United States Patent Application Publication US 2004/0214272 A1 - sequence listing, part 44

SEQ ID NO: 184261 - DNA, 485 bp, Zea mays
  Clone ID: MRT4577_99634C.1
attcggctcgaggcgagagagatagcgcacggttttagatatggcgcatagcatgcgcgaaatcaagcccgggtgggctcataccaaggtagccggcgacgacaagatgctgcgtaccgggttcttctacggcacgccgttggaggggggcaagatcgccgactgccagtccgtcgatctcttagacgctgcccggcttgtgttcaacgcccagaactcatcggagaaggaaggaccacactaggaggggaccaacaagaacgtcgacatcgtggagatggaggccgtcgacatgcccgtaagctcgcggtacgtgacttaggttaaccaaactgggccggatgagcagacaagccgccgacggtaggccatggcctagcccaccgacagtggacggagattgggatttggtctgccagccccggcttaacgatccatatcaagcagtactagaataccgtcactacactacctgctatgatcga

SEQ ID NO: 184262 - DNA, 243 bp, Zea mays
  Clone ID: MRT4577_99635C.1
cgtctggtctatatgcatatgatacagtatgggcaatagcattagcagcagagcaggccggatttgttaattcagactttgtgctgtccgaaacaaacaacgggtccactgatttcgacaaaataagtgcttataaggctgctgaaaaatttcgtggtgcattcttgaaggtccctttcacaggcattagtgggcaatttgtcattcaggatatgcagttccagttagtacaacaacttacaa

SEQ ID NO: 184263 - DNA, 540 bp, Zea mays
  Clone ID: MRT4577_99636C.1
gctgctcgtctgcaggggccgggagtaggaagtcgactctgaccagatcgacttctcgcgccgggccgcgctcgggctcctcaacatgggtcacggtcgtcgacagcacctagtgtgtgctgcccgctgacgtgatacggagaaacacgcaacgtcgaccgaggagaccaacgcgatcaccgagaacatctcgtacagcaaggacagcttcaagctgctggtcccgtccaagtgaaaccccatgatggagtcgcatagttctcgcataggcacggtgctgagcctacgtaggtacagcttaatacgccaagcaacctgctgtcgcattgattcagcgcacggtcaacatgatcattggtggaatacggctgtacaaaagaggttctatgccaggagagtacctgctctgtaggcatgtctactgcgggaataccgagctcctatggctgtaaacaagaccggagccgtggccaccgccaacgttctggagagcacacccgggtgatcgatggaaaggattactactcacgtgtcgcgtgc

SEQ ID NO: 184264 - DNA, 303 bp, Zea mays
  Clone ID: MRT4577_99637C.1
cgtccagcgatactcatagaagtggaggccgcgcgtgcggccgtcgatacgcgtaggtatctgggcccgacgagcatcatcgcattcacggtcgaagacgcgtattcacccacgtatgggagatcgtcagcggagcataatgtagactgccacagaccaagtattgcccgctccgacatccgcagcgtgctagcactaacaaaccaccgcagctccagtggccaacagcctcaccttcgccgggcatgcaaggcaggccgcccgcgcctccgcgccactgctgtccaacaggttcatggcgtc

SEQ ID NO: 184265 - DNA, 336 bp, Zea mays
  Clone ID: MRT4577_99638C.1
tttttttttttttttttttttttttttttttttttttttttttttttttttttttttttttttttttttttttttacttaaaaaaaaaggtttgttttttttgggccaattgttacagggacatagtcaaaaaaatttacccaaaggggggggaaatgcatggggtgtaaagatgccataagattacatgccccaaaaaaaggacaaaaaaaccgacaccaagcatgcctgggggagagccagagccagaccaaacgatgggttcattttttatttttgacacgccacaagcacaaaggaaacagtccgtaaaaaaagggaaagggattcatgccc

SEQ ID NO: 184266 - DNA, 189 bp, Zea mays
  Clone ID: MRT4577_99639C.1
gcgccgccgggtacaccacggccaccgcgccgcctcgtccccgaagatgcaccctgccgtttcgcgccgccgcctcccctgcggcactggaccgccggcgacggacgcataatgtggatggcgacttcttctgcaaccaccgctgcatctactgccacacctgccgatggatggagcccgaggtgctca

SEQ ID NO: 184267 - DNA, 272 bp, Zea mays
  Clone ID: MRT4577_9963C.1
gtaggttacggtctgagacatcaccgcccagctgggcatcggggagatggccgggactgacccctagaccgcgcaggacctcacctcggtggtgcagacactcctgcagcagatgcaaggtaaatttcagaccatgtctgaccagatcattgggagaattgatgatatgagtagtcgcattgatgatctggaaaagaatatcgcggacctcatgacacaggctggggtggaagaactggaaagtgaaaacaagatacctgccacgcaaaaga

SEQ ID NO: 184268 - DNA, 313 bp, Zea mays
  Clone ID: MRT4577_99640C.1
aacgtgagctagtttaatttcacgcatagtgtcaaactagtgtttcgaaacatgcaagtgcagccaattccctaagaagaggtaaaaacaccgtaaaaccagtaaaagctggtacgggttaaagtcaaacgaacatacttgttaccacaaacccaagctatgctggttgcaacagccatagcttaacaacggggtgtgatgaccacatgccacaactgggtttcgatgacattgaaggggcagacattaccaaccttaactttgttcttcgtgcagaattttttccaaccgggcccaataatggaactaccct

SEQ ID NO: 184269 - DNA, 314 bp, Zea mays
  Clone ID: MRT4577_99641C.1
ggaaaaaaacccacggtattgctgcctacttattccaaaacaaaagtttttttttcactgggcaaaaaaaaaataatcccaaggcccgattttaacccctttttttttttttgccaaccaatgttttttaaaaaccggaattttgggtcctttgtttttaaacaaaaattcccccggggttgcaaaatttatttggaacccgcagcaattaaatttacatcctgccccagtttaccctaaggcaaaaattccaagcctcccttcctggtggttctctcaaataaactttgcctttgacgggaaatttttttttt

SEQ ID NO: 184270 - DNA, 465 bp, Zea mays
  Clone ID: MRT4577_99642C.1
aagaaaaaaattattcccacggatgaaaaaaattattccgaaaataaaattctgaaaataaacaatggtcacaaaacgaagcaaggcttggcaaacaatgaagcaaatggtcaacaaaccggaatcacaggaggggcgaaccccccccaccccgaaaccccgaaaattgggtcccaacctattttgaaatacaataatccccatcaccccgggttcttggggaaaaaggcgattaaaccctttccccccgcgagggataccgctctcaacccttctgggaaagcctccctatccctagcatacattttattcagctcttcggcccttcggaacccggcttccaacaaaaaattaagttgccgcatttctattttcttgggatgaaacccccaccttttgaggtcaacctccttcaagaacccaaaattccgggggttcaaccctgaattttcttcactttgcttc

SEQ ID NO: 184271 - DNA, 691 bp, Zea mays
  Clone ID: MRT4577_99643C.1
atgtcgccccctcctcgttcccgtagcttcgccgtgccgcaacgaggagacgaggcctcgcaggggaagctcgccatgatctccgcggagaggagccagtcgcagagcccgcggtcgcccggggcggcggccggggcgccgttcctgtcgatctgcgtcacggatcccgtcaagatgggcaccggcgttcagtcctacatctcctaccgcgtcatcaccaagactaacctacctgaattcgagggagcagagaaaattgttatccggcgctatagtgattttgagtggctgcacgatcggctagctgagaagtacaaaggcatttttatacctcctcttccagagaagaatgctgttgagaaattccggtttagcaaagaattcattgaattgaggcgccaagctctggacctattcatcaacagactagcttcacaccctgaacttaagcaaagcgaagatttgaggacatttttgcaggcagatgaagagaaaatggatagagcaaggtcttttgagactggtatatttaagaagccgggagatttcatacagatgtttaaggatgtacagtcaaaagtcagcgatgttgttttgggaaaagaaaagccagtggaagagtctactcctgaatatgagaagcttaaacattacatatttgagctagaaaatcatctagcagaggcccaga

SEQ ID NO: 184272 - DNA, 205 bp, Zea mays
  Clone ID: MRT4577_99644C.1
aaacatcgagcacagtctgcgagggaatctggtggtacgacgacatgttcggcaccaggagcaagtcttctgcgtcctcgagatcgtcgtacatgggatctgcctacggctcgtggcgtcgtgctatcacgctggcgggcagtatgcttagctcggcgactgtgttctaaaccatcaattagtagtttatggccagggatccggc

SEQ ID NO: 184273 - DNA, 208 bp, Zea mays
  Clone ID: MRT4577_99645C.1
aagatcaaacaaattattaaatctattcttaatagaaagatttacaatatgaatgttattaataaatttaaaataatggaatgacacaaacatcaacgagagcacttggtcaaggacaggacggagggaaagagtacagatacactgttactataggcccacattctgaaaagataaaaaagatacctgtgcaggatacaggaaaaag

SEQ ID NO: 184274 - DNA, 373 bp, Zea mays
  Clone ID: MRT4577_99646C.1
ttccttaagcagtggtaacaacgcagagtacgcgggctagctttcattgctctgggtcttaactcggtgatctctgcttactgcttcttcagcttggtttcatagagctaccgttgtgcattgcatgatgtgaataatactacctgtatgcttcttggagcactgaaccttgattcatgtgaaatttctacatgatttctgtgaaatccctaaactccaaagtgggcctatattgtagcagtacattgagtcaaggttggcctttaaaattttggaagcggaaaaaaaaaaaaaaaaaaaaaaaaaaaaaaaaaaaaaaaaaaaaaaaaaaaaaaaaaaaaaaaaatgttaccactgctttgttccccccgtt

SEQ ID NO: 184275 - DNA, 395 bp, Zea mays
  Clone ID: MRT4577_99647C.1
tcatcggttggacgacaaccaagataatgatggaagtctagataccagcctcccgctacttctgtacgtaccgcggacagcatctgacgacgcaggacctttgcttcggtgtcgtcacgactcacccatgaacactgccgcaggtctcttcctcccgatcccactcctggcgagataggccgctgcctgcaagacggtcagacgcgcgcgcgccacgactctactgaagctcgccacgcttcccgctacaacggctcggagcttgtcgacacggcaagctgtacagcacgggacacccaagaagctacaccgacgactgaaatacagagctgtacaaccatggagcggaaggccaaggctgctacgaaccgcggagcgacacatcaacggcggcg

SEQ ID NO: 184276 - DNA, 574 bp, Zea mays
  Clone ID: MRT4577_99648C.1
aatcccccctcccctcgcttccacaccttccgcctcgtctccctctctctctgtctctctctctctctcacacacacacacgcatcaggtcgggacgggaggggaggtctcgtgcgcgcccggctttcctctcctctcctcgccgcacgacgcgcgcgcggtcccggtcgccgatggccaaggcacgcaggccgccgttcgccgccgccgagcggttcctcggcttcccccgcggcgggccctcgccgggggccgtggcgccggcgcccgccgccctcgacgacctgccggacctcgccgaggccgacgtctggtactcggctgccgacccgggtagcccgtatcccgcggcgtcccgacatgcggcggcggagggcaggagcgcaggccagcgcggcccgcggcgcggcgtgcagggcggactgagccgggcgttcggggacgggtccgggtccgggtccgggcggcaggcggcggcgtcggcgcccgtcgaggtggccgcgtggccggcccgcttctccgtgccggacgcggagccgacgctgctgttcgagatggagatgggggacgacga

SEQ ID NO: 184277 - DNA, 297 bp, Zea mays
  Clone ID: MRT4577_99649C.1
cgctctaagctgattggtgggcggggtccggcggccagtggccgagcgcggagggaaaagccccaggaagaagccctaagagaaaccgccgggcgaaaaccgggggcaccctcctacctggatgatgagaggcacgtgcctaagaaggagggtagctcgggcatacagtcgtggggaagcacggggagctcccacacttcgagcagtaccggcctgagaactgtgcgcgcagctgcaggggaaactctcagtgcggcacgacccaccaagcgcagcccagaccaagcggccagccag

SEQ ID NO: 184278 - DNA, 390 bp, Zea mays
  unsure (1)..(390): unsure at all n locations
  Clone ID: MRT4577_9964C.1
ctgggcaggcaaagatagacccnnnctaaannannnnncnagnaagagcaggcgcaaaggcagccccganaaaaacccangaaggaaaaacacacacccgcgagagaaacccgaaacaggaaaagagaacagcccagcgcaacaaagactttaggaccttctttcagggggacgtggaannaagnnacaggaccagaacccatattatttgtccagaatagcggatcagagtaatcattgttttaatctctgaaggactcttcaaggatcttatgttgtggggagcgctcgattcaggcatgtgctgacacccaatcctttaggaaggaaagcatctacaccattccagagccaagtggacgacgccggttctcaatgggcctacctgca

SEQ ID NO: 184279 - DNA, 1200 bp, Zea mays
  Clone ID: MRT4577_99650C.1
atgtatgagcagtcagaggtcactagtggttcccttgcaaatggagaagacctgccagctgctaatggccatgagttacagttccaccatagaccgttcgcctcgatttgaaagtcctctctccaaaatgagtaaatgtgttaaagctcatattgctattcagcaatcccttttcccgcaggaccttcagtacacaatgccgtggcactagcctcttctccaggctgtatgtgagcaggttgggcctttccacaatgtgccgtggctccattgcagccttgttgacaaggaactcaatcttgcgaagaagaacttcatcagacaatcctaatatatatggcatcttggacactgcagtggaaacctcaggttcagaacaacaaagactcctcttaaggaactcaagcttggcagcaaccttcgctcccgacatacaggcaacgacggccactgcatgcctgaatagcctcgaagtgggaggcaccccaagttgttccgcccgcagcaaaaattctttcacgcgttccgggttgaagttgagcacccgcgggacgtttgaacacagctgggcaatatctcgaacgccccactgacgcagcaaagctatgttaggcttgattaacttctcaaggctcgtacagaggaggcgcctattcctctttagggccaccaggacctgctcaaacgagccgtagaaggagatgaagaactcgagctggggaacgacgccgctgtggcggagagcacctgggccgaccaggaggaagcgagcgatttggggagtagaaagaccgacgcggtctcggagagcaagaagacggggcgcgatgttcttcaccgaagcgcggaggagcagcgggtccgcggatacggcggcgacgatgtcgtcgcgggagagtccggtgccggcgagcagggcgatgatggcgtcggggttggaggctgagaggaggcgggaccgagagatcccctccttgctggattttctgcataactcgcgaaacgccttctttgacacctcgcgtgcttgggctggggcgaggccgcaagcggcgacgaggtagtcctcgagggagaacggcacggcggtagtggaggtggagaggaggcagcacgggcgggggtggttgggggagggtagctgggaggcggcacggagcatagagaggaggccactcggaggcgcagcatggcggcgcc

SEQ ID NO: 184280 - DNA, 517 bp, Zea mays
  Clone ID: MRT4577_99651C.1
agtactgtcaaaatcatgttagcttaataagttccacattcaggagaaaaaaaattgaagttaaagataaacttcagccatgttgtaggcacgaaaaactagcaaacatgcacgtgtgggctgaaattcaaacctggctcataaataaccacaacttaaacttggactatgtatgagcagtcagagatcactagtggttcccttacaaatggagaagacctgccagctgctaatggccatgagttacagttccaccaaagaccgttcgcctgaaccacagaatgagatgctcgaattacgctctagagggcacaataacagcacgagatgcagcataagcatctgcgaggccaggaacagagtccttgtgacagtcaatgaacctcgatttgaaagtcctctctccaaaatgagtaaatgtgttaaagctcatattgctattcagcaatcccttttcccgcaggaccttcagtacacaatgccgtggcactagcctcttctccaggctgtatgtgag

SEQ ID NO: 184281 - DNA, 1649 bp, Zea mays
  Clone ID: MRT4577_99652C.1
aaactcagtgtcgccactctcctctccacacacacacatacacacacgtaacctagcttctacacggatcgggatcccctgcagtactgcatgggccactgccgcgtgggctccgcgtgcgacagggcccacgcgcagtgacccaacggcacggtgcagtacgtcagaggatccgtgtcccttctacaccaccttgcgcaagaatttcagctttcagctgcacttagcatggaaggagacacaggcaaccgatatgggaaacaggtcgccgtggtcacaggaggcaacagggggatcgggctagaaatatgcaggcaactggcttccagtggagtcaccgtagtgttgacagcaagggacgcggagaggggcgcggaggcagccagcacgcttgggcaacccaacgtcgtcttccatcagctggatgtcggcgatccgtcgagcgctgcacgcttagctggttttatcgaggagaagtttggcaggctggatatattggtcaacaatgcagcaattactggaacgacaagtaacgtcgacgatccagaagccgtgtggaaacagctcgcaggcatggatctcatgcagaggatcgaagcaatcaacaagcacaacacagaaccgtacgagcaagcacagaagtgcttgcggacgaactaccacgggaccaaagctgtcacaaaagcgctgctccctcttctgcagtcctcgtcccatggaaggatcgttaacctgtcatcctcctatggactactcaggtttttcagcggagacgaactgaaagaggagctcagcagcatcgatggcctgtccgaacagaggctggacgagctgtcagagctgtttctcaaggacttcaaggatgggcagctggaggctcgagagggtggcccaatgaaggagggttcgtcacgtacaaggcgtccaaggcgctcgcgaacgcctattcccggatccttgcgaaggagcacccgtcgctgtgcgtcaactgtgtgcatcctggctacgtccagacggacatgaacttccggtctgggcatctgacggtcgaggagggcgcgcggggagctctcatgctggccatggcgcccaagggaggcgtcactggcgcgttcttggaccacactgaggtcgcgtccttcgtgtaatatatatgctcgcaccttgcaaccataaatataactcagatttgccttctcgaaaaaaaaaaaaaaaaaactcgccaacgcccattcccggttccatgcgatggggctcccgtcgctgcgctccacctgtgtgcctcccggctatgtccagacggacacccgggagctctcatgctggccatggagcccaagggaggcgtcactggcgcgtttttcgaccacaccgtggttgcgtccttcgtgtaatatgctcgcccttgcactcgcaccgttagctatcgcagtaataaaattccacagaaccaaaggaggatacactattaggtcctgaatcagatctgttctatcccctcccctgggaaaatatcctctcgctgtcgctgggtagatggccgtccaatttcattttggttgccgatgagtgttctcattcgcagcgaattagtctatcttgtatgattcatctgttatgaatataaaagaaataagaatcctcgtatc

SEQ ID NO: 184282 - DNA, 383 bp, Zea mays
  Clone ID: MRT4577_99653C.1
tttatattacatacaacccatcccttacactacacagcgaactatcacgggacatgttctttctaacatagaaaatccaccacacccttaaaaaagcatccaacgtcatgtactccaatccatctgcatacatcaataccccacgcacacccaccctttttatttatgacatcataacaccaagccacgcaagtcacccacacacatacatatatgtatgtaaatatctatatatatctcaccgatagacttggaacgcaacacgagctccacattcattcacgatcttttattcggttaaccctcctttgacgaatagcctactcaattctctatcatctctctgccatccttttgtcattgtcatcattccgatgttcatc

SEQ ID NO: 184283 - DNA, 296 bp, Zea mays
  Clone ID: MRT4577_99654C.1
cacacgcgtccggcgccatggcgacggcgctacgctggggagtagcatagtgctggtgatgatcgccgctagctccatcatcagctgctcctgcaccatcctcctggagctcccgagcgggtgaacatcacgagtaggggcatccatcgtcgcatgcgcatgatcttccttcgaagtcatcgccgccagcgccggcgcttttcactcggatgccggagcctaggtcggcacggatacggaagcgggcgtgggcaccaactgcatggtctgctgaacgacgttactcgtgaccgtgg

SEQ ID NO: 184284 - DNA, 499 bp, Zea mays
  Clone ID: MRT4577_99655C.1
ttctgaaagaggagctcagcagcatcgacggcctgtccaaacagaggctggacgagctgtcagagctgtttctcaaggacttcaaggatgggcagctggaggctcaagggtggccgaatgaaggagggttcgccgcgtacaaggcgtccaaggcgctcgcgaacgcctattcccggatccttgcgaaggagcacccgtcgctgcgcatcaactgtgtgcatcccggctatgtccagacggacatgaacttcgggtctgggcatctgacggtcgaggagggcgcgcgggccgggagctctcatgctggccatggagcccaagggaggcgtcactggcgcgtttttcgaccacaccgtggttgcgtccttcgtgtaatatgctccccttgcactcgcaccgttagctatcgcagtaataaaattccacagaaccaaaggaggatacactattaggtcctgaatcagatctgtctatcccctcccctgagaaaatatcctct

SEQ ID NO: 184285 - DNA, 525 bp, Zea mays
  Clone ID: MRT4577_99656C.1
ggggggggggactttttttttgttctttgaggcggaccaaacaaatgtcacatctttccattctttcaacacccttggtgagagacccccctcttcctgccttcacaggtcacgccccttgattgggggggggggttttttttttcaaacctacaccaggggggccctacacagggcatgccaaatgggcgaaagggctgctttctgcacgaacagccctatgaaagcgcatcaaacaacatcgcccatgaccgacatacgacagttaggagcggttgccttcagagggggcctactgagactgtgcttcattattgtcagtgacctactaggcggccacctttttgggcgacttggtggtggaggacttcttgggcgaccgcttagatttggcttccttggcagcaccgacagggggttttttggggagcaacacagggttgatgttgggcataacccctcaccgtgcgatggtgacaccggccagtaagttcccccacctcttttttgttccaggatgccaaa

SEQ ID NO: 184286 - DNA, 527 bp, Zea mays
  unsure (1)..(527): unsure at all n locations
  Clone ID: MRT4577_99657C.1
accaggttctcaagcgaagacgaaccgaaagaggagcccagcagcacgaacggcctgcccgaacagaggctggacgaccagtcaaagctgtttcccaaggacttcaaggaggggcagcnggaggctcgagagggcggcccaacgaaggagggttcgtcacgtacaaggcgtccaaggcgctcgcgaacgccaattcccggatccttgcgaaggagcacccgtcgctgtgcgtcaactgtgtgcatcctggctacgtccagacggacatgaacttccggtctgggcatctgacggtcgaggagggcgcgcggggagctctcatgctggccatggcgcccaagggaggcgtcactggcgcgttcttggaccacactgaggtcgcgtccttcgtgtaataaatatgctcgcaccttgcaaccataaatataactcagatttgccttctctattatttctgtatttttagaaaccaacacccatatattgtaccatgtaatttgtatgcgattgaagtgttctacctttgt

SEQ ID NO: 184287 - DNA, 1197 bp, Zea mays
  Clone ID: MRT4577_99658C.1
ctctcgtctgcagtctccacccacacacacgcgtaaccttctacaccaccttgcgcaaggatcagctctcagctccaattgacatggaaggagacacaggctgccgatctgagaaagaggtcgctgtggtcacaggaggcaacaggggaattgggctagagatatgcaggcaactggcttccagtggagtcaccgtagtgttgacagcaagggacgcggagaggggcgcggaggcagccagcacgcttgggctacccaacgtcgtcttccatcagctggatgtcggcgatccgtcgagcgctgcacgcttagctggttttatcgaggagaagtttggcaagctggatatattggtcaacaatgcagcaattactggaacgacaagtaacgtcgtcgatccagaagcttttcgtcaagagctcgcgggcttggatgtcatgcagatgatcgaagcaatcaacaagcacaacacagaaccgtacgagcaagcacagaagtgcttgcggacgaactaccacgggatcaaggctgtcacaaaagcgctgctccctcttctgcaatcctcgtcccatggacggattgttaacctgtcatcctcctatggattactcaggtttttcagcggagacgaactgaaagaggagctcagcagcatcgacggcctgtccaaacagaggctggacgagctgtcagagctgtttctcaaggacttcaaggatgggcagctggaggctcgagggtggccgaatgaaggagggttcatcgcgtacaaggcgtccaaggcgctcgcgaacgcctattcccggatccttgcgaaggagcacccgtcgctgtgcatcaactgtgtgcatcctggctacgtccagacggacatgaacttccggtctgggcatcttacggtcgaggagggcacgcggggagctctcatgctggccatggcgcccaagggaggcgtcactggcgcgttttttgaccacaccgaggccgcgtccttcgtgtaatatgctcgcactcgtaccgttagctatcgcagtaataaaattccacacaaccaatacctttggctttttagaaaccaacgcccatatattgtaccatgtaatttggatgcgattgaagtgttctacccttggatccttcgtttttcagtgttttaaatcgccggctaataaggcatttaaaacttccccagttggg

SEQ ID NO: 184288 - DNA, 245 bp, Zea mays
  Clone ID: MRT4577_99659C.1
tttcaaccaactacctacacttaactcttagactgattttcaacaacaactagtcccacccatccacctataaccttcctacccccatcatactatcccactcaacctactctcatttctccaactcctctactcattcacatctacaactactactaccactaatacacctcccttttctaatccctacttaccttataaccacaacctcaataataacatccctaccactacactaaccctaa

SEQ ID NO: 184289 - DNA, 803 bp, Zea mays
  Clone ID: MRT4577_9965C.1
gccgcgggaggcgccgcacatggacacggtgctgtcgcacgcggagtccgggctggtgcacccggacgagctggacgaggagttcgacacgttcccgacgagcaagcccggggacgtggtgcggatgcgctacgaccggctgcgcagcgtggccgggcgcgtgcagacggtggtgggcgacctggccacgcagggggagagagcgcaggcgctgctgagctggagggacccgagggcgacggccatcttcatcatgctgtcgctggtggtggccgtggtgctgtacgtgacgcccttccaggtggtggccgtggtgctggggctgtacctgctgcgccatccgcgcttccggagcaagcagccgtcggtgccattcaacttctacaagaggcttccggccaagtccgacatgctgctctagctgcgctgctctgctctgcctgctggaattggaacaccaagcacgttccttagtttcttttaatttgctcccaattaattaaattatatattaccacgcacgaatctcagataaataaatgtaaatccctaccagtactactcctacataggaggagttgagttggatcagcagatacctagctacttttttgtgtgtcagaagagaagagtagagtggtacagtactactactctgaataatatgaggaacagaattttcattcagaagcttccttctcttgctgtctctgattaagcctgtgtataatcctcttcttgttattataaaaaaaaaaaaaaaaaaaaaaaaaaaaaaagtactctgcgttgttaccactgct

SEQ ID NO: 184290 - DNA, 524 bp, Zea mays
  unsure (1)..(524): unsure at all n locations
  Clone ID: MRT4577_99660C.1
ggcccaaggcattttattatgactaaaaaacggcaaatcccttgggacgggggggggatataaaataaacactgcaatttgaacccccaggggcccaaacacaaacacagggaccccaaggggaggccaaaaaggaaaacacccatggccctgcctgcagggggcactttattggggaaggatgggcggaaggaaatccaacttgttcccaaaaacccgggcccgggtgtcgggaaaattttccatcccgggcaatttggaaaccctgccgtcggcagtaacccccatcgggtagctaaagagggggcccgggaggtcctgctccagggcgtcgctcaagtacaggccccaatacttttggggaacctcgttaaccttttgaaaacactttacccttttgggcccctggaaaaacttttccaaaattcccaggggctcgtaccaaaaaaacatccggaagccatggatttggccccgggcaggctgcctaatncccaaatggtacgggtggtacccccccatgg

SEQ ID NO: 184291 - DNA, 547 bp, Zea mays
  unsure (1)..(547): unsure at all n locations
  Clone ID: MRT4577_99661C.1
cacaaggaattgcttttgagccatggaacccaatttgcacatgggtatcttgacaaactattgaagggagggtcattgaatttgatgcacaataactaattcttttctttttttttgggggggggggaanctttcctcatctcacaatattactccaaanatacattaatttaaaattcttatttttnatcactttaatactaattccaattttaangactcaatnattattatattttcccattaccnanaaantntcaattaaatatattnctcactacannatattnattataaacttntcataccttttaaattcatttntcaaatctcaacatataaccaactaaatgtgcaaattcaaaaaacttaacaaactattttcaataaatttctatctaaattatataataatttaattaccaacattaaatttactaagaatgacttaatattatttaatataatattccttattttatttaataccaatttttcaccattaaaatgttatcaaccattttttaaacttgaacaaataattaat

SEQ ID NO: 184292 - DNA, 275 bp, Zea mays
  Clone ID: MRT4577_99662C.1
tgaaaagcaggttgataaatcattttatgtcaagggcagctttgctcatatttcccatgatttcatgtactgcattatttgagaagctgctcaacttgcaaaatcagttttcctctcaataaaattatagctctaatgtttgcatataagggaagtagttatcatgttagtaatacctctaatagtataaaccccaccccaaaattagccagtaatcctgtaggaaggtactgtatgtccaatgttaaatcatataaatagaatgtaaatgtctc

SEQ ID NO: 184293 - DNA, 235 bp, Zea mays
  unsure (1)..(235): unsure at all n locations
  Clone ID: MRT4577_99663C.1
cccacgcgtccgaccacgcgttcgcgtggaggtgtttatnattttatgctacctcatggggaaacaaaattaagggggccgccttctttatactatcctagaatccatatcctcccatgcctaactgtacatctggaatatactcatcaagacaaatgccactaatccttcctctacaatgttatgacttgtaaaaacatgatgtaactcaacataattggattgtagaacattc

SEQ ID NO: 184294 - DNA, 189 bp, Zea mays
  Clone ID: MRT4577_99664C.1
ggggggggagttccttccaaccttacattaaaaacaaaaaaaagttggggggcaacggtgaggacaattaatttatggcaaacccagatgacagccaaaggcccttagttccccctactttggaaaatccaggaccattagtggttgccccgacggggcacaaaatttgtttggggagctttggggccc

SEQ ID NO: 184295 - DNA, 433 bp, Zea mays
  Clone ID: MRT4577_99665C.1
ggcgccctcctccctggcgctcgctccctgcagggagcagtttcccgggggcgacggcccagccatggcgcctttcttagtcgggcagagcctcggttctccctgcagaaggtccaggagtgatggaaaggcagggtactgaggaagcaggtcggcaccagggaggcgaggaagtgggagccgatgagcgtcggaggaaagaggggggggggggacagggcgcgaaatcgtggcgctgcgcgagatccgaaagtaccagaagagcacggagctgctgatccgtaagctgcccttccaggcgcctggtgacacgagatcgcgcaggacttgaagacagacctgcgattgcagagccacagcggtgctggggctcaaggagggccgccgagggctatctttgtacggtctctttgaggacaccaacctgtggagc

SEQ ID NO: 184296 - DNA, 141 bp, Zea mays
  unsure (1)..(141): unsure at all n locations
  Clone ID: MRT4577_99666C.1
gtttccgccgcccgtgtcgtgtagtgtgtattcgcagcagctagngnccggtcggccagnngagtgagtccatcctccatcgncatccaagggccgnnaccgccctgagcatgaccatcctccgcgcgccgccgccccgct

SEQ ID NO: 184297 - DNA, 385 bp, Zea mays
  Clone ID: MRT4577_99667C.1
agacaaccctgaatgggaccaaaaattgggggggggactttcaaccaaaacacaacatgggcattcaccaacagcttaatgaaattggtctcgaacgcaacacatgctctaatgcccatacaaattataaatggacgcatggcactgccaataactcaattgaataacactttctcccaaaccattaaaaaggggacacacttaaattaacctcggcagttcgttactcaaacagacatcaggcgcaagtaccaggggaggcttactacggtggggacaacttaaaccgttttaacaaataacgtacatgaagatcaccgtagaccatgattgaggcacactataaccattgggttacagatcttcacagacgcgagccataacg

SEQ ID NO: 184298 - DNA, 601 bp, Zea mays
  Clone ID: MRT4577_99668C.1
cacgcctgcgtgtaccgggcccctaatacacggtcgacctatgcgttcgttgcaacatagaacgcacattattgtccaacgccggcagcataaaacaaaagccttcttatgctactaggacttattgcaaatgctaatgaggcaaccacaatgccaggtggtcacaagcaagcatatgtgtccttcaaagcacgtacctttaatgaacggagttgttggaatgggaaaacggagccattcaaccgtacaggatgcaacaagaactggcacatctgatgttaccttaataacgcttgagggctccaacaatcataactgcctataacgagcagttacctttggtgcttttataggcacaaaacatcaaggctcaacaactacaacatcgagagatatgctagcgggctgcctactataactggctgaatggtatttcatgcaaccgactatctgaatcgaactctgctgtcttaagtgcagcagacatacaactacacattcagccagttatagtgctgactaccgccagctagcacatgcattcaaccaactggcaccctggaactctgctgcttatatacagcagcagcaactgctacca

SEQ ID NO: 184299 - DNA, 312 bp, Zea mays
  Clone ID: MRT4577_99669C.1
atctgttaaccagcacaaacaggatcaacataggggatgttagtagggaacacaggcgggattgatggccccatcgtgaagcccttaccaaatgcgatcataacaaaaggcacctgcatggatttgatcgctgcttggcgcgggaacatgaaatacatctggtagtaaggacccaactgccgctgctgatggaaggccggacaaaacttgagggagcgcttcgtcaagccttagcgaacggaaccggatactaaaactaccctgcctacctggggccccgcaggttggcaaacgaaagcaactatctgaaca

SEQ ID NO: 184300 - DNA, 212 bp, Zea mays
  Clone ID: MRT4577_9966C.1
ttttaccattcctaacttttaatatccaaaaaactaaaatcttgggcatattaactatcaaatgacccaatttacacccctcaatttacttgtacatctttgtactgttttcccaatttattaactaacatcattatactgtacatcactactttggttcatcaagattcttccttacttgttcatgttcttctgtttgttttatttaaaat

SEQ ID NO: 184301 - DNA, 309 bp, Zea mays
  Clone ID: MRT4577_99670C.1
aacaagagcgggggaaggccattcgggcccggcaccgggtgaattaccggcttggcccaaattaaatggtttaaaggccccgtgcaatcaaagcccaagtgccgccctaaaatcagaatgcgttcccctacacaatctaccgaggatgacctttgggaatggttaatgccggacctggaccaaataattactgctcgtaactcacctagtaggcctgtgctcacggacggaccctcttttcccaaacctgtgcaaccccaaaggattcccgttgcctcatgcgagggacagcattctcccaaggggggg

SEQ ID NO: 184302 - DNA, 269 bp, Zea mays
  Clone ID: MRT4577_99671C.1
cccacgcgtccgggggtggggcgctagagaatggtgcacgtgcgactgtgcgctacgtaatgcgtgtaccgtattggtacaagtagagcaaaacagtgtttgtgttgtacaaatggtgagtcgttccatgtaccagagaccggattagaggcccaaaacaggtataactagtctaccataacccctagccggacgactaatcatgagtagtcgacgactaggatgactaatcgtttgctagtcgctctagtcgagtcgaagacctaatt

SEQ ID NO: 184303 - DNA, 304 bp, Zea mays
  unsure (1)..(304): unsure at all n locations
  Clone ID: MRT4577_99672C.1
cccggctcgagccacgcgggcgcggacgcgtgggcggacgcgtgggctacgacacacattcccttgctgacggtatcgggaaagaaagggaagagcacaaggaaacaggagatggaatgccactcctgcnnngtcagcctcggatctgaatatctcccgagagttgggttaaatcaagcaaaaaccaaatggcacacgagaccatgtggcaaaagctgatgacattcgaatctcggggcggctcctatttcagcagattctggtgcacatggtgcggttttgtgcacgctctcgtcacggcaaa

SEQ ID NO: 184304 - DNA, 583 bp, Zea mays
  Clone ID: MRT4577_99673C.1
cgcacccgcacccgccgcgcccaggcccggctccccgcctgcgcgtcgctcttcctcgcatcaccctcgggctcctgctccacgacgtgaccatggccgggctgcaggagctgcgattccccgaggagaagccgctgctccggggtcaggacgccgccgagctggagaactccgacaccttcctcttggctatggacacagactggaaggaacatgacatcgagacaccgtacggcctgctgcatgtggtgatccggggctcccccaaagggaaccgcccagccatcctcacctaccatgacgtgggccttaaccacaagctgtgcttcaataccttcttcaacttcgaggacatgcaggagatcaccaagcactttgtggtgtgccacgtggatgcccctggtcagcaggtgggggcgtcacagtttccccaggggtaccagttcccctccatggagcagctggccgccatgctccccagtgtggtgcagcactttgggttcaagtacgtgattggcatcggagtgggagctggggcctatgtgctggccaagtttgcgctcatctttcccgacctggtgga

SEQ ID NO: 184305 - DNA, 150 bp, Zea mays
  Clone ID: MRT4577_99674C.1
tcaacttcttgcgtctctacgcagaggcatgctcttcgtgtcctgccttcgagcgcttacgctcatacctgtcatattgctggtcgtgtccgcacaggctgctactagcctgaaggctctgccagatcgtcgacgaccaccacaacgaca

SEQ ID NO: 184306 - DNA, 525 bp, Zea mays
  Clone ID: MRT4577_99675C.1
atggtgaaaaccgctggatggttagaggatctacatcttcttgtgttcttctgtaaaatactgagacttgggcagcataaaaagcttggcaaatttctgttgtgtggcatctccatgtaagtaacagtggactgcatgcagaagcgagcgttccagttttgcgacagaagggggcgtccgaagttgttgtactgctaatgaacgtcgaactagcatgataaaatgtatcccagcacatttggttgattgtgtcacactagaaagccatgtgacagcgtttggctatgatgctgtaccacctgaatttacatagctccttttgttttagcgatgtcattgtcatgcatcatgagtgacgtctacaaacatttgtaagaaaatcgtggtaaaagattgtcagtattagcatagtcctttcatcacaatcatattacgttcggaaactctaccatttgcgttgttaaaccacacacatttttagaaggtaaaacacgtaagtttaatgtaacaaagttgaattcatat

SEQ ID NO: 184307 - DNA, 304 bp, Zea mays
  Clone ID: MRT4577_99676C.1
ccttccaaaaaaaggaaaacagcccactttattaaaaagattataatcccccaaaaatggagggatccacaccgcccctaaaatggcaacaggatgccaaaaacccccaaaggataatgaaccctttcaaagaaccttatggcccgacccttccattccattgggaatttttcaaatctgagggcagaggctttggacccaaatccctccaaaaactttgaacaaaactttttctatgcaaagcccagttagttgggggggaccaatcttgggggattccccatttttcaaaagccttttaaag

SEQ ID NO: 184308 - DNA, 172 bp, Zea mays
  unsure (1)..(172): unsure at all n locations
  Clone ID: MRT4577_99677C.1
gtcgttctttttttttnttttttttttttatgggtctttgttgatggctgcaaaagcattacatatgaagcaaacccggaaacaaacctcttggggaataagcggacccattacaaccccgtacacaaaccacttattaggacagcgacagtacaggacacatgataagcat

SEQ ID NO: 184309 - DNA, 483 bp, Zea mays
  Clone ID: MRT4577_99678C.1
ccggccggggaacacttccccataatttcttcgagctattactatgaacacacggcacaggttccatgcccgcctcgctcgacaatagtgtctatctcaccgcaacaactacacattacatagctctgatgacacgctgatcaattgaaagatacaaagtcgggagaaccaaaacaatccagacgaccttgggacgacgacgcgtgttgtctgcagcaccgccaccgctgtcatgggtcctgtcgggcttggcgacccatcctgcgcgccgaggacccaatacctggtcttctgagtgaaacgtgacgtacgcccaccatttgcccgctgtgaccgccacagaagtcctcctacatctccagtgaatatcctgtgcccagtatcaactgctcctacgacaacaacatcctgcgactatgtcattcaaccaatctacaccatccgcaaacttatctctcagcagacgacatgcagtgattacaa

SEQ ID NO: 184310 - DNA, 458 bp, Zea mays
  unsure (1)..(458): unsure at all n locations
  Clone ID: MRT4577_99679C.1
gtattacatgtcgctgccgactcactcgtgtgctagcttgcatcacggttccttcttccttatcctgcttaaggtgcacggatcatggccacgcgcagggaccgcctaggcaacaccncacgggcctcgatgaaggacaacaaacccctacagccagcacacaaaaagatgcaggtagaaccacaaggccggcgagcatgccgacaagatcccgaactaaactgcgctgcctactagggtcgcacaagtacatgcgcggttggctcgagcccgcacgctcatccttacatctgtaccgatgactaggattgccacagctctagaactggataagcacatgcaaaacatgaacgttctgattaccaccccatgccacccatgtgatgacactgcaaataggaaaagatggctaagaaacttgagcttctgatcacgggatgaatatgatgctaacatat

SEQ ID NO: 184311 - DNA, 585 bp, Zea mays
  Clone ID: MRT4577_9967C.1
gcgaactcccccctcttccctctcccgccgcgcccccaaaatccgatcggcggccaccccgccggcggcgcccaatcctagcggccaggggttgattcgagcctgccccgcgaggaatccgagggattcgaggcggatttcctccggggtaggaaggatgatgatggggttcatgatggggaagaggaaggagctggagcaggtggtcgacggcctctgcgacttctccctctccggccccgccgccaagtgccgccggctggaccctggtctcccacctattttggaagaagaaccaccgtgtccttccatcccatatcaacatcagacgctaggagaggaaatcagcagtggtgctaacatgcccattgtggaagatatgatagaagttgccatgccatctcatctgtctagcgaggacaagacacttgttatatacaagccagtaaacaagcctaccctctttggtctcagtatcgcaaacccttcaatcatagtcagttcagacttgatacgtggattaaagaatcaacctttcaatcaggggaactgtcatgggctggaggacaattctcctgagcgcag

SEQ ID NO: 184312 - DNA, 331 bp, Zea mays
  Clone ID: MRT4577_99680C.1
atattttttttttttttttttcacattttttgggtgggtttattgaaaatgctgggggttaacaaaactccaccacaaatagaatggcgccagccaaaaactttttggattgcttgataatggacacacaaatgctaacctaaaactataatcgctataaccatgttgaggagattcacggcgaacaccttgtcttaagaggtaaccctttcattaaggaccatgggaccacaaggacctccgggcctctacccaaacgcttggctccccccgcgaatacggaaacggtcccattaggccttccaatttttcttataatgagtcccattag

SEQ ID NO: 184313 - DNA, 565 bp, Zea mays
  Clone ID: MRT4577_99681C.1
cctcgaggccggccgggacggactttgcctcggagcctcagatacaccgccttccggagacggagtcgacccctgactgatgaccgagcctgtctgtggtctacggatcataagagcagagatattcgggagcgagcagatgcggtgagaacaggatgagcaccaccacggcgtctacgctgaaccccaacgcgccgatcttcatcccggaggcgtaccgggaggcggaggacttctcttcctagtggtgggagctcgacaacaccaccgcctggttcagggaccactgcttccgacagcgccagctccacgaggtcgtctgagacgacctggccgagctcctcctcgactgcctcgtctacaacaacgacctcttctgcgcgtcccaagatgaccacctcaaatccggggcggagatactgccctgccacgatatcaccgacaagctcgcaggtgtgacaatcaacacccccacgctgatccgacatccttgatacgataagtctgctgatggcgcctgatgcgtcaccacctccaccacggctgctgtgcctagcgtgacccc

SEQ ID NO: 184314 - DNA, 510 bp, Zea mays
  Clone ID: MRT4577_99682C.1
cggccgcgtgggttcgtgcatcctcaagaaaacaaagctcggtgaagacgaagctagtagcgtggtgttcaccaagtgcacggcaaaaagctcaaacatcctgcgccactcaagttcgattcgtcaaaattattcagtcgaggagaggatcttcagcaattgattatagaagaaaagaaggctcctgaatggcgtcaaccagaaaccgtcgtcgtgcttgcgactatcgcgtcgaattagtaagggtacgttaattaatcgcgtgatgcggaagacgagtcaagtcgaccccaagcacgggctaatccgcaggatgatgctgatgaatgaaccagaagatggataatctgaacgagtgccaagccaaaggatactcgccaagtcgtcacctaacaaacactaacctagtgttattcagactgtaaccttgctgacggagagtacgtcctcgtgccggagcaaggagctgctcaggaggtagccccggatccagccccaaagtctgcatca

SEQ ID NO: 184315 - DNA, 338 bp, Zea mays
  unsure (1)..(338): unsure at all n locations
  Clone ID: MRT4577_99683C.1
aaanaaaccgcatgcgctggggcatccatctgatgcatacatacaggtggcatgcaaatgaaatggacacatgcacgcattaaacactgttaccattggggaacgccaccgggcagagagatctcacctcatactgtacaacaacacacaaggacgcatgcctatcaacacccgcctgacggattctacttagagaccgacaccacggcgccggaccatggcgacgagcacgaccccaccggagacgatgctgctgatgaagctcttgagcgaccgtgagatccccggggcgggctgcgggacctccgtaagcaccagcgccgacggcacggtagggc

SEQ ID NO: 184316 - DNA, 918 bp, Zea mays
  unsure (1)..(918): unsure at all n locations
  Clone ID: MRT4577_99684C.1
ctgtggnttcccaaatgagccctacgactcacaggatcaactccaactttcccaatatagcactacaataaagatgtcgaataaattatacgatactacaatatatgtattcttcttgttagccttataaccttgatgtgcgacaaaaacgttgacgtgagcgagttccaagctgcggggagaacaaaccgtgcacgggcgtccttctcatgaccgtctccaacggtttatctatataattatcctaaatattgttttacacagagtatagtttagagtttaaatatgagaacaaatatagccttaggcgccacaaatgtattgctctcgtagttgtacaagaatatttgcatatatggatacattttttttgactaagtacatgtacatttcttgggaaactggctcgatgattcatgcacacggatactagctaccatgcattggctccatcgacgcttatgatacaggcaaatattattctccgtggacggtattattttagacattttagtagactaacaaacatgtccatacgtcgaaacagaacttgtagcggcttttattgtgttgccattaaggtgattgcggttcaaagatttattcaacgtacgatcgactcatctgttcgaatacaatacatctcgaggccaagcttgtatattgtgccttaaaatacgtcgtctattttattttcgagcataggtcatgagatcgttaggatcgcatgtactccatctgttcttttttatctatcatattttagttcaaaaatagactagtcaacaacaaatattcgaaaacggagattgtagaacaataaggtgtgcgatagctcttatcgaacagtacacatgcaagtttaaatcatatgcaagtttaagggtgtacgttatatctagatacatgtatcagtta

SEQ ID NO: 184317 - DNA, 662 bp, Zea mays
  Clone ID: MRT4577_99685C.1
ctgtgcggcgctcgaggcggcgttttcaaaagagaataacatgctcttttctcctctgttgacgacatcgacccttcttttcgcaccacaaggtcccaggatgtcttcgcgctgcgaatgaagctgttgctgcgggtcaagttgctacgtgcggccagaagtacccgtgcacctggaggatacgagcaccgccgcccgggtcaccgtcgtcctcggcgcggcccggataataggccgcgcccaagttcatctaggcctcgaggccagtccggtgagggcgcccaccgctgcacctgtcgcgttaactgccagcgccacccctgcaactgctgatcacatcgatcgacaaccatggatatgattattatctatctaccttgtgtcgcaggatgaacaatactaagcgacgccgaactgcttgtcatacatactcattgtgtggtgtgtgtgagagatatactgacagacgtcttcaggttgctatctctctctgcatgtctgcggccactctttgtgctcatgatcgtacgagagtctacctggatgtagctggatcctactgcttctgatgccaccatatattacttgctccactgtgatatgatttgctgctatatatataaaaaaaaaggcccctaaggcccctaggcgctctaccgctc

SEQ ID NO: 184318 - DNA, 420 bp, Zea mays
  Clone ID: MRT4577_99686C.1
cttacgcgtgggccagaaggcactgtatagtgaccaaatatctttaggaatgcgattccggatgatgtttgagaccgaggaattagggatgagaaggtacatgggtacaataactgggataactgatctagatcctgtaagatggaaaaactcccagtggcgcaacttacaggttggttgggatgaatctgccgcaggggaaaggagaaacagagtttcaatgtgggagattgaaccaattgctgctcctttcttcatatgcccccagcctttctttggcgtaaagcgccctaggcaaatagatgacgagtcatcagagatggaaaaccttttcaagagggcaatgccttggcttggtgaggagatatgcataaaggacgctcagacccataacaccacaatgcctggtttgagcttggt

SEQ ID NO: 184319 - DNA, 122 bp, Zea mays
  unsure (1)..(122): unsure at all n locations
  Clone ID: MRT4577_99687C.1
aagccatctttgcattgttncttatccgcctacttgctcgccgcagaccgcctccagccgtgcggtaaccttcggacggccgcgggactcccggcaggcattaatcgcccacagctccctga

SEQ ID NO: 184320 - DNA, 380 bp, Zea mays
  Clone ID: MRT4577_99688C.1
ggaatcccgggtagagcaggcattctaccgaaggacacatgaaacaccactcatcctaacacagaaccagaactaccatggttcacacttgacgtggcccaatatgacgcctttttacggcagcaccgaaagatgacagagacccaacatgctatgatcaacactaccaacattaagcagcatcgcaacgatgacgacgacgtttactcagagagcttatgctagatactgtaggaagaaactcactatacgagcacgcacgacatgcataaccatcaacgagagaagaactatagcacaagcacacagtatcatgagggcatccacgtgaggagcgacactgactcaaagtcttcgccacacttatgctaccactacga

SEQ ID NO: 184321 - DNA, 1213 bp, Zea mays
  unsure (1)..(1213): unsure at all n locations
  Clone ID: MRT4577_99689C.1
gctccccgcactccacgctatctgtggcggcaacagtaccccctccaagcgttcaccggtgcacgctccctcctcctcaaccgcgcgtgtagcttctctctcacactacatggagagtgagtgccgggagacgctaccattggcaggcgccgctctccctctctccactcccgcgcgtgaagactccagaggtgccgagttgctcggtgcgactccttcgtcgccgtccacggaagcggaggccggcgaccaacctccccgcgcggcgaagggtacaggcggccggatccgttgggcctcacgcgaggagagccacgcgaacggattcgacgaccgaggagtccggatcgaagctcccactggccgacttcatcgccgccgccgccgttcaaccctgtccgccggcgattcaacgaggctccttccccggctgggtgtccgccgatccagaactcgagctcccgtccatcgatctgcttcttccgatctgcacatctaccgaatggctgagaacaatgataacatgcagtttccccctcatggtcctccacacacatcagctcctcaaggaatgcccccctatgtggaatccacagtactggcagcctaatccctacgactttcctagtggatctaatatccaatttagcagcagccaccttacaattcccagtttatcacaacaacaaaatgaagtaggaggttttgcaaataggggcccatggaatcatttcgttggtatgatgaatcctagttatccttgcccacctcccccgcttgctgctggccaaatgcaaccacctagccattttgtcacactgcctaacaactcttcgaaccctatggacccaatatttttggagtccgaggcagagcacagcgcacaggaggttaacagccccagcaaagaaggtggtacacctggtaaagggaagaaaatgaaagaacaaaactttacgccagtccaagaggatttgttgctatgcacaacttggctagaaattagttgtgatccagtaattagcactggccagaggaaggaaggactttgggcaagaattgataaacagtataacgaaatgagaggtgagtatcctaagagagttatcagggctttaacaagtcgatgggacaagaattaaggctgattgtgggaagtatgcttcgttgaaacagtgtggnanccattnaagtnttatnataatnanttaaa

SEQ ID NO: 184322 - DNA, 220 bp, Zea mays
  Clone ID: MRT4577_9968C.1
gggggggaacaagagcggaaataccatgaaagtggaatgaatcacacaataaaaagatttcttcgccctttaggcaactaaataagcttacctaccgaggaaaaaaattcgaaagggggaaataagactttacatatcggtagataagctattttatttttagggccttaaccaatttaggtcccaaatttttgtttctcttccggaaagtcaggggcat

SEQ ID NO: 184323 - DNA, 351 bp, Zea mays
  Clone ID: MRT4577_99690C.1
ccttttggttttgttttttttttttttggtttttttttttttttttttttttttttttttttttttttataggggggctaaaacaagccgtcttgggcaaaacaaacaagtcgccggggaacaataaggggtcactcgacccccctaacatttttccccccatgtcccggtttttcacccttaacactgggtgaatgcgcttacttgttccttgtccaacccaatggggtcaacccttggcaagcgttcaaattcaaacccgatgggggggggggaacttgcagcaactgcccaatgttcattatcccacttgctgcaaatggccccggacaacttcttgcgggaagacca

SEQ ID NO: 184324 - DNA, 1329 bp, Zea mays
  Clone ID: MRT4577_99691C.1
gagcgttcaccggtgcacgctccctcctcctcaccgcgcgtgtagcttctctctcacactacatggagagtgagtgccgggagacgctaccattggcaggcgccgctctccctctctccactcccgcgcgtgaagactccagaggtgccgagttgctcggtgcgactccttcgtcgccgtccacggaagcggaggccggcgaccaacctccccgcgcggcgaagggtacaggcggccggatccgttgggcctcacgcgaggagagccacgcgaacggattcgacgaccgaggagtccggatcgaagctcccactggccgacttcatcgccgccgccgccgttcaaccctgtccgccggcgattcaacgaggctccttccccggctgggtgtccgccgatccagaactcgagctcccgtccatcgatctgcttcttccgatctgcacatctaccgtgtaattccgtatgttcaatcaaactggtttaactctatgtgataagacttcaatggctaccacactgtttacaaccgaaaataagagagggttccccttcatgcattgttggactaaactcaagaacgaacccaaatggcaagctattgttcaaggcacttcactacgaggggcagcagggatgtcaccggttggcagtgccacaccaactgcaagtgtaaacgatttggatagcgattctctaggtttaactgggaaaaggccattaggccgagactccacaaaggcatcaaggaagaaggccatgtccacgtcgtcccagtccatgaagtatttgaccagaattcatgacctgcaaatggcccggttgaaacaaagtgaagacaaagtggagaagaaagaagcacattatgaggttttcaaggatctcgaatataagaagctgcaagttcaacaagaacaaattgaagtggagaaaacaaaactgaagtttcaagaacgcaaagagaagaacgatgagttgaaggaagcaatggctgtggatttggaggacatagccgaagatttgaggcctgctttcatagcaaagaggaaagcacttgtggactggtttgtcaacaatccaaactgagttgttcgtttagtgaaaattgtggaccacggttttcactagttgagtttctgttttagtaatgcgtgctgtaataatcacattttttgaagtgtgactttggactgcgttagtgtcttcatttcagttgaagaactcaagattatgttatgtttgtaaacttattctcgtcacttatggttatgaattgtcagtttgaacttgtccactaaaaaaaaaaaagaaaaaaaaaaaaaaaaaagc

SEQ ID NO: 184325 - DNA, 154 bp, Zea mays
  Clone ID: MRT4577_99692C.1
gagattcatttttaggttttttcctataaaagaaactctcgatgataatcctgtaaagggcagactcaattgcatcaacacttggctggaggcctgcatacttgtttatcaaatagaaggtagcgcctcgaatgtcattttttgatgcaaccct

SEQ ID NO: 184326 - DNA, 792 bp, Zea mays
  Clone ID: MRT4577_99693C.1
ccggacgttctctatctcctttatctccctggcgcgcagcttccttgtcggcaatttcctggcagctgtgctcctctccctcgccgtgcagctcccgtgcgagctcctctgctggccgctgctgctcggcttccagctcgccatgtctatctccctgctaccgctcgcccatagcgccctcgccttccaacagccagcgatgccagccctctccctgctcgcatccgtacagaaccgcgcagctcctgtgttgagctctgcagcagtgcttcctccaacagcagatgcgtcaccaggccctcgacgtcgtgctgtgcgctgggactatccgtagctcgcctgcgtgcccagccgtctcgaatcacgtcgtcgattctcggcaccgcgagctcaccttcccttacgcacatctctacagaccctacctcatcacccgtctgcgtcatcgatttcgtcgtcgtgcgtcatcaagaaatcccaaaaattgaatgaagacgaagctagcagtgtgaaattcacaaagtactcgacgaaaagcctgtattagaaagcatcgtggttcttgcgaagttcccgtctgattttactaatgaaaaatatcagtgtgtcttggagaagaagaaagtgacgtttcgatgcgtcactcgccaagtgttcgatcgaagacttaaatcgaagcttgtcatcgttcttgcaaatattgagccgatgttgattatggtgagcaaattctgtacgttattactttggtttaataaatggattgatagatatgtaggtttcgatgattct

SEQ ID NO: 184327 - DNA, 2139 bp, Zea mays
  Clone ID: MRT4577_99694C.1
cgttccggtgggcaggcgcagcttgccgagatccgagcagagctcgtgaaggccaaagagcagttgctggacaacgagaaggagaagtgcagagttcttgctgagctggagcgtgccaagaaggtggctgatgaggccaatgccaagctgcaagatgctcttgatgtgcaaaggagggctattgaagcgcaggaggcagacaaactccctgctggagagtcggagcaggcaaccatccacgaccagcaggaggctgatgacactgtgctgcggtcgacagtggagcagcttgagaaggctaggtacgagctggccaacgcaatcgatgccaggaatgaagcactcagccaggtagatgatgctgttagggcttctgaggcgaagcagctcattttccaaggtggatggcgaagaagactgcagagaggatacagaatcttgaagaagagaactttgcattaaagcttgagcttcagaaaaaaaaggctgctgaagaaaaggcagttcgattggagcacatgattgatgaacttcagagtgatgttgatgatgctaggaattttggttccaagtcaaagcagttagctgatgaatggcagaagaaggcacagcttctcgaggtcagattggaagaggctgatcagtctaatattttgaagggcgagtctttgaattcagcaatggaagaattggattcaacaagtagtttgcttcgtgacagagaatctgaagttgctgctcttcgtgacaaagtcaggttcttggaggatgagctgacaaagctcaagaatgatattgttgtgtccggccaacgggcagatgcagcagagaaagaggcggcggatctatggacagaggttgaagggcttaggctgaagctccatacagtggaagaagagaaaatggaggccctgaacagtgataagaatactagctcagaaattgagaccttgaatgaacagaagaaccagctggctgacgagcttgaggctagcaaagatgagcttgagaaaattaagaaggcaatggagggtctggcctcagccttacaggaaatgtcagctgaatccagagaggcgcaagagaagtaccttctcaaacaagatgagattgagcgtgctcaggcacaggtagaggagcttaacttgagtctgaagaatactaaggagaactatgagctaatgcttgatgaggcaaactatgagaaggtttgccttacgaaagcagttgaaagactggaagcagaagctaagagtgcgcatgatgaatggcagtccaaagagctaagttttgtcaactctattaagaattcagaagaagagatagtcgctgtcagagttcagatggacaggaccttggaggttgttaaggagaaagaaaatgaaaacactgagttgcaggagaagctgcagcagcttgaatctcagctaatggaagcgaacagaatcagagaggaaggcaacgctgaaactatccgatggaaggagaacatattagaccaagagaatgaattacagaacataaaacaggagaacgacgacctgcaggcaaaggaattagcagcttctgagaaggttaaggcactctctttccagcttgctaatgtaaaagatagcacgataaatagtaacaccaaggaaggagataatgagaaggggggtactgaagaggatgatgaacctgttgtggtagttgccaaaatgtgggagaacggcaagtttgctgactatgattcatctaaggagaaggataatgatggtgactcacaggttgatttggaatcaaacaagggggatgcaggtcttgacagcaatgggttgcactcaactaaggagagcagtggcagggcatcaactaaacagccgcaacagcataagaagaagcctttgctgaagagattcggtggtttgctgaaaaagaaaagcgaaaattagcataaaaccatctgatgatattctttgttctatcttttgacatatttctttgattagctatctagttcctgagtcttccccccatattatggtaaactgagtgatggatgcttcaaagaatacaaaatgtcgactgtatttacataaaaaacactgccatgtcttattttttttggtatgtttggcgataatttgtttgccagcc

SEQ ID NO: 184328 - DNA, 714 bp, Zea mays
  Clone ID: MRT4577_99695C.1
tatgattcagctaggagaagaatgatgcgactcacaggttatttggaatcaaacaagggggggattcaggtcttgccagcaatgggttgcactcaactaaggagaccagtggcagggcatcaccaactaaacagcaccagcagtataagaagaagcctttgctgaagagattcggtggtctgctaaaaaagaaaagcgaaaattagcataaaaccggctgatgatattctttgttctatcatttgacatttctttgattagatatctagttcccgagtcttcccccatattatggtaaactaagtgatggatgcttcaaagaatacaaaatgtcgactttatttacataattgcctctcttgagttagggagtgttcgcagttcagttcagctgtctggtgtgagctgtctgctgtggaaaaactgttatgagctaaactaaaagaaagtcgtgtagtcaactaatcggtgcagaggcatggcatcaactaaacagccgcaacatcataagaagaagcctttgctgaagagattcggtggtttgctgaagaagaaaagcgaaaattagcataaaaccttctgatgatattctttgttctatcttttgacatatttctttgattagctatctagttcctgagtcttcccccgatattatggtaaactgagtgatggatgcttcaaagaatccacaatgtcgactgtattctcctc

SEQ ID NO: 184329 - DNA, 230 bp, Zea mays
  Clone ID: MRT4577_99696C.1
caacgtgccgcgacctggcgccgattgctaaccgctctagctgcatcgtctcatcgccaatcatcttcagcggctcttcgtagacatctaatgaaagcatcttccgctactccgctctccgcctcccccgtcgtcttcgcaatccgatccgtcgaccggttgccatggatcctgctccgcagacgcagtcgatcctctcttacgtgctctcccgcttctccaacctctcc

SEQ ID NO: 184330 - DNA, 583 bp, Zea mays
  Clone ID: MRT4577_99697C.1
cgggctctttcggcccccatcgatccattgttcccggccatggtcctcaccggtaggcagtggagtggtctcaagcaattaggagctcgacgatggcgcctccaaggccgcggcctccatggctggggccaccatgccgacggcaccaacaccgggggctaccgtggtggtggatctatggatggcggctcccatgacagcgcaaccaagggcaccgggggctcctgcagcggtggatccaaggctgcagcctccatggctggggccacccacgacgtcgcaaacaagactacgacctcccatgatatcgccaccaagcatgggggctctgcgccgcggcatccacaggcggggccatcctcgccggcgcctccatagataaccccattatgttgaggaggcctactgctattgaacatctagttgcctgtacagatatgatttagtctatgatcactactaactaattagtgttagactatgaccagtagtcaataatcagttacagatatattttagtgaccatttctagtctatgagcagtaataacaaatcaaatgacttgaattatttcgttgtactg

SEQ ID NO: 184331 - DNA, 776 bp, Zea mays
  Clone ID: MRT4577_99698C.1
tggcaaaagatggcacgataaatagtaacaccaaggaaggagataatgagaaggggggcactgaagaggatgatgaacctgttgtagtagttgccaaaatgtgggagaacagcaagtttgctgactatgattcagctaaggaggaggacaatgatggcgactcacaggttgatttggaatcaaacaagggggatgcaggtcttgccagcaatgggttgcactcaactaaggagaccagtggcagggcatccccaactaaacagccccagcagtataagaagaagcctttgctgaagagattcggtggtctgctaaaaaagaaaagcgaaaattagcataaaaccggctgatgatattctttgttctatcatttgacatatttctttgattagatatctagttcccgagtcttcccccatattatggtaaactaagtgatggatgcttcaaagaatacaaaatgtcgactttatttacataatggcctcgcttgggttagggagtgttcgcagttcagttcagctgtctggtgtgggctgtctgttgtgagctgtctgccgtgagctaaaaaactaaaagaaagtcgtttggttcgtgcttcgagagctgtcggaaaactgttgtgagctgtctgctgcaaaaaaactaaaagaaagtcgtttggttcaagcttcgagcttggatgaaacattagattttttttatgatttatctgtattgcttctgagattgtttgtatgcaaatgaccgtaatacaacgatttttgtgttgactg

SEQ ID NO: 184332 - DNA, 752 bp, Zea mays
  Clone ID: MRT4577_99699C.1
tttcgtttttgttgtttggtgtacctttctcaaacaaagattggattgcagcaaaaaatccaagatccaaaacattcagatcaggtgaattaggaggctggcatgttagcctaatgtcccaaccatcttctttggcggctgtcacaaacgatggatcatctacaccaatgtgagtccttgcattgtcttgttggatgaagattggcatccctctttcttcagctggccacttcgccttcaaagctggtagaactgtgttcaccagaaagtttcgactcacatcctttgttaccgacgtcatgggttttgttacaaggacacctgcaaatgcaaagacaatgttatgtaaagcatatgaaaatgttgcagataaaattacattgtcttacctctctccctattttgactctttctttttgctggttctaccttgacaaaagggaaaatccctattttaccatcaaatgtgcaattttcatttgcttcatatctaggccttgtaaccacagctagaaacattaccttttctatgaaattattacttttaacacaacgctggggtctttcttcatcattggtcagataatatttttggttctttcgtgtcctatagaaccatttttcatcaatgtacacaacattgtacaatggcttgaaaatagtgaaccattaatcatggacaaacagtattttacccgagctattttgttctcatcagtcaagctaaacttaaggtcattagtgtgacgacg

SEQ ID NO: 184333 - DNA, 348 bp, Zea mays
  Clone ID: MRT4577_9969C.1
ttttctatccttggttacactgggattttttttttttttttttttttaatgagaaacccaaaaaccacccgaaccctgttcctcacataaaacccaatccactttttttccggaaagatttttttaaccttttaccaaaaaaacccattggttaggatttacaaaactttaccagggaacaaatcaaaaggctccaaacaatttttttttctaggacaactttcctattcttaactttcaaaacccccatatacctatttaccgggagggtggttttttccctgcgaaaccctaaagggcaaacaaatttggccctccggggccaacatacttaaaaaactccttcaa

SEQ ID NO: 184334 - DNA, 1988 bp, Zea mays
  Clone ID: MRT4577_996C.1
aatggttggaaaggagcaagctcgagctaaagtaacacaaaacattgtctttgtaactggcgaagcttctccttatgcaaagtctgggggtctaggagatgtttgtggttcattgccagttgctcttgctgctcgtggtcaccgtgtgatggttgtaatgcccagatatttaaatggtacctccgataagaattatgcaaatgcattttacacagaaaaacacattcggattccatgctttggcggtgaacatgaagttaccttcttccatgagtatagagattcagttgactgggtgtttgttgatcatccctcatatcacagacctggaaatttatatggagataagtttggtgcttttggtgataatcagttcagatacacactcctttgctatgctgcatgtgaggctcctttggtccttgaattgggaggatatatttatggacagaattgcatgtttgttgtcaatgattggcatgccagtctagtgccagtccttcttgctgcaaaatatagaccatatggtgtttataaagactcccgcagcattcttgtaatacataatttagcacatcagggtgtagagcctgcaagcacatatcctgaccttgggttgccacctgaatggtatggagctctggagtgggtattccctgaatgggcgaggaggcatgcccttgacaagggtgaggcagttaattttttgaaaggtgcagttgtgacagcagatcgaatcgtgactgtcagtaagggttattcatgggaggtcacaactgctgaaggtggacagggcctcaatgagctcttaagctccagaaagagtgtattaaacggaattgtaaatggaattgacattaatgattggaaccctgccacagacaaatgtatcccctgtcattattctgttgatgacctctctggaaaggccaaatgtaaaggtgcattgcagaaggagctgggtttacctataaggcctgatgttcctctgattggctttattggaagattggattatcagaaaggcattgatctcattcaacttatcataccagatctcatgcgggaagatgttcaatttgtcatgcttggatctggtgacccagagcttgaagattggatgagatctacagagtcgatcttcaaggataaatttcgtggatgggttggatttagtgttccagtttcccaccgaataactgccggctgcgatatattgttaatgccatccagattcgaaccttgtggtctcaatcagctatatgctatgcagtatggcacagttcctgttgtccatgcaactgggggccttagagataccgtggagaacttcaaccctttcggtgagaatggagagcagggtacagggtgggcattcgcacccctaaccacagaaaacatgttgtggacattgcgaactgcaatatctacatacagggaacacaagtcctcctgggaagggctaatgaagcgaggcatgtcaaaagacttcacgtgggaccatgccgctgaacaatacgaacaaatcttccagtgggccttcatcgatcgaccctatgtcatgtaaaaaaaaaggaccaaagtggtggttccttgaagatcatcagttcatcatcctatagtaagctgaatgatgaaagaaaacccctgtacattacatggaaggcagaccggctattggctccattgctccaatgtctgctttggctgccttgcctcgatggaccggatgcagtgaggaatccagccgaacgacagttttgaaggataggaaggggagctggaagcagtcacgcaggcagcctcgccgtgattcatatggaacaagctggagtcagtttctgctgtgccactcactgtttaccttaagattattacctgtgttgttgtcctttgctcgttagggctgataacataatgactcattagaaaatcatgcctcgtttttattaactgaagtggacacttctacgcattcttgcccgttt

SEQ ID NO: 184335 - DNA, 396 bp, Zea mays
  unsure (1)..(396): unsure at all n locations
  Clone ID: MRT4577_99700C.1
gtatcccnnncgaggccggccggggaaaaaaaaaataaaaaaaaaaaaaaaaaaaagaaaaaaaaaaaaaaaaaaaaaaaaaaaaaaaaaaaaaaaaaaaaaaaaaccccttttgggggagtttgaagcatcgacggttacaagccttggcttacttatataaaaacataagaagtatttgctattgccaagggggccttgcttgaggcaagtggggtttccgaatcattataattatgcccgcccatcgaacgggaagggtttgaaggggttattgccaacttaaaaaaagccccctctgtttgcctataagcactgaggtttgccccgccatgcacatgttgagccgggttttatttgtattattgcaaaaaaaaaaaaaaaaaccccggggcc

SEQ ID NO: 184336 - DNA, 176 bp, Zea mays
  Clone ID: MRT4577_99701C.1
agtcaaatccgacagctcatccgctctatcggtacgattcgaataactcgtgcgaccgtgcggtctaaaccatggataacgttggtcaacaatcgcgggcaactgtcaccattgtgaagcatcacttcctcaatatgaggccaggcgtagcagaactcgacgagagccatctggac

SEQ ID NO: 184337 - DNA, 571 bp, Zea mays
  Clone ID: MRT4577_99702C.1
gtaggccccttttttttttttttttttggagcatgcaataaattacatgatgattgtggagattaagctattacaagattgatgttgtgacgctagcagctaacgtagcagctaggcagcagcctcacttcacaactacaaatcacacaggagcatggggtccttgagcagactggcctcactcatttcacctcgaggatctcgtccaaggcatagttgttggtagacacgccggcgtagttcaccttgttgaaccgcaccaccaccgggtaacgggtgttaggatcctgatcgacggtgacgacgttgccgatcccgttgtaccagtaggactcccgcctcaggatcttcaccttggcgcccctcttgggcccgatcggcggcggcttctcggccttgggcttggtggccacggccgctgccgctactggcagtgggcacgcccgcggccagcatgaaccgcgaggtggccgacgccatgttggtgctcgccatgggcgtgaactccttgccgcgcgcgggtgctgacttggttggactggcgcggatggggagagagagtcccggccgg

SEQ ID NO: 184338 - DNA, 549 bp, Zea mays
  Clone ID: MRT4577_99703C.1
tcggggtacttactcactctccccccacccgcgccaggccagacagactaactgagcacccgctgcaaggagtccgcgcccatggcgagcaccaacatggcgtcggccacctcgcggttcatgctggccgcgggcgtgcccaccggcaccagcggcggccgcgtcaacttcgccaaggtgaagatccttaggagggagtcctactggtacaacgggatcggcaacgtcgtcaccgtcgatcaggatcccaacacccgctacccggtggttgtgcggttcaacaaggtgaactacgccggcgtgtccaccaacaactacgccttggacgaggtcttagaggtgaaatgagtggggccggccggctcaagggctccgcgctagctaccgtgtgattgatttgtagtagttgtgaaatgaggctgtgaagctgcatgctgtgctggctagcgtcacaacatcgatcctatgtgtaatagcataatccacataatcatatcatgtaattgcttgctttattcaccgtgtactcaataatctctcttgctctct

SEQ ID NO: 184339 - DNA, 510 bp, Zea mays
  Clone ID: MRT4577_99704C.1
gccggccggtccggggtacttactcactctccccccacccgcgccaggccagacagactaactgaggcggcggaaggggagggtgccgtggccaccaagcccaaggccgagaagccgccgccgatcgggcccaagaggggcgccaaggtgaagatccttaggagggagtcctactggtacaacgggatcggcaacgtcgtcaccgtcgatcaggatcccaacacccgctacccggtggttgtgcggttcaacaaggtgaactacgccggcgtgtccaccaacaactacgccttggacgaggtcttagaggtgaaatgagtggggccggccggctcaagggctccgcgctagctaccgtgtgattgatttgtagtagttgtgaaatgaggctgtgaagctgcatgctgtactggctagcgtcacaacatcgatcctatgtgtaatagcataatccacataatcatatcatgtaattgcttgcttcaaaaaaaaaaaaaaaaaaggccccta

SEQ ID NO: 184340 - DNA, 900 bp, Zea mays
  Clone ID: MRT4577_99705C.1
ccttggacgagatcctcgaggtgaaatgagtgaggccagtctggtcaaggcgtagttgttggtagacacgccggcgtagttcaccttgttgaaccgcaccaccaccgggtaacgggtgttaggatcctgatcgacggtgacgacgttgccgatcccgttgtaccagtaggactcccgcctcaggatcttcaccttggcgcccctcttgggcccgatcggcgccagtttctcgaagtcggcaccggcgcgcggcaagccctccccgcccatggcgagcaccaacatggcgtgggccacctcgcggttcatgctggccgcgggcgtgcccactgccagtagcggcagcggccgtgtcagcttcgcctcggcgcccaaccggcttggcaggaggcttgtggtccgggccgatgaggagtccccggcagagccggcgcccacggcggaaggggagggcgccgtggccaccaagcccaaggccgagaagccgccgccgatcgggcccaagaggggcgccaaggtgaagatcctgaggcgggagtcctactggtacaacgggatcggcaacgtcgtcaccgtcgatcaggatcctaacacccgttacccggtggtggtgcggttcaacaaggtgaactacgccggcgtgtctaccaacaactatgccttggacgagatcctcgaggtgaaatgagtgaggccagtctgctcaaggaccccatgctcctgtgtgatttgtagttgtgaagtgaggctgctgcctagctgctacgttagctgctagcgtcacaacatcaatcttgtaatggcttaatctccacaatcatcatgtaatttattgcatgcttcattcaccgtggactcaataatctctcttgctcgaaaaaaaaaaaaaaaaaagcggcc

SEQ ID NO: 184341 - DNA, 358 bp, Zea mays
  Clone ID: MRT4577_99706C.1
tggttctgctcctaaggcgtgatcgtttccgctgcaccctgcacccatccttaccgccctgggggaggctcctgatctcggggtcgaatgtcagtgtgcagtccgtcgatgataaatctgttctaatccctggcgggccctggaatctcaaccatagtccatataaccgttccggtcaaatcgtccggtcggtatcacccccagctactcgactactcactgcgcgctccgggccaacccggtatgcggaaagtgaccggcctagtgagcccacttcccaagagtaactaagtctaaacgaccagtcctcttctaagactcaaaactacgctcccattcccctcccctcctctacaat

SEQ ID NO: 184342 - DNA, 792 bp, Zea mays
  Clone ID: MRT4577_99707C.1
gccggccggcctcggtattgcacccttggctcctactcactctctctccccatccgcgccagtccaaccaagtcagcacccgcgcgcggcaaggagttcacgcccatggcgagcaccaacatggcgtcggccacctcgcggttcatgctggccgcgggcgtgcccaccgccagtagcggcagcggccgcgtcagcttcgcctcggcgcccaaccggcttggcaggaggcttgtggtccgggccgatgaggagtccccggcagagccggcgccgacggcggaaggggagggcgccgtggccaccaagcccaaggccgagaagccgccgccgatcgggcccaagagaggcgccaaggtgaagatcctgaggcgggagtcctactggtacaacgggatcggcaacgtcgtcaccgtcgatcaggatcctaacacccgttacccggtggtggtgcggttcaacaaggtgaactacgccggcgtgtctaccaacaactacgccttggacgagatcctcgaggtgaaatgaggccagtctgctcaaggaccccatgctcctgtgtgatttgtagttgtgaagtgaggctgctgcctagctgctacgttagctgctagcgtcacaacatcaatcttgtaatagcttaatctccacaatcatcatgtaatttattgcatgcttcattcaccgtggactcaataatctctcttgctctaaaatcgatgtattcgtttttcttgtgattttgtacatgcacataaatttctctctgggaaaaaaaaaaaaaaaaaggcccta

SEQ ID NO: 184343 - DNA, 397 bp, Zea mays
  unsure (1)..(397): unsure at all n locations
  Clone ID: MRT4577_99708C.1
ccacccntccncaacaatnnnattattacttttttataatgnananattttcttcagctgggccccaattattcttgatgganaacatttatcatcactnnnaaanattcttccttnttnatatanntnaacannctnctataccantaaacataattaaacatttcaattcaaccaaatatcttatttctnnannaatttctnntccancatctcntacttcaacttctcctcttnatctcctcaaanttatcattcaattacaaacaacacttacttcaatcattcattcaattaaaaatatctnnactaaanntntcattctannattttttaaaatnaattnatttaattttntaaaaatttctccaaaaaattcaataaaattttattccta

SEQ ID NO: 184344 - DNA, 814 bp, Zea mays
  Clone ID: MRT4577_99709C.1
acaaaagctgactttttttgccgctttttttcaatttttgtttccagagagaaatttatgtgcatgtacaaagtcggaagaacaattttttttttttttttggagcaagagagattattgagtccacggtgaatgaagcatgcaataaattacatgatgattgtggagattaagccattacaagattgatgttgtgacgctagcagctaacgtagcagctaggcagcagcctcacttcacaactacaaatcacacaggagcatggggtccttgagcagactggcctcactcatttcacctcgaggatctcgtccaaggcatagttgttggtagacacgccggcgtagttcaccttgttgaaccgcaccaccaccgggtaacgggtgttaggatcctgatcgacggtgacgacgttgccgatcccgttgtaccagtaggactcccgcctcaggatcttcaccttggcgcccctcttgggcccgatcggcggcggcttctcggccttgggcttggtggccacggcgccctccccttccgccgtgggcgccggctctgccggggactcctcatcggcccggaccacaagcctcctgccaagccggttgggcgccgaggcgaagctgacacggccgctgccgctactggcagtgggcacgcccgcggccagcatgaaccgcgaggtggccgacgccatgttggtgctcgccatgggcgtgaactccttgccgcgcgcgggtgctgacttggttggactggcgcggatggggagagagagtcccggccggcctcgaggaacccaatcgccctatggagt

SEQ ID NO: 184345 - DNA, 326 bp, Zea mays
  unsure (1)..(326): unsure at all n locations
  Clone ID: MRT4577_9970C.1
gctgcttgagacccatcttgtgtccgtcttccctgcccccgatccaggtcttctatgtaagatgaagggtgattacatacagatacctcgctgagttcaagactggagctgagagagggggcgctgctgagaacacgatggtggcatacaaggctgcccaggacattgctctggctgagcttgctccaactcaccctattangcttgnactgggattagacaaggcactnttctactatnanaccctcaactcacctaaccgcgggggcagtcttncaaancannnctggggcccggcccccccccgcccggcccccccccccccc

SEQ ID NO: 184346 - DNA, 3418 bp, Zea mays
  Clone ID: MRT4577_99710C.1
actcactctctctcaccatccgcgccagttcaaccaagtcagcacccgcgcgcggcaaggagttcacgcccatggcgagcaccaacatggcgtccgccaactcgcggtttttgctttttttacagagagaaatttatgtgcatgtacaaaatcacaagaaaaacgaatacatcgattttagagcaagagagattattgagtccacggtgaatgaagcatgcaataaattacatgatgattgtggagattaagctattacaagattgatgttgtgacgctagcagctaacgtagcagctaggcagcagcctcacttcacaactacaaatcacacaggagcatggggtccttgagcagactggcctcactcatttcacctcgaggatctcgtccaaggcgtagttgttggtagacacgccggcgtagttcaccttgttgaaccgcaccaccaccgggtaacgggtgttaggatcctgatcgacggtgacgacgttgccgatcccgttgtaccagtaggactcccgcctcaggatcttcaccttggcgcctctcttgggcccgatcggcggcggcttctcggccttgggcttggtggccacggcgccctccccttccgccgtcgtatttttggctgttcagtacacctcatctttccggacttcaagcctcttggatcctctatgttgcgcgcccttttttttgtttcttgcatgagtgtgttgttagcacaaacaatgtttccagagagaaatttatgtgcatgtacaaaatcacaagaaaaacgaatacatcgattttagagcaagagagattattgagtccacggtgaatgaagcatgcaataaattacatgatgattgtggagattaagctattacaagattgatgttgtgacgctagcagctaacgtagcagctaggcagcagcctcacttcacaactacaaatcacacaggagcatggggtccttgaccagactggcctcactcatttcacctcgaggatctcgtccaaggcgtagttgttggtagacacgccgtagtataacgcgttgttgacttaccatagcaatggttcaaggattctagggttacgacacagtagtgccacttttctgataacgtcgtcgctgtagagattcttcatcagaatgtcataccagcactctctattgggcagaatcggtggcgcattgttgaccctgaaggagggtagctcgtagaccttacctttcggcgtcggcaccggtctaatcggggactcttcgtagccgaggttggcaagtttcaaagcaagcaatttgtggatatgatgatggtatattcagtgataacacggatggattaagggattgaccgtggcccagcccgcatgcagctgtcacatcctcatttcacaactactacaaatcaatcacacggtagctgcggcggagcccttgtgccggccggccccactcatttcaccgagaagacctccggcccggcggacgggttcctcgacgccggccggctcgggcgtacttactcactctccccccacccgcgccaggccagacagactaactgagcacccgctgcaaggagtccgcgcccatggcgagcaccaacatggcgtcggccacctcgcggttcatgctggccgcgggcgtgcccaccggcagcagcggcggccgcgtcaacttcgcctcggcgcccaaccggcttggcaggaggctcgtggcccgggccgacaacgaggccgccgcagctgaggcggcggaaggggagggtgccgtggccaccaagcccaaggccgagaagccgccgccgatcgggcccaagaggggcgccaaggtgaagatccttaggagggagtcctactggtacaacgggatcggcaacgtcgtcaccgtcgatcaggatcccaacacccgctacccggtggttgtgcggttcaacaaggtgaactacgccggcgtgtccaccaacaactacgccttggacgaggtcttagaggtgaaatgagtggggccggccggctcaagggctccgcgctagctaccgtgtgattgatttgtagtagttgtgaaatgaggctgtgaagctgcatgctgtgctggctagcgtcacaacatcgatcctatgtgtaatagcataatccacataatcatatcatgtaattgcttgctttattgaccgtgtactcaataatctctcttgctctccaggatgactctctccttaggcgggtcatcgtgtgttggcatgctgtatatattaatattgctaacgacgattctctaactatggtattgccatgttccacattaacaaaataaattctttttagagagcaagagagattattgagtacacggtgaataaagcaagcaattacatgatatgattatgtggattatgctattacacataggatcgatgttgtgacgctagccagcacagcatgcagcttcacagcctcatttcacaactactacaaatcaatcacacggtagctagcgcggagcccttgagccggccggccccactcatttcacctctaagacctcgtccaaggcgtagttgttggtggacacgccggcgtagttcaccttgttgaaccgcacaaccaccgggtagcgggtgttgggatcctgatcgacggtgacgacgttgccgatcccgttgtaccagtaggactccctcctaaggatcttcaccttggcgcccctcttgggcccgatcggcggcggcttctcggccttgggcttggtggccacggcaccctccccttccgccgcctcagctgcggcggcctcgttgtcggcccgggccacgagcctcctgccaagccggttgggcgccgaggcgaagttgacgcggccgccgctgctgccggtgggcacgcccgcggccagcatgaaccgcgaggtggccgacgccatgttggtgctcgccatgggcgcggactccttgcagcgggtgctcagttagtctgtctggcctggcgcgggtggggggagagtaggatcctgatcgacggtgacgacgttgccgatcccgttgtaccagtaggactcccgcctcaggatcttcaccttggcgcctctcttgggcccgatcggcggcggcttctcggccttgggcttggtggccacggcgccctccccttccgccgtcggcgccggctctgccggggactcctcatcggcccggaccacaagcctcctgccaagccggttgggcgccgaggcgaagctgacgcggccgctgccgctactggcggtgggcacgcccgcggccagcatgaaccgcgaggtggccgacgccatgttggtgctcgccatgggcgtgaactccttgccgcgcgcgggtgctgacttggttggactggcgcggatggggagagagagtccgtaggagccaagggtgcccgcga

SEQ ID NO: 184347 - DNA, 183 bp, Zea mays
  Clone ID: MRT4577_99711C.1
gaaatacttgataaaatcataatgtcacacaacttaatagccttaaacaaaatgcgtaaatcctcaggtgcctaaatagtgaaataactcacattaatcgcccttcgctaaaatgtccgcattctaaatggcaaatgtaccctccctgctgcattaaataaaccgccaacgcgcgtggtagag

SEQ ID NO: 184348 - DNA, 266 bp, Zea mays
  unsure (1)..(266): unsure at all n locations
  Clone ID: MRT4577_99712C.1
ggccgggacatcattcccgcacgcacgcaccagnccagcagtagaagcgcccctcggccctcgctcccacaacaagctcaagccagccttctctctctctctgctccaatggcgcgcttccagctcgcagccgtggccatggccatgctcttcgccgcggcggcggcgcaggccccgaccgtcaccccgacgccggctcccaacgcgtcccccccgccggcgacaccgccgccgacccccgccccgatccctccgcccctgccccc

SEQ ID NO: 184349 - DNA, 449 bp, Zea mays
  Clone ID: MRT4577_99713C.1
ccccgcgtccgccccgcgtccgggtccacgaacctgctaccgccgcattgctgctctcaagcgcatgggagctggtaccgtgacaccggtgcgcagaaatcaaaaccgccggttgcgaacatggggtgcgacgacaagagcgggtgcgccatcccgtgccccagccgcacaacatcaaggtgcacatcaatagagcagtgggcagggtccgcacaccacttgcgtaatgggaaagcactggctatgcacctctgtactgtttgctactcatccgaaaccgaacctgctaccacaacagaaggctaactgctcctgcggtacaatgcatcaaataatcagcctgcgcatacacctactccttgcacataggccttttgctaccgtgctgcctacccattgaagcagtgtaacctggctcactacgaagcaactattgctactaataataa

SEQ ID NO: 184350 - DNA, 291 bp, Zea mays
  Clone ID: MRT4577_99714C.1
gaccaatcaactgatcttgctcctcgtaggaggaagcaaaaaaaaaaaaaaaagaaaaaaggaaaaaaaaaaaaaaaaaaaaaaaaaaaaaaaaaaaaaaaaaaaaaaaaaaaaaaaagaaaataaaacaaaataacaattctataatgacacttaaataaaataaaatagtccgaaaatttacaacattaaaaactaaaaaaacctcggagtaaataaacttaatcgactttaaaaacattaccattacgcaagttaacatattagcaaaaaataccttatcaaccagaa

SEQ ID NO: 184351 - DNA, 593 bp, Zea mays
  Clone ID: MRT4577_99715C.1
ggtaccctcgggttcggccggggagaccatttgcttcctacctgatcttcacggagctcctctacatggcgacgccccgctctgcgagcccccgcgccgaaccgcccctcgattccgcgccggtggtgggccggtgcctgacggtcggtcgcggagccagtccgccggagtgacggcagcgcctcgcgccagaacccgtcagctgccgagggtggcgcatgcgtgctgctcgcgcgcgcggcgggcggcgagccatgcgggagcccatgaagctgaagcgggaggcagcctcacagtacctgtaggaacgggaggcggactgggcctactcccgccccgtcgtgcagatcgacctgctctggatcctgaacgtgatcaccggggatgagcacgtgctcgagctcatcgagacgaggactatcccatgccgctccgaacagtgcccacgaatacgccctggaccagggactacactatggagcatgaacgacggcattaccaaagggctgatgactggcatggccaagcacgtggcacaacgctgctgaccagtaagaggcagcaaccactgacaactctactgctaccgatga

SEQ ID NO: 184352 - DNA, 554 bp, Zea mays
  Clone ID: MRT4577_99716C.1
ccggccgggctcgacagctacccgagacgatgctagccgatcacaaggaaagcgacacgattaccgctccagggtacaaaaactacaccaccgatagctccagtgcccacaatagcctgacccatgccactgcagccccaactggccagaacgaacgactgtccccgtgctcgtatatctctatcatcggagcaacttgcgtcgttctataactagcatgcgccttgccatactcgatgaagctcaaggacacatcatatataaacactacttgccatggaacagacccccttgacgtcgctgatatggagatgaagaaaactgtctccgcggacaacaaattcatttatggttcagatgtatcttgtaccacatcgggtgtccctccatgaccattgttggataccacatacagagggatgcatgcgcatactggcgacaactgtgcatacatccttgcacgagatagaacgttatcctgacacagatccactcatgatctccaccataggataatcggaaaataccggcggtgcctatggcgtgagctaact

SEQ ID NO: 184353 - DNA, 179 bp, Zea mays
  Clone ID: MRT4577_99717C.1
gcatgtagtagagattattacagggcattttgctcacgggatacagacagaccgcaccgaacgcaacggaagaattcgtcgttagaatggtatggtagaactcctcggccgattatgttcacactaacacccttcttgttaatagatatgacgacgaaagaagggttaacacccgacgg

SEQ ID NO: 184354 - DNA, 1324 bp, Zea mays
  Clone ID: MRT4577_99718C.1
gtggtgctgttcaacttcggcgactccaactccgacaccggaggcgtggcggcggccggcgggatacggatcatgccgccggagggccgcacctacttccaccaccccacgggccggctctccgacggccgcgtcatcatcgacttcatctgtgagagtctgggcacgcgtgaactgaacccatacctcaggggaattggttcggactacagcaacggcgtcaacttcgccatggcaggctcgacggtgacccacggcgtctctccctactccttgaacgtccaggtcgaccagttcgtctacttcaggcacagatcccttgagatgttcgaacgaggactggaaggcccggtgagcaaggaggggtttgagagcgctctgtacatgatggacatcggccacaacgacatggttggtgtggcgcacacaccgtccgatcagtgggacaagaagatcacagagatcgtcggcgaggtcagacaagccatctcgatcctgtacgacaacggagcgaggaagttctggatccacggcacgggcgccctggggtgcctgccggcgctggtggtgcaggagacgaagggcgagcaggacaagcacggctgcctcgccggcgtcaacagggccgccaaggcgttcaacaggaagctcagccagctctgcgacgacctccgcttccacctcaagggcgccaccgtcgtctacaccgacatgttcgccatcaagtacgacttcgtcgccaaccacaccaaatacgggatcgagtggccgttcatggtgtgctgtggcaacggcgggccgccgtacaacatgaagcagggaagacccggctgtggcgacctgtgcccaccggaggcgaaggtggtcagctgggatggcgtgcacttcacggatttcggcagcggccttgctgccaagcttgcgatgagcggggagtactccaagcccagggtgaagctggcaagcttgatccatggcggatccaagaaaacgtcagactcttgatgcggaccattgaccgagtcgtgacctttggatccacatctatggaatggaagatgggtagcggtgaagaattggagggatatcttgcaccaggctgtttcttgacgaagattgactccttgtacacactacacagaactactacagaaggcaaagtagcactgggaatgctcagttacaagcttaagttaatttgctgtctttttattttgggattttgtgctgcagagtacagagattttgtaccttgatgtacgtgtaactatttatgatagttcttacaagctccaaaaggaaaaaaaaaaaagaaaaataaaga

SEQ ID NO: 184355 - DNA, 231 bp, Zea mays
  Clone ID: MRT4577_99719C.1
tgcaagatgaaagggagagtgatggtgctttggctaccgttttagatgtcttgaagcgcatacacgcgactttctttgacatggctgctgaaactgatctttcttcacgggatataagacaggtgatcaagacgttacggaaggaaatactgcaaggatgcaaaatagtcttcagtcgggtgttcccaaacaatacacgcccacaggagcagatggtctggaagatggccg

SEQ ID NO: 184356 - DNA, 179 bp, Zea mays
  Clone ID: MRT4577_9971C.1
ggactacacaacaccattgcatacaagggaatttgaacatttaacccattttgggggtccggaataaatttttggggcaaaggaccggggaggaaaatttgaactgttccacaaccaggggaaaaaaaactgtcccatttgaatttgccccggttcccttgtttggaaatttatttttt

SEQ ID NO: 184357 - DNA, 717 bp, Zea mays
  unsure (1)..(717): unsure at all n locations
  Clone ID: MRT4577_99720C.1
actccatcgcctcgccgccgttccccgcaacctgtctatcgacccaatctcacatcaaccgacgcctcgtcctcctctccagatcagatccctgcccgagctggtagcagcaaccaactgttctgctgctgcagccttcttcgccgccaaaaggaaaagatgctctacgaaatccactcccatgcccaaatccaagacctgcaggcccgctccgatgagctgggccaccccgaaggccacatgggtgtgaagcttgtctctctggagtcggtgcgcatagcgcgcgagtcgtatgcactcctctgcccgctgatcaaggagccgatgtcctgggcatgcctgcagctgaattccctctcggtcgtggcacccttgtcgctggaaatccaaatgctcgagcatgatgtgttaccccagctcatggttcaggagtccaagctggaacggggcgccctggaagccctcctactcatgcagaactcagcaattaagctcttacatctggcgaagtgctttaaggaatccttgggcatattgcaggatctggtctcatgccgagccgaagatgtgagcataatgttaaatgatattgttcttcatgtactccgaggtaacatttcctggcttcaggcgcgcntcccggtgctggccgggctggtcaccattatgttggagaccccgggntcgtttctgtgattctgatgagtagacctatca

SEQ ID NO: 184358 - DNA, 293 bp, Zea mays
  Clone ID: MRT4577_99721C.1
agaactactaacaaaccaaccggggtgggggtctttacaattgctttgcacatccaaaccaccacaatggaagaatactagcattgaaaaatacacaaaaatcaaatgaaaaagggggcatttttacatgccgctaccagtcatagaccactgacactgtttgtacatacataataaaatgtataaaatcccgcttatcgaaactgcgctgagtacctcaaagacctaacttgactcgcacaacatcacaagatataagcactaatcctaaagtatacagcctcagcggccga

SEQ ID NO: 184359 - DNA, 742 bp, Zea mays
  Clone ID: MRT4577_99722C.1
aagacttcctattacacatgccgacgcgataagggttccgacggcgattgccggcgacagagtgggagacggagaaaacaagagatcacaagagcccactatgactgcagcgggcggcgccgcaaagttcctcgcggggttggctgcgcgcgggaacttctcttccggctcggacccctccaacctgcgagtcttgaggcattacgactgcgagaacaacacagatcccccagaaggacaaggtatcaaactacctattccaccgatatcttataatctcgcatctcaggtgaaaaactgaagactgaggcgaaacatgaggattccagaactgtctcggaaaacaacagatgcaaaatcatctggtgccagaacttatgaatgtcaacaattcgctcaaaaatgctaacttgggcacttcatgtgtgatcgtcaaacatatgatcgaaattttggtgttttacaaagacgcagtgaaggcatttaccgagaacagattgcgagcacttctactacaaaggggccgatcgaccaaaggcaaaaaggatgaactgattgatctgttactgcagcatgaatgatgacatgaatctggtacttgtttagccaataataccgcttcagggatggctacccgagcatatgagtaccatgctggacttgtgaatgactgctctgcctatattggatacaatgcattgtgatatgtatgatgagactttgccggaccttattatactca

SEQ ID NO: 184360 - DNA, 671 bp, Zea mays
  Clone ID: MRT4577_99723C.1
ccgaaaccgcgaagaagaacagcgaggcgaggccggataaatctccccctgtctgtcttcatcgcaaagcccgtccctttcttgttccgcctgaagccctccccttgttcccatctcctctccgtgtgtgccgaatcgatcttgcttggcggcagagggaggacggaggagggtgacctgctcggctctgccatggcattgcccgcgcgcctcgtgcgcgtcgcgctgctcctcctcgtcgcgctctccttctgcgccgccgggacgcaccgcgctccccgcgagccccaccgggcgctccactccggccaagatacgcatggcttggtggtgagaagatcagttgctgaagctcctgctgacataaatgtcactaccaacagctcctttgtgttggcggaacatcgaacatttcgaaaggaccctctgaatgcgttcaacagatatgaaggaggttggaatatcagcgaagttcactactgggcttctgttggatacacagcgtatcccttgttcgtcgtggccttgctgtggtttgtgctgttcttccttcttatgctggggatttcctgccaccattgctgctgcccgcaccacagttacaactactccagaatagcatatgccctttcactgatactcctgatattattcacttgcgcggcaattgc

SEQ ID NO: 184361 - DNA, 249 bp, Zea mays
  Clone ID: MRT4577_99724C.1
acccaataacaagagacaccacctagcaaacgaccccctgagaccccgtggcagtgccagtagaactgaaaggaagcccacctctctccatcctgcagccaataacccccaagagcgccggaccattcatccagttcggaaactttcaaaccagcggcgcccatgattttcttgaagccaatgagatcattcaaccgtcccgaccctttaacaatagccttacaaagacacaaccactcaaactaacct

SEQ ID NO: 184362 - DNA, 608 bp, Zea mays
  Clone ID: MRT4577_99725C.1
attattcaaaaccgccctctgtctgcaactccagcacagtttatcttcgtttgcgctttctcccctcttccgcaacatacttctcatgtcactcttccggattccctctgctctttacctaaaaaaaggaaccatgcgggcgaaaggtaaggggatcgagtcagaagccgccgacaaggtcacggccaggagctctcaggctgccctccagttccccgtggcaataatcgacaaattcctcatacccgcaaagtatgccgagagagtcccccccgtacctcctgtctacctccctgacgtgctcgagtatcttgctgctgatggtcttgagttgtgcggcaatgcggcacgagactccaataatacccggatcgtaccttgtcacatccagctcggcgtacgcaattacgaagatgtctcccgcttggtgcatacggtcgaccatcggtagtgccgaagatatgccctgcatccatagaccttttgctcccgaagaaaggcgtccactgtagcgaccaaggtgcgaatgtcgaccaggactaacgccttgactacgccaggtgatacctccagtatgctgacggatctgcatgtgtctgtgtactacg

SEQ ID NO: 184363 - DNA, 218 bp, Zea mays
  Clone ID: MRT4577_99726C.1
tgaggtggctgccgccgccgccgccagcggacggcgagatacccttcggacacgacgccgtcgccttgtccttcttcgtggcgtgtgtggccggcagcgtcgcgctcgcgtcgtcgatgtgctcgggattccgtcgcaagcgggacgcggccacccgtgcagacccggccgcttcgggcgagtcgagcgggacgggctcgggctccgtcgccggtggc

SEQ ID NO: 184364 - DNA, 687 bp, Zea mays
  unsure (1)..(687): unsure at all n locations
  Clone ID: MRT4577_99727C.1
gaaaccgncgacgggcgagagggagaagcccagaganggaagcggctcatcctacttgggtgccagaagctccgtgcaatactatggccaccgagatcctcgtctattcttgagaccttggatgtgttttgtgtgagcaccaccccatccacagcatcaggacaggagggggcacatctatgtaaatgggaagaaaagaggaaggaggctacctctgcttctactgcagaatcatcatccttggatagaaactggtacatttgtgtaagggatgcgaggctcctacggtcgctagatgtcttttatacctatgaaaacaatcgttgttccattggctggcctgcacgtgtggagttcactacaccaccagcatcaggtgatcttgttgctgctcaaggagtcaatatcttgcagcagtctatacatgttgtagatgtatatgcaagagatatgatcacccataaccaacttattcatgatgaggatgcaactgcgggtgatgaggacggngaaggagcgatccactggatgngggattgcccaacgacccggacgatgcatggtcatggcttgtatattcacgtacaagcagaggatgatgagcaggagggagagtggacataggtggaacatggtctatgccccctagatttatatgcaccagtgctgatgttatgcatgtgcatg

SEQ ID NO: 184365 - DNA, 356 bp, Zea mays
  Clone ID: MRT4577_99728C.1
cgcactgcttattgctcctagcgccgatcaggttggggctgtttgcctccccgtgggttgctctgcacacacgccaccgctcccgatgttgcttaagttggtgaaacagcttgatcctaaaattgttgtggctattgaccacggcagggaccagagtgacctgcacattttgcagcacttaatgaatagcttccagccgctgatagaacttcttgactcactcgatgctgatggcaccaatgcggatgctgccaataagaacaagaaagttctgaatcaacctagagtacatgatgcattgcttgaccgtccatatgtgaaacggcaatggtcttgctggcaaactttacatagct

SEQ ID NO: 184366 - DNA, 366 bp, Zea mays
  Clone ID: MRT4577_99729C.1
agctactccaccgcatacaggtcatgatggatcagcatatcgggcgcctcggaagcgggcatcattcagactccctatagccagagtctaggatgtgtgtgggacctcactcaagagcttgatggcaacggaacctttgagaggaccgagatccatcttctacgactatgaccaaggcatgcctaccatcggccacgaggtgtaatccggaaccaagccatgcacactaagatgaggcatgtgaacccatacttggaccatcatgcgaccattgttgctgactgcaacctgctgctctgacgccctgctgacatgagtatattcatgatgagcgcggccgatcgaagaccggccaaggaggaggag

SEQ ID NO: 184367 - DNA, 393 bp, Zea mays
  Clone ID: MRT4577_9972C.1
aataatttcttttttttttttttttttttttgtgtttttttagagctttttcggggattttcaaatttttcgggaaaagaaaccccaacgggccagggggaacacgagacccggggcaaaacaaacacaggcaaacagaggggaaaaacccaaaaccaaacaaagccgggggggaaggcaaacccaagcccccccggagaagggcaaacccacccagccagggccggggggaaccggggcccgggggtgcaccagcccaacggattggaggggcaggaccaccaaccacagggggaacacagaggggggcaagccaaaacccggtccgaagggacaagggggcccaaaacaaaactggttcagcgagaggcactgcccaaaaaaagcccccag

SEQ ID NO: 184368 - DNA, 560 bp, Zea mays
  Clone ID: MRT4577_99730C.1
ttggggccctcgaggccgggcggggtgttcctagaaaggagagacggttggcatctcccctgagagggacgggaacagcttcgggctttcctctagcaacattgcggttaagggtctctgcttcggcagatctaacccaaattttataaaaaaaaaaaaaaaaaaaaaaaaaaaaaaaaaaaaaaaaaaaaaaaaaaaaaaaaagattacaaacccggcctctggccggcctaccaccacaggtcaccgggggttgggtttctcccctcttccggacccgcttctccgtccggattccctctggtctttccctaacgaagggagccatggcggggaaagggaaagcgatcggctcaggggcccccaaaaaggccacggccaggagctccaagggtggcctccagttccccgggggaaggatccccaggttcctcaagggcggcaagcatgcccagagagtcgggcccggcgcccctgtctacctcgctggcgggctcgagaatcttgctgctgagggtcttgagctggccggcaatgcggcacgtgacaacaaaaagacc

SEQ ID NO: 184369 - DNA, 627 bp, Zea mays
  unsure (1)..(627): unsure at all n locations
  Clone ID: MRT4577_99731C.1
tttttttttttttttttnnnnnnnnnnnnnnnnnnnnnnnnnnnnnnnnnnnnnnnnnnnnnnnnnnnntataaacttatagatgaaatgttgatatgataaatttattgattagataacatgatcatcctaaataaatatttcacagaggctagctttaaatgtaagtagcttgttcacggtttgcggcggtatattctctgattttcttgtaggcaggttcattgttattagcttccaaatcaacaagctcaacgtaattcttaccagtcacattcaaatccttgatttctctttgttttcctggttcagcgaaaataaagacacttccatcgatattcacattttccaaagcaatatcaccatccaaaaccacagtactttgaggagtaatagtcacattacccttgatcttgtttctaatttccttgagagtgacaccaaattcgggcattaaaacgactttgggaactccaggcaaaataactccagcatgagtaacattttcgcccttttggacattagcaccagcaagtctcaagacttcagcatttaattgataaagatcaaattcgcaagagcttgagctttcagcaggcaagccgctcttgactttagtgacagcag

SEQ ID NO: 184370 - DNA, 1302 bp, Zea mays
  Clone ID: MRT4577_99732C.1
gcacgagctgggcactggtgaatgaacgagagtgacctgacccccgtgcggccgtccgccgtcaccgaccgagcgccgggtcccaccactccccgtccccaacccctcgcgctcgctccagcctccagcaaccgcgctccctgttcctttccttcccaggcggccaggcccagcagcgtgaagtgaggccagctagcctattatcagcctatggcggctcggattggagcggacgggaaggcgatggcacgccgcggccgcgtggagctgcggcggatcgaggaccgggtgagccggcaggtgcgcttctccaagcgccgctcggggctcttcaagaaggccttcgagctctccctgctctgcgacgccgaggtcgccctcatcgtcttctcccccgccggcaagctctacgagtacgcctccaccagcatagaggatacatataaccgctatcagcaattttctggagaaggaaggaatataaatgacgatcgaaatagaaacgataacaaggatgaagcttcttcagatttgcagttgatgctgagcaagattgccacctggtctccccagagcaatgctgacgaatcagatgtagatgagctggagaagctggaaaatcttctgagaaatgctttgaaggatacgagatccacgaagattcagatgttggcgaaacaaaacagcggagctagtacaagcggccagaaaagtccggagcaaggaacggcgtgagcacggatctgtccagcgtccacctacctgggattgctcttgcttccccttgccgatggatgcttgtactgattatgaccttgtgggttgcgagaccctgtgctagctttgggcctgccaacctgcagtgtccctggaggggacggagctagtgtatgtagtttgatgttccctttgtgtgttgtgatatgcagcctacctaatggccagagcttggtgctgcaaatcctgcagctgatctggttgcgtttcatgcttgacagtatatacagcatactactgtgttttagttcctacagacacttgctcagatgaaacaactgggctaggaaaatctatcgagcaaaatgatggtattgcataatagatactgggtgttcgccaaccaccatctggcggaacaaatctattggtctcggataccagggaatccattccaaactgggcttgcacgcgatccacctatggcctttaggcggcgtgctaaaactaggagtgactatcggcaacatacttctgtgcgtggacatgactctcactcataatgccatacaggagacttgttca

SEQ ID NO: 184371 - DNA, 1628 bp, Zea mays
  unsure (1)..(1628): unsure at all n locations
  Clone ID: MRT4577_99733C.1
aattcggcacgagggccgatctcaaccagcacctcttctcggcgttcatcgcacggcgctgccacggcccaggtgaagccgccctcgaggcgcctctcagcgtacgcatcaaatccagaacgccgcggcgacgcgcggaatccacgaccacgaggatcctctgcaggggcgcagaggcgcagcagggctctggaggagggaggaggagggagccgctgcggcgcggggccgtcagcgcgcgcctcccggtgccggaccacatacgccggccgccctacgtcggcacggccgccgtcccggaggtgtgccccgaccggcaggtgcacgacggcgagagcatcatgcggatgctggacgcctgcgagctcgccgctcgggtgctgcaccatgccggggcgatggtcaagccctcggtgacgacggacgagatcgacagggctgtgcaccagatgatcgttgacgccggcgcctacccctcccctctcggatacggcgggttccccaagagcgtgtgcacgtcggtgaacgagtgcacctgccacggcatccccgactcacgcgagctacaggatggcgacattatcaacatcgacgttactgtctacttaaacggataccatggggacacctcgaggacgtacctgtgcggagaagtcgacgacgcaactaagcagctcgtgaaggtcactgaagagtgcatgatgcgcggcatatcagcctgcaggcacggcgccagtttcaaggaaatcggccagagaataagtgagcacgcggagaagtacggatacggcatcgaccccttcgtggggcacggcgttgggaggatgttccactgcgagcccatcatatggcatacctacgattacgagcccgggttcatggtcgcaggccagacattcaccgtagagccgacgctgtcgatggggagcacgcagtgcgtggtgtgggacgacgggtggacggccgtggcggcggacggcagcctcagcgcgcagttcgagcacaccgtgctggtcaccggcgacggcgcggaggtcctgaccgggttcccgtagctgcctgcacgcatcacgtgagcggtgagcctgggtgggccactgcgtcggcgagggacggaactgcaggagcaggcatgcagctatgcgcacgctgacaattttattaaaaatctatgttggacggttgccgtaagaaagaaggcagaacaaagaggtctagagaaggaagaggaagactacttcaataaggatagtgatgaagaagattcaggctccggccggcgggataaacatgcacagaaccagcatagcaagcctaagcccaaggtccctaatggaagtgaagctgatgacactgatggcgcctctagacctaaatctgctggacttgtggactatgacgatgatgacnatgaagacttcaatcaccaccaatggaccttctaccctgcaaaggatatgtgccctaacatnttcccgtgaaacggnaaccnntggttgtgaacatccnatngggaggnccangangcaaaattgaacccgaatatgggccaaaatgctntgtactgtccttttaaccnccgnttcaaaaacttcttgtntgctcataacngccatctganccangtt

SEQ ID NO: 184372 - DNA, 119 bp, Zea mays
  Clone ID: MRT4577_99734C.1
ccatgcagaagggttgtgtacatggatgttaccaggccgccagacggggaggaagcctctatatagaacatatgagttgggaggatgagaaatagagccctcttaactagactttggtg

SEQ ID NO: 184373 - DNA, 737 bp, Zea mays
  Clone ID: MRT4577_99735C.1
ccggccgggaattcgtacccacttcccgccatctgccgtccctgcactgcgcttataccctgcaggcaacagcagcgatggcggcgagggtaccggcggccgatctcaaccagcacctctcctcgccgttcatcgcacggcgctgccacggcccaggtgaagccgccctcgaggcgcctctcagcgtacgcatcaaatccagaacgccgcggcgacgcgcggaatccacgaccacgaggatcctctgcaggtgctcacgatcactcctatcctacccgcgacgtgccgttccaatttgcgcccaaaaccaaacccgctcctcgaattccctgacaatcgcgagggctctgacacgatcgaaccgaaggggcgcagaggcgcagccgggctctggaggagggaggaggagggagccgctgcggcgcggggccgtcagcgcgcgcctcccggtgccggaccacatacgccggccgccctacgtcggcacggccgccgtcccggaggtgtgccccgaccggcagctgcacgacggcgagagcatcatgcggatgctggacgcctgcgagctcgccgctcgggtgctgcaccatgccggggcgatggtcaaggtgagtggcgactggcgagcgcgtcctccagatctggtttcgcctcctgtggtggagtggagaaacttgagacccgtcctgttctggccacgtgtgcagcccctcgtgacgacggacgagatcgacagg

SEQ ID NO: 184374 - DNA, 758 bp, Zea mays
  Clone ID: MRT4577_99736C.1
ttgggtacctcgaggccggccgggacctggtagtgtgcatgattttctaaagactcctcatcttatccccgctaagccgcgcgacagcagagcagagggggcagtgcagaaggcatgtttccgatggcgtcttcctcactgtcgtcgccgccgctatcacttatcctcctccggccgctcccgtgcatacccgtcctcctcttgagacaaaggaagccattcccagctgtccgcgtagaagcaaggtctcagcagcggttgcagcggaggccggtgactggccagtggaggaggagctgcagaaggggcggaggctacgcgtgtttctcctacaatgccaagaacaagacgcccccgccttcagataagagttcagacgagtgggcgatcgttcgccgatgggatgtgccatgggaatggcaaactgttgtgctcagcatggtaggctgtggagtaagctttgttctgacaggattggttgagcaattggctttgcaagaactgggatttaaagctgtggaggcaactatagatgagaaggcagaaatactcttctttgggcagctgagtgtgacagtagtagtgcttggtgttatatttggcatcaccaacacttttcgaccattcccagatgatgtgtttcgttatgatattaaagaaccgttcaagctgcaaaatggatggcttttgtgggctggaattggtctctttggagcagtaatttctattgccttagccggagctgctatgacttatct

SEQ ID NO: 184375 - DNA, 499 bp, Zea mays
  Clone ID: MRT4577_99737C.1
tgaacctgcttgatttttgagctgaacggttctgcttcctcccaatggccttgcaggatggcgacattatcaacatcgacgttactgtctacttaaacggataccatggggacacctcgaggacgtacctgtgcggagaagtcgacgacgcaactaagcagctcgtgaaggtcactgaagagtgcatgatgcgcggcatatcagcctgcaggcacggcgccagtttcaaggaaatcggccagagaataaggtctcggtctctcgatcttatcgaacatacaagcgtttcttttttaaaaaaaaagcagcttatttcagtcaatagaacttgattgttaagaacgccgacagatcgcaccgcgcggattgttttccattgctgtgaactggctctgctttggttgttttgttccagtgagcacgcggagaagtacggatacggcatcgaccccttcgtggggcacggcgttgggaggatgttccactgcgagcccatcat

SEQ ID NO: 184376 - DNA, 300 bp, Zea mays
  Clone ID: MRT4577_99738C.1
aatatacattattttatttcattataatattggggtcacagctattaatccatacgtccgtgcacattgtggaggacgcacataaccgactatagcaggatgctcacataaccaaaccgagccaggagagggcaactagcaacgaacacatccttacagacaaaaagtattcataacaaaggcttgactagaaaagcaaacagctaaccaaacgtcacccacaaatgggcaacactaaaaaaacagggaaaggacaggccccagggggccggagcctattcaaggatccggggttgtcag

SEQ ID NO: 184377 - DNA, 1983 bp, Zea mays
  Clone ID: MRT4577_99739C.1
ctgccgccgcgtcctacatccgctgcatagtatccctgttctgggatgctccgtgatgcgcgcggcgcgtgcaggtgttcatcctgctgtcgtgctcgatcgcggtgtgcgtaaacttcagcacgttcctggtgatcggcacgacgtcgcccgtgacgtcacgggtgctgggccaccttacgacgcgtggggggctcttctgcggttcccccatccccacagcccccttcgccccgcgcaacgtggagggctcttcggcctcacgcatctcctcctcctcctccaatccaattcacaaacacacacgggcaatcaattagcagaacccgcgccacccccccttcctcggagtcggagcgagtcgaggaacggctcgtctgcctctcccgttctccttcctctcctccccagaagatctgatccatcatcgaggactcgccgggaagaatcaaggatatatagataataaacaaacaaaggttcctccagagcccagagcaggagggaagtcaccggccgtcggcggggaggagatgtcggacggcgcgggctcccggacgggcgtcgctggcgcgctgggcctctcggtcacctcgtcggtggccatcgtcatctgcaacaagtacctcatcagcactctaggcttcttctttgcgacgacgctgacgagctggcacctcatggtgaccttcttcacgctgtacgttgcgcagcggctgcgcttcttcgagccaaagccgatcgacgcgcggaccgtcatctccttcggcctgctcaacggcatctccattggcctcctcaacctctgcctcgggttcaactctgttggcttctaccagatgaccaagctggccatcatacccttcaccatagtcttggaaaccctctttctgagcaagaagttcagccagagcatcaaggcctccctcatggttctgctcttgggagtcgggatcgcgtcggtcacggatctccagctcaacctcctcggctcgatcatcgccgtgctcaccatcgctgcgacatgcgtcgggcagattctgaccaaccaaatccagaggaggctgaaggtttcgtcgacgcagctgctgtaccagtcgtcgccgtaccagtccgcggtgctgctcgtcaccgggcctttcgtggacaagctcctcaccaagcgtgacgtcttcgcgttcagctacaccacccaagtcgtggtgttcatcctgctgtcgtgctcgatcgcggtgtgcgtaaacttcagcacgttcctggtgatcggcacgacgtcgcccgtgacgtaccaggtgctgggccacctcaagacgtgtttggtgctctccttcggctacatcatcctcaaagaccccttcagcgcgcgcaacgtggtgggcatcctcatcgccatcttcggcatgggcctctactcctactactccgtcgtcgagagcaggaagaagaccgaggacgctagctcgctgccggtcgccgcgcagatgagcgagaaggactcggcgccactcctcggcgccaagagctcgccgcggacagagaacaaggccgaggaaaccttcgactacatgccgaggacggccaagagcgcgttcaccggccggtgagcgcgtagcttgtaaggagtacgtatctttctagagttgtgggtagacgacgagcaacaaggcgggaatgtgttagtgaaagatgtaacggcagcaagtgacattccaattatcatttttgcgatttctcctctagggcggtccgcgtggtcatggtttaccagagcataaacatcagaatgtgtggtcttgcccgagcttgaaatagtagattggattggtggtaatacaactatacaagacgtgcgaaatgtgtaaggtttgtgcccgttaaggtcttgttcgtttgtgccggattggtgggtcggaacgattcctagccggattgcttctctaatttatataaactttgacgaaaaaaaaaaaaaaaaaagcggcc

SEQ ID NO: 184378 - DNA, 223 bp, Zea mays
  Clone ID: MRT4577_9973C.1
gaaaacccggcccgacgcacgcgtccggccgcatcttctatcagtaccctctggtgttctggtcccaggtggccgcccactacgctcgtttcttttaggcgagcaactgctaccctggatcattggacgcgcagaaggtggccgggaagatcgtggtgtgcgtaagcacggacccgatggtgtcgcggcgggtgaagaatctggtcgccgagggttttatctc

SEQ ID NO: 184379 - DNA, 548 bp, Zea mays
  unsure (1)..(548): unsure at all n locations
  Clone ID: MRT4577_99740C.1
actcccctaaaccacccactatacccgcccgcccggctagggttttgccaccatggccgccgccgcggccgccgcccggaggctcctctcccgccgcgcctcctcgaactcgctctccgcgttcctccgccgcggcgctgccccggagcagtcgctgctgcgcccggccgtcgtcgcggaggcctcccgcctcggcttcccgcgcggaatggcgcggcgacctggcggggacggatacggcgcgggacgacagcgcaagcccacgcagatagcatagctgctgacagggtgcttgactatgcactactccatcgagatggaaaaatatggtcttgaagtcgccccgaccaactatacaactgactactgcattgagacttctgtcgagtcgccgtgagctcaagatacgcgccatggatcacgagtacgaagggactgatgaggtcactggtgaggacttctctgttgagccagntgatgagaggaggcctttcccggctctcatggatgatggcctcatcaggactacaacagggaaccgtgtcttt

SEQ ID NO: 184380 - DNA, 412 bp, Zea mays
  Clone ID: MRT4577_99741C.1
gcgtacaaaaacaataaaaggacaactttcttatggttttattgatcacaagcctattcaagagctcgtgtttatcctaccatataagatccttataccgtatataaaatcaatgtatgcgtaacatgagattcttaatttttacaaggaggccaaaatctatgtacttcgttactcttatcttaaattcaaatttaaaatggagatttgtattatatataaattattactataatcataatttaaattaaaagattatgtaaaatagaaatttaaaatgctaaaataatgtactttcatatatttatatttataataatatcttaaaaatagaacttattaatctatacttgttacatctaactatttctaattgtatattttattacataattataataattacatatta

SEQ ID NO: 184381 - DNA, 662 bp, Zea mays
  unsure (1)..(662): unsure at all n locations
  Clone ID: MRT4577_99742C.1
agccaaacttgatcatggataatgcatatatatctccatctcatgcccaacttcccaccccaccaaaatctagagtgaggaagcaagaattaacaatatgggcaaaaatgaagagattctggaagccaagcaaagagtagagtggcgaaaaattctaatgatttctagggatcaaattctacaaaatgctaatggggaaaaggaacaagaaacaattaagcagggaggtttgttacactgattatggttccacagtgccaggtatattcgctacatcatcgtctccgtcagcgagtaactctgcatccttgtcttcatcgttagagaagtcccccctctctagcttcgaatttgcagcaacaaagaccaaccggtgtgctctaccattgccacctgccagtctccgaggtgcagagagccagcgcaccattgatggcgtgcatctgaaacccctggaggttgcatggaggaagatgagccgcgcagctaccctgccgagggacttgagctcacccaggcatgtctcccatacgagcctgctgctctgcttatttgcgaccttcatcctccctgtggaggggtcaggctgcctcacctgcacagcttgtgcgtacggcgggtccagcccatctgaccgncatttcatcagctccatcaaaact

SEQ ID NO: 184382 - DNA, 329 bp, Zea mays
  unsure (1)..(329): unsure at all n locations
  Clone ID: MRT4577_99743C.1
taggactagcggctagcgcgagaatggccaaggacatcggggccggggcggcgcacgagggctatggctactcngacccnccccccgcgccgctgttggactcggaggagctgaccaagtggtcgctgtaccgggcggtgatcgccaatttcgtggccacgctgctcttactctacatcacggaggccacggagatcgggtacaagcaccagacggacgctgcggcatttaaccccgactctacgatcggaaaggttggccagcaccgcatcatctgagactacgacggcatgatcttgatcctcatctactggaccgttttggagtct

SEQ ID NO: 184383 - DNA, 926 bp, Zea mays
  Clone ID: MRT4577_99744C.1
gggacctcgagccggccgggagatctcttatctttctaaaaaactcagcttatccttataattgaccttatccctccaacctaaaaaccggtaccatccgccgccgcagccatccgcttcttctcttcggttcagctctcgaggcatttctgcagtttccaggatgaaggtaatagctgcctacctgcttgctgttctgggtggaaacacttccccgactgctgatgatgttaagagcattctggaatcagttggtgctgaagctgatgaagaaaaactagagttcctgctcacagaactcaaagacaaggacataacagaagtgattgcagctggaagggaaaggttatcctctgtgccttcaggtggtggtgcaattgacatgggagctccagcagctgtagctggcggtggcgcagcacctgctgaagaggcaaagaaggaagaaaaggttgaagagaaggaagagtctgatgaagatatgggtttcagcttgttcgattaaaacagcactaccagtttacagtttcttcgcgaatggtctcataatattggccggtttccacaaaataagattgtcaatagctactacgtacttatgctattctgcatgtgatgtacgagtgtgcatcttcaagaatctttaagttgaatggtcggtggtcccataataatattggtaacaatgtaaattgtatgtcctgtacgtactttggtatcgcgacatctcagtgtgcatcttcaaggatcataagttgaatgttatcattaaggtcagtttggttcagataaatataattgctagttatagctaaacattgccttggtgtcggaacaactgagttgaatattgtgactgttcgaataaatggtgggggatattgatgttttttttattaaaataagattacatcagagcttttttt

SEQ ID NO: 184384 - DNA, 944 bp, Zea mays
  Clone ID: MRT4577_99745C.1
agccccccgcccgcggccgcgcaggcgccgccgcagccatccgcttcttctcttcggttcgcggcctttcggttgcctcggaccgggatgaatcctgcgtttaacagagtatatataaaactctattattgacggaatggtccggaaactggtaccatccgccgccgcagccatccgcttgttctcttcggttcagctctcgagtttccaggatgaaggtaatagctgcctacctgcttgctgttctgggtggaaacacttccccgactgctgatgatgttaagagcattctggaatcagttggtgctgaagctgatgaagaaaaactagagttcctgctcacagaactcaaagacaaggacataacagaagtgattgcagctggaagggaaaggttatcctctgtgccttcaggtggtggtgcaattgacatgggagctccagcagctgtagctggcggtggcgcagcacctgctgaagaggcaaagaaggaagaaaaggttgaagagaaggaagagtctgatgaagatatgggtttcagcttgttcgattaaaacaccactgccagtttacagtttctctcgcgaatggtctcacaatattcgctggtttccacaaaataagattgtcaatagctactacgtacttatgctattctgcatgtgatgtacgagtgtgcatcttcaagaatctttaagttgaatggtcccataataatattgataacaatgtaaattgtatgtcctgtacgtactttggtatcgcgacatctcagtgtgcatcttcaaggatcataagttgaatgttatcattaaggtcagtttggttcagataaatataattgctagttatagctaaaaaaattgccttggtgtcgcaacaactgagttgaatattgtgactgttcgaataaatggtgggggatattgatgattttttttact

SEQ ID NO: 184385 - DNA, 376 bp, Zea mays
  unsure (1)..(376): unsure at all n locations
  Clone ID: MRT4577_99746C.1
cggtcaaagactggacccttcaaggaccatgtagagatctcttcaacagagtacttggcttctatgtgcgctctgaagatgatggtgtggaagcagccaaggcggtgaaacagagcaatgtgaaaactcactatctataagcaaaaataaaaggcgtcaagacagaacatgtgctcttgaagtatgggagcgcttggaggaatttatgcgggcacggacataattgatgtgcagtcatgtaagccttatgatttcacttttactgagttcttatatgtcacagcaagttctagtaggattggatatcttgttttgtatgattaaattgnntggtcagtgaccataagggaataagtgatacgtgtgtttttaccgc

SEQ ID NO: 184386 - DNA, 288 bp, Zea mays
  Clone ID: MRT4577_99747C.1
gcgtccggccaggctttcgctcatgtgttagatcgtggcggcgtgcgcggtgctcctcgatgatcgacgaacttcttcacaccggagtgcgagcaggacacatccccataggcgtcgggagctctcgtccaacggggctggggctcgcgaaaccgatgggattcacgcatgctgcagagcgacgcgtgtggggcagcataccttaacatagatcgcgccaagccaccgcttcttgcgcaggggggggcgtgcacctcgccttgagttttccggatgaacgcgtcacat

SEQ ID NO: 184387 - DNA, 211 bp, Zea mays
  Clone ID: MRT4577_99748C.1
acgtaatgtaatggatcaatagaaactctgcagagcatattttgttacaaactttggggtggttttttttttaaaccagggggagggttattggctggttaacggcctaacctgggttccagggccaaacttgaaccctgatgaatggggttcttccgaaagcgagggtgaatggataaattaaactctaaacatgccggcgatcacaggt

SEQ ID NO: 184388 - DNA, 410 bp, Zea mays
  unsure (1)..(410): unsure at all n locations
  Clone ID: MRT4577_99749C.1
cccacgcgtccgatctgatccaggcgctagcaggagcagagtttctcctcatctcttctacctacaacaacccgcagtagcccaacagatcacttggtaaactgatgatgaggggtgatggtggcttctttccctaancaggcacgcgtcgctgccttaaaacagcttgaggagcaccgtgtaaatcccagctacatgactgtctaccaagcttgcaaggaagacttgcctgtttacacttcagtttacgatgatcgctccgccaaggatattatcggacggagggggcttaaatgcattgatgcgcttgcgaggatgtatggaaatactgcagagggacaaggagttactgttgaattgtgagaagctacttgagacccaacttcagagggtgcggaagcacatgcccc

SEQ ID NO: 184389 - DNA, 642 bp, Zea mays
  Clone ID: MRT4577_9974C.1
ccggccggggtctcctccctcccagcgccgccgtggatggccggaggagccaccacgccggccggcatcaggcgcctcgtcagggtcagcctgcctccacttatcctcctctttttctacgggtaacccgcgtttgttttgtttttccaaccagtccagggcagccgctccgctaaactttgcactttcgaggctgtgggtacttttaagattggggtagtgctgagttaaggcagacccttgggactatctttagccaccgtgttaatggtggtctatcttagtttagtggatggatttgttgagtaaaacactggattcggtgaaggccggcgccgctccggagctccagcgggaagggtcctgatttgccatgtgttttgaagacgagagctctcggcacctatggccgaggaccggaccctcgagagcggccccgaccctcatggtgaaccacccaaacctctagcctaagggggtcctgtgctccatgtgctacgtgttggacaacactgtgggagacggacctcctccgcaatgacgggcccaggatttagagtgtgggtattcgaaaaattttctaggatgattatttttaaagactaaagtttttcgaaaaaaaaaaaaaaaaaatttgcggcc

SEQ ID NO: 184390 - DNA, 206 bp, Zea mays
  Clone ID: MRT4577_99750C.1
gggccgcctggaaaaaaggggtaataatttcaattttaattttagcaaattcaattttcgtccgagattaaaatcctttgaatgaatgtttgggtgccacaattttttcggggggctttttgcatttggccatacccccaaaaggaacatttttgggaagcactcactcccctttatacatttgggggttacaaataaatacttac

SEQ ID NO: 184391 - DNA, 169 bp, Zea mays
  Clone ID: MRT4577_99751C.1
gggggaggggggaaacgaaagagaaagcgtgggccatccatctatggttgacagatctattattgcgatagttagggctaaactcttatgcgtgctatgagatcatgggaagcacgagcgggatgatgctctttgtatgcccatggatgccgtgggggggggggaagag

SEQ ID NO: 184392 - DNA, 182 bp, Zea mays
  unsure (1)..(182): unsure at all n locations
  Clone ID: MRT4577_99752C.1
aaatagcccgaaaccagaggcgggtagggtctggctgtaaaaacgngcatgtcggcacacaaccgccgcccggcgctgcttaacgcctctactgcagctatattacagcctactactacaactgcagccaacaaaagcataataactaaaaattaaaaaaatataaaaaattaaaatataaa

SEQ ID NO: 184393 - DNA, 292 bp, Zea mays
  Clone ID: MRT4577_99753C.1
gaaaaaaaataggggggagacaaatttgggggccccctcccttgggaaaaaaggctaaaatgccaacattcctacttcaccggccaaaccaaacccatcaaaccagggggttttacagccccaaagaagccccactccggggggacaaagcaacccggtaccaaaactccttcaaatcaaacccagggggggggccaaactagtccccaaaatcccggaccccggggcgggggattacccccacctaaccaaacccctaaagccaaaaagaggggggccctggggtttgggg

SEQ ID NO: 184394 - DNA, 705 bp, Zea mays
  Clone ID: MRT4577_99754C.1
atgatgtctcaaggcaaatcttctggtcggggacctgaattgggtgacaacaatgaggacttgaacccgatttctgaagatcctataaatgaagatgaagagtttcatgagagtgaatatgacctcttaagttctcaagatttggaggagtttgccaaagatgatgagggggttgtacctccttgccaaggaaaatcagcaagtctcctttgggtgctcaagctgagggttctggaaaaactgaagctgaaaaacaagttgaggagcagcagacttgaatccaatgatgatatgaagattgctgataaagctgcgacgagagctatggctaaagatgccttcatgaacaaagatttaggaatagatttaggtaattctattaataaatctatagcaaatttggagttgattaaatctttagaattgtccagaaatgttcttgcctttcgatatgtcaaaaattctgttgaacataatctccaagttggttctgactctgagttggataagtctatccaagatgagaatggaaacaatcagctgactgacttagatgatgttatggtcttgagaaaaggcaggaaaattcgttataagaaaaattcagtcaagaaaaagaagaaaaaatcttcttccaaaattaggtattctcctaataaagggaaaaggatcccttctgtctccaaccttaactatttagaatga

SEQ ID NO: 184395 - DNA, 985 bp, Zea mays
  Clone ID: MRT4577_99755C.1
ccgggaaaaaaaaaaaaaaaaaaagtcctgcactcgcacctctttgccgttttccttctcccgttcacctcgcgccgccgccgacctacgccagttgcacaggtcttcgtcggccgctttccggcgaagagcattcgcgcgagggaggggatggggaagaagcagaagaagcctgggaaggggaaggagaagacggagcggaagacagccaagggcgaggagaagcgtgcccgccgggattcccgcaaggtcggcgaggaggacgacatcgaagccatccttaggagcatacagaaggaagaagcgaagaaggaggttcatgtggaggagaatgttcccgcaccatctcctcggtccaattgctcgcttactgttaacccagtgaaagagacagaattgatcctgtatgggggagagttctacaatggtagcaagacctttgtttatggtgatctttatcgctatgatgtagagaaaaatgaatggaaattggtatctagccctaacagtccacctccacgaagtgctcaccagacagtagcctggaagaataatatatacatgtttggtggggagtttacttcaccaaaccaagaacgttttcatcattacaaggacttttggacattggatctgaaaacaaatcaatgggagcagattcttgcaaagggctttccaagtgcacgttcaggacacaggatggttctttacaagcataagattgttctatttggtggcttttatgacactcttagggaagtgaggtactacaatgatctgcatgtttttgatttggaccatttcaagtgggaggaaatcaagcctcgacctggatgcctatggccaagtccaagaagtggctttcaacttgctgtttaccaagatcagatatatctatatggtggatattttaaagaagtttcttttgacaaagaaaaaggaacagttcatgcagatatgggggctctttgatctgaacttggga

SEQ ID NO: 184396 - DNA, 550 bp, Zea mays
  Clone ID: MRT4577_99756C.1
tagaccagcacacattctacgctctaacatccctaagacgagcaagggtcaagtaaaggaatagttgaaagaatatcagttgttatgcacctgtggctcgcattatggtagatgatacctgtgatgtggatgtgctttgtaaaacacagaaaactggcagggcaggcatgggtggagattaatcgagattacaaccttctaccaatgcatttccataggatgcgcaaacacttttgagtttgctatcggcaaagaaaatgcaaagctacgaatattgtcaagaaacagaaatcactactgtatatgaattaaggaacatggtacttatgcacctaaggagaaaaggatgaatcaagcatgagaaagtctgctgagaaaaaaccaccagcataagaggcacatattgctgaccccaatgctgctgctgctcaaagcaatcgaactggctatcaagcgggtcgtctgtgcaaagcttcccaggagccacctgctcctccgagaaacattctctttattcaaaacttgccagaccagaccacgatcatgatgc

SEQ ID NO: 184397 - DNA, 374 bp, Zea mays
  unsure (1)..(374): unsure at all n locations
  Clone ID: MRT4577_99758C.1
attaaagggcagacccgctcactagtcggcggccgccctcancactacatcttacccaattttttttttttgacccaacaaacaccccacccgggggcgggggggaaaaaaaaaaagacgcagacccccaacatcgaaaccaacccgagcgaaaagaccctgaccccgcaaccaaacaccaagaatactggcaggccaacccaaaaacaccaagaaccccctccaccggaaccaagagctgaagcaccccaaccccaaggacgagcccccccactgcatcaaggacaagcccaagaaacacaaccaaaaaggaaaaccaaacgtacaccccgaacccgctggggaacaaggcaaaaccaaaaaacagcaagcac

SEQ ID NO: 184398 - DNA, 303 bp, Zea mays
  Clone ID: MRT4577_99759C.1
ggggcggcaaaatcattttaaacaaatgtttccggggccccaaaaaaacacaagggttgttttttttaagggatttatttgggacccccaaaaaaatttgtattttttttcctgggccccccaaaaaaaaaaggttatggcccgaaattaactccaccccaattgtttggcccagactttccctagggagcttcacccccataattctgcccaaaaaaaaaaccggggctggggggggggcccccgggcaattaaaaaaaattggggcggaaaccccccggggaccctaaaactccaaccccc

SEQ ID NO: 184399 - DNA, 1623 bp, Zea mays
  Clone ID: MRT4577_9975C.1
tcgaggccggccgggagtcagacacggcgcgcccgcccgcccgcccgccagaaacctcacaccgccatcaccatcgccatcgcataaactagacgagaagagagagagagggagagaggggaaagttgattctctctctgacccgcccactccctccttccctgctccggtcgcactccgtcgttcctccgcgcacgtacgtacagcagccagacacgagatcgagtggtacagggcccgccagaaacctcacgagctagctggttcctgatcggcggcctgtgccgcgcgccgatccacgcatggcgccgccgctcctgcccgcgcgcttcgtcgccgcctccgtcgcgctgctcgccgtcgccttctcctcctctctaacgcgtccgtcaggtgcatacgatccgctcgatccgaacgggaacataacaatcaagtgggacgtgatacagtggactgcggatggctatgtggccgtcgtttcgctatacaactaccagcagtaccgccacatccaggcgccggggtggaggctaggctgggtgtgggcgaagaaggaggtgatctgggcgatgaccggcggccaggccaccgagcagggcgactgctccaggttcaaggccagcgtcctcccccactgctgcaggagggacccggaggtggtggacctgctgcccgggactccctacaacacgcagaccgccaactgctgcaggggaggagtgctcgcctcgtgggcgcaggaccctagcaacgccgtcgcatcgttccaggtcagcgttgggcaggctgggtccaccaacaggaccgtcaaggtgcccaggaacttcaccctgctggcgcctggtcccgggtacacctgcggagccgctaagcttgtcaagcctaccaagttcatgtctctggatggcaggagatcaactcaagcgcacatgacctggaacgtgacgtgcacgtactcgcagttccttgcccagagatctccaacctgctgtgtctcgctctcgtctttctacaacgacaccattgttagctgcccagcatgctcctgcggctgccgccagaacaacagcagcaccgccgcgccaggaagctgcgtagagtaagtttattttgcatccacggcgatgctatggggcatcaagtactacaacgatctgctcatgacggccgggccagacgggaacgtgcagtccgagcttctgttccggaaggagccgtccacgttcaccttccacaaaggatgggccttccccaggcgagtctacttcaacggagacaactgcgtgatgccgccgccggacgcctacccgtggctgcccaacgccgcctccccgcggctgtcgccttcgcttctcctcccgctcgttgcggctgcttggacagcattcgcagtcctttcgtgatgtcccatgacgagttctgacctgattcggcgttgctgcttgctgctgatcattagtctgttgccaagttttatttggtgtcttgaatcttgatccaggaacaggttcagatgtgcagtcacgtactaccaagcatgtacatccccaatacttgtaaatttctgcaaagactgactggcaagtgacagtagaaataatctgtttctctctccgcacg

SEQ ID NO: 184400 - DNA, 253 bp, Zea mays
  unsure (1)..(253): unsure at all n locations
  Clone ID: MRT4577_99760C.1
gcccggccgtctcgatcccagcatccgagagagcttcacaggccaggtccccatcggcgcggcgcttgccccacctctcccccgcccggtagtagcctcgccgccgttgccgagatggggttcgtgtacttcgtcgggagggtgctattagtaggcgctttcatcctctccgactaccacaagtttaatgaattcccggctaagagcaaggggggggggtggganattcctccaaaatataacncttttccta

SEQ ID NO: 184401 - DNA, 590 bp, Zea mays
  Clone ID: MRT4577_99761C.1
ccggccgggactgattctctcgccatggcctccatctcctctgtcgccgtaaacgcaccttccttcgccgcaccagcaccagccagtgacgtggtccaaatgaggaccttcaccgcgcgcgcctctctccgcaagggcaccggcaccgccgccgcgtgaatggctgccaaccgcctgcttgtcggcgtgtgccatgccaccaggaggtgctgctgggcgcaatcgacgacgagttcggactcgagaccagtcaggtgcacccgccagggcgtcgacaccatcatgttcgggaacaacgcccgcttcaccgcacaacggcaatcttccacgaagacgaggtgaccgagagtagatgtacgccctcaatcatctcacaggaggagcacctccacgctgcagatcacacctacttcgtgacccgtcaccgcgtcggtacactcaccgcttcgactgcgagctgcatcaaggactcctaacgcacggcaagagcgccgtctactaattaagctagctaacagatctacatccattcatacattagctgctcattcctgctttgtactcgacagaactgtccatcgtcaacaagt

SEQ ID NO: 184402 - DNA, 825 bp, Zea mays
  unsure (1)..(825): unsure at all n locations
  Clone ID: MRT4577_99762C.1
cattgggaccctcgaggccggccgggacctctttttccacttctgcttttcccgtctctcagatctcgaacacccctctgctgtccccatctttgcagctcccgccatcatgttcgacaacattgacttcacccagccctcgctgtgggtgtccgccatcagcattgcgttcaatcccacgttctggaacatcgcggcgcaatcagagtaccacaacaaggtaatcaccaagctcttcagcggaaacgcgcgctacgggtgctatgccctcgccgtggccatcttctcgctcggcatcttcagagactacctctacaacgaagccctcgccgaccaaccaacctcgccgctcctccagagccccctcgtgaaatactccgccatcccgctcttcctcacgggcaacaccctcgtcctaacctccatgtgggccctcggcgtcacggggacctacctgggcgactacttcggcatcctgatggacgcgcccgtgacctccttccccttcaacgtctccgacgcgcccatgtaccacggctccacgctgagcttcctcgccaccgcgctgtggtacggcaagcccgcgggcttgttcctgacgggctgtgtcgccgtcgcgtatgccgttgcgagacagttcgaggacccgttcacgggcatgatttacgcgaagagggatgaggagcgcgccaagggcaagaagggcttgtaaagccctttctgagaaccgagcgnggggnagcgcatgccccttatcccccgcgcgcgcagagcgcatgtgccttttgtggaagcgcgagcgagctgcgacacagctagctcgca

SEQ ID NO: 184403 - DNA, 238 bp, Zea mays
  Clone ID: MRT4577_99763C.1
caggtacgacgtccgggactgaaaacttttgctgtgtagcaatgtggcatgacttatgtaacttgtcgtatgatctgtttaattagcgtgtgaaaggctagaagatttcaatataggttgatagtttggtagtttaaaacatgcgtgctttggttctctactgtacgactggaaacttttgctgtgtagcaatgtggcatgacttatgtttggtgctttcaaaaagaatcaaaacatc

SEQ ID NO: 184404 - DNA, 381 bp, Zea mays
  Clone ID: MRT4577_99764C.1
gcttgtcagtggatctagaaagaagcatttaacgatcggtcgcaccagacgaaaccgtagcagcactcaactgaaggcgaccgcggccacaatgtccaccatccgcgctcattctttcttttgtatttccgttccatctattttttttgtattgtaccctatcatcacttttttatcaaacaactgtatagtatgctttatgcaaaagagcatgatgatgctttattttgaatctgaaagaatgttccagccaaagaaccttaactcagggataatctatgcattgtagtttcagaggtattcacggtagttattgagtttactaaaccatattcatcctctttttttgtttacgttttccacttaacttttaggtaaagg

SEQ ID NO: 184405 - DNA, 439 bp, Zea mays
  unsure (1)..(439): unsure at all n locations
  Clone ID: MRT4577_99765C.1
ggggggcggggggcggganaaacaaaaattcccacaataataaacttacaaattttccaggctaccaaaattaaaaaaaacacccaccccccatttaaaacaccataccccaactaacccacctcctccattttttttttcccaccttcatcctcgtgagggggggggtcatttttttttttcaaaaccttatcctcatcaatattaaaacccaattttagcatggggggaaccttcttcccaaacgtgttaggaaaataaaggtttaacccctaggggagcatctccaaaaaaaaaaaaaacctttcaaggtccttaacaaacttgcgatttttgcggggctccccgcccttacacagattctccataagggcgttacccgggttaatcctccatggtctttttggaggagaggtacccaaaaattttcaattccctt

SEQ ID NO: 184406 - DNA, 1235 bp, Zea mays
  Clone ID: MRT4577_99766C.1
gggtacctcgaggccggccgggagtttcgggggagtccttcaggcttccagcgatgtgttcctgcgcctgcgcgcgcctcctcccccggctcttcagcctcgctccaggccccaatctcagacccgccttcccgcacagcccgacgccagcccgcagccgcgccgtcgtcgcgctcgcgggcgcagcctcccgggacgacgcgcctgcgccgttgtccagcttcgacttcctcgcactgaagcgggagcttgatgaggaggaggaggcagtggtggctgttgatgcgaaggaaggtgctggagctgtcaatgaggacgatggagagttgggtgcggaaaggagtgcgggtggtacgaggagacggcggcggaggcagatggcgaggcgatcggctctgcttgcgaagcaggtgattagtgtgacctcggcgcggagtctcgggttcgtgtcgcagctctggatcgacaccgcctcgtgggctgttgcattggttgaagtgaagccaagcttactttcaggtgaagcggagaaattcctttttgaggacatatatcaggttggagacgtggtgcttgttgcgaatgaatctgtgatcgataatgaacataaactggttggattgcacagcttggtgggctacaatgtcgtaacttcccggcgacgcaatgttggcaaggtgcgtggtttcacatttgacatcagctcaggtgctatggagtctctcgagcttgactcttttgggctttcgattgtcccttctagcttggtaagcacgtactgtttatttgtcgaagacgtgctggatatagtctctgatacagtcgtggtgcatgaagacgccgtctcacgggttcaacggttaacacagggcattttgggcactcaaaacatccacgggcctggtggtgagattgacgagtacggtagatttggggggaggggaagggggaggaggaggagagcaaatggccagggaaagtctggtggccgagaactccgcagcgaaccgaagcatccggaggatgaatgggagctgccgatggactactgacacaaactcgccatgacagcattctgtttagtgctattgtattgccagaaaagtacatgctttgtacatataacataccagaggattgcgaattcagaaaagacgaaaggccctttcagccttgtcagagtttgatcgctttggcccgggtgggttagtataaaaagcgagattgtgttgcca

SEQ ID NO: 184407 - DNA, 213 bp, Zea mays
  Clone ID: MRT4577_99768C.1
tgtaagggtggcatgaatcccacgagctcgatcgtcagcgctcctagcagctcagcgcgagtcttaggaggcgcacagccgtaccggccgtgctttgcctgctgcttgcgggagggctcattcttttcgagaacacaagcaacaggaacatccgtctgccgtgcttgcttctgtgccctgctgtgtgcgcgtctgacctactctgctgtctct

SEQ ID NO: 184408 - DNA, 1703 bp, Zea mays
  Clone ID: MRT4577_99769C.1
ggatcccccgggctgtttgaattcggcacgaggagagagagggaggagaccttgcagaggagcgaagcaagcaaggggggaaagaggcagcaagggcggcgggctgccggaaggggaacatgctccctcctcatctcacagagaatggcgcggtgatgattcagtttggccatcagatgcctgattacgactccccggctacccagtcaaccggtgccacgagcgatcaaggctcctctggaatgagcgaagggagcctcaacgagcattgtctgtgtgcgagcgcaggaggagccttgcagggagcgaagcaagcaaggtgggaaagaggcagcagcaagggcggcgggctgccggaaggggaacatgctccctcctcatctcacagatgactattcaagaaacgtggaaggattctccgagagtgacgaaagaatggcgcggtgatgattcagtttggccatcagatgcctgattacgactccccggctacccagtcaaccagtgagacgagccatcaagaagcgtctggaatgagcgaagggagcctcaacgagcataataatgaccattcaggcaaccttgatgggtactcgaagagtgacgaaaacaagatgatgtcagcgttatccctgggcaatccggaaacagcttacgcacataatccgaagcctgaccgtactcagtccttcgccatatcatacccatatgccgatccatactacggtggcgcggtggcagcagcttatggcccgcatgctatcgtaagtgatctccatgcgtccagcctgttgtttcactacttgctgccggtgctagatgatgccctttgtccactttgaagacactttgctaggcaatgcggtcagtactggtgctttctttttgtttttcctgtgcgttattgcgtttagggttcttcatttgctagcacatgcaccctcagctggttggcatggttccgtcctctcgagtgccactgccgatcgagccagccgctgaagagcccatctatgtcaacgcgaagcagtaccacgctattctccggaggagacagctccgtgcaaagctagaggcggaaaacaagctcgtgaaaagccgcaagccgtacctccacgagtctcggcacctgcacgcgatgaagagagctcggggaacaggcgggcggttcctgaacacgaagcagcagccggagtcccccggcagcggcggctcctcggacgcgcaacgcgtgcccgcgaccgcgagcggcggcctgttcacgaagcatgagcacagcctgccgcccggcggtcgccaccactatcacgcgagagggggcggtgagtagggagccccgacactggcaactcatccttggcttatcagcgattcgactcggctctccctcgtctgaaactgaactctctgcaactactgtaactgtaactaaactgggtgtgcccggattggcggtcgttctgttctactactagtacctgctacgcgtcgttgggttgggtctggactagagagcgtgctggttctttgatgaacttggctggacttgagggtgttgactagcgcgaagctgagttccatgtaaaacttttgcttcaagaccgatgactggcggcataataagtagcagtaataaccattcttctgtgtcaaaaaaaaaaaaaaaaaaaaaaaaaactcgaaaaaaaaacccgggggatcca

SEQ ID NO: 184409 - DNA, 405 bp, Zea mays
  unsure (1)..(405): unsure at all n locations
  Clone ID: MRT4577_9976C.1
cccattctttaanttatttttgttttatnacncattggggcgccgaagaaaacaatgaaaatgatcaatgatcacaatgagctatgagaggacccaatggaaatgaatcctatgacgctgctgaagtttcatcgccggatgaatcctgacgctggatggcgtcgtcagctaaatcgctatagaaatatacctggcgctgctgccctccatgaaaggacttctacataccggacctgctgctgtcctacatcgagatcaagaaccaggacgatcatcttcgaagtcaacagtgtcgatcggcgtcgagcaactcgtagaagcggacgagtgtgttgtccaaaacactgaactcgttagcctcgtacctcgaataatcgacgacatgtaccagtgtcgatggcggcg

SEQ ID NO: 184410 - DNA, 1377 bp, Zea mays
  unsure (1)..(1377): unsure at all n locations
  Clone ID: MRT4577_99770C.1
gaaagggcccaacagctcaacagaaaagccaagcaaaggctgctgctgcatactggaaggcccccacgcgtccgctgtctgtgtgcgagcgcaagagaaagggagtcagagagagagagagagagggaggagaccttgcagaggagcgaagcaagcaaggtgggaaagaggcagcagcaagggcggcgggctgccggaaggggaacatgctccctcctcatctcacagtacgaactgaaaaacaagagtaaagaatttccgtgagatgagacagaatggcgcggtgatgattcagtttggccatcagatgcctgattacgactccccggctacccagtcaaccagtgagacgagccatcaagaagcgtctggaatgagcgaagggagcctcaacgagcataataatgaccattcaggcaaccttgatgggtactcgaagagtgacgaaaacaagatgatgtcagcgttatccctgggcaatccggaaacagcttacgcacataatccgaagcctgaccgtactcagtccttcgccatatcatacccatatgccgatccatactacggtggcgcggtggcagcagcttatggcccgcatgctatcatgcaccctcagctggttggcatggttccgtcctctcgagtgccactgccgatcgagccagccgctgaagagcccatctatgtcaacgcgaagcagtaccacgctattctccggaggagacagctccgtgcaaagctagaggcggaaaacaagctcgtgaaaagccgcaagccgtacctccacgagtctcggcacctgcacgcgatgaagagagctcggggaacaggcgggcggttcctgaacacgaagcagcagccggagtcccccggcagcggcggctcctcggacgcgcaacgcgtgcccgcgaccgcgagcggcggcctgttcacgaagcatgagcacagcctgccgcccggcggtcgccaccactatcacgcgagagggggcggtgagtagggagccccgacactggcaactcatccttggcttatcagcgattcgactcggctctcgctcgtctgaaactgaactctctgcaactactgtaactgtaactaaactgggtgtgcccggattggcggtcgttctgttctactactactagtaccttagtacctgctacgcgtcgttgggtctggactagagagccgtgctggttctttgatgaacttggctggacttgaggtgttgactagcgcgaaactgagttccatgtaaacttttgcttcaagaccgatgactggcggcataataagtagcagtaataaccattcaaaaaaaaaaaggcggcnnnnnnnnnnnnnnnnnnnnnnnnnnnnnnnnnnnnnnnatcc

SEQ ID NO: 184411 - DNA, 181 bp, Zea mays
  Clone ID: MRT4577_99771C.1
gtcgttccattccccggcgctgaggagagagaaagcgcgcgagcaactctgggagggggaggcacagcagccaggcaggcaggcaacgccccctccacccttttttttacaagatactggaatctcattcttacccacatttatcatttttgcctgctgattccttcaacccattgagaga

SEQ ID NO: 184412 - DNA, 479 bp, Zea mays
  Clone ID: MRT4577_99772C.1
gaggtcggccggggagtcacgacctcttccattcgagtgactcctcatcctcgtgcgccgtcgccggcgctttcgtcgattccgtacgctagcttacacgcttccgtcgcctccgccccgggagacagagccttgcacatgaaccgggcggaccatggggaagatgaacaagagcatggaccagaactgctgcatctactgctgcctccagttgctcgacgacgacaccctcgggcacacacgacaagggcaggcactggaagtgccacgtatgccacaagaagctctgcgccggctctggtgtggccatacacgtactgcaggtccacatggagtacctgaccaacgttcctaaagcttagcctgctagggaggtatcggatatagagatcttgggaatgcaggtaattactgcacatgttttgtgctgttcattatggtatatacgaaggccctgcatcaatgggacgctatgtaga

SEQ ID NO: 184413 - DNA, 317 bp, Zea mays
  Clone ID: MRT4577_99773C.1
gcgtcgcgtgagagtggggggctgcacattaagaacccctgtagcgtgaaccatccacccgatcttcaagagctacagcctgccgccgcacgagtgcggctaccccggcagcgtcttcaacccgctcaacttcgcgcccacgctcgaggccaacgagaatgttctcgccaacgagaggctggccacgctggcgctcctggccttactgatgcagcacaacgtcacctgcaaggggccctgcgacaacctactgcagcacctcgccgacccatgtgacaacaccatcatgcagaccctgtcgggttgagtcgacagtc

SEQ ID NO: 184414 - DNA, 189 bp, Zea mays
  Clone ID: MRT4577_99774C.1
atagattatgatatttctgtacagatgattgagctatacaatgaacaagtgagagatctccttcaggatagtggaaacagaagattagaaattagaaatacatcacagaaaggacttgcggttccagatgcaagcatagttcctgtcacatctacgtcctgatgtggttgaactgtgaatccaggccaa

SEQ ID NO: 184415 - DNA, 741 bp, Zea mays
  Clone ID: MRT4577_99775C.1
ggggcgcattttgaaggctggcaggaaggcctgatcacccttctcccctactacaagtaccagcccaactccgaccagtaccactggtgcttcgacagtgcgggcagcgacaagaagcgtgctccagcatggtgcgatcgcattctgtggcgaggcaaggggctgaagcaagtccaatacgggacgtgcagctacaggctgtcggaccaccggccggtgagagcggttttccacgccgaatgcgatgcgttatcggaggcggtgtcgcacaagtaaaaacattgccaggctgctaccccgccgcacagagcgcccagcagcaagcaaagcgactgatgagacgtctattcaaccagagagtgatggatatggacgacggcgcgcgagtgccaaatcgagagagaactggacgcatgattggaccgagcgagtagagccaagaagagatttcttctgagacgaacatgaagttgttgtttttttctctcgccgattgagctgtgtgcagaagaggtgcatggggatagagtaccaggatccaagaagaggtgctggttttttttggctttgttctgttggtgacggtgttcagattcttttttccctcgtttaaaagctagctccttctggggctttgggcttgtgtctgaaagaatatcagagcctaaaaacggcatctgcacattctgttgcttaatagattggagattactgacgaaaaaaaaaaaaaaaaaagcggcc

SEQ ID NO: 184416 - DNA, 548 bp, Zea mays
  Clone ID: MRT4577_99776C.1
gaccaccggccggtgagagcggttttccacgccgaatgcgacgcgttatcggaggcggtgtcgcacaagtaaaaacattgccaggctgctaccccgccgcacagagcgcccagcagcaagcaaagcgactgatgtgatgagacgtctattcaaccagagagtgatggatatggacgacggcgcgcgagtgccgccaaatcgagagagaactggacgcaagattggaccaagcgagtagagccaagaagagatttcttctgagacgaacatgaagttgttgttgttttttttttctgtctctctgtctctccctctgaacgccgattgagttgtgtgcagaagaggtgcatggggatagagtaccgggatccaagaagaggtgctggttttttttggcattgttctgttggtggcggtgttcagattcttttttccctcgtattaaaagctagctccttctgggctttgggcttgtgtctgaaagaatatcagagcctaaaaacggcatctgcacattctgttgcttaatagattggagattaccgact

SEQ ID NO: 184417 - DNA, 2513 bp, Zea mays
  Clone ID: MRT4577_99777C.1
atctcatcgcataaaaagttgttactattagtaataaatgttcattggattgaatatgcagagtactttgaagtaaattaataattgtgtgttgttccagtgcaggtatattagagcattttttgtgtatggaggttgcaatttagttttggcagcagctgcagcagcaatctgtgcttatattgcacctgctgctgctgggtctggtattcctgaagtcaaagcttatcttaatggggttgatgcctattctatattagctcctagcacactctttgttaagatttttggttcaatacttggagtttcagctggattcgtgctaggaaaggaagggcccatggtacatacaggggcatgcattgccaacttgcttggtcagggtggatcacgcaagtatcatcttacttgtaactggctacgctactttaagaatgacagagacaggagagatttgatcacatgtggatctgcagctggtgtggcggctgccttccgtgcacctgttggcggtgttctgtttgctcttgaagaggcgacatcaacatgaggcacttctctttctggtggaacattctttacaactgctgttgttgcggtggtattgagggggctgattgagttctgtcgtagtggaaaatgtggtctctttgggcaaggtggattgatcatgtttgatctcagttcaactgttgcccgctactggtcgcccgtgcgacttgctctcatcgtccttgggataattggtggaatctttggaggcctcttcaactatctgttggacaagatcctccgagtttatagtattatcaacgagagaggtgctccattcaagatccttctcactataacaatatcaataatcacatcaatgtgttcctatggtcttccttggcttgctgcatgcactccatgccctgttgatgctgtggagcagtgtcccactgttggccgctccggaaattataagaacttccaatgcccaccaggacattacaatggtcttgcatcactcttcttcaacacaaatgatgatgccatccgcaatctcttcagcaacggcacatcgactgagttccaaatgtcatctcttttcatcttcttcactgctatttactgccttggactagtgacttacggtgttgctgtcccatctggtctctttatccctgttattcttgctggagccacgtatgggcgcatagtgggaactcttcttggatccatatctgatcttgatcctggcctttttgccctacttggcgcagcatcttttcttggtgggacaatgagaatgactgtgtcagtctgtgtgatccttctagagctcaccaacgatctccccatgctccctttagtcatgcttgttcttctcatatccaagaccatagcagatagctttaacaagggagtttatgatcagatagtggtgatgaaaggcttgccgtacatggaggctcatgctgaaccatacatgaggcacttggttgctggtgatgtggtgtctggcccactaatcaccttttctggggttgagaaggtggggaacattgttcatgcattaaggttaacgggccacaatggtttccctgtgcttgatgagccacccataacggaaaccccggaactggttgggcttgtgactaggtctcatttattagttttgctgaacagcaagaatttcatgaagggacgggttaaaactagtggtagcttcgttctgcgaagatttggtgcatttgactttgcgaaaccaggttcaggtaaaggtttgaaaattgaggacctggatttcactgatgaggagatggacatgtatgtggatctccacccgatcacaaatacatcaccttacacagtggttgagacgatgtcactggcaaaagcagcaatccttttccgggaacttggtttgaggcaccttttggttgtgccaaagacaccagacaggcctcccatagtcgggattctcacaaggcatgacttcatgcctgagcacattcacagtctgttcccaaacctcaatcctcacaagtaccattcagcatcaatggcaggttgacaaggagactctttctgcttctcatctatttggcattattcgggtgctggctgtatgtaaattgcaaaggtgtatgcgtatctggttttcaattggatccatctcatcttctctacatagttttgtttgtgtggattttgtagcatatgctctttttgcaataaaaaaaatgtggcagttgtttggctggtgactgcctattatgagcctgcggcaataaatgttcagcaaattgcggagtaaacattgagagctccagaacatggagagaaagtgtgtattgtatatttgcgttgttcctgtaaagcatgtttagtcaaactcgaatattgtctataacaccgagtaaatctcaggcggaaacatgggcgagctttctaagtacagatttcttgctattgtaagtacttgaattgagattcgtaacatttctgctctgctctgctctgct

SEQ ID NO: 184418 - DNA, 2004 bp, Zea mays
  Clone ID: MRT4577_99778C.1
ctccaccccggccggggggttactacatggtcgtgcatgcatgaatgctcgctcctgcatgctactattaaacaaggaagccatgggagagaacaggaagctgttcttgttgtagcagatcacccggtcaaggctggtgacaaacaagctgctgcaccgctgccagcaactgcatggccacggatctgtatctggggtttctgaaaccttggggaagagacccttgaatgggaacaaggatacacttgtgtacagtgtgtttgccagcacctggaatgtcggcggcgttacaccatccgatggcttggacttggaggattggctggacacaagggctaacgcctacgacatctacgtcctagggttccaggagatagtgccactgaacgcgagaaatgtgctgggtcctaggaagagccgcgtgtctgccaagtggaactcgctgatcggggaggcgctcaacagaaggtgtcgagaagaaggcggggcgaacacgaacagcagcgccaaggacgacgaaggctctgtggagggatcacagggcttcagatgcatcaggagcaagcagatggtcggcatcttcacgtcggtgtgggcgagaagcagccttaggccgctcatccgtcacctggatgcgtcgtgcatcggctcgggcatcatgggctgcctagggaacaagggctctgtttcgatccggttcgtgctgcacgacacgagcttctgcttcgtctgctgtcacctggcttcaggcggcaagcaaggggacgtgctgctgaggaacttggacgtcgcggacatacttgcaaggacaaggttccctggccttgcagctcaggagttgccggagaagatccttgatcatgagtaggtgtacattagctcacccttcaaactgcttcaacctcagcctcatatttccatcttctagaatatggattctactataagtgatccctaaactaatggtttagtctgatgtgacatgtttacatttttactaaatgtgcctgtctcctttgtgaatgaaaaaaaacgaaggggggtatccgaaatggcatcacgcataaactgcagacatcaccctgtgcaccatgtctctgtggactgtttatccaaacaatatgtgttttctttcccgtttgtgcagccaagtggttttgctcggtgacttgaactacaggatatccctggaggaggccgagacgaggtcgctggtgagagccaagagatggcccgtcttgttggaaaacgatcagctgctgttcgagttctcgagagggcggcattttgagggctggcaggaaggcctgatcaccttctcccccacctacaagtaccagcccaactccgaccagtaccactggtgcttcgacagtgcggggagcgacaagaagcgtgctccagcatggtgcgatcgcattctgtggcgaggcaaggggcttaagcaagtccaatacgagacgtgcagctacaggctgtcggaccaccggccggtgagagcggttttccacgccgaatgcgatgcgttatcggaagcggtgtcgcacaagtaaaaacattgccaggctacagagcgcccagcaagcaaagcgactgatgtgatgagacgtctgttcaaccagagagtgatggatatggacgacggcgcgcgagtgcaaaatcgagaaagaactggacgcatgattggaccaagcgagtagagccaaaaagagatttcttctgagacgaacatgaagttgttgttttttctgtctctctctctccctctgaacgccgattgagttgtgtgcagaagaggtgcatggggatagagtaccaggatccaagaagaggtgctggttttttttggcattgttctgttggtggcggtgttcagattcttttttccctcgtttaaaagctagctccttctgggctttgggcttgtgtctgaaagaatatcagagcctaaaaacggcatctgcacattctgttgcttaatacattggagattaccggctaaaa

SEQ ID NO: 184419 - DNA, 199 bp, Zea mays
  Clone ID: MRT4577_99779C.1
acgcatgctgtcggggtccgctggatccgtataaatcatgctgtgataccggagagactcgatcgctgtgctggccatatgtggaaaccgcaatgtgcccattattgacacgactcgagtgcatacacaaatagtagacggactagactgatgccatagcaagggcacgggctatgtgactgctggactagagcgatag

SEQ ID NO: 184420 - DNA, 284 bp, Zea mays
  Clone ID: MRT4577_9977C.1
gttgtagactggcacgaggctttccagtacgcgccgccgacggggaagaccagcgtgcggctggtgttaacataccgcgaccagctatgctccacgtgagctttccggagtcacagaacctgacctgtggagtgtctgacgggccactgctttcacggccagggctgtaggattctggttcagagtcaagacgtacgcctgtcatggcggccgccggcgtacggagaacgggccgactacagcacatggagactaagtcggtggttcatgtgatagatgctgga

SEQ ID NO: 184421 - DNA, 450 bp, Zea mays
  Clone ID: MRT4577_99780C.1
ggaaaaaacgaaaacgggtaaacggggttgtcctagggcggaggggcgggggcccccccaaatttacaggtaacaggatttttttttaaaaaacagggggggggaaaaagcccctacgggatcccttggacaggaaacaattcaagaaggggttttttttttcactcccccccataaaacgggacattcgaaaggggggccccccccggggggggtgcaaagctacaaggccccccgggaaaggcttcaacatcgagcaaatgggggggacaaacaaagccaaaattttttttgccacgctgcccttcacgccattggcgggggcctttgactaaaacccctaccttgcaagaaaaaaaacactaccctatagggggccttcccaacccccctgatatgtccatcggcccatgccagtatgccacgaccaatgcttttgctcattcccgg

SEQ ID NO: 184422 - DNA, 379 bp, Zea mays
  Clone ID: MRT4577_99781C.1
ccgacgcatgcgcttctcatgcttctctgtagttcccactatccgaacgggcgaaaagtcaatgttctagttccgtcataccatacaatgcaaaacgcgtgcttcacgatggtgtgtcctttgcaagaaaatgtggtacatgcttcaactacatgccccagcttgcaaggattcagactgcaatgtgccgtggtgcatggatctgaaggagcaccttataaggttgcaacaccagtctgattccacgacgagggctgctgtgaatgaaatgatgaggcacagagcgacggaagtcgcttcaaactaataattgtctctgtacaggtatactttgaggaaagaggataggaagaagtatgcatacagagtttcactcctc

SEQ ID NO: 184423 - DNA, 723 bp, Zea mays
  Clone ID: MRT4577_99782C.1
cttctcatttcgagtgatccgcggcgccgtcaacaaagacgacagctcatggcgacggcggaggagggcggcaatggactggagttcctatcagatccggtggacaggttccccttgccggatcttgcatccagcgatttgacgcccaccggtgagccagatactggtctcacccaatcagctgctgaatcgagtatgggatatgttggcgacttgccgcttacaatccaattgcccatgaacaacggctgcgaagaactgagcttgtcggcggccgattcacagcaatcaacaggaaaggatgaccctcaagcccccgggtggacaaaaagggaaaagaaggcaaccgttaacagttagaaataattcattcttactgatgcaaggtttgtattgggcgagcccctatcgagcatgcaccttgtgctggaagagtatgtgcccttcaaaaaaccttaagaggatacgcagagaagaaaactgataccgtatgaagcaggacaatacagagtagaagttgaaaaaggttcaaaatattatgtacaccggtaccacccagagagacatgacaagtggtgcagagtagtgtacatagtgcacgttcttgctgagggtgaagaactctcatgggaatgtggtaacttcgagctcacaggattgctatgctgccattcagttaaggtacattagctgtcagcctcacttgagaaacctatatatgct

SEQ ID NO: 184424 - DNA, 363 bp, Zea mays
  unsure (1)..(363): unsure at all n locations
  Clone ID: MRT4577_99783C.1
cacggaaaagatgatntgtgaggaggatacgctctctgccatcaaggaagaaagaaacaaggtccgccagctccaagaagagcttgacattgatgtagcttgtgcatggcagagcctgagagaaacgatttggttgattacttcagtgagcaaatctcgaccttttggtctactggcaatgggtgggcgcagacttatgggtcaaggggcgtgaagccttccgaaatttaccgtgacgttagccgccccgatgacttgaccgtgttctggaccaagacggagccatacatgacgacgtctccactgaaggggatgctgcctgggccactccgcactttcaactggtgctaaggacggaatgac

SEQ ID NO: 184425 - DNA, 277 bp, Zea mays
  Clone ID: MRT4577_99784C.1
ggaaatgatatcagtcactgggtaccaaagcacgtgaatggaccattagagggcatacatgtttcatcaatttcacgtggaccttggcatacagccgtagtaacttccgctggacagcttttcacatttggtgatggatcttttggggttctgggccatggagatcgtgagagtatctcggtccccagggaagttgaatctctcaaagggctacgcacggtgcgggcagcttgtggtgtttggcacactgctgcagttgtagaagtcatggctggga

SEQ ID NO: 184426 - DNA, 838 bp, Zea mays
  Clone ID: MRT4577_99785C.1
ttgggtacctcgaggccggccgggtactggtgcggcaaacaatacatgtgcgcacaaagggtgtcgcagagatattttcccgttcagctacaactatgtgcctttcgaccagctgccgcctatgtgtcctgatgggcaattctgcccagacgagggggatcattgtatgcctgtagccgctcaaggtgaaggctgccaaaaggaccgggacgacgaatgcgcccatcctcccaattggagagacctctccggttggctcaacaccaacggctccatctgcctcaactttacgtgcgaatacgccaacatcaccctcggccagacttgcatcaacgacaacacacgctacacgggctacacgaacgagggcgtccagtacgcgcatatcgtttcgagggacaattgcgccaacgggctgtactgcgatggctcgacgttgcagtgcttgaaggtgaaacctgtcggagcggcgtgttcgggcaacaaggagtgtatgagctataattgcccggatgacaagaagtgcggcaggaacgcggacgagccgatccatccgccgacgtattcgtttgtgctgataggcttgggcattgttatattaatagttggcgtctttgtcggtttatggtttgtgcatcgtaaacaacgcgccgagaaccagcgccgtctggagcagtactggaacgagcaagtggcatatcggcagagcatcatgtcgatgtcgaatgccaaaaagtccctcttgggacaagtcgccaaaagaagacgattttcctcgcaccccccgtggcgcccatcccccgcccacgtgattctgacatctactcggacgctcaag

SEQ ID NO: 184427 - DNA, 771 bp, Zea mays
  unsure (1)..(771): unsure at all n locations
  Clone ID: MRT4577_99786C.1
cctgcaggttccggtccggaattcccgggtcgacccacgcgtccgcatggcctccctgttaaggatgttccaaagcacagctgggtctgggggagtgcaagaagatgccctgatggcagttagcacactggtggaagtgttgggtggtgaattcctcaagtacatggaggcctttaaaccattcctgggcattggactgaaaaattatgctgagtaccaggtatgtttggcagctgttggcttagttggagacttgtgccgagccctgcagtctaacatcttgcctttctgtgacgaggtgatgcagctgctcctggagaacttggggaatgagaatgtccacaggtctgtgaagccacagattctgtctgtgtttggtgatattgctcttgccattggtggagagtttaaaaaatacttagaggttgtattgaatactctacagcaggcctcccaagcccaggttgacaagtcagactttgacatggtggattatctgaatgagctaagagaaagctgcttggaagcttatacgggaatcgtccagggattgaagggagatcaggaaaacgtacacccggatgtaatgctggtacagcccagagtagaatttattttgtcttttattgatcacattgctggagatgaggatcatacggacggagtggtagcctgtgctgctggtctgataggggacttgtgtacagccttcggnaaggatgtactgaaggtagtagaagctaggccaatgatccatgaactattaactga

SEQ ID NO: 184428 - DNA, 278 bp, Zea mays
  Clone ID: MRT4577_99787C.1
tattattttatatatcttgtcaagtgttttttggttttttttttttttctggagacaggggagcaatttcactgaagccattacagaacaccgtacatgttttaacccatcttctctactagccagaagtggtgcataatggaatgaaaggattcatgccatactctacaaggggctgccggtaaaaaacaacgaagtgtgtcagggggggagaggcttcttacattgaaagggggcctgtgggcaatagatggctttccaatccgggatgaaaaacc

SEQ ID NO: 184429 - DNA, 170 bp, Zea mays
  Clone ID: MRT4577_99788C.1
gatacggcaactgaatcagacggatcattattttggttgaccaatatacagtgatggtacatacaacatgctgtggaccccactggactatcaacaggtgtacaatccaaatgctgttgggtactgaagcgctgatgatctgctatggacaccatcagcatagacgaaac

SEQ ID NO: 184430 - DNA, 394 bp, Zea mays
  Clone ID: MRT4577_99789C.1
caatactaaaaccaccgtatcctatcaaacataatgctttgatatcctgtggtatttcaactagggatcaaaaacgagacaacctaaaagagctcagggcgctaagcaaaaaaaacccgcgggccgccgccacgccggcgttaaaaaaaaacacccagcagaaaaggcacgcggaaaaggccgacgcactacgccaggggcggggggcgcaaaaacatccaaaagtctttctagaagcaaaaagattatggcgggccgggaggaggcctgatgtgcctaggggaaccaaaaaaagggctaggctgaaaaaaactgggggacgaacaaaaaaacaacatattatccatccggaggagggaaacaaagcactcacgtaggcagcttctccagaaac

SEQ ID NO: 184431 - DNA, 838 bp, Zea mays
  unsure (1)..(838): unsure at all n locations
  Clone ID: MRT4577_9978C.1
agnataacagcactgcgccaggaagctgtgtagagggtaattcgccttacctggcttctgtcgtgaacgatcctaataagaacagcttggcgcctctagtccaatgcacttcacacatgtgcccaataagggtgcattggcatgtcaaggttaactacaaggagtactggagggtaaagatcacggtgacaaacttcaattaccggatgaactactcgcaatggaacctggttgcgcaacaccccaacttcgacaatctgaccaccattttcagcttcaactacaaacctctgaacccctatggagtgataaacgacacggcgatgctatggggcatcaagtactacaacgatctgctcatgacggccgggccagacgggaacgtgcagtctgagcttctgttccggaaggagccgtccacgttcaccttccacaaaggatgggccttcccgaggcgagtctacttcaacggagacaactgcgtgatgccgccgccggacgcctacccgtggctgcccaacgccgcctcgccgcggctgtcgccttcgcttctcctcccgctcgttgcggctgcttggacagcattcgcagtcctttcgtgatgggcccatatgcgtagggaaggcaaggcaaggcacacaatgtcccatgacaagttctgacctgattcagcgttgttgcttgctgctgatcattagtcgatctgttgcgaagttttatttggtgtcttgaatcttgattcaggaacaggttcagatgtgcattcacgtactaccaagcatgtacattctcaatacttgtaaatttctgcaaagactgactggcaagtgacagtagt

SEQ ID NO: 184432 - DNA, 255 bp, Zea mays
  Clone ID: MRT4577_99790C.1
tcggctttggtcggttcttgggacccttgatcccgagcgtggttaattcacgcattgaccggcgaacgccaccgtattccattttgaataccttcgcgcttagcgtcatggacgggtttttcaaaacgatcggggggggtgggcctaacgttccggcgggatcccaccccgcgggcgggagccaggccgcggcagggggaggcgccacccaacggacgcaatattccgatgtgactggtacttcaggcattggct

SEQ ID NO: 184433 - DNA, 298 bp, Zea mays
  Clone ID: MRT4577_99791C.1
ctgaccggctagagccatggagagcctgagaattatatacacctatgggtcgttcataacaacccaaagaatcgactcatgctgcatgtgctcgaacgccgataaatgctgcccgaatgctgtgctgctaatccaggatcaatgcgctgtttgaccacttcaagatggccctggattgtttctttgccgtctggtttgctgctggaaacgagcggatatttggtggccggtcatctgctgcatgatgcaccgaactcgtacaggtagtgcattgtgttcctcacttctagttgcattg

SEQ ID NO: 184434 - DNA, 544 bp, Zea mays
  Clone ID: MRT4577_99792C.1
aaaaaaaaaaaaaaaaaaaaaaaaaaaaaaaaaaaataaaaaaaaaccaaaaaaaaaaagaaaaaaaagaaaacaaaaaaaaaaaaaaaaaaaaaaaaagggggctgtgagacacaggttttggttccttttagggagggtaaacgggcccgcatggccaaaaaaaggaaacaatagggggcccctggggaaaatgtgatcccgttaaaaattccaaacatcactgaacccgtaacatttaggaaaaaagccgggggggcttaaggaggaacctaaccaacattaattgagaggcgctaactgcccggttcccagtgggaaaacctggctgaccgactgaataaataaatcggccaacccgcggggagaggcgtttggtgattggggggcttttccctttcctccataaaagaatgggtgaactcgggaaatagcttggggggagcggcctacttaactcaagggcgcgaaaacaggtcatccacaaaatcgggggataataggggaaaaaccatggaagaaaaaggccaaaaaagggcctgaa

SEQ ID NO: 184435 - DNA, 702 bp, Zea mays
  unsure (1)..(702): unsure at all n locations
  Clone ID: MRT4577_99793C.1
tcggccggggtctagcgccaggacggataccatccctgtcccacgcacagtagtcggaacctcgtagcttccgggccgaagatccattgcgcaacgtactggtgggtctgctgacgtggtgcngcgatgaccacgaccgtgctcgtggcgtgcaatatcaatctaccttggcataggccgtatttaagactcgagaacaactgcgaaatggcggttttgtgcaagatgactaaagcttactgcttggtatcgattggagggacatataacttctacagtgcctaagacggtgctcttgcaccatgccatgcctgtggacaagacctctattgcggcgactagaacaatagggcgacgtgtgtgtcaggaaacaataatggatttttattgccacatactacaaccgatcaatagctacagcatttgaggaatcgcttgactgatcaagtggaggaaaaaagtattgatgagaggatatttgtcctagcgaaatggatagcctggagtgaccatgatggacttacgcaccctgtccttgacaaggagactgaggagttgattgcaaatgtattaagcagccaggacgtgttacgcacactattgctggaaatatccttgtggggaggtactggaacttctctaacaggctgggttagagagatgctcatacatgcgctgataaccttgaagagctctacactc

SEQ ID NO: 184436 - DNA, 481 bp, Zea mays
  Clone ID: MRT4577_99794C.1
tttttgtacgttaaatgcgtatcagcatagatatactagtagcattaaaactagtagtttaggacagagttaacaaactcgcacggatattggccatgcatgatattgaaatccagaatcacttgattacataaagcatgtgcatcccaattcccaaggcgtaaggcgtgcagctaaatgtacataccgcatgaaaatttgacaaattctatgaatgtaactagacaattagtagatggataaaaaaataaaagcacgcctaacaccaattacgcaggatatattgagctgaaggtagcacggggtattaaatgaacgacacaagtaactggtggaacgctcgcgagctttcattttgggtcccaccaagggtttctggatccaacattccacatgattaaccaccgtctaccaccaaaggaaaatactcgtcttgaaaaaagaaaaccctagcgattcctctcagcaggcaatggggcga

SEQ ID NO: 184437 - DNA, 141 bp, Zea mays
  Clone ID: MRT4577_99795C.1
tacagtacaaatacggggatggaggacatggaacaggctcttaagggtgggatgggtaccgtgcaacgacggtatacacactgaccagcgtggtgcactaggcactaaccaaggacttgggggggcccatcaacatgacta

SEQ ID NO: 184438 - DNA, 1485 bp, Zea mays
  unsure (1)..(1485): unsure at all n locations
  Clone ID: MRT4577_99796C.1
ccgccacgcgtcnctnggtggatctctggggccccacgaaggcgaggctgagaacggcagggtccccgccggaacttccgccgccgccgccgccgccgggccgagggtgaagaagcccggggtcctctcacagagcgcctccttcccggcgcggggcgcggtggcggtcgcggccaagaaggccgcggcggcggttgctacgcccaagcaggccaagggcgccgtgcccattggatcagagacggcggcagcgcttgcgccgggcggtggagaagaaggcgagtttggcgcggacacctgttgctcgccggccgatgcttgttaagtctggatcagtggatgcggctgccccaaatgacacagttgttgctgtccaagagtcagatgaaaatacggacaaaccattgaaacaaacacagccagggaaaacagaggatgatgtgcactccaccacatcaagtaccaatactccccgtgcagcagctcgtaagagtgctgctgctgctgctgctggttttagtttcagattggaggagcgtgctgagaagagaaaggagttcttccaaaagcttgaagaaaaaatccatgcgaaggagctggaaaaaacaaatttgcaggagaaatctaaggagagccaagaggctgagatcaaactactgaggaagagcctaacatttaaagccacacctatgccaagcttttacaaggagcagccacccaaagttgagttgaaaaagattcccccaacacgtgccaggtcaccaaggctcggccggcacaaggcagccagttctgctactgctcctgctcctgcagatggttctgtatcatgtgggagcccacggagcactgcaaattcgggcaaggtaaatgaaatcatggagaacatcaaacctcgtgtccctgctagaaaatctattcagaggccagtcacgaaaactccattgcaagtgtctgccaccacaaaggctgaaccaagacccatagctacaaagccgaaaatcgcaaactcgaaacctaaggtttcaagggcaaaggttgcgcaggcgcaaggaaactcagctgaagtccctccttcagaaccttctgcctcggaagagctagtagtcgaacatggcgttggagaagctacaggtcctgatctggcttcacaattggttgcttcgaatgaagtcccagtccatggttgatcaattgcgcattttgcctatttatttccttcttgcagttctgtgaatagtgagggtgtgtgcttcattgaaagttgaatcgctcaaagtgccatggtttatcgtttctggagtaggcatccaaatttttttttcagcttgtcattgagcatgccatgtatattgcttgatattgtgttcatgtttaaaattcccaatcttgtgtatattggatttatatgtctttggacatcctaggattgttgcaatacgtcaatgcaatttgtgcatgaaaaaaaaaaaaaaaaaagcggcc

SEQ ID NO: 184439 - DNA, 403 bp, Zea mays
  Clone ID: MRT4577_99797C.1
aaaacggccacaaaacaatccacaatttgcctcagcgtattgcaacaatcctaggatctccagcgacatacaaatccaatatacacaagactgggaattttaaacaagaacacaataccaagcaatatacatggcatgcccaatgacaagctgaaaaacaaaatggatgtctactccggaaacgataaaccatgacacttcgagcgattcaacttccaatgaagcacacaccctcgctattcacagaactgtggcgtctccaatgccatgttcaaccgtgaaatcttctggagcagcaggttctgaaggaggggcttcagctggggtttcttgcgctcgcgcaaccttcgcccttgaagccttaggtttcgagtttgagatctttggccttgtgaccacgggt

SEQ ID NO: 184440 - DNA, 367 bp, Zea mays
  Clone ID: MRT4577_99798C.1
agatgtttcttttataaaggcaaggtacacaagattggggattttaaacatgaacacaatatcaagcaatatacatggcatgctcaatgacaagctgaaaaaaaaatttggatgcctactccagaaacgataaaccatggcactttgagcgattcaactttcaatgaagcacacaccctgactattcacagaactgcatgaaggaaataaataggcaaaatgcgcaatcgatcaaccatggactgggactccattcgaagcaaccaattgtgaagccagatcaagacctgtagctatgggtcttgaatcagcctttgtggcggcagacactcgcaatggagttttcgggacaggcctgtgaatagat

SEQ ID NO: 184441 - DNA, 2146 bp, Zea mays
  Clone ID: MRT4577_99799C.1
gccggccgggctggaccgcactcggcactccactctcctccccctgaccccgagttgagtccactctgctgtccgctcacaccaactcctcggctccccctccacgcagccctaaccgcgcctcgcctcagtgggtgggtgggtggttcgcctcctcatcctctcctccccgcacgtccacggcgatggcgcccgcgcccgcgcactgctgacccacccccgccgcgcactctcatgaccgtggtttggtaggtggggcggaggttggtaggccgggacttgccggcaggcggttacgggaggcgcggccgcgatcccgggccggatctggacgccgcgatggaggacgccgttgccgctgagaatgggatcgagggggagggctacgtcgtcgtcaaggcggcggcggccgcggaggcggagggggactccggcgccagcgatcgtggggatctcgccgcccccgctgaggacgcggcgccggccggatctgaggacgccccggccccggcggtgacgccggacgagaccgcggcacctgccaaggcgccggccaagaagggtggatccggggacgccgccggggtccggaaggcgaggccgcagaacggcagggtgcccgccgccgccgccgccgcgccgagggtgaagaagcccggggtcctctcgcagagcgcctccttcccggcgcggggtgccgccgccaagaaggcctcggcggttgctactcccaagcaggccaagggcgtcgtgaccaatggatcagaggcggcagcaggttaccgatgctcagttccttcattatatatagtgatagcgataggtgttctcggccgggcagccgagaagaaggcgaattcagcgcggacacctgtcgctcgccggtcgatgcctgtcaagtctggatcagcggatgcggccgccccaaatgacgcaattcccgctgtccaagagccatccatgaaaacaccgacaagccattgaaacaaatgcagccagggaaaacagaggatgatgtgcgctctaccacatcaagtaccaatactccgcgtgcagcagctcgcaagagtgctgctgttgctgctggttttagtttcagattggaggagcgtgctgagaagagaaaggagtttttccaaaagcttgaagagaaaatccacgcaaaggagctggaaaaaacaaatctgcaggagaaatctaaggagagccaagaggctgagatcaaactgctgaggaagagcctaacatttaaagccacacctatgccaagcttttacaaggagcagccacccaaagttgagttgaaaaagattcccccaacacgcgctaggtcgccaaagctcggccggcacaagccagccaattctgccactgctgcttctgcggatggttctgtatcatgtgagagcccacggagcactgcaaattcgagcaaggtaaatgaagcgatggaaaacaacaaacctcatgcccctgctagaaaacctgttcagaggccagtcgtgaaagctccatcacaggcgtctgcgaccacaaaggctgaagcaagacccgtggtcacaaggccaaagatctcaaactcgaaacctaaggcttcaagggcaaaggttgcgcgagcgcaagaaaccccagctgaagcccctccttcagaacctgctgctccagaagatttcacggttgaacatggcgttggagacgccacaggtcctgatctgaccgcgcaattggttgcttcgaacgaagtcccagtccatggttgatcagctgagcattttgcatatttattcccttcttgcagttctgtgaatagcgagggtgtgtgcttcattggaagttgaatcgctcgaagtgtcatggtttatcgtttccggagtagacatccattttgtttttcagcttgtcatcgggcatgccatgtatattgcttggtattgtgttcttgtttaaaatttccagtcttgtgtatattggatttgtttgtcgctggagatcctaggattgttgcaatacgctgaggcaaattgtggattattttgtggctgttttacttttagccccgccgccattcttgttggttgtacatacttaggggctgtttcgttgtatacttgaggtgccagagaattttgccacactaccacatgtc

SEQ ID NO: 184442 - DNA, 1020 bp, Zea mays
  unsure (1)..(1020): unsure at all n locations
  Clone ID: MRT4577_9979C.1
cctcgaggccggccggggacccgcccactccctccttccctgctccggtcgcactccgtagttcctccgcgcacttacgtacagcagacagacacgagatcgagtggtacagggcccgccagaaacctcacgagctagctgggttcctgccgcgccgccgatccacgcatggcgccgccgccgctcctgcccgcgcgcttcgtcgccgcctccgtcgcgctgctcgccgtcgccttctcctcctctctaacgcgtccgtcaggtgcatacgatccgctcgatccgaacgggaacataacaatcaagtgggacgtgatacagtggactgcggatggctatgtggccgtcgtttcgctatacaactaccagcagtaccgccacatccaggcgccgccggggtggaggctaggctgggtgtgggcgaagaaggaggtgatctgggcgatgaccggcggccaggccaccgagcagggcgactgctccaggttcaaggccagcgtcctcccccactgctgcagagggacccgggaggtggtggacctgctgcccgggactccctacaacacgcagaccgcaactgctgcaaggggaggagtgctcgcctcgtgggcgcaggaccttagcgacgccgtcgcctcgttccaggtcagcgtttgngcaggctgggtccaccttcaactaccggatgaactactcgcagtggaacctggtcgcgcctggtcccgggtacacatgcggagccgctaagcttgtcaagcctaccaagttcatgtctctggatggcaggagatcaactcaagcgcacagtacgtaagattaacctcaagcctaccaaattcatgcattgacgatcgacttgtttaatttcttcgcgcagtgacctggaacgtgacgtgcacgtactcccagttccttgcccagagatctccaacctgctgtgtctcggtctcgtcaacctacaacgacaccattgttagctgaccagcatgctcctaccattgccgccaaaacaacagcaga

SEQ ID NO: 184443 - DNA, 775 bp, Zea mays
  Clone ID: MRT4577_997C.1
gtcgcgcccgcgccgcagcttccctctcgctgccctgggctgtgtcgccatgtccacctcctcttccccctcttcctccacctccacctccgcggccgccgactaccactgccgcaccaagcacagtcccaccgccggttacgcgcgcggtccgggccgtctcgactgggccaaccagcccaaccccttcctccgtttctcccccgcaccgccactaccgctccccaacccacctcagctcgcccccgtcccctaccctgctctcttccactccccacccccgccgccgcagccgctcaccctcgactccctctccgcgctgctcttccactccctcgcgctctccgcctggaagtccgcgggcctctcaacctggtcgctccgcgttaaccccagcagcggcaacctgcaccccaccgaggcccacctggtcttcccgcatccgcgagaggtcgaccgcctcgccatcgcgcactacgcgccccgcgaccatctcctcgaggcccgtgctaccgcaccaattagggattgttccgcgattctgtctgcgccggggatggcgatcctggctctatcgtcagtcttctggcgagaggcgtggaagtatggagagcgggcgctgcggtactgcaaccatgacgtggggcacgcgctcgcagcggtggccttggccgcggccacgctgggttgggacgcgcgtttgctagacgggctgtcggacgaggacctcgggaggctcgttggggtggagaagggagcccggctgctgctcctg

SEQ ID NO: 184444 - DNA, 368 bp, Zea mays
  Clone ID: MRT4577_99800C.1
agcgtggtcgcggccgaggtacctatgttcgctcgtggttccggaccgcgacctgcccgaattgacgtcactggtggcctgggcccttgcgttgaggtgcaccttggcaactactacacgaagacactgctctttgacgagtaacctgtggccggattggcacgggggtctcgcgttctcctgtggggttgtgcatgtttccatgctttaggttgttgtggtggacaacggtgtactttgtgaccgctatgtgggccgggctggcattggtctgagtgaggttcgtctctgggcgggtgggggctgcccagtggaacttgagtggtctctgggccggtggtcgttggtacgccgctttgccccacact

SEQ ID NO: 184445 - DNA, 714 bp, Zea mays
  unsure (1)..(714): unsure at all n locations
  Clone ID: MRT4577_99801C.1
ccggccanaaaaaaaaataccaaaaaaaaaaaaaaaaaaaaaaaaaattattttgaagtaggtacttagcaacggaaaattgctttatggtggaaatacatgtgttgcttttacttaaaaaccacagcatcgagttgaataattgaaggggaggagatgaagaaaaagagggtatgggcaataatgtggaaaccaggaaagttgggaagcttggttgcgtgtgcttcagttgagtgagtcgtcatacttcatatcttgcagcaatgcaatcagagtgcacgcgtgtgtatgtggtagagtttctcaggccagtaggcagatcagtcaaaaacactcagtgacatattctatgctttctacatcctgaccatgatgttgctattttgaaagttttccagattctccgaaggaaccttgtcaaacattgaaagaaatgagatacaatggcagagggcaagtattgcagatgccaatctacgtcatttcaacactttattctcatttgcagtattccagttttattatttagttctacctttattgacagtatttggttaattgttctatccaatgtccgaacttggctatcaatgcctggagtactggatgcatgaactatctttcttttaggaagcaatgcccggtcgtgggcagaggctcccggcccggcgttcctgcaactacaactccctctccaattctccaaccccatcg

SEQ ID NO: 184446 - DNA, 153 bp, Zea mays
  unsure (1)..(153): unsure at all n locations
  Clone ID: MRT4577_99802C.1
cttntttttttttttttttttttttttggagagggtggtacaccggcaccagcctaattaccgcgtttttttattaaaactttagggcaagatacatttttcaataagcccagctaccttgttgaccccttatttgagggcttgccaaaccaa

SEQ ID NO: 184447 - DNA, 343 bp, Zea mays
  unsure (1)..(343): unsure at all n locations
  Clone ID: MRT4577_99803C.1
gaagacctaaggcggggcgtgggcgcttacataatctcaaaattcnactcaagctattgattattacncatctaaaaacccgcaccggaaaaaggggggtggtctggctcaactaactactnatnttcaataacatntcataactagtgacntnaacatatcanagggcggggcctttgttttgttttgttgacatatttcaaaacctttttatgccagagaaagagaacttgggcctttatgggttgccaaaagagacttgggagggtactcttccaactgaggaagtaccttctgaggttacaaaaccaggactgggcataaactttgcccggaaaggaat

SEQ ID NO: 184448 - DNA, 253 bp, Zea mays
  Clone ID: MRT4577_99804C.1
ttttggttttttttttttttttttttgtttttttaactttacacaatggatttatttatttgttcaatagcaaggttcgggagaataattccacaatgaaagagggtcaaattaaaaaaaggattaaaacaagctaaaacattaaggaaaaaaaaacagaaaaccctgaaaaaaaaacataaaaccaccctaaagggggtggaagcgctatactcgaccttaacgccaaccatagagcactcttacgtatgga

SEQ ID NO: 184449 - DNA, 196 bp, Zea mays
  Clone ID: MRT4577_99805C.1
ccaggtcccgtgccgcaagtggaaggagctatgtccgggctgaggggggacaacagctcagcgcaccgcgctgtgagcccataggtcaaaaaccgatcctatagcagatggagagagagaacgctctcgttcctactaggaacagacctaacctgtggaaggagaaggagcgcgcgaacccgatctacttaaggaa

SEQ ID NO: 184450 - DNA, 350 bp, Zea mays
  unsure (1)..(350): unsure at all n locations
  Clone ID: MRT4577_99806C.1
gctacgcgcttcggnaaagggccttttggtaagtgcatttnatggtatcgttagaagtagtcacactttcacagaggcctangtaatagggacaaaggaaagtctgcaaaggaaaggatatcacagaaatgtaatcacaacacgagcttgcaccaaagcttgatgcttaagggttagtcttattgctaccataaatgctaccacaacagacacatggactcagagctgcgtgctaagtacctacataataacatcacatgtgagaacgttgtgctacacgtattgctacacttatggtcaccagtggtggaacctggatgggataatgaatggggttgtcaattaggaag

SEQ ID NO: 184451 - DNA, 234 bp, Zea mays
  Clone ID: MRT4577_99807C.1
ggggaaaagggatttcgtccctttaaactaatataaacaaagaaccgacttggggtaatttacaagataccaaaaaatgtttatccaaatccaaagatttaacccaaacctggccactttgtaccggaaaaggcccggaaaaattgcccacaaggcaaacggaaaaaatgtcgagcaaaggaaaaatattcatgttaccctaaagttcgctcaaaaaaactgaaccttgtattg

SEQ ID NO: 184452 - DNA, 343 bp, Zea mays
  Clone ID: MRT4577_99808C.1
aaaccaaaagaagacccattccaattccatgccaaaagtgccttgcttgagaatacatagactgaaagaacaggaaccaaccagcacaagatacaacaagctgcaaacgcggcaggaatggggcaccgagcacatgacaccgggcccaacatccattgccagcagtagcaccactttattgaaccaagctcactgattacacagcaccgggaagggccaacctacagtgcctgaatgactacgtaccgggctgacgaacattcacaaaccctgatagagaaggcaataaccgtgcctctctaaaaagaagaagcccttgccatacagtcatggactcgcggga

SEQ ID NO: 184453 - DNA, 258 bp, Zea mays
  Clone ID: MRT4577_99809C.1
cgaacggaggttcagagagcagtactgccgcttaatggtcatgaagcgatccagaaaatcatcgtccttaaccccacgatcttggacacgtatcccgaactatactttcatatccatcaactcaaacttatatagttgattctcgatggagaaataaatgaatctttggagttcactcaagaagaacttcgcaccgaaaggcgttgaactgcaaacatttctcgaggaaatagacaatactgtcgcactactggtttt

SEQ ID NO: 184454 - DNA, 2699 bp, Zea mays
  Clone ID: MRT4577_9980C.1
gaccgctaaaaactgtgttcttggcgcccggccgggccgggaacaaacccacggactaacacacgcgcacgcgtacagcaaagaaatggcgatggcgatgcagccatcttagccccccctcccctctccctaccctccatggccgtccctcctctgctgctcgtcgccgttgccgtagccgcgctctccatcctcgtcctcgtcgtcttcgccttccggcgatgcaggcggcggcggcaacgccacccgctgcaggccgcggcggtggccccgaccccggtcgctgtccaggatgaggacatagataggcctcttctttctgaaaatcagagcgatcactctagacagaatattagttttcttggaagttctgtaggagaaccttcgaagattcaaacaaataggagtaacacttcgcctagaagtcatgcaattgctgatacagggaggatttatcctgctgaatgttgtgttacacaaggagaaactcatgtaatcaatgttgaaaatgatacttctgaagagttccaattaggaagcacactaagacgtacaccgccaccaaaatggccaacacctgaccagaagcacagaagaagggtttctggagatgacaatcataatggaagtgttcctttgaaggataatacatatcatagccgcctggatttagaggttatagctggtccatctcatggaataagctgttctcggcagtcaagtagaccttctatgctcccaataactcttggaagggttcccccaagtgatttagtgttgaaggactctgaagtatcagggaaacatgctcagataaactggaatggaaagacattaaaatgggaacttgtggacatgggcagcttgaatggaactttcttgaactcccaggcggttcatcatccaagtgctgggtctaggcattggggtgaacctgctgaacttgcacatggtgatattataactctagggacttcatctaaactatctgttcaaattatactgcaaaatcaacgagttcctgctggtgttggtatggcatccgatccaatggtggcacgtagaagtggaaagaaacttccaatggaagacataagcttttgccagtgtcctctgcagggtgttgaacattttgggctctttggaatttttgatggacatggtggggatggagctgccaaagctgtcagcaagattcttccagaaaatctgggatacatgttatctcatcctgaaacaaaagagcgagtgcagtcatgttctgatgcttctgatgttcttagatatgcttttactttgacagaagacacaattgatcatcagtacgagggatgtacaggcacagcacttcttatttggtttgaccagaataaagattgttttgcccagtgcgctaatcttggtgactctgcatgcgtcatgagtgtcaacggcaagacgatcgatatgactgaagatcaccgggtaactagcgcgaccgaaagagctaggatagcaagaactgggcagcccctgagagacggtgaagctcgtcttagcggactaaatcttgctaggatgtttggtgacaagtttctcaaggagcaggacccgcgcttcagctcagaaccatacgtgagccaagccgttcgcatcaccaaagcgtgcacagccttcgccgtcattgctagcgacgggctctgggacgtcatcagcacgaaaagggcggtacagcttgtcgtcgagggaaaggagaggaggagctctggcgacgccacctcagcggcggccagagtagccagccgtgtgctggacgaagctcggagtctgcgaaccaaggacaacacatccgtaatattcgtagattttgacgtcctgagaagggatccctgtatctcgccagttgattgacatggcagattccggagacgcagcttcccatggatcgtcgtcttcctggctgctctattatatagctcccaagttttgttgtgttttcagtgagatgatgtggtgtaggaggcagagtgcgtgcataccgtgtaatctggtgcatgccttttagagtctcctctctctctctctctctctctctctctctctctctctctctctctctctctgtcaccctagttgatgaaccgatgatcacccatcatccaggaatggcttaacaaatctccattaactgtgaagtcattcgcgatttttgggtgagtttttgtcaagtctggaatccttttccgcaaaaaaaaaaaaaaaaaacgaacttgttagctcgtcaaagacgttgtatgcgaaagacggtggaggcgcgagcgatctgaccagccaggagggtggcgagctcgagggactgggcgttgtcaatgatggagccggcaacggctatgctaaccgtcggcttcagctttttcttctcctcccgctcgtccttatccttcctctgcttctgcttctgcttcttctctttgggtgcttcttcctcggccatcgaggcgccgcagtcatcctccttggcatccttgtgcttcttcctcttctccctcttgtcgttcttgcgctgctccttcgcagcagcggcagcctcgctgtgaacgcggttcatggcggtggcggcgccgctggccagggaggaattcctcgagccgaatatctaggaatggatgcttggattgggaattttggccgatcaggagttcccggcccggccggcctcg

SEQ ID NO: 184455 - DNA, 560 bp, Zea mays
  Clone ID: MRT4577_99810C.1
ccggccggggacgcgtccccgtccgtcttcccacttttccccgataaaaccacgggcgcctctcgtccattcctcgctcgcccaccctccccgcggatcacagacagcctgtgcccgccttccagtccacaatctccctgcctctcctctcccaccctccgaaaagcaagctccggccggaccgccccaccgcgcggccaagatcgttaggttctgattcgaccggcgggcggaggaaggaattgcagagagggaaaacgaagattccaagggcggaaggggggaaaggcatgcgaaatcagagaggtcttcggtgttactactatgatgttcttggacgtgtttgatttttaatctccttttttatatatataattttcctacggaggtgggaggagaggaggtggacgaagaatagtgtaatgataatggtggtggtgcagcggcggtggttgagggcccaaaacgatgaacacatggggttgggttgggtgtatgtatctgtcacacgcagcttttgtgcaagactattataccaaaaaaaaaaaaaaaaagcggcc

SEQ ID NO: 184456 - DNA, 320 bp, Zea mays
  unsure (1)..(320): unsure at all n locations
  Clone ID: MRT4577_99811C.1
gaannaaanttttaatcggggtgttttttggggttaatatatatactgtaaaaagggtttnggggaatcaaactcttaaccaaattgtcttttttcgtttttttacaaacctgaaaaagggaatcccctgggcactggaatgtgccttactgtttaacttaaaaacttttaatttactcaaaaaaaagaaggggggccttttttttttttctaaaggaaacaaaaaaaaatcccgggacatttgttttttttttcccggcaaggttttcccccccccccccccccaaaaattcgggtttttttgccccggacaaaatttt

SEQ ID NO: 184457 - DNA, 575 bp, Zea mays
  Clone ID: MRT4577_99812C.1
gccggccggtccggggctcgcccaccctccccgcggatcacagacagcctgtgcccgccttccagtccacaatctccctgcctctcctctcccaccctccctccgaaaagcaagctccggcccggaccgccccaccgcgcgcgcgcatacacagagagagagagagagaccgcacggtcgttcggggttcctttggccaggcgcacgacacgagcatggcgcagcgcgacaagaaggaattgcagagagggaaaacgaagattccaagggcggaaggggggaaaggcatgcgaaatcagagaggtcttcggtgttactactatgctgttcttggacgtgtttgatttttaatctccttttatatatatatatatatataattttcctacggaggtgggaggagaggaggtggacgaagaatagtgtaatgataatggtggtggtgcagcggcggtggttgagggcccaaaacgatgaacacatggggttgggttggggtgtatgtatctatctgtcacacgcagcttttgtgcaagactattatactacaaaaaaaaaaaaaaaaaaggccccta

SEQ ID NO: 184458 - DNA, 1462 bp, Zea mays
  Clone ID: MRT4577_99813C.1
ccggccggggaggccgaggccggaaaaacacgccgggcgggcgggtcactgctactgcctttgccgctgcgcgtccgcggaaggggacgcgtccccgtccgtcttcccacttttccccgataaaaccacgggcgcctctcgtccattcctcgctcgcccaccctccccgcggatcacagacagcctgtgcccgccttccagtccacaatctccctgcctctcctctcccaccctccctccgaaaagcaagctccggcccggaccgccccaccgcgcgcgcgcatacacacagagagagagagagaccgcacggtcgttcggggttcctttggccaggcgcacgacacgagcatggcgcagcgcgacaagaaggaggagcccacggagctgcgggcgccggagatcgcgctctgcgccaacaactgcggcttcccgggcaacccggccacgcagaacctgtgccagagctgcttctcggcgtcgaggtcgtcgtcgtcgtcttcgcagccgtcccctacctcctctccctcagcttccgcgccggccgccgcggtgccgcagccgaggccggcgctcctggacgcggcgctgcagctggcgcctccggccgcggccgcgggccagcctgtggaggcctcggccaggacttctgccaaccggtgctccagctgccggaagcgcgtggggctgacggggttccggtgccgctgcggcgacctgttctgcggcgcgcaccggtactcggaccgccacggctgccgctacgactacaggggcgccgcccgggacgccatcgcccgggagaacccggtggtgcgcgcggccaagatcgttaggttctgattcgaccggcgggcggaggaaggaattgcagagagggaaaacgaagattccaagggcggaaggggggaaaggcatgcgaaatcagagaggtcttcagtgttactactatgatgttcttggacgtgtttgatttttaatctccttttatatatatatatatatatataattttcctacggaggtgggaggagaggaggtggacgaagaatagtgtaatgataatggtggtggtgcagcggcggtggttgagggcccaaaacgatgaacacatggggttgggttgggtgtatgtatctatctgtcacacgcagcttttgtgcaagactattatactacatcgctggtccctccaatttgctcgaaagttcaggctcctagtcatatctgccgaccccccgtatttcctccgcttaaactttttgctcgcggagaatgagaagcactgaagcaatcaagtcctctttttttttcccgtctggcccacatgccaatctccataatggaaccgtcgcattatcgcgccgcggtcggcacaatagtcatctcccgggccggctggccagcgtgccacggcgtcgccgaattttttttgcaaaaaaaaaaaaaaaaacccgcggcc

SEQ ID NO: 184459 - DNA, 1093 bp, Zea mays
  Clone ID: MRT4577_99814C.1
ctcgaggccggccgctcgccaccttccccgcggatcacagacagcctgtgcccgccttccgtccacaatctccctgcctctcctctcccaccctccctccgaaaagcaagctccggcccggaccgccccaccgcgcgcgcgcatacacagagagagagagagagagaccgcacggtcgttcggggttcctttggccaggcgcacgacacgagcatggcgcagcgcgacaagaaggaggagcccacggagctgcgggcgccggagatcgcgctctgcgccaacaactgcggcttcccgggcaacccggccacgcagaacctgtgccagagctgcttctcggcgtcgaggtcgtcgtcgtcgtcgtcttcgcagccgtcccctacctcctctccctcagcttccgcgccggccgccgcggtgccgcagccgaggccggcgctcctgggcgcggcgctgcagctggcgcctccggccgcggccgccgcgggccagcctgtggaggcctcggccaggacttctgccaaccggtgctccagctgccggaagcgcgtggggctgacggggttccggtgccgctgcggcgacctgttctgcggcgcgcaccggtactcggaccgccacggctgccgctacgactacaggggcgccgcccgggacgccatcgcccgggagaacccggtggtgcgcgcggccaagatcgttaggttctgattcgaccggcgggcggaggaaggaattgcagagaggaaaccgaagattccaagggcggaaggggggaaaggcatgcgaaatcagagaggtcttcagtgttactactatgatgttcttggacgtgtttgatttttaatctccttttatatatatatatatatataattttcctacggaggtgggaggaggagaggtggacgaagaatagtgtaacgatgataatggtggtggttgagggcccgaaacgatgaacacatggggttgggttgggtgtatgtatctgtcacacgcagcttttgtgcaagactattatactacatcgctggtccctccaatttgctcaaaaaaaaaaaaaaaaatccgaggggggaaaccggtaccc

SEQ ID NO: 184460 - DNA, 225 bp, Zea mays
  Clone ID: MRT4577_99815C.1
aagaaggggctgacaagaaaaaaaatgggaaccgcaaacacaaacggacaaaaaggggccagactaccagtacacgaagagccacacaaaacccaaacgccaggacactgaacccagatggaaactatcaggaaagaacgcagctaagggacgcgcaggctaccacatgaccccaggtgggtaatatacccacggaacttggtgcctacttatgacaaacacaac

SEQ ID NO: 184461 - DNA, 114 bp, Zea mays
  Clone ID: MRT4577_99816C.1
aaaaaaaggaagcaggggctgcctcattacactaacagggggccgatttcactggtatgttttctcaacgattacctgacatgaatggggcctggttataccaggttcaccact

SEQ ID NO: 184462 - DNA, 785 bp, Zea mays
  unsure (1)..(785): unsure at all n locations
  Clone ID: MRT4577_99817C.1
tagttgcatatggtcatttcttttctttctcaatgctctactgnttagaatatttagtgtgctactttgtntaattggtatgctatacgaggtagcttagagatagttgtttagaaagtaataaattgtatctatctatattttagtcctaaatgtctagtattgatgagtctaaattttgctagattttcagtgttatgatctagctaaagaaagtataggaattatgtatggtttattagtctgatgtttgaattaggtctgattaaaactggaagatcctgattgttgtgttagaacgtcataggtatctattgtttccctataagagttttaatgcatgctttaagtgtttaatcctcgtccatatagtattatgttgtagtatgttattcctctgtatgttcattcatgtgcattatgcatatcatttaggtacgttaagtgatcacgtgatgcggaagatcagagccaagtcattcccaagatgatgcagagagtgggcatctccgcaagacgatgtcgtcagtcggaccaacctaaagatggataatctgaacgagtgccaagacaaagtgtgacggaacctcccaagtcattaggcccgcctacagttgtccttgtccaacggacctcggacaaccctgtaaatgcacataatcacttgacaagttcgatatctgtatcctttacctttcccaagagtgtttcacccgtcacgcagatattacaacacatcggaggaacgaataagcggaagcaaattacaataacttatcttacat

SEQ ID NO: 184463 - DNA, 636 bp, Zea mays
  Clone ID: MRT4577_99818C.1
ttccctcacataatcggttcaacttataatctgtgaaagcaagaaaatgttgaaaggtcgggtcctgtcaagtgtatgattcactatttcgctgcataaataatgttacagtttttcacaagtttggtattagaggcattacgacttgggagcttgaaacaacgaagcagtgcagagtattggtccagttgctctcttaaaaactcgagcggcatcgtaggccatgtgagaacgacctttggcgtgggacaaatgagatgagttttttaaccacaacctaaaattcgcttcacatggggagtcgaactcaggacctaaggagtggtactcagaccatctaaccaactcagctagatgccttccgctgtccagttgctctcttattccctgctttcgatctgaataagcttgttctagagattatagcaataaagttgcactttgcctggaactcttttataaatatcagactgcaagtgcatgtgatatttaatttattgtgctctcatggcagccctaacggataaggggaagtttcttttggctgctcgaagggtcagacaggagcacatacagaatatatcatctcttatgactatgaatgatctgcacccaagaagcagtttatatgttggg

SEQ ID NO: 184464 - DNA, 459 bp, Zea mays
  Clone ID: MRT4577_99819C.1
ccggccggggcccccggcctcgttgcgtctcccagatctcggtgagtcagcgccgggtgcctcgctcgttaggatcatcacgtacctcgggccgaacatgatggagatcctgcacatccagggagcgcagctgcgccaaccagattgcggccgagctctgggtaggcgtgcagccaatgagcatggcgttgaccctaccgggcggtacgctgcgaattcccaccttcagtcggagcgcgtgactgtctactaccacgaaggctcctgcgcacgcttcggccaccctgctgctctcaggccccttgaggctgcgacaatgcacagggtccggactggactctatgggcagatattccgccctgaccactgtgacgcttgggcgactccggcgctgctaacaagggggccttaggccacaacacctacggtgttgagctccctaactctgccccgcatgcg

SEQ ID NO: 184465 - DNA, 204 bp, Zea mays
  Clone ID: MRT4577_9981C.1
tcccgactcgacgcacgcaatccattctagatcgctagcttcctccctttttttttttttttatcggttaaacacccattggttgatcaaataccaggtaggtacacttcactacacaaaacaacaaacataaaactgtttaccgtaatatgcaccacctaatgaacaatacctaataactaccactattataattcacttcat

SEQ ID NO: 184466 - DNA, 1746 bp, Zea mays
  Clone ID: MRT4577_99820C.1
actcagaattcggcacgcggtcgcctagtcgcaaatctcaccccgccgccatggcctcccccgccgccgcctcccccgcgcgccgcctttccgtcattttctcctcgaccaagccacgcgcccgaccacccaaaccggcgccggctccgaaagcgccggccggccaggcggttgcgaaacctgacgagcgctgcgagtcccggaatctcacgaaaatcctgcaggtcatcttccgggagcgcgatccggacaagctggtttcccagttcatcgccgaatcgaccgcgtctgaacgcttccgcaacaagcaccgcgtgtacgacgtggccgtggcccgcctcgcctccttcggccgacacgatggcattgctgccatcatcgactcacagaagccgttcatcgcggcctccagcgtgggcttcgccgcacgcctcatccgcctctgcggccgcgcctccatgccgtcccacgccgccgcgatcttccatgacctcccaccgaagcacaagtcctccatgactttcaatgccctcctcgccgcctacctcgacgccagcgacttcgacgcactcgccaccgcgttgcaggaaatcccggccacacaccccactattgctcccaccatatactctcacaatatactcatcagtgcgctgtgcaagaagccggacctctcggccgccgtggatgtcatcacgctcatggagaagcgcggtattacccctgatatcatctctttcaacattctgctcaatgggttttacagcaatgatcgctttgatgacgtcgagaaagtttgggagatgatgaaggagaggaatgttgagccggatgcgaggagctataatgcaaaactgcggggtttggtttcccaagggagggttgaggatgcagctgcattgattgagaggatgcaaaaggagggaccaaagcctgattcagtgtcctacaacgaactgattcgagggtattgcaatgaagggaggttgaatgaagccaagaaggtatatgataatatgataaagaatggatatgcaccaaataggggcacatttcatacccttgtgccacattttgtggaggctggagagcttgatcatgctctaagctgctgccatgagatcttcactaggaagtgcagagtgcagtgctcgttgctgcagggggtagtgactgcgttgtttgctgcatcaagggtggaggaggctaagaggatcgttcatcttggaagggagaactactatcctcgaaagggtttgaggatgccaccacgtactagaaaagacgagggtttgaagatgccgcaacctggtggagaaggcaatgatgtagaagctggaactgattcagaagattctgtatcatatgaagatgggtgcgagcaagaagaggagtcgaaaaatggtcagtgaggatgtacctttgtaatttaagcattgatgtggcatggcgatgcaagctgaatttgctctacttctttgatggcctgatacaacagaattgcctgtgcaatcggaattctctcgtactttagtaatatgatggtttattttgcttctctaggttgattggtaaaaactcctccactcattatatacatgatattagaatcaacccctcttccctagaatggcttgttttggcattttttgtcacacgtcttcaatattgttaattatgtttgtttcaatgtgttttccctatgtatctattcgtaaatgatgtgtgagctttatagttgttttc

SEQ ID NO: 184467 - DNA, 487 bp, Zea mays
  Clone ID: MRT4577_99821C.1
gccaattggcagaaatggagaagatccaggtttttcatcccgcaaaaagcgcattgaggatccagttcgcacaaatgttgaagatgcaggcttctcatctacgaaaaggctgtctgagaagcccatcagtgtaaacggagaagacaatcgtcacgattctcatcgaggaggcatctaaggaaccgagttgcggagttgagcaggatggtcaaggttactcatgcgatgaagaggctgtgaaaaagccagtttgtatggatagccacgatgcccaaggttcagatatctctgctgccactattgcttctgtgggagatggctctaatggtttaagcatgtcacagcctaatgccactgaacctactggttgtcctcttaccaatggggttatagacaaagacatcagctctccactagatgaaataagatctgagaagactgacgatattttggccaaacctagctacaagccaattgtggtagacga

SEQ ID NO: 184468 - DNA, 266 bp, Zea mays
  Clone ID: MRT4577_99822C.1
cggacgcgtggggaaacattcgctgctcatggttcatgaatggcgagcggtggcgtggtggcgtctctactgtcgtcggcgaccaagctgctcgacctcctccggggtgcgccgtctgtttctcgccgtgcagggcagcagcagccggtttccgcagacgtgcatcggttgcagcggctgctgaggaggatccaggccacgatcgatgacgctggggagagggagatccgggacagttctgtgaagctatggatcgcagagatcac

SEQ ID NO: 184469 - DNA, 241 bp, Zea mays
  Clone ID: MRT4577_99823C.1
gttttaataaactatagtagtgttataaaaagttaaatgaagaataaacgcaaatataaaagctctgattttgccctgtatgtatgatgacttcagtgtgcaagatgaagtttaatacctgtaaaaactacaaagaagttcccctagcatttctaggccaaaccttgtaattgacttcagctatgtacgtggacaagcttagactgaaatgctaggtatatgtattggcttcagtgtatga

SEQ ID NO: 184470 - DNA, 325 bp, Zea mays
  Clone ID: MRT4577_99824C.1
ggcagaagaagaatttaaaatccacgacatgcaagagctcgacaagacgttccaaaaacatggccaccatggatcgggggcagtttaggccacccagagggcttgttttgaaaaaagaaatttaagcaaaggtccttgcttccccgagagcgagaagaaaacgacgccgggaacctacgatacaaggcccaaccaggcaaagcttggggcagccatgccatttaatcggggcgacgggggttcacttgatgaacccgatggcccaggcctccgtgttgaccggaagcacgcactcgacgacgatgaccttgccattttccggcag

SEQ ID NO: 184471 - DNA, 364 bp, Zea mays
  Clone ID: MRT4577_99825C.1
aattcggcacgaggcgccggtctacttcgtccgacgcccctccttccccagcggtgacctccacccgacgtactctttttcccgcaccgccgtctaaggtgcgagccacccgaacttatccatgtcttaggtggcacctatcccgtaatcaaggtggtaaccatccgtgcataggtgtgcttattttagcacagacgagtgcattacttaacactgactcacgacacccgcctcaatctgcgcctaatgcctttttcacattccctggactctgctgtgcgatagctgaccgtatccaggacccatgtggacccatgagggcagtagtatgcagcgacgggtgtagtaaaaagaaggagtggaa

SEQ ID NO: 184472 - DNA, 341 bp, Zea mays
  Clone ID: MRT4577_99826C.1
atggatcgagaagctgaccattctgatctcctactggcgggatcatgcgggcatcacattatctacatcacaaggtattataaagggctcaagaaaactacaacagtacatattatatattacggtaccaaacccgtgcacgagatggatctcgatacgaagcttaattatcacctgcacctgcggctgtgcggcaacctgaagtgcaccctatcccacatcatgaggccacacaagtgtgcgcgccttttccgcgaactgcaggacgttgtagtagaggtgcttttggaacatgtacacaatgacgcgcgcatgtggcgaaacgaccactcctacaaaca

SEQ ID NO: 184473 - DNA, 1942 bp, Zea mays
  unsure (1)..(1942): unsure at all n locations
  Clone ID: MRT4577_99827C.1
accctcgaggcctgccgggaggtatcctcacctcttcccctttcctgctctgcgaaaccgagcacgaaccctaacttaagttatgtggctatttgaagtgtgtccatggccactaacttcgaatttttttttgccaaaaaaatgagtctcgtgtcctttacttggtccgccccctggtctggaacttcaatttattttttacattcgagttttgaatttctgatgcattccgtttctaccaaatggccaatttgtgatgtgctaatcccttttattttctcatttatgccttttcagtaatgctgttggcaagctcaacaagacgctatgagcaatttcctttagcacgaaacaatggacttccaagattttcaagagtaaaaatgtcatgcttgggaacaaaccaaagtaaccatcattctgataccgtcagatcttcatcccctagttgtggagataccagaaagatccaccctgtagtcaaaatgtgtggcatcacatcagctagagatgcagaaatggctgtaaaagcaggagctgagcttataggcatgatactatggcccaactctaaacgctctgtctcgttattggaggcaaaagaaatatcaagagttgcgcaatcttatggcgctgaatcagttggtgtctttgtggatgataatgaagagagaattctacgggtgtctgattcatgtgaccttaactttgtccagcttcatggtgatgaatctcgtgcattggttcatactctttcaaagaataatcgtatcatttatgtactaaatgctgatgacgatggaaaactaatcaacattcctgatattgaatacgaacttgattggtacttagtggacagtgcaaagggcggaagtggaaagggattcaactggcagaagttccagatgccatctgtcaaaagcaagaatggatggctattagctggagggcttcatgcagataatgtttgtgaagccttttctgctctgaaaccagatggtgttgatgttagcagcggcatatgtggtcgagatggtatccgaaaagatgcagacaggattaattccttcataagtaatgtgaaatccctaaatttgcacaggtgaagccggttgcttggagagagcttagtttttttttcatttgctcacgtgtggaatccctgaattgctgcaacctgaaggcaagctgtcaaaattgctcttggggctgagggcaaaagagtgattgaatttttgaagtgtgaacatatgtatccggtttattgtggagtgtggcaaactcgttactgcaacctgatggcaagatgttcaaattgcgcttgagaatagggattacatttttgaatgtgagtattgtgtttgtttctagtgcaataagtgtgttttgtatgcatatccagttcaaatgcaaaaataaaaacccattgtcccgttgccnnnnnnnnnnnnnnnnnnnnnnnnnnnnnnnnnnnnnnnnnnnnnnnnnnnnnnnnnnnnnnnnnnnnnnnnnnnnnnnnnnnnnnnnnnnnnnnnnnnnnnnnnnnnnnnnnnnnnnnnnnnnnnnnnnnnnnnnnnnnnnnnnnnnnnnnnnnnnnnnnnnnnnnnnnnnnnnnnnnnnnnnnnnnnnnnnnnnnnnnnnnnnnnnnnnnnnnnnnnnnnnnnnnnnnnnnnnnnnnnnnnnnnnnnnnnnnnnnnnnnnnnnnnnnnnnnnnnnnnnnnnnnnnnnnnnnnnnnnnnnnnnnnnnnnnnnnnnnnnnnnnnnnnnnnnnnnnnnnnnnnnnnnnnnnnnnnnnnnnnnnnnnnnnnnnnnnnnnnnnnnnnnnnnnnnnnnnnnnnnnnnnnnnnnnnnnnnnnnnnnnnnnnnnnnnnnnnnnnnnnnnnnnnnnnnnnnnnnnnnnnnnnnnnnnnnnnnnnnnnnnnnnnnnnnnnnnnnnnnnnnn

SEQ ID NO: 184474 - DNA, 319 bp, Zea mays
  unsure (1)..(319): unsure at all n locations
  Clone ID: MRT4577_99828C.1
tccacataactcaattggtgttcttcctactcctcctttattataaataaaaccagtgtggggtggggctcaactaatgtaaccaggctcaatcttcctaagatcataacaacattgttgcttcaatacctggcatctacttgcttgtatcaaacctgattggagaaaaggcgttaccaataggccccactgctcccttacgaattcataacaattctttatatttgagctactactatagttnttatagcttctccttgtattctgttactgctcctggccttgacattcttccttttttgattgtctcttccccctc

SEQ ID NO: 184475 - DNA, 2857 bp, Zea mays
  unsure (1)..(2857): unsure at all n locations
  Clone ID: MRT4577_99829C.1
ttgggtacctcgctcgcggccgggggggtttcgcgcgctctctctctctctctccctctcgtagtcgtgcggccaccgggtgactgccggcgccgccctaagccaggtgccgtcttcgttgggtccctcggttgcgacgagcacccaccagtaatgctgttggcaagctcaacaagacgctatgagcaatttcctttagcacgaaacaatggacttccaagattttcaagagtaaaaatgtcatgcttgggaacaaaccaaagtaaccatcattctgataccgtcagatcttcatcccctagttgtggagataccagaaagatccaccctgtagtcaaaatgtgtggcatcacatcagctagagatgcagaaatggctgtaaaagcaggagctgagcttataggcatgatactatggcccaactctaaacgctctgtctcgttattggaggcaaaagaaatatcaagagttgcgcaatcttatggcgctgaatcagttggtgtctttgtggatgataatgaagagacaattctacgagtgtctgattcatgtgaccttaactttgtccagcttcatggtgatgaatctcgtgcattggttcatactctttcaaagaataatcgtatcgtttatgtactaaatgctgatgacgatggaaaactaatcaacattcctgatattgaatacgaacttgattggtacttagtggacagtgcaaagggcggaaaatcttgtcattccttacttagagtcttcgattgtatgctagtcaatgggcatatttcccttatccgaaaatgcctttcggtggaaagggattcaactggcagaagttccagatgccatctgtcaaaagcaagaatggatggctattagctggagggcttcatgcagataatgtttgtgaagccttttctgctctgaaaccagatggtgttgatgttagcagcggcatatgtggtcgagatggtatccgaaaagatgcagacaggattaattccttcataagtaatgtgaaatccctaaattttctatcgtaaggtcatttgcttgtcgagagcttagttttatttcatttgctcacgtgtggaatccctgaattgctgcaacctgaaggcaagctgtcaaaattgctcttgnggctgagggcaaaagagtgattgaatttttgaagtgtgaacatatgtatccggttgttcaactggggcatgggcaactgaggtagcgtgccgcgcgtccgcgacgacgagcgcacggacacggttctgctcaagttcctgcgagcgcgggagttcaaggtgaaggaggccatggcgatgctcaagtccgcggtgctgtggcgcaagcgcttcggcatcacctcgctcctcgacgccgacctcggcctgccggagctggagaacgtggtgttctaccgcggcgcggaccgcgagggccaccccgtgtgctacaacgtctacggcgagttccaggacaaggatctctacgagaaggccttcggcgacgatgagaagagggagcgctttctcaagtggcgcatccagctgctggagcgtggcatcctgtcgaagctggacttctcgcccaacggcatctgctccatggttcaggttaccgacctcaagaactccccgcccatgctcggcaagcaccgcgccgtcacccgccaggctgtcacgctgctccaggacaactaccccgagttcattgccaagaaggtgttcatcaatgtgccgtggtggtatctcgctgccaacaagatgatgagcccgttcttcacgcagcgcaccaagagcaagttcgtttttgctagcccagccaagtcagcagagactctattcagatacatcgcaccggaacaagttccggtccaatttggaggccttttcaaggaggatgaccctgagttcaccacctcggacactgtcactgagctcactatcaaaccatcgtcgaaagaaaccattgagatccccgtcaccgagaactccacgattgtatgggaactccgggtgctcggttgggaggtgagctacggcgccgagttcacccctgacaccgagggtgggtacactgtcattatacagaaaacaaggaaggtgcccgctaacgaggaaccgatcatgaagggaagcttcaaggtaggcgagcccggcaagcttgtgctaactgtgaacaaccctgcatccaagaagaagaagctcctttacagatcaaaggtcaagagcaccagcgagtgagtgtgaggttgctgctagctgcctgggtcctacagttaaatgatgtacagcatgatagaagagaggagaagccttttggtttggttcgttaatttattgggttttgctttttgcatgatagaagagagaaggaaccttttggtttggttcgttaatttactgggatttttttttgggttcgcattctacattttgtttggttgaaaccaaagtgagcttgtttttgtgacagtaaatgggagaagtataatggcattgtgtgatggttgtgcagggaggacaaaatgtgggggaaaaggttggatctgttcctctgtaatgtgttctgtgcatggatcatgttaaaatttaggagcatgatagaagcacccttttggttgtgttaatttcctggttttttcctccaagtggattgaggtcaatactagagtacccaaactaagccttattgtggagtgtggcaaactcgttactgcaacctgaaggcaagatgttcaaattgcgcttgagaatagggattacatttttgaatgtgagaagtgtgtttgtttcgtagtgcaataagtgtgttttgtatgcatgtccagttcaaatgcaaaaataaaaacacatttttg

SEQ ID NO: 184476 - DNA, 274 bp, Zea mays
  unsure (1)..(274): unsure at all n locations
  Clone ID: MRT4577_9982C.1
atttcactatcttacaagcctcagngtatttcgaaacatcattttctatctcagacggaatttacggctcaacattcttcatagcaacgggatttccatggcctnccacgtaattattgggctcaactttcctaattgtctgtctactacgacaactaaaattccacttcacatcaaaactctcatttcggatttgaagccgcagcatgatactgacacttcgtagatgtagtttgactattcctatacgtttctatctattgatgaggatcct

SEQ ID NO: 184477 - DNA, 433 bp, Zea mays
  Clone ID: MRT4577_99830C.1
cggattcttgggcatggcgcccaccatcaccatagttgggagaatggaaacaacgaagtgactgatctaccggacctaaacaggaacaacctaccattactacttcatggcgcaagatgaatgtccactggctacaaaatgactgtgagagaagctcaaaacggaatctcaaactatactctgagaaaagcactctaacggctagttgaacccactagaggaatgattataaaggacaacagtgacattagcctaggttttgaagaagacattcgctccgatattgacgctatgtggaaaaacgttgggactatgcgcaaaacgcctgtaacatagcgttctcacttctgagcgggggcctgtgaggacatgttctttgcactatgaagaggaaatgttaaaccgggcaacttgatggaggaagaaaaacgag

SEQ ID NO: 184478 - DNA, 303 bp, Zea mays
  Clone ID: MRT4577_99831C.1
atgactcatctatttatcatctctggtagacttttgtcatggtatggacttcgctctaattgcttgattctttacagtacagttctgcttaaacccgacacaaaaattcttttcaccccggctgttcgctgaaggtaaccttgtggagcgggcactgaaccccccatcaacctgtacatcggtaaaagaggtcacacaacagctgctgactgcccttaccacctcacctgttgaactttttttttcttgccaacaacaggattggagagccccaacaccatgctgatcttgaacatcagggac

SEQ ID NO: 184479 - DNA, 252 bp, Zea mays
  Clone ID: MRT4577_99832C.1
ttttcttacggcaacgcaacccttgcagcgggaggccctcacagcagccaggggtgggacgcaggagcccctctctgtggagggcacgatgcgcggccacaacggcgaggagaccgcgatcgcgaccccgatcgacagcacggccaatatcgagtacaacttccgccacaggttcttgactcatgtgcgacctagccaacccggtccactccaccctggtatccggcgccaccgccgactactgcgtcccct

SEQ ID NO: 184480 - DNA, 343 bp, Zea mays
  Clone ID: MRT4577_99833C.1
caagaaaaacattcggggcccacactaataaaatccatcgggggaggcaggaaacaataacccaacactaaggtttcataaataaacaaccacaattttcggggcgcaatttaattaacaaaacccggcattggcctaatcggaataatatccaccgggagacatgggtataaacccccccctttttttctgggcacaccgtagccgggacccaaaccggttggccccttcagtaataacaggcggttaatacacacccacacacccttcattcacctggaggaataggcacatacccccagggataaaaaccctctggccgactgggtgggtaaatgcaaaa

SEQ ID NO: 184481 - DNA, 177 bp, Zea mays
  Clone ID: MRT4577_99834C.1
tcaagccttcgcgctatcttctttttttagtatatataaaagaacggtgcgtgctctggtgtcgtgaatctctctcaccttcccgtatcatgctagcggggcagcgcgccaggatggatcggaggagacgccatcaatcatcacttgtgctcattttgatttctaatttttattttt

SEQ ID NO: 184482 - DNA, 278 bp, Zea mays
  Clone ID: MRT4577_99836C.1
acggcgagacgtacctgtactggctacgccgccggccggcgctgtacgtgtcggacccggagctgatccgcgagatcgggcgttgcgtgtcgctggacatgggcaagcccacctacctgcagaagggccaggagcccctctttggccgcggcgtcctcaaggccaacggcgccgactggcatcgccagcgcaagctcatcgcccccgagttctacatggcaaaggtcaagggcatggtggagctgatggtggacgcgccgcagccgctgctgaaggcg

SEQ ID NO: 184483 - DNA, 850 bp, Zea mays
  Clone ID: MRT4577_99837C.1
gcgttcgcccagcgtccgctttgctccaaggctggcggggagaccccgtcgtcataggtgaatggtgggatatggaccttgcgcagttggacaggaacacgatggacggtttccttgtcgacgtcccaaccggaagcacgatcaacggcaagcttggagacctctacagctgctccggcgccgggcgagacgggttcgtgctggaggtggagcccggcaagacgtacctgctgcggctgatgaacgccgccctcttctccgagtactacctcaaggtcgccggccacaggatgacggtggtcgcctccgacgccaactacgtcaggccctacaccacggacgtcgtcgccatcgcgcccggcgagaccatggacgtcctgctgccggccgacgcgcctccgggcaggtcctactacatggccgcgctggccatacaggcgcccgagcccgacgtgcaggtcccgccgaccatcacgcgcgggatagtccagtaccgcagcagcagcagcgacgtcgccgtcgatggtgtcgtcgtccctgcagcagatcccgcagtcgtcatgcccgacatgcctgaccagcacgacacgaccatcagcttccacttccacggcaacctctcgagcctgcgccgccgccaccgggtgccgccggcgcgcgccgacgaccacatgctcgtcacgctcagcctgggctccgtgtgccgcgacggcgggcgggcgtgcgccaggagcgacagcgacgagtccatcatcgtgggcaccatgaacgacgtctcgttccgggcgcccacggccgcggcgatgccgctgctggaggcgcactactacggccgcggcgacatggcgat

SEQ ID NO: 184484 - DNA, 226 bp, Zea mays
  Clone ID: MRT4577_99838C.1
tctgtattccattccagaaccatacttcgggggcccccgccgacgagctggggcggccatatacggcgaaagccctattccagcccttgggcggggatagataggttagttactatcaccaaaacccaaggcgggccagtgactatgctgtggtcatggaaatacgtgttgcaaattttttgctttaagggacctcaattgagggacgcctacatttcaaactttt

SEQ ID NO: 184485 - DNA, 310 bp, Zea mays
  Clone ID: MRT4577_99839C.1
cgtacggacccgcaagccaatgccgcgcccaaatcttcgtgacagatcaatcgttcgagcaagtaacgtggctggacgcaatgggcaccggggggaaccgagcgaccaatacgactggaccggcgcaagaacatgaggccaacggcaacggcaacggcgaacaaaaaacgcgccacttcgaggtcgggcacaagagcctggttaagagcgacgacctttaccagtacattctggacacgaacgggtacccgcgggagcccgagagcatgaatgagcttggcgagaacaccggcgagcacacatggaacct

SEQ ID NO: 184486 - DNA, 147 bp, Zea mays
  Clone ID: MRT4577_9983C.1
atcagcacattacttataacacagttatatctagagggatgaccaaacagaggtgcacaggggaaaattactgtgggcggacacttggctaaggtacttacaggaaacagtgatacaacttagactggaggcagaatacagatcgat

SEQ ID NO: 184487 - DNA, 356 bp, Zea mays
  unsure (1)..(356): unsure at all n locations
  Clone ID: MRT4577_99840C.1
cgtcgacaggggaattaatggcgtcgtcttctagcagcagccaccgccgcctgatccgcgcagccgccgtcctgctctccgtgctcgctgctgccagcgccagcgccgggaccttctgcgtgccggggtgggccattctgcactacctgttcccgagctgtctcttttttccttacgcgagttgcctttttcggatcctctttcttcttactgaattttgagggtcatggtttttttgtgaggtatttttttttctttttctcgcagtatctttttctttttctctattcttttttttttgtttatatttttttcgctcttttttcttcttttttttttctttgctttantttttt

SEQ ID NO: 184488 - DNA, 1385 bp, Zea mays
  Clone ID: MRT4577_99842C.1
cattggacgcctcgaggccggccgcccagtgccgcacaaccaccgtatctccctcacagcacagcctcactccatgacgctcgttgcctgccagcctgcctaatctataagctcatcgccgtcgaggcagtgcccagctgctctcttctatttctacaagcggtcaggtagtattattagtatgttgtatggctaatggccaatggccgatggcctgcgagacaacaccaactgcgccgagctgccgcagacaacaccaactgcacactgctgcataggaggtcaggagaaggcgctccagcgtagcacggcagcagggatttctggacggatctgattgaataaaccgtgaaggagatgccctggaatagattcatgcccttcctttcaaaatgttgtacttctactgttcagacatcttcatcatattcatctttttcctcgtccttctccccgatacaaccatggttatttgtgggtcttggcaaccctggtgagaagtatcaatccaccaggcacaacgtgggttttgatatgatagatgcatttgcgcaatcccagggtatacccctgactacacattacttcaaagcactctttggtgaagggatggttgatggagtccctgttcttcttgccaagccccagacttatatgaatctcagtggagaatctgtcggcccacttgctgcctattataaactgccacttaatcgtgtcctagtggcgtttgatgacatggacttgccatgtggagttctccgtctacagccaaaaggaggttctggacgacacaatgggaattggacggccagctggccagatggatcctaaagcctttgttcttcagaagttcaataggactggtcgtgaacggatcgattcagccgtgagagagggtgtcgatattctgaagatggtggctgcgaggggtttgacagaggcggcaaaactgacaaatgcggaccagaagtataagcatctgagatcacatggtatccagactaacgatgactagacaaagcttactagggggactactcttttcagcacatctcccgatattcagactaaagacgaaactcgttttatggcctgttgtctagagcatggtaggcttgagaaacaggcgctcgatgagcccctttagaccgtcgctgaacgtgaacgcgtccttgttgtcaccgtacatcaacggcatgctggcggttatgtcggcaactcgctgcactgctggaagtagtttgctgttctcaaagcgtgctccgtttatagttttccatgcatcttcaatcagggagcttatctgtgcaaaggcaacctcagctgtgacgccatgctcactgatgtagcattcgaccgagctgtccacgtcgtttttgttc

SEQ ID NO: 184489 - DNA, 1365 bp, Zea mays
  Clone ID: MRT4577_99843C.1
cacgacacgaaccaggcaaccagctgccgattgaggaaccgagcggaacactgttcaggtgacggcggcgcgctaccggtggcggatacggcggcgtcgtccccctcagcccctcctccatccccggcgcggcggcgccagcagccggcctgcagatttatggacggatctgattgaataaaccgtgaaggagatgccctggaatagattcatgcccttcttttcaaaatgttgtacttctaccgttcagacatcttcatcatattcatctttttcctcgtccttctccccgatacaaccatggttatttgtgggtcttggcaaccctggtgagaagtatcaatccaccaggcacaacgtgggttttgatatgatagatgcatttgcgcaatcccagggtatacccttgactacacattacttcaaagcactctttggtgaagggatggttgatggagtccctgttcttcttgccaagccccagacttatatgaatctcagtggagaatctgtcggcccacttgctgcctattataaactgccacttaatcgtgtcctagtggcttttgatgacatggacttgccatgtggagttctccgtctacagccaaaaggcggttctggacgacacaatgggttgaagagtgttatataccactttcgtaagaatcgagaattttgccgattaaggattggaattggacggccacctggccagatggatcctaaagcctttgttcttcagaagttcaataggaccggtcgtgaacggatcgattcagccgtgagagagggtgtcgatattctgaagatggtggctgcgaggggtttgacagaggcggcaagactgacaaatgccagaccagaagcataagcatctgagatcgcatggtatccagactaagcatctgagatcacatggtatccagcctaacgatgactagacaaagcttactaggaggggtactctttcagcacatctctcgatattcagactaaagacgaaactcgttttatggcctgttgagaaacaggcgttcgataagcccctttagaccgtcgctgaacgtgaacgcgtccttgttgtcaccgtacatcaacggcatgctggcggttatgtcggcaactcgctgcccttctggaagtagtttgctgttctcgcagcgtgccccgggtctagttttccttgcgtcttctttcggggtgcttatctgtgcaaaggcaacctcagctgtgacgccatgctcactgatgtagcattcgaccgagctgtccacgtcgtttttgttctttccacgctgcgaaagaacacatccatttatttatttatttattactgggcaacaatccaaaaaaaaaaaaaaa

SEQ ID NO: 184490 - DNA, 289 bp, Zea mays
  Clone ID: MRT4577_99844C.1
aaaaccgaaccttaaaaattactgaaaaattcaaagcccattaaaacccctaattacagggaaaaaaacctaaaagtacagtccaatttcaaatccccccaaaaattaagtcattagctacaaaagatttaaagagggagaaaaaaaaaaaaaagggccaaacttattgaaaagcccttttatgctttcgaccccaaatacacaccttattttttttctttggggaaaatatttttgccgataattccccaaaattattccttgggataaaaaatccaaaaacaccatt

SEQ ID NO: 184491 - DNA, 288 bp, Zea mays
  unsure (1)..(288): unsure at all n locations
  Clone ID: MRT4577_99845C.1
gattgatccctggtgggtggaccgcgtggcaaggtcaaccagtggctgggatggcctcntcngcgtccgcgccagcgttcacaggcccgcgcttcgccccggcggatccgacgctgtccaagccgtggagggggcttatccacggcaacaccgggtacctctacctctggaacccggagaccaaggtttcccaattcgagcgtcccgtcgcttccgtgcccgccccccaatcccagccggttgtctacttcaggccccatgattggccgataagccacgcacctggcc

SEQ ID NO: 184492 - DNA, 283 bp, Zea mays
  Clone ID: MRT4577_99846C.1
ctgtcgcttcctgctcttgccctgtaaagatgcatccaggtggcaagggacactgccagggtcattctcactgtgggccacctcctgcccatggtccaggacactgtcctgggggcaatcaccctccaggacctggtggcccatcccatagccatagtccaggacactgtcctgggggaaatcaccctccaggacctggtggcccatcccatggccatggtccaggacactgtcctgggggacaacatcaccctccagggactgatcggccacccatgggcat

SEQ ID NO: 184493 - DNA, 236 bp, Zea mays
  Clone ID: MRT4577_99847C.1
attctctagacacgatcgagcacacatgctcgatgacttttttggagatatcacaggccacgaggccttgcaagcaggagggagtactgttatctagggcatgtcggacacggctccacgttccatgtttaccattacagctactcagtctgtggcttttagcacggtaccggcggtatgaggcacggtacgggaaccactggtggtatgggccagctgggtgagcacgggtgtgc

SEQ ID NO: 184494 - DNA, 378 bp, Zea mays
  Clone ID: MRT4577_99848C.1
ctcgtgtaataatacattcgtactgaaaaaaataaaattcaatcacgtaacacgataaagaatgttttcttacatatattaaaaaaaaagagttcatatatatatgctttatacgatgatcttatatatgaattaatccttcagaattttcagaaacaaatcatttccatccccaaaattcccttgtttagatttgttgctttcttgaactgcctgccaatgaagctgatgctgtctgaggtcttttatttgctggaatgtaacccttgttgattgtattaagctttgtctgaacaccctggaacttcttcatcttgtacaagttagtatcactgccatatctgttcaattcttccaatttctttgcagtagtttccg

SEQ ID NO: 184495 - DNA, 248 bp, Zea mays
  unsure (1)..(248): unsure at all n locations
  Clone ID: MRT4577_99849C.1
gggttttggttcgtnctangctgctcgcgtacgtctgctcgttattctcgtcgagtgaagcctgatctggtcttgccattaattggggacttgcccattgtacaactggcatctcatcgtccggagggtgcctcatggagtcctggtgagatgcttgagcttgtccagagcccttctttgcgccagctactagattcgttcacccacgttctgcgaactgtgcataaagatgttgctcagttgggagg

SEQ ID NO: 184496 - DNA, 1152 bp, Zea mays
  Clone ID: MRT4577_9984C.1
aatagaagcagagatgatttacgtagaagcagaaatgatttacataatttcggtacatttgcggtgagtgtcacgaaaattagcgacaacgcgaatacctgaaccatcagctacgcttgttcctcagtgccatctgcaagcggtccaaactggcagaattttccgtctacagcatcggaaacagaacgcaagccgaatgggctcagaaagatggtgatcccggccgcgcccagagccccagacaaacggtcactgcgggacagggacgcccagccgaatgggctcctccggtgagtgcgcctctctgccgaggtgcttccacgagaccaccacgcctcgcttcacagcggcggcgtacacggtcatggcgtcagcccaccgcccctgccggctcagctctcccaggagcgcttcgaacgcgttccgtcccggcacgaagtccctcacgatcatcacaagcacaagcacctgcagcgcgtcgcgggccctgccacggtcacagagcgcgcgcaccacgtccgtgtaggcgcgcttccgcagcgcgtatcccttgcgcaccatgtcctccaggagcgccacggccgcgtccacctcgccgccgcgcgccagcgcctgcgccatcaggcagtacgtgtaggacaccggctcgtggcccgaagccactaccttgccgaacacctcctccgcgtcgccgagggccgaggcgtccgtcgcgcaccgccggcacaggccccgagccagcgtgtccagcgcgcgcccgtccacctcgaacccagcgcgctccatccgcttgtacgtctgccacgccgctgaggtctcgccggcgcggagcagcgccgtcagcacgatcccgaagctggtcttgtctggcaggcaggcggcgtcgttgttgccgcacatctccatgagcagcgcgaacgctttgagcgggtttccctccttgcagtggccgttcaggagcgcgttgtaggtgaatgtcgtcggcgagaggcccatcccgatcgcatcgtggaagatggccgtggcctcctccgtccgcccgaccttacagaacccgtcgagcacgatggtgaaggtgtagatgtcaggtgtcaggggcgagtccttgagcttcttgaggagttcgaacgcctcctccagccggcctcgagg

SEQ ID NO: 184497 - DNA, 537 bp, Zea mays
  Clone ID: MRT4577_99850C.1
ataaaaaaaaaaaaaaaaaaaaaaaaaaaaaaaaaaaaaaaaaaaaaaaaaaaaaaaaaaaaaaaaaaataaaaaaaatattaaaaaaatttaaataaaaattttttccttgtttaatacatgtctttttattggcctttttttcccctttttcctgattttttttgggcttttctttcctcctttttggggtcctttttttctttttttaaccctgattttttcccttttgtttgccccttttttttacaccccccctttctgcatattccctttgttcctacaaaagttccattttggtttcacccttttccactttttttacaagattgggtgttctccttatcgccccctttttccccccttttctcactttttttccccttgtttcgcgtttgctccccccttgactttgtaccttcctctggcccggtcctttggttcttttccctttctttttttcctttttcgccgcctttcccctttttcttttccttttttggctttctttttgggtcttattttaagttttacccc

SEQ ID NO: 184498 - DNA, 365 bp, Zea mays
  unsure (1)..(365): unsure at all n locations
  Clone ID: MRT4577_99851C.1
acgcctgcaggtaccggtccggnattacttcccgggtcgacgagctcactagtcggcggccgccctttttttttttttttttttttttttttttaataccataatgtgaaatgtaactttaagcattccttggtacatgaggtgaacaaaacctgcgcttaaatctgtgccctccttcaaaccataaagcctcaagcgtaaacttttcccaacgcaaaaaaaacctatttcgcctgaaaaatgagcgcccctcatcccagggatgacagacaaaaattccactacgattaaaaaagattcgggaactaagcttttgaccggctgagacaattccactccacccaatgtgatctccgggaacacag

SEQ ID NO: 184499 - DNA, 503 bp, Zea mays
  Clone ID: MRT4577_99852C.1
tacgtaagctcggaattcggctcgtgggctttctaaacaggccgtcgtcccacctagccgggtgccggcaccgggggtgcttctagcacacaccgcgggacgtctcccttttcacgacgctcagcctatgcgggctcggcgacaccacgctgcccatgtgcaccaggcggaagctggccgagtaccctggcctgcatgcgtacacgcgcgacatctaccagctgccgaaggtggtcgagacgtgcgacatggacgccatcatggcaggatactacaagacactgtagcgacttaaccccggcgggatccagccacacccgccggccacctgcgatagggagacagtcttgaggccgcatggcagggaggccttgacctgtgctgatggcacgccgattgaagcgagtgcggcttcataatcattcacgatccgaacaaaacttctgaaacagcacaaagagattatcgtcctaccagatactgatgcttgagctgaacaggat

SEQ ID NO: 184500 - DNA, 356 bp, Zea mays
  Clone ID: MRT4577_99853C.1
ggctgaatgtcttgtatcagttgtccagtagacttaccgcataagcggatatggacaactgatggctgaatgtcttgtatcaataagattttttttccacatccgacaccattctttttggatcaatcgggcttttaatattacctacctttcatcgagacaacttggcagttggtacacattaaatatgcgcaaatcagttcaggtcgtttcagtcctatttgaataattgctctagtttaatatgccatctgtggtcaattggtcataatttcagtttctttccaattatagcgtcgcattcgtacaagatcatgtagcaattgatttggcaagttgtgttccaaatcgcatgt

SEQ ID NO: 184501 - DNA, 807 bp, Zea mays
  Clone ID: MRT4577_99854C.1
atccatacaactcacgtacatgaatcatatcatgagatcttctagtggattaagatataaaacttaaatatattgggctatatgaaagagttttttagatgtatttagtgcttaaagaactgaaacgtagtatctagattgtacatgtctttatgactatatggatgagttggtgtcccgtttgatttttcacgcgcctttgaatccatgtgaagatcgatgtgctagctagctagctcgctcttcatgcgttcgtctggattttgtttgaaattcacgcagcatatatgtgtggaatataatctgtatgcacatacaggtacggcctgccgttcgtgtccccgaacaacatcctggtgtcgacgatcaacgggacggggtcggtgatcgaggccatctacgtggtgatcttcctcatcttcgcggtggaccggcgggccaggctcagcatgctggacataacagggcatcgtcgcctccatcttcaccaccgtggtgctcgtctcgctgctggccctccacggcaacgcccgcaaggtcttctgcggcctcgccgccaccatcttctccatctgcatgtacgcctcgccgctctccatcatggtacgtgagcgatgatgattggttgttgctgccttgctgggtagctagctccagcgggtccccttctgggcgtgtacgtgcgtccttgctgtcaacgtacggcatcagttaacaagctaagcgtgtgcttggtgtgtgcagaggctggtgatcaagacgaagagcgtggagttcacgccgttcctggaaacccgccccggccgg

SEQ ID NO: 184502 - DNA, 603 bp, Zea mays
  Clone ID: MRT4577_99855C.1
agcaaggcaagcacatccttgttacagcacaaagtcttaacgaaagatatccataggtttctttttcctcagctaaaaccaccagattacaattacaaaagcatagcagcacttaaccatgtagaacaaagggaccatatcttttttttcagtcctgtttcactatcatatggaaagtattggtctcatcttcatcagcaagctccttgagaacctcgtcatcgatttcggtcacacggttttgcaatgggtcatcgaaatgacggccaaagaagaccatttttgcgatccaagctttcctcctgttactgttgtatttatcttcctcccatgtcccagacgccacaagaaggtagacaaacaccatcctctcctggccaggccggaacgccctcgcgattgcctgccttgtcttggaatggttccactccgaatcaagcatcaccagtctggacgcgccggtgagactgataccctcggcacaggctgtagttgaagcaatcagcaccttcctcttccctcttctgtcgctgttgaatttatccatgacatctgaccgcacatgcagttcttggtctccctgcagcaccaggacttcctgcc

SEQ ID NO: 184503 - DNA, 467 bp, Zea mays
  Clone ID: MRT4577_99856C.1
gcttattctttttgtttgttgttactgtttacgggcatacacatagcgcaaatttatatgctggatttgtcaaacacagaaatcaccagcacacacccagagaggactacgcttcatgccgccaagatcccgtatgagcctacagagatgcctacagcctactttcactactactgacctttatgtgattgcttggcttggggaccgccgttacttcctaaatgcgtcctgttctcattctacatcgatctatcgccctgagggcagactgggcaccaattccgggggtcttgtttttgttgccttcagcggaactaagctcaatgtgcaatgcagtaatgccaagctccttgttgctctgtgcgacctcttgatcagaacccatagtagcgtatggtgacgacttgccacggtcatacttgaccttcatgccaccggcgatccgaaccatattttccctcccatac

SEQ ID NO: 184504 - DNA, 722 bp, Zea mays
  Clone ID: MRT4577_99857C.1
tttttttccggccggggaaaggtcaaatctttgtttcccctcttccgcctccgctcccatccgcatcgccgcctccgtccctgtacccgtcacgtccgccgcgcgagagccactcgaagccgccgcggtcatccgcccacgcaaagcctccacctcctccccttcctagagctcgtcgtgggaggctacctcaagctcgccgtgctgtgcgttgcgcggcagcggctgctgtcgctgtcggtgtcgctgtgctacgctcaccccgccgattcctccgccacccgcgcacgccgaacaatttttggtggcctcggaccttaagctttttccgctagggtcggctccaaggtcgaccgtgtatgccctagccgaacgggaacagacatgaaagaggcgatggctgtggctgcgctagatgagatatggtggcgggagccagaggaggaagcgccggtggagtggacgtggagctggggcgcgggcacggacgggcagctggggaacggcggattcgacgaccaccaccttccgcagccgctgcttctcccgactccatgccgcagccgtgtctctttcgtcgctggtggcggcgcccacgctatcgccctcacaagtgatggtgaagtatttacttggggcagaggtacacatggccaacttggccatgggaacttggacaacatgcctcatccgaagttggttaagttccttgaaatcatact

SEQ ID NO: 184505 - DNA, 428 bp, Zea mays
  Clone ID: MRT4577_99858C.1
gtccgaggccggggagagcctctggagctaccatgacccgtagactgcattgcccgattgcacgcctagctaggccggccatggccagcggcggggccagccgcatggagtgcggtaatagtacagactatagtgaactccccctagtagtaccccggggccggtagcaaaccatggcaacaacaggaggagtggaggaggtacatgttactgccggtacataccggccggtgcagcgcatgcagcgtcctctatctggtaatatatacgagtgtgtatgccataagcatagtgtgacatgctcgctagtaatggtatatagttaccagggcatccgcttcaactttcaaatgctattattactacctttcaaatttaatatccttttttctgctccagaaaaaaaataaaagggccggccgcgacta

SEQ ID NO: 184506 - DNA, 233 bp, Zea mays
  Clone ID: MRT4577_99859C.1
atcgtttcgaatctagtatactttcgcgcttatcatcatgtacggtttccgcacgagcgtttgtatgaggcgtgtcctaacattgcgcccggatcctacccatgacgcacgacccaggcagccacaagaggaggcgcgacgcagcagacgcactataccaataccactggctattcattcattgccttgaactacacagttagaatgatcatcgcatgtgacactggatcctc

SEQ ID NO: 184507 - DNA, 997 bp, Zea mays
  unsure (1)..(997): unsure at all n locations
  Clone ID: MRT4577_9985C.1
cctcgaggccggccgggccggggtttcaattcgccgctaactgtcgtctgatgcctccactccgttccatctgacgattccatcaaccgacagcctagagagggtggaggccaggaggccgaggagcctggccaagatcttcggcacggccgtctgcgtgagcggcgccatggccatggctttcttcaagggcccgaagctgctcggcgacggccccaacgctctccagctcctcctccacgcgggcggcggcaggtgggtggccggcgcgctcttcctcgtgggcagcagctcctgctggtcgctctggctcatcctgcaggtgcccatctgcaagtcgtacgtggagccgctggctctgtcggcgtggatgtgcgtcctgtccacgctccagtccgcgctgctcgtctccttcctcctgccggaccccangcgcctggaggatccactcgctcttcgagctctcctgctgcgtcttctcgggcgtgttcgggtcaggcgtcacgttctacctgcagtcgtggagcatctcggtgagaggcccgctctactccgccatgttcaacccgctctgcaccgtgatcaccaccgtcttcgccgccgccgtcctccgtgaagagctgcacgtcggcagcttgctgggcgcgatcgccgtcatcgcggggctgtacgtggtgctgtggggcaaagcgggcgacgccaagaggcgggggctgcaggaccaggagccagagcagcactcggacgacgacttggagaagacgtcggcgcggtcggattcgatggtcgacgtcggcaatggcatcgccgagcccctcctggccggcggcgatccaacggcgaagtagaggggattttttgctcctcagtgttctgtgcgtgcgccgtgtttcagggtcgtcgttatgctactggcgcagtgcgcgcagtcccattttttttggtcatgtacagtactctagcagtttcaaaatggccggttggtggagtttgactt

SEQ ID NO: 184508 - DNA, 307 bp, Zea mays
  Clone ID: MRT4577_99860C.1
cggacgcttagctaagaatgattcattgagatctcatgagctgaaacataaggacggatatctatgtggatacgatgctaatgcataccaactatatctatggacacaacgagacacagattgagatttcctgatttgctgcattaattagggacttgtacatcacctattaacaggtgatacctaaacaaccaggattacagaagtgtaggaacctacatctactttaccattacttgaatcacttcaatttattcaacgctggctaccgctcatcagctatgtccataatcgaacactacctata

SEQ ID NO: 184509 - DNA, 863 bp, Zea mays
  unsure (1)..(863): unsure at all n locations
  Clone ID: MRT4577_99861C.1
taatacgccgggtgtgggcaaccgagcgccatgttccagccgctccggcaacagtgctgccagcagcagattaggatgatggacgtgcagtccgttgcgcagcagctgcagatgattatgcagcttgagggtgccgctgccgccagcagcagcctgtacgagccagctttgatgcagcagcaccagcagctgtgggcagcccagggtctcaaccccatgcccataatgatggcgcagaacatcccggccatgggtggactctaccagtaccagttgcccagctaccgcaccaacccctgtggcgtctccgctgccattccgccctactactgattcatgatatttgggaaatctcctctatccatctctctctatctatatatgtaataatgcagtaagacgacacacattatcatgtgtggtatgaccaataatatatgcatggtcataataaagttttggttttaatgaaaaaaaaaaaaaaaaaaaaaaaaaaaaaaaaaaaaaaaaaaaaaaaaaaaaaaaaaaaaaaaaaaaaaaaccaaaaaaaaaaaaaaaaaaaactttnccctngcccccccccccgccaagggccggagggtgaaaatttcaatgacccctggcccccgttggaccttaaaggaaaaagtcccacttcgccttattgggattaaaataaaatggacggggctttcgagccccacttttggaaatggaaaaccgttaccaaccccaattttcttgccttaaaaaccctttcccctttccccttttttggaaaaaaggaaaaagccgaaaaggccttcccatccctaccttttccaaaatttaaaaggaaaagggcctgtccttgacccttaaaa

SEQ ID NO: 184510 - DNA, 2551 bp, Zea mays
  Clone ID: MRT4577_99862C.1
agtccgccgcctcctcgttaacgttcacatctcccacgccacacggccacacccacactggaagcctgccttggcctactcccgtcccgtcgcagccgtctcgctcctccgtctccattccccgcctcgtcccgccgcagccgcggccgcgaggagcctcccctgcctctcttcccgctcgctgggccctgcggctcgcagccagcattccgggctccgggtcgccgtgagccgcgggaggtttcgcgcggatctgaggctgcccgggctggggaattcgggttgataccggcgggagtcgggctgagttgatttggcgagtttaggtgtgcggagggaggaattccgggaggaacagttggttggtctgcgagagtttggtgggcggtagggtggtcggcgggcgggcgacgtacttgcgccccggaggccgccgtcgctgcttcgggcaagcgatgatcgagcagttcgtcaacttcgtcatccggccgcctcgtgcagagtacaatccagatcagtatttatgggagccagagttcactcttgccggaaggaagtataaaaggctagatttggagcttacgaatgaaagaagtcagaccttaaagtgcagccactatgttcctgctgtcatcccagaaaacacttcccttccatgtgtagtctactgccatgggaatagtggatgcagagcagatgcaaatgaagccgctgtcatacttcttccttcaaatatcaccctttttacacttgactttgcgggatcagggctatcaagtggagattatgtcagccttggttggcatgagaagcaggatctcaaatgtgttgtgtcctttctgcgtaagaataagcaagtttcttgtataggtctttggggacgctcaatgggtgctgttacaagtctgctatatggagcagaagacccctcaattgctggcatggttctggatagtgctttcgctaacttatatgacttaatgatggagcttgtagaagtttacaaaatacgagttcctaagttcacggttaagatggctgttcagtacatgcgatgcgtcattcagagaagagctaaatttgacataatggatcttaatgttgtccagtttgcacccaagacgtttattcctgcactatttggacatgcttcaaatgatatgtttattcagcctcatcacacagaccatattcatcaggcttatgcgggggataaaaatctaatcaaatttgagggtgatcacaattcgccaagaccccagttttattacgactctgtttcaatattcttctacaacgttcttcacccacctcagtttccttcaacctgcacacataaacttgataagtattataaccttggtgcttttaagggtgctgctggtactaatgagagcttattgtatgagatcatcaatggtctacgggcagctggcactgatgcaggaagttcatcagctgctacagctagtttcacgaatgctacaaaatcagtagttgaattgctgacagagagggtaaatcagctatctgttaaaaatgataatgacttggattttcttttggatgaaaaccataaccttactgagatggacggtaacacaggagagtgtcatttagaggataaatcaaacagacaaacagatgaatgctgttcgtataccagctcaaaccgagagagctggggaagatgttcttccttgggtggagctagtgatggattgtcatcaggcgaacagcctgagatacctaatcataagcttaagagcttgacactaagggctctagcaacaccactgagacgggtacgaaggaaacctctcgcgatcccgaaggagaagaatcgatcactgtggaagaggttgaaaaaggagaggcaacagatgggggaaaacatatcccagcgtctgcggttgtgtctccaaggccaggctcgacacaagagaaccaaatcgtcttgacaactgtggatacatatttagctcttggacaaatctgctaggaactcactgatgattcagcaaccgagccgcgccgcaatttggagcttctggcactcagcgccaatggtgccgtgtacattggttgaagattacctagaaatcttagatcatggattgtcccggacccaatgtgttaactgtcagtctttaatgttcgtttcttattttttttcaatgtaatcctgtaaaattgaaggctagaactgcccctgtacttgtggttgggggaggggcaccggttcgttgcttttttcaggatttgtgtagggtttggaggtcgagctgtatcgacagaatctcattttctatgttgctcggtaacgtctctgatttgcaaaaccactttattcccacccgtgttgccggaatttagcctgtgttcagctgcaactgcaagttggtaggatttgcagcccttcacgccattgcagtgatgatatctgcacttgcaagtcgcgagacctgtcaccgtacatgtaagcggaagcccgccgaggtctgctcggacaacctacatgtcaccaagggaaccgtccagatcacctggc

SEQ ID NO: 184511 - DNA, 1414 bp, Zea mays
  Clone ID: MRT4577_99863C.1
gactcatgacattttgccattttggtcacaagatcagttcatcagcaactcggacttacaaagaatcataattcccttccacactgaaaaaaaaggtaaacctagtacacagcaacgcctacatccacattttttttttatacaaactccatattattactttcggttactataggtcctgtaacatattcaatacaacaactcagttgcgatggagctgccactcataactggctgcaggcaccccacagaattcctctccaccaccaggcccacatagtaatccaaactctgcagcttgcacggtaacaacagatagcgtactttgcactactttgcaccgagtgagatccacgagtagttgaattctaccctgctagataacctagagactgtttcttatagagaaccccaggactgaaaatgatatacgtagtaaatgcccacattgcctagcgttcttgattaaagctgcaccttgcggtcataaacccaactgaaaggaataaccggtgcttgcttcgccctcgcttgagctctatcatccagccgcctgatcctcggcgccaaggtacagacaaagtcctgcgcccttctcccttctccagacagccctgtgagctccgcgactttccacctctggaccaggaactcgaggatgtcggcgtagtctttggcggtgtagacgcccagcctctgcgccaccgcgctgaagtgctcgaacaggttgtcgtccttaccgtcgtacatgagatgggctggcatcgtgatcttcttcctcatcatgtcagcaaacgcaagcactgtgtaatcagggtccatctcgaagagctaccagtaccagtaccagctgcccagctaccgcaccaacccctgtggcgtctccgctgccattccgccctactactgattcatgatatttgggaaatctcctctatccatccctctctatctatatatgtaataatgcagtaagacgacacacattatcatgtgtggtatgaccaataatatatgcatcataataaagttttggttttaaagaattaaaaaaaaaaaaaaaaaaaaaaaaaaaaaaaaaaaaaaaaaaaaaaaaaaaaaaaaaaaaaaaaaaaaaaaaaaaaaaaaaaaaaaaaaaaaaaaaaaaaaaaaaaaaaaaaaaaaaaaaaatggtttttccccttggcccggaccccccttagggggaatttttgaaaattcccaccaccctggggggccgttgggccttccttttaggggccccaatcccccctaaaggggggggtttaaaaattcccgggcccgcgttttaaaaacgcgggactgggaaaaacccgggggttccccaatttaaaggccttggaagaaaatcccccttttcccaattgggttaataccaaaaaggccccccccc

SEQ ID NO: 184512 - DNA, 543 bp, Zea mays
  Clone ID: MRT4577_99864C.1
acaagctttttttttttttttttttttttttttttcgtttttttctattttttttttttttttttttttttttttttttttttttttttttttttttttttttttttttttttttttttttttcccccccgcgggggggcccttgggggcgaattccaaccccttgggggccgtttttaggggatcccagcttggccccaaatttggggaaaaaatgggaaaaattttttcctggggaaaattgttttcccttaaaaattccacaaaaaatacaagccggaagcaaaaagggaaaacccgggggggcctaaggggggggctaacccaaattaattgggggggcctcactgccccttttccaaggggaaaacctggggggccactttttttaaaaaatcgcccaacccccggggaaagggggtttggtttttgggcccttttccgttttcttgttaaataaatcgttggcctcgggcgttcgggtggggggggcggttttagctaattaaaagggggaaaaagggtttccccaaaaataagggg

SEQ ID NO: 184513 - DNA, 581 bp, Zea mays
  Clone ID: MRT4577_99865C.1
aaagaagtcagaccttaaagtgcagccactatgttcctgctgtcatcccagaaaacacttcccttccatgtgtagtctactgccatgggaatagtggatgcagagcagatgcaaatgaagccgctgtcatacttcttccttcaaatatcaccctttttacacttgactttgcgggatcagggctagggaggggagattatgtcagccttggttggcatgaggtgcgtacacactataaattttgtagcaacattcatattctattttaaatggcaagtcctgaaaaatattaccactgtggtactcccagaagcaggatctcaaatgtgctgtgtcctttctgcgtaagaataagcaagtttcttgtataggtctttggggacgctcaatgggtgctgttacaaggtattaatttatctaaaatgcttattctctactttgtgtagaatttcttattggtctatttctgtgataatataccttttataatgttttggattatagcagaatatatctcttaccaagtgcctctaaaagaatggggactttggactgatcattaaattggcccttcccccttt

SEQ ID NO: 184514 - DNA, 499 bp, Zea mays
  Clone ID: MRT4577_99866C.1
agcagtggtaacaacgcagagtactttttttttttttttttttttttttttttttttttttttttttttttttttttttttttttgggaatttggaacaggtcctggccaggaacaagggagagaacccgcccctaagcagctgcgagaacgggcctggaaagcccccccaaagggggggccgggaaacccaagcaaagggggcccgccggccccacgctggcttttcctaccgggtctgaaggggatattccaatctgttgggagcgccacagataggggtccctgggtggcaaccgaaccggggcccttggggggggcgccccccccgccctattggggggggggccccccccgcgttttccggccggggttggcggccaacaccccccctgcgcgtgggccgggccccccgctctctcctcccccggcgccggccgggttcccccccccggcgctggcgcgtctttgcccccccctgcccgtgccccccccccggc

SEQ ID NO: 184515 - DNA, 175 bp, Zea mays
  unsure (1)..(175): unsure at all n locations
  Clone ID: MRT4577_99867C.1
ccgagatctaccagaagaagaagatgtacccgggcggcctgcacacaatanccgctcggactagaggactcaacccgtgtcaagatcgatcagactgcgagcaagaggtgatcaaggacagcacgcccagccctgatgccttcttctatgctgcagggaacacgccgatgccacc

SEQ ID NO: 184516 - DNA, 747 bp, Zea mays
  unsure (1)..(747): unsure at all n locations
  Clone ID: MRT4577_99868C.1
gggtacctcgaggccggccgggattnttcctccactcgagcgcaggattttctttttgatgaaaccataaccttactgagatggacggtaacacaggagagtgtcatttagaggataaagcaaacagacaaacagaggaatgctgttcatataccagctcaaaccgagagagctggggaagatgttcttccttgggtggagctagtgatggattgtcaacaggcgaacagcctgagatacctaatcataagcttaagagcttgacactaagggctctagcaaccccactgagacgggtacgaaggaaacctctcgcgatcccgaaggagaagaatcgatcactgtggaagaggttgaaaaaggagaggcaacagatgggggaaaacatatcccagcgtctgcggttgtgtctccaaggccaggctcgacacaagagaaccaaatcgtcttgacaactgtggatacatatttagctcttggacaaatctgctaggaactcactgatgattcagcaaccgagctgcgctgcaatttggagcttctggcactcagcgccaatcgtgccgtgtacattggttgaagattacctagaaatcttagatcatggattgtcccggacccaatgtgttaactgtcagtctttaatgttcgtttcttatgtttttttttcaatgtaatcctgaaaattgaaggctagaactgcccctgtacttgttggtgggggaggggcaccggttcgttgctttt

SEQ ID NO: 184517 - DNA, 260 bp, Zea mays
  unsure (1)..(260): unsure at all n locations
  Clone ID: MRT4577_99869C.1
ctgcacgtcgttctccatggagagcctctgctcttgatcggcgctcgaccacacctcccatgccgtgcactcgccagactcgccttccctttgcccatcttcaacgccagccgatcctctccttccccacctcaggtcgacggcctcaccttccttggcgcccaagctctgctcggcacccatcccagcccgngtcaccctcttgctggacgcagtcatcgttactcgtatcgcagttcgtcgagctcatcccatactcg

SEQ ID NO: 184518 - DNA, 475 bp, Zea mays
  Clone ID: MRT4577_9986C.1
ctcctaagggcgattgggttcatcgaggccggccgggacttccgagaggcttctttggctgatttttcgccatgacgccgccgccgccgctcctcgcctgcctcctcaccctcgtccttgccgctgcggtggcgccaccggcgggcgccgtctgcgttccgcgcaagcccggaggccatagcaagccaggagcaccggccaagtctgcgccatcgaagccgaagccgaagcccacgcaggcgccggcgccgccgaaaccgacgccgatcgctccggaagccgacatcgcgagtagcctgtgcctgaaacttgctacacgaacctgtgcatggcgcccatcgagaaggagccgcccacgcaggtgcccggcgatctgctgctgaacacggacctaaggcagtacaaggaccatggtaattggatcgagattctacgtgtggataacctggtcatcaccggcaagggaaaccttgac

SEQ ID NO: 184519 - DNA, 240 bp, Zea mays
  Clone ID: MRT4577_99870C.1
ggggggcacttttaaaagccaaggggggtttcaaacaaataccaaacgtgcgaacccagaaagcaggctaagcacgcaaaaaaaaaaaactatcgcccctcttaaaattagaaaccagtggccccggagcttgatgatacttaccaaaaaaacatgctaggtttattcatgctgagcgcagaaataggacaggccctagaaaccacaagggtgtttaaaatagcggagagcaactgtccc

SEQ ID NO: 184520 - DNA, 362 bp, Zea mays
  Clone ID: MRT4577_99871C.1
agttgaacatgtgtgcgaccacataagcctttaccagcataatacctgtttttcaacattttttcatgttttttttgcaccaggaggttcggacatatatatacacgcaaaaaaaaagtcgactgttgcaatgaaggttctaggagcataatagaaaccatacacaagatagtagtgaacattgtagaaaagacatcagttatgtgttacaatgagttgttcacaatctgagtttaatgagttgttcaaaacttgagtttaaagtacagtcaacaaaatcaccacatgtcatatctaggtgcaggcattgaatcattgatctcactgttcctacacagttgaacacttttttttgagcttct

SEQ ID NO: 184521 - DNA, 421 bp, Zea mays
  Clone ID: MRT4577_99872C.1
ttccgttgctgtctgcagtaatcgtgactccgtgacacataggccatccggaaacagttgttattggctgcatcgacagcctttagaaaggtatgcagaatctgggagcaccagaacacactctttcctatcgaacatgatggcttactgcacaccgcactactcaccctctgctgaaatgcaaccgtgctctgtaagggaacagtaacgtgctgcatacacataagatctccgccaaaaggttgtggctctcatctgcgcacatatctgaagcaagtaatcgagcacatgtgcctgcttaaactgcaacagtgccggatgcacattcacttcacagttcaacggcacaacctatgccagagtatataaggatgccaccaagaggagttctccagagatgatgacagatgtggaaaacccc

SEQ ID NO: 184522 - DNA, 532 bp, Zea mays
  Clone ID: MRT4577_99873C.1
ggaaagcaaagcaagagttattgcctccttagtcctagttgtagttaacttatcattctcttaataagcataaaacaaacagacaccttaatattaagatgtatacgagacaataagatataccgaactataaacgtgaagaaatctttggatgctcacttctttcttttcctctccctcctccaagattaagctgcgtccgatttcaccatcgcagaatataccgccaaacggtaactccgggaagttctctaaaaacggggagctgtctgcgtttggacaaccaaagaaggaatcaccgcgacagctaccgacgaaagcaaaacctccaacgacttccggtttattcggcttaaacttgagatttctaagttgagcaaaaacatcatttagtgctgcttcagccactttgagatcagggaggtatacttggaattggtcgccgggtttgattccggcaccatcaactaaaagatcctgatcgtcagatccattcacttgatgaaatacaagggaggacatgatttttggc

SEQ ID NO: 184523 - DNA, 371 bp, Zea mays
  Clone ID: MRT4577_99874C.1
aaaagccgggggaaaatattaccaccgtttaccaccttattcgcccccgcggccgtccaaccaaaataaacctaaaaaagcacaaggccgttttcccccaactaaaaccccgccaaatcccccccccaaaaaaagcctacccgcagttggcaaactggccaccagcggtagaagttcctaaaaaggacccaaacccgaagccaccccgggtccttgggatatacaaaaaactaaaaaaactggcccaccccctaaaagggacaacaaggtacttaagaaggtggatttaaccccgcgttaaccactttcgaccgaacctcaacttggccccctaatgagcaaccttatttctccgggtccctctgtgggcc

SEQ ID NO: 184524 - DNA, 468 bp, Zea mays
  Clone ID: MRT4577_99875C.1
tgacactgtgacacagtctatgacgctatatgcacgcgtgcagctgcgccttgatcctgtataccgtacagccgccgcccttttttttttttgattaaaaggataataagagttgggacccaatggcacgaatgcgacaataaaacttatttctccttcccaaaacgggtgggacaaaccatggacatggaataatgcggacccgtatggccatcgcgacgatggtccaactctttcttaaaacgctacccacatgggatgactaagaccaaggggccacccttgctacttacctctactggggaggggttctccaaaccgaaccaaattttaaaacagccgacagtgcacttttaccgcacttaagaaagacgcgattgggacctatttcccggatcggtgaaactaaaaggggactacggcgcacaacagggagggggtgtttttttaacctgaacttgaaagggg

SEQ ID NO: 184525 - DNA, 732 bp, Zea mays
  Clone ID: MRT4577_99876C.1
cctcgaggccggccgggactccgtgcaaacacgtactccccgaataccgtctttgccttcttacatcgaagtaacttgcatgtctctttggacgagctctagactcacctctctacccctgtctcgcgccggcgcttataccgagcttccagaacatccctccgctatctatggcgcctccctactcgctatgtctcctcttcttatacatccacccgtatgtcgtgcacccctatccttcactgaaaagatacagatagctcgtactcttcataccacgagtaaccaatcctggagaggctgactccaataactgactgacagatcgatgaggaaataccactcatctacgaacggcgtagttgatgacacacagagatcgcatcatagatgccatctctgacagactcctcttgcatctaagtgcacaacaccattagcaatgtgccgtgcacgagctgactacacgagacattgtgactttgaacggaaaatctagaaaaggaacaaggttattttgaaaattacgactcactacacactaaggacaaccatctaactgactgctgctcaagatcgcctagctgatttcgctacgctggaggatgatcttatgatgacctattcgcttgtcgcactgctcaacaagctctacacatcaatggcgaaagaaggatgaggcagaccgcaggagctgccccataagatcctgtataaggacatcgaccttcc

SEQ ID NO: 184526 - DNA, 196 bp, Zea mays
  unsure (1)..(196): unsure at all n locations
  Clone ID: MRT4577_99877C.1
ggtattcgcgagctaagaagccccactcaatgtgggnaagccctctcgtatgtttctctagctgcatttgctggaagctgagctcgtgtctgcggtgtgtgacgaaaaaattttgcatccctttctgtgcccttggacctacccgatgtgagggcttgtttcttccgaggggggctgtgctctagtcggttttcgc

SEQ ID NO: 184527 - DNA, 1640 bp, Zea mays
  Clone ID: MRT4577_99878C.1
ttttttttttttttttttcttggttcgccaagcaatggatttttcatgtttcagcaaaggtctagatgcaacaatacagacgcaatagtcagactttacaaactaaaagcttaaagcctgcgcatcccgcatctgaatatttctgtcaatccagcatcatcagaccactacgaacgaatcaaatctgtacaagacggaggagccacctccaatgaatgaaaccaaccggagcacggtctatcttccagagggcagcaaggtggtgtccgttcttttttttttttttggttcgccaagcaatggattttttcatgtttcagcaaaggtctagatgcaacaatacagacgcgatagtcactgcgcatcccgcgatagtcactgcgcatcccgcgtctgaatatttctgtcactccagcatcatcagaccactacgaacgaatgaaatctgtacaagacggaggagccacctccaatgaatgaaaccaaccgagcacggagcacggtctatcttccagacggcagcaatgagttatcggccgatccctggccgagcagggacgcaggcagaggaagccacgggcctcccggcgcggcagcctccttggcaatggcttccgcgagggggacgaggccgcccggcttgtcgtaggtgaagtgcaggtccctgttctcagccaaagccatgagctccgactcgtccagcccccgcgcaggcccgaggctgcacctctcagccccgtgcttggcgagcgcgtccttgaacttgttgatcgttgcgttggtgcagctgaagctgctgacccggccctcggctccccggtagaacctgaagaaagggaggacgtggacgcggaggctgtagcacatggacttgtgcgtctcgtagttcacctgcaggaactgcacgcccgggttcttctcggcgaactgggcgatcttggggtggagggcgcggcagccgccgcagcctggggagaagaagtcgacgaccacgagtttgtcgccggcgctgagcagcgagtcggcgaggtcctgcgcggactcgacctcgcgcatgttggggtgctcccggttcgctcgccgttactaggggaatcctcgtaagtttcttctccgtcctggcgcggcggcgacgcgtgaaggaggtcttgctggcgtgcccgacgacctgcagggactccgcgagcgcggccctgccggcgcccctggcccggccagcgacgtcccggccgcacggggacgccacggcgccgttgcacaacgtgtcagccatgaccggtcgaatgaatctgtcggctcagcgacagcgagggcggctaaggcagcggagaaacctagagagtgcgagagctccacaacggggactgaggcgagctcgacgccggagagggggggagcttgaagggggggaacagcggcgagtaagggcgtcaaaccctagctcacaacgagtggatacggagagggagagctcgagggtgagtggagacgggagagggagagctcgagggagagagggggagctcgacagcggcggctgagagcgctaaaccctagttcacggcgactggagacggagagggagagctcgagggcgagtggagacacgagagggagagctcgacagcggcggctgaggg

SEQ ID NO: 184528 - DNA, 1541 bp, Zea mays
  Clone ID: MRT4577_99879C.1
cattgaggccctcgaggcgggccgggataccagcctcagccaggcccgtgacatacgcccaatttccgcgttcgtggggaaccaggctgggcgcatgcatccgaggccgcctcaccccgcgcatctccctcgagctctccctctagggttttccgccggcaccctcagccgccgctgtcgagctctccctctcgtgtctccactcgccctcgagctctccctctccgtctccagtcgtcgtgaactagggtttggcgctctcagccgccgctgttgagctccccctctctccctctcccgtctccactcgccctcgagctctccctctccgtatccactcgttgtgagctagggtttgacgcccttactcgccgctgtcgagctccccccctctccgtcgagctcgcctcagtccccgttgtggagctctcgcactctccaggtttctccgctgcctcagccgccctcgctgtcgctgagccgacagattcattcgaccggtcatggctgacacgttgtgcaacggcgccgtggtgtccccgtgcggccgggacgtcgctggccgggccaggggcgccgccagggccgcgctcgcggagtccctgcaggtcgccgggcacgccagcaagacctccttctccgctgggaggatgtcggtcaaggacagcaagccgaggcccctgtcgcgtagcctcgaggccgccgcgccaggacagatgaacctgtcgttccccaaggccatgcggtggtgggagaaggggctgcaccccaacatgcgcgaggtcgagtccgcgcaggacctggccgactcgctgctcagcgccggcgacaggctcgtggtcgtcgacttcttctccccaggctgcggcggctgccgcgccctccaccccaagatcgcccagttcgccgagaagaacccgggcgtgcagttcctgcaggtgaactacgagacgcacaagtccatgtgctacagccctccgcgtccacgtcctccctttcttcaggttctaccggggagccgagggccgggtcagcagcttcagctgcaccaacgcaacgatcaacaagttcaaggacgcgctcgccaagcacggggctgagaggtgtagcctcgggcctgcgcgggggctggacgagtcggagctcatggccttggctgagaacagggacctgcacttcacctacgacaagccgggcggcctcgtccccctcgccgaagctattgccaaggaggctgccgcaccgggaggcccgtggcttcctctgcctgcgtccctgctcggccagggatccgacaactcattgctgccctctggaagatagaccgtgctccgtgctcggttggtgtcattcattggaggtggctcctccgtcttgtacagatttgattcgttcgtagtggtctgatgatgctggagtgacagaaatattcagatgcgggatgcgcaggctttaagcttttagtttgtaaagtctgactattgcgcctgtattgttgcatctagacctttgctgaaacatgaaaaatccattgcttggcg

SEQ ID NO: 184529 - DNA, 1641 bp, Zea mays
  Clone ID: MRT4577_9987C.1
ttcctaatgagtcatgcataatagcagacacaggcaacagtgccccgtgagcacatgcaggatcagcagtacgacctccgactccgagctactgctcaccctctcgggctctcggcccgcccgtatgccagtctgtctctggtacactccttcatttcatcgcctagctagctactatatagtacgacctgcctgccttgctcttgccctgtgagcagcggcgtgcgatcgatcgaggcagtcgtcgtagtaataagccaacaaattaacaaccggccggaacgccatgctggaggagtacaaaccgtgtgcggccatggtggtgacgcagtgcatctacgccgctctagcgctcttgtccaaggcggcgttcaccggcggcatgagccccctggtgttcgtcgtctacaggcaggccgtcgccaccattgtactcgtccccgtcgtcatcgcggccaacaggaagaagatgaaggagatgacgacgggccttggactgacgggcttctcgctggtcttcgtcgcctcccttgtcggggcaacggtgaaccagtgcatgtactaccaaggggtgaatctgggctcgtcgtccatggcaacggccatgaccaacttgatccccgccatcaccttcgtcatggcggcatcagtcggcctagagagggtggaggccaggaggccgaggagcctggccaagatcttcggcacggccgtctgcgtgagcggcgccatggccatggctttcttcaagggcccgaagctgctcgggggcgacggccccaacgctctccagctcctcctccacgcgggcggcggcaggtgggtggccggcgcgctcttcctcgtgggcagcagctcctgctggtcgctctggctcatcctgcaggtgcccatctgcaagtcgtacgtggagccgctggctctgtcggcgtggatgtgcgtcctgtccacgctccagtccgcgctgctcgtctccttcctcctgccggaccccagcgcctggaggatccactcgctcttcgagctctcctgctgcgtcttctcgggcgtgttcgggtccggcgtcacgttctacctgcagtcgtggtgcatctccgtgaggggcccgctctactccgccatgttcaacccgctctgcaccgtgatcaccaccgtgttcgccgccgccgtcctccgcgaagagctgcacgtcggcagtttgctgggcgcaatcgccgtcatcgcggggctgtacgtggtgctgtggggcaaagcgggcgacgccaataagggcggggtggagccagagcaccactcggacgatctggagaagacgtcgtcagcgcggtcggatcacaattcgacggccgacgtcggcagtggcatcgccgagcccctcctggcgggcggcgatccaacggagaagtagatgggattttgctgctcctcagtgttctgtgcgtgcgcgcgcggtgttttcagggtcggtatgctagtgctactgtaacagtgccgtcccagttttgtcatgtacactagtggcagcttcaaatgactccgtgctgccgatgtgtattatccgcacaattttgttaagcaacgcggcgtccccgtccaaaaaaaaaaaaaaaaaagcggccgggtccgcctcacaggatctcg

SEQ ID NO: 184530 - DNA, 2003 bp, Zea mays
  Clone ID: MRT4577_99880C.1
caaacgctactttataaaaagggccgcttttttttttttcctgaaatccaccaatttgcaccgagcccccaacacaacatccacataatagtgcagtatgtaactaggatacaacagaaagagaaggttgcaatgcatcagaatggtagacaatgtcacaacgatagattcaaatggctctttgatcttttgcccacctctccagtatgcatgctcctttggtctttgcccacctctccagtatgcatgctcagttaaaaacaaatgctgccattgctgcctagctaactccacaacgtgcttctattcactgttggtacgtacttcatacaaagtgtttgggtataatggaagtatggtaacgtgacaaatagcgcaagcaatgaacaccacagctactcgatcctatcgtgaagggtcaccacaagatcgtgcgcatcgtccaggagcttccaaatgtccagctgcccagccatgctgttacactcccttatgatctcatccatgctgttgtagctttctattatcagtttccgcttctgcaacacactagcagcaatcgcatacagtaacagatcatctgttggaggcgctcccaactgcaatttacgccaggatgagtttgcgatctcggcgcggtttgctgcctgatcagcccacatcacctcccagagacatagggtctgctcgaaggtgagttccctccggaacatcacaaccaccattctgtaaacgaaaaagcagtcttcagcttggagcatctccaaatgtctgtagagatggaagtccttgtatttgattatcctggcaaccatattgagttgccggcgtatacccacttcatcaagcctaaagttgtggcgggctttcctcataaaaccagcaaagcaccagaaggcctcgtcatcgtcctctagaacagcaaggagaggcgcaagcaggtcactcattccttgacaatatccaatttcttggtcatatattgcgtaggcctcaagaatagcaacaaggcgtgacgcatgatggatccgatatggttctaagtggtcatagtctttgagaaaaacagctttagcagattcaattgccctctccttggaaactgcagcttgggatggagagtaggaaatccattcgtcgttagcacggactgcgtccaaacggataatccgttgccatgtctcaaaatcctcagttgcccgtgcagacttcacagggcgggcagccttagataacacaacatcatccatatttcctcctgtgttcgaatatcttgggatgctttcttgtccatcctcaaatgaggactcacaaactgaggccaagttcttatgagatgcttctacttgagtcacaacacttctttcactcccttcctcatcagaggagctagatgaagactggtttccattcatctgctctggctttgtttcagaagtgtcatcctgcacttcttgctctgtactgaggcatggaattccttcctcagttgtagcctctcccatgccagaattttcaagaacatcttcagattcaaaaggactaacacaaccagattcatcacctttttcagaactattgctcccttcatggttgactttaactgttttagttgactgcttgctctcttccatgatgtatgctaatttacgcaggcaatgtttcctcaataacaaatatcccttcctgttctgggccttgaccacatctctttgtgcttcagaactgtcaaggctataaactcccagaaggaacggccagacttgcgctctgatactcggttcaatccctccgctccgaactttcttcagaagcttcactccgccgtcctgaagcttcccctgcggtgtgaacaggtcgcaccactcttgcgccgtaagtggcgccttcctccgccgccgccaccacggagatttgagcccgcctctgcgggaagagacgacgatggcgacgagcacgaggcccgcggcggccgtgaccccgacggcggacgcggtgttcca

SEQ ID NO: 184531 - DNA, 1050 bp, Zea mays
  Clone ID: MRT4577_99881C.1
cctcgaggccggccgggggtagcggcgagacgagccgtttaaataggtgtcaagtggaagtgcagtgatgtatgcagctgaggcatcctaactaacggacgcgggggaaagcaaagcgttatccatcccgtccggacacgccaaccgctcgctcccttgcgcgcgactgcgctaccgccggcgccgccgcgtcggcattagcttgccgcgcgatggacatgtgtgccccacgccgcctgctcctcttctcactccccaccccgaagctctctccggagcatcctttgttcaggcaacggcgcaggggcaggacctggcccggcatcgctcgctgcgccactgaggttggcactggatggggaggcatcgtcgaggacgacctttctgagctcctgcagattctcccgagagatttgcgagataatctacagaatgagcctagaaaggaccaacttctggaggtcattctggatttgggaagacgaccagaggcacgattccttggtgactccggtggccaatatctacgggacagtgagatctcacaaaaagagttggaggatgctcagaaggctgtaggagagtttggaggtgacaaccgtgcaggaattgaaggtactttacataggatatctgctataaggagtaggaaaggaatggttgttggtttgacctgtcgagtcggccgagctgttactgggcatgttgacatggtccgtgatctcctaaattacaaagaaagtatcctatttttgggaaggcctggggtcggcaagactactgttatgcgtgagattgcgcgtgttttagcagatgaatttcagaaaagagtggtaattgtggacacaagtaatgagattggtggggatggggatgttcctcatgctgcgattggtggagcaagaaggatgcaagtacctgaaccatcaatgcagcatagggtgatgattgaagcagttgaaaaccatatgcctgaggtggttattgtagatgagatcggaactgaagcagaagcacaagcttgtcgatcaattgcagaaaggggtgtta

SEQ ID NO: 184532 - DNA, 450 bp, Zea mays
  Clone ID: MRT4577_99882C.1
ccagaaaaactttgaacgacacgtgcaacaaacatgtacatggtccaaaaatttggattcattaaacaggggccaatccccaaaccatttttttaaagatcaagcctacatggcacactttttaacataaaaaaacttcactgtataaactacttatataacataaacctaaactcaggatctaaaaaaagccttcttgccggcgtatatgatccaattgggaagactttaaccacattggaacctcacacattttgatacgggcctgccatggcccatgatgacctagtgaccttactttacacaaaaacattgacagatgtgaaccttacactttgagcacctctttctatacccttcggatacttaaacaaagaggcggtaaatcctgccaacaaagatggatattcacatttaagcactgtggtttgtaccagcaataaatatgcc

SEQ ID NO: 184533 - DNA, 186 bp, Zea mays
  Clone ID: MRT4577_99883C.1
ttagtattatcttttccaaaatcaaatctttctgaaacacttcactagatatccaacttgtaacatcttacatcaactccttcgaagaagcaaacgttcatcaattttcttttatttcttgatatctacttatttaagtggcatcttttttcttgaacaaccaaccatctacattcttctttgttt

SEQ ID NO: 184534 - DNA, 228 bp, Zea mays
  Clone ID: MRT4577_99884C.1
agtgtctaatgcgatgatcatgggaatgcccgactgggctgagcaagcaacgctgtattctacacagctgcctcgacctcctatggcgctaatgcgatggccctatgcacatagccgagcaactgcagccagcgtaacatctacgaacagactcatgacgaccatgcaattcaattagatcggaaagtagcatgcaccttatgactattacaaatttacttaatgcct

SEQ ID NO: 184535 - DNA, 244 bp, Zea mays
  Clone ID: MRT4577_99885C.1
gcgtacgctgactgcttggtctgacacgttgacttttttttgtgcggtcgcgtggttctaatggagaggggcttatcattatattccggagggaaccatggctatcaatatctcagggtctgtaacaaggattatataatcttctaacattagagcgtgggttcttgagaacgctactctaggttgtgcgtcgtttaataatatctggctactgtaaggcatccttgattggtttggtttttta

SEQ ID NO: 184536 - DNA, 401 bp, Zea mays
  unsure (1)..(401): unsure at all n locations
  Clone ID: MRT4577_99886C.1
tactcggtccgttgaattcccggggtcgagcccgacgcgtcacgtcccacgtccgtccgtcccatcgccgtctctgattctgttcagtaaggcttcgtgccttagtgaaatctctcgcgatctgtagnatgttagtgttgttgagtccaaaaaaaaanaaaaaangggccggcacgcttcttagaaaggatcctaagncattacgtnatcgcgtgccatgcngactgnntcatagctttcttctaattagtnggtcaccttaannattcatattcacttggcannngtcgttttaccaacngnntcgtgacctgnnggaaaactntnctggcgttaccccaaaacttaatcgccatttgcagcacaaaatccccctattcgccaagcttggcnnngtaata

SEQ ID NO: 184537 - DNA, 353 bp, Zea mays
  Clone ID: MRT4577_99887C.1
gccgccaaggtgctcggtccttccgaggaagctaaggctgcgttggggtgaggccctcacttcatccggcgactagcaccgcgtccggcagcgccagccctacactcgcccgcgccatggcctctgtctccgagctcgcctgcatctactcggccctcattctgcacgacgatgaggtgacagtcacggaggataagatcaatgccctcattaaagcagccggtgtaaatgttgagcctttttggcctggcttgtatgcaaaggccctggccaacgtcaacattgggagcctcatctgcaatgtacgggccgggtctcctgctccagcagctggtgctgcaccagcaggaggt

SEQ ID NO: 184538 - DNA, 310 bp, Zea mays
  Clone ID: MRT4577_99888C.1
ccggccgggaaattcttcccccctctccgatctcgacgcgaacctatgcgatcgatgacatcgatggatagtagatatgctgacgaaacaagctgcgtcatcgagcgcgcgttctcttcgtgctagccctagggctcgtttgtgccccgatcccagcagacgaaaagaagcacagagtctacgtcttcaacggcgaggcgacgaatgcgcaggacaacctctgctcgaaggttgtgcgagctgccctactacatggactccttgctcgccaaggagatcctcgacctctcactcaactccaagctggagc

SEQ ID NO: 184539 - DNA, 243 bp, Zea mays
  Clone ID: MRT4577_99889C.1
cggtcgaccacgcgtccgtgacggatacgatgttaaatggaactttattatgagcagcgacagaatgaatgaagtgtgaactctttcactatcaggacggacgcaaactgcaaatactaactgctcatgtgatcaatcataagagtaagagatcgcgtttgaaacattagcaattagcgtaaggaaagaccttgctactgaacgaatgacatcaagtataaatggttcgacacatatatttca

SEQ ID NO: 184540 - DNA, 891 bp, Zea mays
  unsure (1)..(891): unsure at all n locations
  Clone ID: MRT4577_9988C.1
ggcgagcacgacaacagccacgcctcacgccctcacctccaatcattggcctccccaacccaacctctccccgccccgtcctgttgagccgggtgattgacggattattagttaatccgggggcttcacctcgttttatcggcctcgttcgttcgcctccgcaaaaggctaacgccagcccgggcgcgcgctaacggcagcaacgacagcaacccgctggctagctagtcctccccacgattcgactccgccaccgtccccggcccagcacaccttttcttctctcctgaagcaaaaaccaccaaagactagtcctacaaaatctaggggttctatggctgtttcaatgagggaggtggatcctgtttttcaaggtgcaggtcaaaaagatggattggaaatatggcggattgaaaagttacaggctgttcctgttcccaaggaatcatatgggaaatttttcacaggagattcctacatagtactgaagacaactgcccttaagaatgggtcttttcgtcatgatatccattattggcttggcaaagataccagtcaggatgaagctggtacagctgcaattaagactgtggaactcgatgctgcccttggtggaagagctgtccaataccgtgaaatacagggaaatgagactgagaaatttctttcatactttaagccgtgtattataccagaggaaggtggtgttgcatctggtttcaggcatactgaagtaaatgagcgggagcataaaacacgattatttgtctgcagaggaaagcatactgttcatgttaaagaggttccttntgcacgagcatcactcaaccatgatgacatatttattttagatacaaaatctaagaattccaattcaatggatcaaaatca

SEQ ID NO: 184541 - DNA, 430 bp, Zea mays
  Clone ID: MRT4577_99890C.1
gcgaaaaaaagaaaaatcaaaatattgattttttttaggaaacacaaccccgtttgggggcaccgtccccatttccatttcatttttattttaaaaaaaggaacctccacctatgggttggtgtagggcaaggttaataaaaaaaaaagggatgtggggcaacaattgtttttgttgttgctggaagggaaagaccaagggcttagcctctgccaatggataaagaaactgtacccgttgttgttggtccccaaccaaatttgacccagccacttgcttgaagggaaacaactgtttttggtgggcaaaggggtttggcacagccacctttatcagagctggaacaatttcttttagcaactgttgttgttggtacaagggcgcattgcccacccccaccgggctagataaaaataaaagtaggtgaacg

SEQ ID NO: 184542 - DNA, 251 bp, Zea mays
  Clone ID: MRT4577_99891C.1
gcgggtgatttgaagaatccaaacaagaatttaattttactagatttgagaaaaaaaaaaaaaaaaaaaaaaaatagcttgaaccttgcccttgcagcggggctagttgggtgcaaaatgccagatccttgctaagtggatcctagtctcttcgtgggtggggggggggagttctaaccttagcatgtatcactgtgcctaacttgtgatcagtgtggcaatcgcctcacagcttcacaattccttacgca

SEQ ID NO: 184543 - DNA, 619 bp, Zea mays
  Clone ID: MRT4577_99892C.1
ccggccggaacctgaccaccgatggacacgaccgtgctcctgctgctggtcttccgcccacccgctgctgcttctccttgccagcgacttccctcatgctatcctctgattttgacaccgcgtcgagatcaccctagatcatcctcgtcccgacggacccagcaaccgcaatcctccagcaccggcatccgctagagcaagaagcagaaggtgacacttacactgacgtacctgcgagatccacagatgcgtgtgacgacgtgcaacaccaacgccaagcccccgtgcgcatactgctggacccagcccttgtcggcaacctcgacttctgcgcgccctgactgttctgacgcgcccaagaataatcccaaggcgaatgccctcggggtggacgacctgctgctggcgccagaagtgaggccgcacgtgctgctcatcacgcagagactggacgatcactgccacatgccagacgctgacgcacctgtccgccagggcgcctgacctgccggtggtgaccacccccaacgcgcagtcagatgctcgaatccctgcccacgtccttccgacgagacacctacatctagcccgggcagtccaccgccgtcaaccagcatga

SEQ ID NO: 184544 - DNA, 359 bp, Zea mays
  Clone ID: MRT4577_99893C.1
gctcttgggggttgtattttattaaaaatattctttcgggctcacaaaaaccccttaacataccccccaaattaaattccacctaacctatacccgattcacatgaccctcaaagaggaaattctacccacacaaaaattaccaaatttttatttaaaggggaaatactaaacttgaacctccccgacatccccttgaaaaaaacgaaaaaacaccctaaaaccttaggcccttactccccgcctaaagtacccctccaaatggaaaccccaacttcactgcagaccaggctatcatttaaaccttgcccttgaaagttagtgcaaagccaaaccaaacatcaccctgaaccaaaaagc

SEQ ID NO: 184545 - DNA, 664 bp, Zea mays
  Clone ID: MRT4577_99894C.1
ctcgcacctccttccccgtgccggagttaccggtgtccccccctcgccgccgaccaaactcacccacgagctcccgcgcgggttcatgtccatctcccctacagaatccaccagaggatcccacccgcccgctccgcgcgcctcgaaccctagccccagccctcgccatggcaccgcctctcgccgcggcagtcgctcttcccctcgggcctctgccgccgcgcctggcgtcggcagggacggcgcaagcaccgactcagtgggttttattggacaatctgttgatacatcccaagcgtcccaggtagttggatttagaatatctggtgaagaggatgatccgtacgcccaagaggttagtgatgtttctgaatgccagtcttctggacaggggagtttgggtctcacagtgcacagtggcggctcagttcaggcagatgttcagagacttgagttggtggggtccctggagattgaccatagttctgatggacttcagggtaatggagctctgctggcttctagaaagaatcaggctgtgaatgcaaattatcttctgaatttccagtatgatcctatttctcgaccgcagcctcgtggccctagaacatatccaccgagaaggcaaaggaagattaagccttacaacaaggacttgttcctc

SEQ ID NO: 184546 - DNA, 216 bp, Zea mays
  unsure (1)..(216): unsure at all n locations
  Clone ID: MRT4577_99895C.1
ttgacttgtgagagatcatgtttgtgagagtttttttctagttctcaactataaattatactacttagttgcttgtgcatggctatgggttgaaactccagtcagtgtgtgtgttttggatttttcacgggcacgtgtgggaagaaattatttttggtagggagcgtgtgtggaagggnggatgtcgtatgaagggagaaactcccaccttatagc

SEQ ID NO: 184547 - DNA, 353 bp, Zea mays
  Clone ID: MRT4577_99896C.1
gcggccgcgagctctatggcttgtactgcagcctacctggcgcgcgggccctcacagagggagccagtgcgcctgctgtagacatgaccctcaatgacacgctcaactgagccgtctactggcatctattctacaagcacgtgtccaatctgatcatcaaggaccaggacgacatagatgtggataacctctacttcgtcgataagctcattgcctatgcggacactaagcacatgcacttgaagagccgcgatatctacaatactacatgggcaccatgcatcactaaattcacatgacacgaggctgcagattaccggatctacatgatctacaatgattgcaaggaggac

SEQ ID NO: 184548 - DNA, 257 bp, Zea mays
  Clone ID: MRT4577_99897C.1
atagaccgatcatttcatctctaggatgggcatctagggtcttgattacaaaagttggcatcagagctttaccatctcctatgtcaatctcctccaacagatcaaccgatgtaggcccatgtccgaacttgtcgagatcctaaattcctcaattctgtaacactcagtggacttcggcactctctatgcggctacagaacgtctagactcgaatgccaaaccgtccatgctatatgccacataaatgtcgaccaaag

SEQ ID NO: 184549 - DNA, 124 bp, Zea mays
  Clone ID: MRT4577_99898C.1
tataaagaggagctcggacaaggcatatcgccatcattcggggaacaattctaagcgcggaacgctccatcgctctaagggaaggaagctatcttttaacattgcgtaattcgcgcactgcatt

SEQ ID NO: 184550 - DNA, 488 bp, Zea mays
  Clone ID: MRT4577_99899C.1
ggttgcagagcaaagcataatcacctgcctatctatctagcgagacagatagaggaaagctaggtaactagcatggagtgcggcagcaaaaaggcagcatcgtggtgtgttggggctgctgcttctccagctggggttagctccaacgaccccaacgacccgtctcctgcatgagtatacgtccaccgtgcttgagctggacatcatcgagagtgagttcgaacatccagtgagaggcatcctctgaggtgaaacctgtgtcttcctacgatgctataatggagacatgggttgacaatgcattggccaaatctgaatgatgtgatatctggactaacgctatatgaaatgtgggccgagacaaacacaaggacatgacggtggagtacaacttataggatgtggatggcgatctaataaggaaagtataataaaaagggatatgatgtaatgtgtgaacaaaaaaaaaaaaatgcgcccatagggtc

SEQ ID NO: 184551 - DNA, 450 bp, Zea mays
  Clone ID: MRT4577_9989C.1
acaagctttttttttttttttttttttttttttttctttttttttttttttttttttttttttttttttttttttttttttttttttttttttttttttttttttaccgcaagaagcaacaggggcttgccagcttgagggggggtccccccctgatgccgaaaaaactgggggccttaccgcttaaaacaatgccagggatgatcccccaaatgaagacccctaacatgatgtccccattgatgatccccagcatgatgtcaccaatggtcttgcccagcatgatgtcccaaatgaagatgccacaatgtcactgggaccccctttcgcaaattatgctgcaacagcagttaccattcatgttcaacccaagggccatgacaattccacccatgtttttacaaaaaccctttgggggggctgcattctaaaaaaaaatatttgggttgg

SEQ ID NO: 184552 - DNA, 249 bp, Zea mays
  Clone ID: MRT4577_998C.1
agctgactgcccctaggcctagatctctgcacaacttcgctcagggacacctgcctctgtgcatgtctcatggtgtgaatgtgtttcctgctcacaggtaccgttttgtgtcatgcagttactggaatgtacaatagcagctgtgatctttgtgagagctgcacagagcaggagtctgagagctgcacagagcaggagtctttatttggttcacttctggtctgcagcaaccacttgctactaatagat

SEQ ID NO: 184553 - DNA, 410 bp, Zea mays
  Clone ID: MRT4577_99900C.1
ccattcacataatataaatctgagataaacaccatcagaacaacaataggaatcagataggcacaaatttagataaccataggttcagataaccataagttcaggtaaccataggttcacaataaaaatttagggacaggactagtagtaaggttacaacattttaaggtaaatttggggcaatttgtgcctaaaacatttgagagcagcaacatgctcaactttcatatcatcggtcattccagaagtgtcttgattgaggggggtggaataagtttccatcatctttgtttccttttcaataagttttgcatctttcccttcctttgcttatgggagagcaatttttgatagctccattttggcggtattaaactttccttgcatttttaggagcttaagccgattag

SEQ ID NO: 184554 - DNA, 454 bp, Zea mays
  Clone ID: MRT4577_99901C.1
acaacaaggaaacccagggggggggggaaaccaatcacgaacccaagttttcctggacagacctgggctcaccaaaggacagttttttgccccctgactaaacctgaaaaatggtgccaaggggggaacaaaccccctcaaaccgggggatttgaaaaaaacagctcatggaaacatcctttaggggggggctacaaaaacgggggggtttttttttactgaaccatgtaaaaaaaaagatccaatttttttaaaaaaaaaaaaaccagtcattgggacgggtttgttccaagaaaaaaacctggctttatttgggcaaatttttcgcctaggggtccacctttttggttttgaaattaaagggcccccaaagggctaaaaaaaaaagcccctggagagggatcagctccagagttatcactttggttttccggtctaataaattcaatcaaat

SEQ ID NO: 184555 - DNA, 191 bp, Zea mays
  Clone ID: MRT4577_99902C.1
acaattaaattagggagaaaagcatttaaattatcataaacaaatatataacatgcctacaagggttccaatacactggtagtgctgctgcaaaaataattgcctctctcataatcactgcagctatcatacatttactagcattttgggaaaaaatgacgctggatcaacacatcatgaaattgcaaaca

SEQ ID NO: 184556 - DNA, 145 bp, Zea mays
  Clone ID: MRT4577_99903C.1
attgaaaatcacatgacttccaccgcaatcgcacgcaaaaatcccgctcgagcttctatcgtctcgctccgcttctccgtgcggtggtgccgggtcgcgtcgtgccatggcgctcgcctgctcggtctcgtgcgtgtttggattc

SEQ ID NO: 184557 - DNA, 294 bp, Zea mays
  Clone ID: MRT4577_99904C.1
ccctcgctcccgcggacgcgtgggcgggagggagatggacgggctcccgctcgatgggtgcgactacacgtgcatcctcggccagtgctgcaagctgccggtggggttcgtacagcttcccgtgggcagaggagggccttttatcctaagggctcgcaggttgtaaacgcgaatagggcccaccgtgggatgcactacggccagcaccaaccgcagccgctttgtcatggcctagtgggactacatcatcctttggccctgctcaaggcctggacgacgcggagcacgagccgt

SEQ ID NO: 184558 - DNA, 218 bp, Zea mays
  Clone ID: MRT4577_99905C.1
aaccaaatctggaacccattttgggctccccagatgttgggataagctttaaaaaccccttggggggccgggtttaaccgaaaataccggttttaaatcgcccgggcaaccgtggggggcttggttcaaccatggccgggaccaagccgggatttttcttgtttcccctggggtcccctcaggcaaacccggacccggccagcccctttttttggccc

SEQ ID NO: 184559 - DNA, 349 bp, Zea mays
  Clone ID: MRT4577_99906C.1
cccacgcgtccggtttgctggtccttagtggctatctaaaacacaagtatatatataggtgactgggatgagtactaccggacgtggacggaattcggtcctcctgatttttaagggccggctgcgtcgcatcttactccgttcgatgtgcggtgctctttcggtcgatggaccctaccttcggctgaaccgatttcaggggtggcgggccgttaagcataaaagataactcttttcgaggcccctcgtcggcgttttcggacttcctaacgtcgccgtatgccgtcacgtacttgctcgggaaatcttaacccgatttcctttcggttgacgctcgtgatcgcgctat

SEQ ID NO: 184560 - DNA, 161 bp, Zea mays
  Clone ID: MRT4577_99907C.1
cttgtgggtcctttggggtttgcaaggagagcccccttactcgttaaaaacagtccccttacatgctctaagcagtccccaatcagaatggaacttgggcgttggggggggctgatacctcggtccctgtcccgctatggttgatctacacaaactgccgg

SEQ ID NO: 184561 - DNA, 477 bp, Zea mays
  Clone ID: MRT4577_99908C.1
gagctgaatcgcttttagatttctgtgttcatattatgtttgaaaatatggcataacgctctgaacctgagacgacgaaccaaaaaaggggacccagcaggacacacaaggcggggcaggacaacccaggaggaggcggcaagccaccgcgcccaagccctaccaacaagaaaggaggggcagaaaaaaaacaaacactggacccgcaaggaggatcccaaaccctggccccacaggtcccaccccccccaggccgaaaacccccccccaccaagggggaaacccataatcgggcacaacaggtggcaccagggagtattggacccgcaaggggaccctaccctcccaaggggccaactttgggccggaacccacccaaaaggcggggggaaccgggggcccaccccgaaaagctgggggggaaacaaactcgcaacggaggggggcccccaacggaacaaggggccccccccggga

SEQ ID NO: 184562 - DNA, 302 bp, Zea mays
  Clone ID: MRT4577_99909C.1
cgcagagagagacgggtacgtagcgtagcgttcctcgacgaccactggtcggtcgagactgcgcgcgcgccacagccagcagaatggcgaccaagctcatcatcatcagtagcgcgcggtcgccgctggttgaagtcgacgtcggtcttctgctcttgacgacatgcctgatgctcgcggcgaccgtctcgagtgccagcaggccgttcaaggtatcgtcagagggcgatgatggtggtgcgcagcatcatacggtggaggagtcgccgcccgtggattacatccatacggaggtggtggtc

SEQ ID NO: 184563 - DNA, 586 bp, Zea mays
  Clone ID: MRT4577_9990C.1
cattatagttgaagcatagtagtagaatcctacaaaaatgaagatcattttcgtatttgctctccttgctattgttgcatgcaacgcttctgcacggtttgatgctcttagtcaaagttatagacaatatcaactacaatcgcatctcctgctacagcaacaagtgctcagcccatgcagtgagttcgtaaggcaacagcatagcatagtggcaacccccttctggcaaccagctacgtttcaattgataaacaaccaagtcatgcagcaacagtgttgccaacagctcaggctggtagcgcaacaatctcactaccaggccattagtagcgttcaggcgattgtgcagcaactacagctgcagcaggtcggtgttgtctactttgatcagactcaagctcaagctcaagctttgctggccttaaacttgccatccatatgtggtatctatcctaactactacattgctccgaggagcattcccaccgttggtggtgtctggtactgaattgtaatagtataatggttcaaatgttaaaaataaagtcatgcatcatcatgcgtgacagttgaaacttgatgtccg

SEQ ID NO: 184564 - DNA, 350 bp, Zea mays
  Clone ID: MRT4577_99910C.1
atttctgggcagcgcaccaacataatacgaaaaaactagattgattgaactatagctcatatgcgatctaaaagaggcaccaccaatgatgggttgctggttgaacactgctgggtttgtcaaagcaagctggtgggggggggggaattgttgcatttgtaagagggtgccagcgttaggcatagcgtgtaggttgaacggcaacaactgttgttgtgttaagaaggcagtagggctcacataagctagttggttgtatgggagtagttgatgatgatgttaataagcggtagagttaagtgatgctagttggcttgttggaacaacatggtggggggaggtagtagcta

SEQ ID NO: 184565 - DNA, 371 bp, Zea mays
  unsure (1)..(371): unsure at all n locations
  Clone ID: MRT4577_99911C.1
atccttaaatanatcatcccancnacataaacccacccggggggcgaatttttgggggtgtatctgcggtttttagcaagaacccccaaacccagaacaacaaaagcaaccattctcaagggcaaccaacccacaaggatccgccacccaagagggcccaaaaaacgggacaaaaaccgggaaaaaaaaaaggggggccaaaacgggaaacccacaaaacccaaaaaaacggcccttggtaaaaccccatcgggggggggggggtaccgcaataaaaacaaacacccgccacagggaaatgccctttttaaggcaagaggggggcaaacacacaaaaacagggggccggcgccaccggccttgggaagggg

SEQ ID NO: 184566 - DNA, 408 bp, Zea mays
  Clone ID: MRT4577_99912C.1
cccggtcgaccagcgtccgctacgcgtacgcccacgcgtcgcagcgtcgttacctaaattagcgtggcttcgcgttgcgaagcgtggttgatcggatataggactggattgcagtgtacatgttattgttttaagaatgcttgggttttttttaatctactttttttttgtgaggaagttaatctttcttgtaatgctaggttgtctataaattttcttcgttgctaacagtttttgaatgatgatagatgttacttgcacattattaagttttagatttgtgttgcagacggacgactggtctttggatatggatctgtatttggttcactttggggtattagtggcgcatttgtttgacgttgttaacatactgttatgagggtcattttggtgtccattgagcta

SEQ ID NO: 184567 - DNA, 302 bp, Zea mays
  Clone ID: MRT4577_99913C.1
gctttatgatcctcaaaaagcagatggctttccataatcccatgcaagatgatctgccggggaaccagctacatgttaacactctcatccataccagccaataccgaataatatcatactcctagaaaggcttcacaggccgctatataccaatgtattgtaggaaaaaacatcttgggttacccaagctaaaccaccttgaacatcatggcacctgtctccaacatagacaatatgagagaagaccgcatagatcgctgttctgaacaggggcatcaacctacaatgagcgaaggggacac

SEQ ID NO: 184568 - DNA, 441 bp, Zea mays
  Clone ID: MRT4577_99914C.1
ccatgccctcataattatcatctacatactctttaacacttccaacaagccatcggggtgttctcacttccagatgatgctatcttaactgataatctagatgatgaagctaaatatgaagctgatagtgacactgacttgactagacttatcgacaataaagaagattatgaacgctacaaatactatgtcgttcaattacctaatatcagctgtgtataaaaaaacagaagtaaatcacgagaaccgtgactaactccaccagaagtgtcttgaacatcacaatgctaataaaacaaatactgtcatccaaaggctcactattggtcatcctgagcaaacagaatcagcatatgaatatgactatgaatactacgacgacaatgaagatgattatgtaactcattttgaggaaggatcacataatgaatatgtaacttc

SEQ ID NO: 184569 - DNA, 648 bp, Zea mays
  Clone ID: MRT4577_99915C.1
ggaatgaatggttagcagatctttcttttcaacaatcataatatgaggtgtctggtcctccaaaagctttcggccacaacctgaatgacaagcactcccctgcctctgcctgctacacaggatcactcaatcattgaggggcgatagtgtcttgatggtttgaggtcatggtacaatgcaaaggatagtgtctcgggactaatccatttttcttacaatcctaaattttgtacccctaactaataaacatcaaggacaatgcaaggaatcatgtgagctccagcagcttgctgagctggatatggtggccgtaacccgccttggcgatggacctcgccgctttctccgcgatggcggcgcgcacctgcgccatcgacggccggagcccgggctgcgcggccaggcactccacggcgagctcggccacgctggcggcctcctcctcgtcgagcccgccgtccccgagcctgccgtcgacgagccccgccaccccgcgctccctgacccgcggcaggatccgcgccgtcaggttctgggcctcggacgccggcggcaggccggtgacggcctcgagcagcagtacgccgaagccgtacacgtcggacttggtggacacgatgcccgtgcggaggaagaaggggtcggcgt

SEQ ID NO: 184570 - DNA, 681 bp, Zea mays
  Clone ID: MRT4577_99916C.1
aattcggccccaggtgttattgaccatgtaaggagacatatacttttctagcttgatggatgaggcgaacaataacttgtctttggatgacttcagtgtcctgcctgaggtaaatccatcaggcaatgagcatgaaccacccattgttcagagtactccattatcaagacccaattagaaaaggacaaagaattttagtgaacaagaagatgaattgcttgtgacagcttggttaaacattagtatcaatcctgttcatggcactaatcagactcgtggcacattctcgaagagggtttatgagttcttccacaacaacaagactttcgaatcgtctcggattgaaagttcattattgcatcgatgaggactcattcaagagaatgtgaattagttttgtggatgtgtatcaaatattgaggacagaactcaaagtggggttacttatcaagataagccatggctttgttcaagagcaaagacaataaatcattccaattcgtgcattgctggaatatattgcggaatcaacccaaatggcatgagaagcacaagcagatggaggttattaaacaagtacccaacaaaaaactgaagtcaagcatgaactctagtatgggaaattcaaccaccatcgttgctgatagtagggaacattgaggtcgatgcaaagcctctccc

SEQ ID NO: 184571 - DNA, 153 bp, Zea mays
  Clone ID: MRT4577_99917C.1
gtctagcagtcctaagcgtcgttgcgcctccatttgacactgtcgttggaaaattctgggatgtaaaccgaatgcgaggggtggagcttgcatagtctgttaccacgtacattaatgggtgaatgctctatacacaccgttaacacgcttaag

SEQ ID NO: 184572 - DNA, 216 bp, Zea mays
  Clone ID: MRT4577_99918C.1
caaacaacaccttatagtagcctctattgttatataaggggaaaactcaaaagtgaagtttaaatattagtagtagatgcaggcattcatccaaaacatggatgattgtgcacttaatttatgatttattgtatttgtcttctgttggtaaaatcttgtgatgtcctgtgaagctcctctattttatttacctttgtagccagttttgggatgttg

SEQ ID NO: 184573 - DNA, 1896 bp, Zea mays
  Clone ID: MRT4577_99919C.1
cctcgaggccggccgggccggaaaaaaaattccttcagatcaatcggacgagctcactcccgttcccatcttggacatggcggcggcggggcagctctgagggatctcacctcggcgacggcgacgcggctcccagggatatctcgcctcagcgacagcgaccctccaccccagatacaggttctcccctcaggcaaaagggtggatcacttcagtttctcatcacttgctctgatggatgcaaatgaaataagaagatctttaattattaaagctgttgctctagctgctgctacattttattatattttgattgtgaggaggaagatgaaacggaaacgggtttcatatgccccaatgattgatatggaagtgaaacgaaatgactacctttctagtatttaccataaagatgacacgagttgtttgcgcatgctaagattgaggagagcaccattctttttgctgtgtgatacactgaaacaaagaggccttctttctgatagtatccattgttgtgttgaggaacaagtagcaatgttccttcacacaattggtcacaacgagaggaatgctgttgtaggaaaaaatttcaagagatcaggggaaactgtcagtcgctactttaagttagtacttcgtgctatcggtgaacttcgtgatgaccttattaggcctccatctcttgaaacttcagtcaaaatccttggaaatcctcgatggtatccttactttgagaattgtattggcgcaattgatggtacacacatacgagctagtgtccccaagtctcgtgaggcagcttttcgaggtagaaagagtttcacaacccaaaatgtgatggccgcggtagactttgaccttcgcttcacatatgtgctagctggttgggagggttcggcacatgatgccgtcgttctagctgatgccttacaaaggcagaatggtctcgttgtacctgaaggaaaatattacctagttgactgcggttatggtgcaaagccagggttcttaccaccttttcgtggtgtccgataccacttaaaaagaggggtgtaatgtgcggccgggccgggattccttcagatcaatcggacgagctcactcccgttcccatcttggacatggcggcggcggggcagctctgagggatctcacctcggcgacggcgacgcggctcccagggatatctcgcctcagcgacagcgaccctccaccccagatacaggttctcccctcagtatgccattttctccaacgcaagtactctctgaactcattcaacctgcttgttgacaggcaaaagggtggatcacttcagtttctcatcacttgctctggaagatggatgatgtccaagaaattgaacaaaggtcccagtcacaaattttctggacacaagaaatgtctgcatgtgctttgaaatacttggcccagttggttgctgatggaattcgagtagacaaaggtttcaaaagctcgcactataatcaatgtgctaaagtggtgaaggaaagatttcaggttcaagtttctggttctcaagttaccaatcatcttaagacatggagaactcgctggtcagctaatcttcttataattgcagatgtttgacctttagagaatattctcctcagatccggaacagagtagtattatgtgcaccgtcataactgtggcaacagaaaacaatttgattatgattatccatgtgacattttttatcttgatggattgattgaattttttttatttatatagattattattttgctgggttggtttcaagtcatggatgataaaaggcgtcatgtatcctgtgggtgggatgtagtggttctgttctaacgagcaagggagcagagtagtattctgttccacctgtgcagcttccct

SEQ ID NO: 184574 - DNA, 230 bp, Zea mays
  Clone ID: MRT4577_9991C.1
gggaggggtcaatccaaagcaacatttgcatcgccttcttggattacatgactccagaggcggcgatctatagggggatgtgaacattgggactacttagtgcacgctctatcatcagacggaatatgccttaactttccatgcgtccttgtgcggtactacaccctaaggggacaatccaactataagtgtcggtagacactttataacatccttgtgcctagggttag

SEQ ID NO: 184575 - DNA, 363 bp, Zea mays
  Clone ID: MRT4577_99920C.1
gcaggtcgactctagaccaaacctattgtatcccttttctacaaatctcggggacgagattatttttaaggggggtaggatttgtaatactcgaggttgtgttcaaggaatatatagtgttttccttatttgatgtgcctcatttgcatcatacagagaacatacacaaaatttggagtataattcaaacaaatgttttaaaaaaaaatgcatcatgttggagtttatatgtttatgcattaaataaaataataaatagattaataaaagtatattcatatagtcgtattgaagttttgactgaacgtgtatttaaaattggaaacttgaattcgtattctatagcgtcacctaaatccaatt

SEQ ID NO: 184576 - DNA, 1198 bp, Zea mays
  unsure (1)..(1198): unsure at all n locations
  Clone ID: MRT4577_99921C.1
aagatcaatcggacgagctcactcccgttcccatcttggacatggcggcggcggggcagctctgagggatctcacctcggcgacggcgacgcggctcccagggatatctcgcctcagcgacagcgaccctccaccccagatacaggttctcccctcagtatgccattttctccaacgcaagtactctctgaactcattcaacctgcttgttgacaggcaaaagggtggatcacttcagtttctcatcacttgctctgatggatgcaaatgaaataagaagatctttaattattaaagctgttgctctagctgctgctacattttattatattttgattgtgaggaggaagatgaaacggaaacgggtttcatatgccccaatgattgatatggaagtgaaacgaaatgactacctttctagtatttaccataaagatgacacgagttgtttgcgcatgctaagattgaggagagcaccattctttttgttgtttgatacactgaaacaaagaggccttctttctgatagtatccattattgtgttgaggaacaagtagcaatgttccttcacacaattggcaacaacgagaggaatgttgttgtagggaaaaatttcaagagatcatgggaaactgttagtcgctactttaagttagtactccgtgctatgagtgaacttcgtgatgaccttattaggcctccatctcttgagacttcatccaaaatccttggaagtcctcgatggtatccttactttgagaactgtattggtgcaattgatggtacacacatacgagctagtgtccctaagtctcgtgaggctgcttttcgaggtagaaagagtttcacaacccaaaatgtgatggtcgtggtagactttgaccttcgcttcacatatgtgctagctggttgggagggttcggcacatgatgccatcattctagttgatgccttacaaaggcagaatggtcttgtcgtccctaaagggagatggatgatgtccaagaaattgaacaaaggtcccaaccacaaattntctggacacaagaaatgtctgcatgtgctttgaaatatttggcccagttggttgctgatggaattcgagtagacaaaggtttcaaaagctcgcactataatcaatgtgctaaagttgtgaaggaaagatttcaggttcaagtttctggttctcagttacta

SEQ ID NO: 184577 - DNA, 470 bp, Zea mays
  Clone ID: MRT4577_99922C.1
ttttttttttttttttagccataatcagcatacttgattcagcctgatcggttgcactagcacagctgtgactgctgtctgcaggctgctgctgcacacgtacaatacaagagtaatagtaggaatagtagaatgtgctagaagtaacagtgcatgaatgcagcagcagccaacggccacagcagtggtagggcattcaatcatgctgattaataatagccaattttcaaattctcatatcataaactgtggatttcaagtacaaaatagttctcaaatttaattttcataaataactccaactagctttatggttttatttcactttttggaataaatacctagtctttatgccactcatcctggcctggcacaaccagttcgatttgaaatgcaaccacttaaaacagaccagatgcaaagctaatggagcaaacatggatgcagagttaatgagcaaacttggacga

SEQ ID NO: 184578 - DNA, 589 bp, Zea mays
  Clone ID: MRT4577_99923C.1
cgccatcaacgcccggatccccaccctccttcccaccgccgccgcaatcaacgcgctcctcccccacgtggatccctccaccctcctccccaccgccgccgctcgaccgcggtttcgtcgcactccttccttcgaaagcgctcctttccatcctcgattcctccttccttccatgtggctccttccttcgacggccagcctcatccggtcattcctcctcgctgtgccccctcccccgtattcaaccacctcttcctcctgcggatccaccaccggcgtcctcgcccaacgtctccttgacgcatatgcccgcagcggctccctcgcgtccccaatggtgagtctggcctgtatggaaggagtgcgggcgtgggtggagtgtgtagagaaatccaagcgaaaccccgtgagagcgaggtgacggcagacggaggcgagtgggtgagctgcgggcgagagacgaggtagcgggctagcggatggcgtcgctggttgtagtggccgcagcgctgctggtggcggcgctggtggcattctgcggcacggacccgctctggacggggttcgagtcccacctcgtcgaccttcc

SEQ ID NO: 184579 - DNA, 342 bp, Zea mays
  Clone ID: MRT4577_99924C.1
catcaagcatgttaatggccccatcatcattaatcttatccatgtccgtgtggagcatcgtctgtcttaccgttgggcataggatttccgcttgaggaaagccaataacgatcatctcaaggttgatgccaaggaccatagcgaggtgatcatcatcaatatgcaccctgtgagacccaaacctggcttcatggctgtcggtgctacacttgcgaccgttactcctattccctatgatgaggtaaatgatcttaatgcttgtttactacataaaattatttttcttgagcatttcaagcgacctgtcataaatacctatcttaatctttttgacaactgtct

SEQ ID NO: 184580 - DNA, 284 bp, Zea mays
  Clone ID: MRT4577_99925C.1
ctcgctcgctccccgctctggagtctgccatcatggatgttctcgcagaagcaaatggcacctttgccttaaaccttttgaaaacgctgggtaaagacaactcgaagaatgtgtttgtctcacccatgagcatgtcctgtgccctggccatggtctacatgggggcaaagggaaacaccgctgcacagatggcccagatactttctttcaataaaagtggcggtggtggagacatccaccagggcttccagtctcttctcaccgaagtgaacaagactggcacg

SEQ ID NO: 184581 - DNA, 571 bp, Zea mays
  unsure (1)..(571): unsure at all n locations
  Clone ID: MRT4577_99926C.1
gggcgcgcgccgctctactactagtcgctcccccttttgcgtgattcggcacgaggggcgtggttcagttcagctcatccgtgttcttgtttgcgaggtcgagagagactgagagaggatgtcgtgctgcggaggcatctgcgggtgcggctccggctgcaggtgcggccccggctgcggcgggtgctgcttgatgcccccggacatggccgggcgggtgaccnccaccaccacccaggctctcatcgtgggtgtcgcaccctccacggggcgcggcgagggcgggttcgcggcggccgccggngctgcgatcggcgggcgcgtgtgcggcggctgctgccagtgcgacccctgccactgcggcaagtgtgctccgtgctcctccctgcaggccggccggnggatgcttgctacttctcaggccttgtaccgtctagcggccgtccctgtgcgtgtttcgggctcgtctgcctgcctgttgcgtgccctggcgtgctccgcgtctgcgctcatcgctgtgccctgttggccggcgtcgtgtcctgccctggccccctggggcgctcctggc

SEQ ID NO: 184582 - DNA, 494 bp, Zea mays
  Clone ID: MRT4577_99928C.1
cggtcccgtatttccggggccccccacgccgtcggagggagcctttttcttatgttttatccaccgggaatattttttttgaagaaaccctttggtggcctggaacaaattaaaaacccccttggggaaatttaaccaatggcccgtttttcttgggccactcaagcctgtggacggttcctttggtcccgttcttcaaaaggttccaaatccttttttccattttaaaaacctttgacgtcccaaagggcaaacccacccttaaaaatttcatcggggaagtgaccaaaatcgttgcttacacccaaactaacctggacccgcagtttttgtttgaccaaacaaaaaaccggttgggaattgcttaaagcctgtgaccaaggacaaaactttcgccagatgcaccagcgtattaaatcggagctcgttttattcggtggtgtcctggaatattacatctggtcttaattaaggcatggccttctgtaatggct

SEQ ID NO: 184583 - DNA, 203 bp, Zea mays
  Clone ID: MRT4577_99929C.1
taaacgaacactggacattataagacctactcaattagggaggaaaacaagggctatgcttggggccaactgccaagctagatatgcacttgcatttaaacacaccgacatgaatatgattacctcggcattgtgaggtcccacatccatgcaaccccggacattcacttagactgtcgataacgacagtaacatacccaaac

SEQ ID NO: 184584 - DNA, 359 bp, Zea mays
  Clone ID: MRT4577_9992C.1
cttcgaaatttcttttataagcccaattaaggcccatggggaattacattgggacatttttcccctacagcaacgggtcacatgggggcctaatttacaaaatttccaggccccccgcatccatttgaaagactgaaagggcggttcatcccactagattagcctctacgggcaaaaaaaagggcccgccccatcacaaaagggccgggttcagtttgcttgcccacattccaaaggaccaaaattttgtcgctgtttcaggctttcaacaatcgggggggccttttttcggagctcccccaatttgggggggccctgggcctaccaaacctttgggaagctccgagctcctaaaaacc

SEQ ID NO: 184585 - DNA, 330 bp, Zea mays
  unsure (1)..(330): unsure at all n locations
  Clone ID: MRT4577_99930C.1
gcgcacacgctgacgctcaacaactccgaacgtctttacctacacaaaatggaccaggctgctgagtganacctgccttgctatgtcgccttacaagtcgaccgtaccctgagctcgaacgacgtcaactggtcgcttaccatcaccacactgccgattcttgtcaatggagtgcttaccgttgaagacacgatgctcgcctttgccaacggcgctgtaaatatcatgctgtctaaccactgcccacggaatgttgaatacgtgccggagaccatcaaacctctggaggatgacgggaaagccagccggcgacagctccccgtgatcgtc

SEQ ID NO: 184586 - DNA, 168 bp, Zea mays
  Clone ID: MRT4577_99931C.1
agctgtggtgccattgacaaaactgctgccttcacagccaaaatgcccagctcatgtaaagaactgcgcgaggcactcgcgcagtgtctccaagaatctgagtgtgtcatggccgcagactactccgccgcccccttcctccatatccccatcccccccccactcccc

SEQ ID NO: 184587 - DNA, 191 bp, Zea mays
  Clone ID: MRT4577_99932C.1
ggggacaaaaaattttccttactggtttttacaaaacccaaatcttgatgcccttctcccaatgcaggggtggttgttgctaaaaaaaatagtcaaacccaaagcggggaacgatttacccttcccccccaacaaatttaataaaaattttttgtttgcccgggaaaattaatttggggccatcggttccc

SEQ ID NO: 184588 - DNA, 328 bp, Zea mays
  Clone ID: MRT4577_99933C.1
gttccgtagatgattccgttcactcgaggggttttagctaacctgagtgcgagccgcacatctccctccgattataggcatgggcgccggcgccaacaaccacgaggagtcaagcccccttatcccaactgcggatgccgtacccgcggacgagaagcccccgaaggctatagcgccggaggcattcaattactatgccgaccggacaccggacgagatgggacagcccgagtaggaccactccttcggaggagtaccgcgggagagctgagactgcacgaacctctgctgcctgggtcgcaacgacaagatctgcagcatcgactcg

SEQ ID NO: 184589 - DNA, 293 bp, Zea mays
  Clone ID: MRT4577_99934C.1
ctcagtgaccacataagcgttactcaatttaaggcgcatggagtgcacacaccctgtacagacaaagtgttcaccacactttgggggttgaattaccggatccagtacagaagcagctatgactaccgcgctggtgacgcactgtaacagtattgttgctcagaatgtctagccgtgtacgttattgttgctcaacggctggctgccgcccatgatagatgtcaccacgattaacaagcactctgcatgatacctaaattgggtgtcgacccagcggctgtacccaattttac

SEQ ID NO: 184590 - DNA, 490 bp, Zea mays
  Clone ID: MRT4577_99935C.1
ttatatctcttctcatacgatctgaactacagacggcttgatggtgattgctgaagaaagacagggaaagacgatggtggtgaccggaggtcagcgttcttcatcagggtcaaccctcgtatgatgactactctggcgtggctgcaacgtccgcgccggcgtcctcacaccccttaccacagggcgcggactgaccacctcctcgtgttcgtcgccggcgccgagcgcctgagcttctttggctgcgacctcctggacggggtctgcactgcgtcgacttggcaagggggtgctcagaccgatttccacctacccggcaccctgtagcgacgaccccgccaaggacccccagaatgacctgatgatgactgcagcggaaaggacgctgaacgtggctgcgcactgatccaggacgcccacagaatgaggatgctggtattgacctcaggcttctcagtaggacagcccaaacccggggggaccggcgact

SEQ ID NO: 184591 - DNA, 871 bp, Zea mays
  unsure (1)..(871): unsure at all n locations
  Clone ID: MRT4577_99936C.1
gcgattgggtccctcgaggccggccgggacggcatgactcctctggatctactcaggaaacagccacggacgacggcgtcagaggaagcccggggacatcgttcaagataccagacggcgagatcttcttcctccacgctgctggagtcgacgtgtcgggcggcatcggcatcggcgaaggaggagctggagcagtaccgttttcctccgttattgctagggctgatgatgccgctgacgtcctgctgggacccaaactgaagaggctcaactctttccaagacgcggcgaagcatatcaaggtcctattcagatggcctcgccgcggatggaagaagtcaggcagcggcggccgaaagggtctggacgacgacgatgcctcgtctgtggactctgccaagacctggagccacgaggagaccccgacaccgctgaggcagaggtattccaggatcggctcgctgttcaacaagcggacctacgcagcaggcagggcttcacctagcgaagcagtgaagaagggtggagtggtacagccagctggttctactctactttcgacatctctgtcgtcgtcgtcggcgtcggcgtccttggttgacaggatcgaatctgttcatcaggacaacgatcagtctccttatgtcagtaggttgatcaggcacacacctaagaaatctggatctctncacagtagacttatgaaccagtccttgcgcctcagggcctaagataggcaccaacattgacaaggcttcttgcttccctcactagctagctggttacagtttacagcttcactggtagcagacagataattactggtaaaatgtggctagataaatctaagggcccgttcgcttctaccaaa

SEQ ID NO: 184592 - DNA, 442 bp, Zea mays
  unsure (1)..(442): unsure at all n locations
  Clone ID: MRT4577_99937C.1
agcgcgcgagagaggagacactataagcgagggcgcccaaanaaatttttttttttttttatgtttgggtgggattaatttgggagaaggggggcagggaccaaaggagaacagagacaaatgggcacgatagaaaaaaaatagactttcagggaatgggggagaagaaacggatttgacagtctaaacatggacgagggggcattggggggggaaaaggagaacacgacagagggggagaaaattattatgtgcgaagacaatggggaagggaacatcgtaaacagacttagggggggcttggaggggggtagaggggggcagtgagggcaactggtggaagggcttaaacacggaggagagcatgtgggagattgggggctcgggcaaagcaatgggcaccggctggcacttgggagatttattcccgaaaatggaggga

SEQ ID NO: 184593 - DNA, 1006 bp, Zea mays
  Clone ID: MRT4577_99938C.1
acgacggcgagtttaggcgcgagatgatgaaccgcgccgtgcacgccgcggcgaggggaggcagccttgccgtgctcagggacctcctgcgcggctgctccgacgccgcggcatacagggacgcgcagggatcaacgatcttgcacgccgcggctgcaaagggccaagttgaggttgtgaaggatctgattgcatctttcgaggccgggaactgtgtagatgaccaaggggacacggcgctgcatatagcagccttccgaggccatgtccaagtggtcgaggctctcatcaccgcatctccgtctcttatatcagcaacaaacgaagccggcgacacgttccttcacatggcactgactggcttcgggactcccgagttccaaaggcttgatcgccagacggagctcattaggcaattagcgagtggagcaatcgtggatatcagcagcagcagcactattatcaacgcgcagaatgatgacgggaagacagctcttcacttggccgtggtttgcaacctgcattcggacgtcgttaagctcctgatgagtctgccttgtattgacctcaacatctgcgacaaggacggcatgactcctctggatctactcaggaaacagccacggacgacggcgtcagaggtactgatcaaacaactgatcctggccggtgggttcacaagctcaagggaccacgagactaggtcggctatcgcttctcagctgaagatgcactccattgtaggaagcccggggacatcgttcaagataccagacggcgagatcttcttcctccacgctgctggagtcgacgtgtcgggcggcatcggcatcggcgaaggaggagctggagcagtaccgttttcctccgttattgctagggctgatgccgctgacgtcctgctgggacccaaactgaagaggctcaactctttccaagacgcggcgaagcatatcaaggtactattcagatggcctcgccgcggatggaagaaccaggcagcggc

SEQ ID NO: 184594 - DNA, 165 bp, Zea mays
  Clone ID: MRT4577_99939C.1
gtcaacattggaaaatgatcttcttctagaggtccataggcgcagtgatgaaattagcttacagttctgtttgaaggatcaacggaacaatgcatcctatttccacatatgcggtggagaacaaacaggaaatgggtccatgacagctggcttttgattgtggtc

SEQ ID NO: 184595 - DNA, 352 bp, Zea mays
  Clone ID: MRT4577_9993C.1
ctcggcgtcgattgggcgaccgccgccgcctcccccgggtcttcgctgggcccgtcgccggcgacaagcacccaccagaaagagaaaaaaaataaaggagctacaggacaatgttgttgctgtcaattttactccatccaacaaactggggaaaatgctaatggctaaatgtagaacattgcaagaggaaaatgaagatattggggtgatggcatcaaaaggaaaagcatgtgttcttcctgcccccaggagatctttttgtggcaattatgccagagtcgtgaatcaaattttgcaaggcctgaccaatatgcatttgtggatcaggttgcctctggagaagtctaagcct

SEQ ID NO: 184596 - DNA, 306 bp, Zea mays
  Clone ID: MRT4577_99940C.1
cggcacctctcatagaagacccagtctctgaaatacatgacgcatgcggtgacttaacaaaccacaatggctacggacacgcagtcttaacaaacctcggaacatcgcacgagctgttgaacgcatgtgtggctgagaaaaacacattttcaataaaagaaacctaaaaccttggcaccaacatgtgttacgaggggcctgctcatggaacataatttcaacggagattggtatgacggtgtggccaaactgccgagatgggagaaggctgaggcgccatccctgcatgtgcttaacgcgtacgtg

SEQ ID NO: 184597 - DNA, 1790 bp, Zea mays
  unsure (1)..(1790): unsure at all n locations
  Clone ID: MRT4577_99941C.1
cgactcctcttccgtctctctctctatcatctactgcctgtctccttccctctaaacccgcatccgcagcagcgccgctagggtttgctcaggccccgaaccccacccttggattgctctgattccgtggcgactcgttgggaaagatttttgtcggaggcgttgcttgggagacaactgaagaatcattctccaagcattttgagaagtatggggcaataactgattctgtaattatgaaggacaagcatactaagatgcctcgtggatttggatttgttacattttctgatccatctgttatagacaaggttttggaggatgatcacgttatagatggcagaacggttgaagttaagaggactgtcccgagggaagagatgatcaccaaagacggccctaagacaagaaagatcttcatcggtgggctaccaccatctcttactgaagatgaattgaaggatcacttttcatcatatggtaatgtggttgaacatcagataatgcttgatcatagcactgggcgttctagagggtttggttttgtcacatttgaaagtgaagattctgttgaaagggtcatatcagaggggagaatgcgtgatcttggtgggaagcaggttgaaataaagaaggctgaaccaaagaaacatggatctgaccacagcagtaatgggagatcaaaccacggaggtggagcttaccgcaattcttaccgtagtggtggtggagctggtagtggcagcagtggaggcggcggtggttatgggtatggtggtgcttatcgatctgctgcagcaggttatggatatgatggtggcgcaggagcaggatatggctatggtagagggtatggctatggaggcaatgctggctttgggtctagttttggtggtggttatggtggatccatgtatggaggtgctgcctatggtgcatatggtgcctatggtggtggcgcctatggaggaggtgcctacggaggcggtgcctatggaggtggtgctgcctatggtggcgccccaggtggttatggcactggcggatacggcagttatggcggagcaggtagtactggtggtgggagcacaggtgctcggggttctagcaggtatcatccatacggaaaataagcgacgagtttaaactatttttctgggtctcaggtgttcctcttctcctagaagttcagatttcatggcatgtccatctaaacagtgggcattggaacgtagttgggtctaattaagtcaccgtgagaactgtgtaattgctgcagctgagcctccctgcctgccttgtttgcagtacaagctacacataaaacctgtgttgtattctttagtttggtatatgcagagtttagaaccctgagatcgagcattttatggtaggaacagtatttggtgcggtagaactatattccgtgctctaacattgccattgcaagattaactgttgccacatgtggtgattacaactagggacccattagaggatttggttacattttatgacttgatttacattctacaaatggaaatgaactcagggatgcgacctgggctatggcgtaaatattagagtgttgagatgcctgcgttcatattagcagttttgtgcttgcgtgctggtgctcggcttacctccgcgccttctccttatttaaaaaaaaaaaaaaaaaaaaaaaaaaaanaaaaaaaaaaaaaannnaaaaaaagggggncgcgccgncttctagagggattccacagncttacggtacgcgtggggcatgcgacnngtcatag

SEQ ID NO: 184598 - DNA, 226 bp, Zea mays
  Clone ID: MRT4577_99942C.1
attcggctcgaggctagactcgcggattatctggccactaagcgaccaagaggacggggccattatatggcagagatgctgcatgcctcacatgactacgtccgcacgaggggaattaacttacgcaaggagtaatgccttgcagccgggatcgcattggaatcagtcgatgcaacctgaaggatgcttcatatgacaggtgcccttctagctaaaaaaaaatcaa

SEQ ID NO: 184599 - DNA, 235 bp, Zea mays
  Clone ID: MRT4577_99943C.1
agtaacactgattaattgatgcaaatgtgaaatccaagttgtgaacctaagaattctacaaattgggcaatattattgcaccagacatcaagaggaaacttaataactcaagttgaatggaatagaatatcacattaaatctggaattatcttctctgcttgtacgaaaatttatgaaccgtggtatttacaattttattgacgggatttaaaaaaatattttgtaattcatgtt

SEQ ID NO: 184600 - DNA, 1801 bp, Zea mays
  unsure (1)..(1801): unsure at all n locations
  Clone ID: MRT4577_99944C.1
cattgggtacctcgaggccgggaaccgaacctcgccgccgccgactcctcttccgtctctctctctatcatctactccctgtctccttccctctaaacccgcacccgcagcagcgccgctagggtttgctcaggccccgaaccccacccttggattgctctgattccgtggcggctgtttcccgaagtttgcagtatggcggggtacccggaggacaaccagcacgagttgaacgggtacgacgaggaggtcgacgaagaggagggacaccccgggaggcgggtaggccgggatgggggctctgggtacgctgatgctgtcggagaggatgggaggggggcgggtggcgactcgttgggaaagatttttgtcggaggcgttgcttgggagacaactgaagaatcattctccaagcattttgagaagtatggggcaataactgattctgtaattatgaaggacaagcatactaagatgcctcgtggatttggatttgttacattttctgatccatctgttatagacaaggttttggaggatgatcacgttatagatggcagaacggttgaagttaagaggactgtcccgagggaagagatgatcaccaaagacggccctaagacaagaaagatcttcatcggtgggctaccaccatctcttactgaagatgatttgaaggatcacttttcatcatatggtaatgtggttgaacatcagataatgcttgatcatagcactgggcgttctagaagggtttggttttgtcacatttgaaagtgaagattctgttgaaagggtcatatcagaggggagaatgggtggacgtactccggctggtccccgttctgcaggaattcggcacgagggaggcggcggnggttatgggtatggtggtgcttatcgatctgctgcagcaggttatggatatgatggtggcgcaggagcaggatatggctatggtagagggtatggctatggaggcaatgctggctttgggtnnnnnnnnnnnnnnnnnnnnnnnnnnnnnatgtatggaggtgctgcctatggtgcatatggggcctatggtggtggcgcttatggaggaggtgcctacggaggcggtgcctatggaggtggtgctgcctatggtggcgccccaggtggttatggcactggcggatacggcagttatggcggagcaggtagtactggtggtgggagcacaggtgctcggggttctagcaggtatcatccatacggaaaataagcgacgagtttaaactagttttctgggtctcaggtgttcctcttctcctagaagttcagatttcatggcatgtccatctaaacagtgggcattggaacgtagttgggtctaattaagtcaccgtgagaactgtgtaattgctgcagctgagcctccctgcctgccttgtttgcagtacaagctacacataaaacctgtgttgtattctttagtttggtatatgcagagtttagaaccctgagatcgagcattttatggtaggaacagtatttggtgcggtagaactatattccgtgctctaacattgccattgcaagattaactgttgccacatgtggtgattacaactagggacccattagaggatttggttacattttatgacttgatttacattctacaaatggaaatgaactcagggatgcgacctgggctatggcgtaaatattagagtgttgagatgtctgcattcatatttgcagttttgtgcatgagaatttgtactctgctaacttcagcgattactgcttattttaaaatttatctcagtat

SEQ ID NO: 184601 - DNA, 258 bp, Zea mays
  Clone ID: MRT4577_99945C.1
atactaacctccatcaccaatacccacaatcgacttttttttctcttcttctactaaccctcacaccggtcagcttcaaataaaaaaatccccttaccctctacattacacaaatttaacttacacttctcaaatatcaacacaacaatcacattctcctccggacaaacactacaacttattactaaaacccaatcaccttcaacacccaaaaactccctctaaatatcaacctccaaaccatatctcagtcactat

SEQ ID NO: 184602 - DNA, 592 bp, Zea mays
  Clone ID: MRT4577_99946C.1
attgtgttttcattaatgggcatcaatctaagttatgcgtattgatcttgccatttgcattacctggggatggttttatgtatagatgatgactagtgcttatttattgtatatactggtattctatccaaattttgtctggtctgcatatatacacatgccttgacattctattatctggccagtcgtataatttacaccatccttgcaccatttgttatacttctaactgaaatgggctctgtgtcgtcatttaataatatctttgaattgtttcaaaacattgttggtattagcattttcatcttgatttaatagaaaaggtcctcctttctactgtataactgcatgtatatctcttaacttaattttctgtttggatctgcagatcggctggtacgcacactgacaagaagaaataaagcatttcaagttcatgaatgtggcagccagagattatcaactgtgttttttccctacctctagaaactagacatggcaaagtatttttgaccgaaacattgtttgttagtaatgtattgaaccacctcgtggtattttgccccaacttccaatgcatcaatggtttgtt

SEQ ID NO: 184603 - DNA, 541 bp, Zea mays
  Clone ID: MRT4577_99947C.1
gcacgagacgggaggacatcagccgtccgatccagaatcgagggctctgattagatctgatcttaagtgaaacggtatgaaactgtggccatccgatcccacgcggacgacccagcacgaatggatacgctcagatcggatctcatccatcggatggagatccaatagacccggggcatcttcaacacccgacggttgcgaacggcggtgccagcgtgctaacacggcagcgccattgccggagtagcacaaccacgcgattttgccgaccacggtggcagcatcaccggaggactccgcccaaccctccgagtaccagaacaaaatctagtatgctcaacgcgatgctggggacaagacgaacaccgagtacgatgtcttaccggcggtgaagacgtcggcggtgctgactacgtcgcgggcggatccgggatgcatcctgagctccggtgaggaatccagcagcatccgaccattcatcatgcccgacgacaaatcgcacacaaccaggacatcccgacggccctccaaggcgactcgt

SEQ ID NO: 184604 - DNA, 352 bp, Zea mays
  Clone ID: MRT4577_99948C.1
aattatgaaccactcacattgtgtttattctttattgctgatttctaacgggggaatgaacttattaccactggacaaagtgggaaaggaaatattttaaacgggacgccaaattgacatttggctcaataatgcttgaaaacaaattgtttctaaaacaaacacccactccttttaacccagacttggggtgcaaaacatgcactccttaataaccggaaacagtgtttcaaacggatatgccctattgctgcagatccacgaacaaaaaccccaacggggcattgagagaaacaagccatttcattttcacccttcccgaagggactcattttcatgccatgcacggatc

SEQ ID NO: 184605 - DNA, 391 bp, Zea mays
  unsure (1)..(391): unsure at all n locations
  Clone ID: MRT4577_99949C.1
ggaccagcgggattttctgttccattttaaacaagacaaaggggcttcgtatctatcagngccgaccagcacccgttacggtttacaacgggcgaggaaaaaaccccatcccccctcgtaggggggctcccncgacacaatcaccatgagtagggtatgcagacaaacaccccacgtacattgaccgcgatccgtgcnnncgtgcccacacagggcatgttcttgcgtgtctaggttcacaagaaatcatncccatcctgatccttttttacgatggccccattcgtgccctgaacctggccccgccgtnaacgggaggctaaccgaactatttctncatcctgggcccccgggggggtttggccatgcgctcagacccgcacggagctac

SEQ ID NO: 184606 - DNA, 650 bp, Zea mays
  Clone ID: MRT4577_9994C.1
accaacctacctgtctcatctatatgcttctctctccctctctttctcttcgccgtaccgaatctccgatccccattctgatcgatacctcaaccatacgagcaccccaccgctgtctacggtgttcctgtgtccaatgcaacgccaaccacagatcacgtcgagaacattgtcaaaaccctcatcgactactcggatcccccttcaaatgttgtcgactgcgtcgtcaaccctccttttgacttccttcatgcgctcaacagccacctgctcctgcacctccatgttgctgataacaactgctggctcgtggaacgaaggcgctttccctgtggtaccactcgctgagatgctcgacacccttgtggttccctgctacattcttggacactctgacaagagagttctgctgatagactcgaatgaatttgctaaacacctggatgcgtatgccctgtttcactgactacgacgtcattgcatgagctctgcgacacccttgaggatatcaaggatgattctatcatgctgggtggtgctgcactccgaccgatcctgatgattctcctgaggactgtgacaacctacgtgctgtctatgaatcgtgtgcgctattggaactgaaggagaagtcaccccctgtacagctc

SEQ ID NO: 184607 - DNA, 646 bp, Zea mays
  unsure (1)..(646): unsure at all n locations
  Clone ID: MRT4577_99950C.1
gtcccctacagacggacgcggcgacgcacgttctcgcacaccttccgccgcgggccttcttctcctttctgctcgcctcttctccacctgtccgctctactgtatagaggaaggccgaaggccgtttccatttctcgaagccgcggcagcacgcgtcctgcttgcctcccggtcccggatcttgcccaccccgcaacgcgccgccacctccgccaagcaagggcagcttgatcatattcaagatggggaaggacaaagaagctgccaatctgaaggaggaggagacagagatcaaggccaagtttgttgagaaggaagaggccaaagactcgggtggtggcgcagggtccgtgggaggaaagagtaaagagggaaagaaagacagagagagaaaggaggaggagaagtcggtggagcatgaatatggcgaaggcgatgagaaggcgatcaagaagaaggatggatcagagttgaagggntcaagtggtgagaaacaagagaaaatcaaagataagaaagagacaggagatggcaaagatgtgggggaggaagagaaacgcaagaagataggaaaacaagaccaagataagaaggataaaaaggccaaagaaaaggatgtatcgggaaccaaagggtggcaaggatg

SEQ ID NO: 184608 - DNA, 536 bp, Zea mays
  Clone ID: MRT4577_99951C.1
cctcgaggccggccgggaaccttctgtcgaccctctggatcgaagcctggacgacgcgaccgtgcggcggcgactcgacgcaaccagcacggcggcggcgcacagccccgacgacgactctccccactgccttctctccgttctacaatgagtatccgggtgcgggatcgtattagaaagaggagggaagaagaagaagaagatgacatgatgatatttattgggaagcaaagtattggaaaaaactgcatttagttgatgatccactagaagtttaagctatgtcccactcgagtctttatacagtggtgatgtctcttgttatgctatgttcactgcatgatttttgtttttggcatgtctacaactggttcagctgttcagctgctcattgtggttgcagtcaaccataagattgttgtcttagcacctttgatatgtcttagcaaaaactcccagttcactctttgatatgtctagattgaaccagttcactctttaatatgtcttagcattgaacttgttttagattcaac

SEQ ID NO: 184609 - DNA, 650 bp, Zea mays
  Clone ID: MRT4577_99952C.1
agactccgagatgcccgggcgaaccgcggatcgctcgccagtcgccacgcggctccaccgtcgccaaacgtccccgaccgacggacgcggcgacgcacgttctctcacaccttccgccgcgggccttcttctcctttccgctcgcctcttctccacctgtccgctctactgtatagaggaagggcgaaggtcatttccatttctcgaagccgcggcagcacgcgtcctgcttgcctcccggtcccggatcttgcccaccccgcaacgcgccgctaagcaaggtccaatgctcgtcttggccacgccttcgatgtgcatagcattatctgcgtgaacatcgcgaaatggttggtggtactggtacaacagggacctgtaggaggcacaggtcactgtgccgagcagattctcttgttgaaaaaaatacatgcaaaatcaactgtcatggcggcttgatcagattcaagatggggaaggacaaggaagctgccaatctgaaggaggaggagacagagatcaaggccaagtttgttgagaaggaaggggccaaagactcggctggtggcgcaaggtctgtgcgaggaaagagtaaagagggaaacaaagaccgagagagaaaggacgaggagaagccggtggaacatgaatat

SEQ ID NO: 184610 - DNA, 1573 bp, Zea mays
  Clone ID: MRT4577_99953C.1
attcggctcgagccgggcgacaccgcggatcgctcgccagtcgccacgcggctccaccgtcgccaaacgtccccgaccgacggacgcgtcgacgcacgttctcacacaccttccgccgcgggccttctcctttccgctcgcctcttctccacctgtctgtccgctctactgtatagaggaaggccgaaggccgtttccatttctcgaagccgcggcagcacgcgtcctgcttgcctcccggtcccggatcttgcccaccccgcaacgcgccgccacctccgccaagcaagggcagcttgatcatattcaagatggggaaggacaaagaagctgccaatctgaaggaggaggagacagagatcaaggccaagtttgttgagaaggaagaggccaaagactcgggtggtggcgcagggtctgtgggaggaaagagtaaagaggggaagaaagacagagagggaaaggaggaggaaagtcggtggagcatgaatatggcgaaggcgatgagaaggcgatcaagaagaaggataaaaaggagaaagacaagaaaaagaaggaagatgatggagattcagggaaggcagagaaagataagaaggataagaaggctaaagagaaggatggatcagagttgaagggttcaagtggtgagaaacaagagaaaatcaaagataagaaagagacaggagatggcaaagatgtgggggaggaagagaaacgcaagaagataggaaacaaagacaaagataagaaggataaaaaggccaaagaaaaggatggatcggaaccaaagggtgacaaggatgaagatggtaagaagaaagaggccgatggcgatgaagacgaagaaggtaagaaggaggacaaggaaaagaaagagaagaagaggaaacacaagggtgcaaaggagaagacgattgatccggtgaagctgaaggcaaaactggagaagattgatgccaaattgcatgacctacaggccaagagagaagacatcctgaggcagctgaaagagctggaagaaggcggcaagggaaacgcgaatgaagaggagcctgcacatgtgcaggaggacaaagggaaggatgttgtgcctgcacagatactggaacaggttggagagagcaaggtcgaggaacagaatcctgttgccacagcctgatcttgtggagctcctgtagcggttcatgtaacaataactctgatctggttttgcacacatgcattacacagtgtaaaggaatacagccatataaaaagaaaaaaaaaaaaaagaaagaaaaaaaaaaaagcatttcggggcgtgtttggctgagacatgccctagccgtgcatcttcaattttgcatagaccgcatgggagcttggagcttgtgcgctggaaccaggccccggggaaacgaaatttaggggcttggttgacctccagcctccggggaaagtggggtggggggggatcccgtggttgggggaaagcccgaaaggttgtttggggggtaaaagcaaggaccctgttttttaatttgtctttggcccggttcctttcaaaaatgaactagcggccaatttttgg

SEQ ID NO: 184611 - DNA, 1849 bp, Zea mays
  Clone ID: MRT4577_99954C.1
gtcatagccagatagccttctaagttctaaacttattttcctgttactttacctatggagtttcattcctagttcattgcacattggttatcgtgacaaatgggggtgtcgctagcaggtctctcttctctggataaccacaccaccaatcatgagggaatcaccttcaacacagggggggccatctacatcttctgcggttgatgatagttactcagctgacggtgttgaagattcacaactattcctctccgtgccagctttaaaccaagctgcatcttatcttgcccagacagcttcattcctcacccaatgcctccctgtacctggttttgtgggtctatctgaggagggccaagagttattaacactgccacctgcatcggcttcaggcagactttctgttcagacttcttcagtagagccttccggtaccaattcatcccttggtcagtcagattgtggtggaaacccctctcaagaaaacgctggacagatggtgccttcgcatgtttttcagaatggagcttcactgttccaaggccttgttgaacgtgctcggaaaacggtccgtggttcagcagatgatattggctggctccagcgagatcaaagcttacctacaactgaggatgggacagccagattcttagagattttggattctgtgagaaaaaatgagcacaagctatctgattcattggtttacttgttggttccaggtctgtttagtaaccacggacctctttactttgtcaaaacaaaggcatatttctccaagatgggtctggcttgccatattgccaaaattcatagtgagtcttcagtgagtaaaaatgcacgagagataaaggaatacatagaagaaatatactggggatccaggaaacgtgtgctcctccttggtcacagcaagggtggtgttgatgcggctgcagccctctccctctactggccacaactcaaagacaaagtcgcaggtttagcattagcccaaagtccatatggaggaagccccgttgcttcagatatcctgcgagaggggcagcttggtgactatgtcaggctgcgtaagatcatggagatcttggtatccaaggtccttaagggtgatctgcaggctctagaagatctgacttatgaaaggcggaaagaattcctgcgacggcacccgctacctcaggatgttcctatcgtttcgttccacacggaggcaagcatcactcccagcgtgctcacagcgctctctcacgttgcacacctggagctcccgattgctggcgatggcaattccactaggatcccagttgtgatgccactttcagccgcgatggcagcatgctcgcagttgctggtggcgaggtatggcgagaagagtgatggtctcgtgacgaggaaagatgctgaggttcctggttcagtggcggtccggccggagcggaagctagaccacgcgtggatggtgtattcgtcgctgaaagaagagtctggggatcaggcggacacgtcgcaggtatgcgaagccctgctgactctacttgtcgaggttgcacaaaagaggaggcatgagatggcaatgaaagacgagtgaaagtagcttttggtgttggctggcgatagtgggatgtatcctcctgtaatcgtagactggcctgttgctggctgtacagagttgtgctgctcaaagtgctttgggacctgtttttgtttggttgacagaaacttgtgttgtatagcatgtgaagttcagaggtggatggagaaggttctactgtgttgtgtttggttggatgtacaaaaattgatataaaggggtggccacattttctataaaaaaaaaaaaaaaaaa

SEQ ID NO: 184612 - DNA, 371 bp, Zea mays
  Clone ID: MRT4577_99955C.1
gcatcggaaccaccccggcggtaaacaaaatagtctaagccttaaagggcgggggggccccccatcaaaaatttggttaaaaaccgggggccttggccacctaaaccaaaataaaatttgagaggcggtgttttaccaggagccaaatgggggttaaaaccgggggtagaaacaggttccccacccgccaaaaattttgggggtgggcccaaaatcaaaaagggggggggttgtgtccctgggaacccctcctttgggggatttccaaccccagttgaccacccggggggccgcgccccaaggggccgggccccttcatgcccaagtgtgaaagtacacacttggggacccccggaccagggttgaggccc

SEQ ID NO: 184613 - DNA, 456 bp, Zea mays
  Clone ID: MRT4577_99956C.1
cgttgctgtcgggagactggttaactgaagcattcgatgtatccaccacaagtgttctttgctgattcatgatctcctccatcttgcacatatcagaagcagatgctaaaggggctgattgtggactgcagattggaactctttcttcatgacttagcatatctgatggtgaactagaacctctgtcttcaacgggggttgctggagcgcagctcttaggctttgcagaagcaatagaagaatgaagttcatcgagaaagcttgggttagttgttgaacttaagcaagacccttcctgttgacttgaagctgtcctcgactcggccggactccaagcaaacaaaggactggaaacatctttcccaatacgttgagcaggtaggtttttcgatagatcctgccttgaattcagatctttaacaaatcctccttgtgaaccatgtttcgacagcaacg

SEQ ID NO: 184614 - DNA, 462 bp, Zea mays
  Clone ID: MRT4577_99957C.1
gaaaatcttttctacagatgcttcccggcaacccagtccggccggccgcttccctttccttggataagcacggcacgccgatgcgaacgaggcatccaaagatatcaagacgtgaattctgagccatgtggcagccattgccacaacggacggatcatctgatgcaataactgtcatatcttcggtaatgcgacgaccatgaacatgtggtcacatagtccctagggagatgataatgaattaggataacgataagaatggctaccgtaatcaagccatgcaatcatgaacgccagagacgcaggcatgaatccgggaggctttgctacatgcccgataccacctggctcccaggactaactacaaacgatgaaccggtcgacacctgctaatgtagccaaatacacctagacggcgtcgacgatttccaaaggacgaaacgtagatacgaatcgtggcaga

SEQ ID NO: 184615 - DNA, 226 bp, Zea mays
  Clone ID: MRT4577_99958C.1
cggctcgagcggctcgagaagttctgtagctgaattactaagtactttaagtaacctaccactaacatggagttactgaatagcttattcagtaactagcacttagtagcctccttgcttttctaatacagcaatctcaaatacaatctcctttgtagatttattctagttgagcaatcctgctggaaacctaacattgctcgattcatcccaggatgaagctgtt

SEQ ID NO: 184616 - DNA, 365 bp, Zea mays
  Clone ID: MRT4577_99959C.1
ataggaacattctaataggaggggacttacttagaaggagtggaatacgcataatatactaaaacacaacatcattatatgaccacataaaacaatcgccggcacacaatacacacattatttcccattacatttttcctacaccaaatactatataacatgcccaattcgatactacacattttggtccaacaaataactcaccctgaacagccaataatcattgactgaaatttacatgaaaatactgcaagtacgcgcttatttcagctattcaagatcccaccagccccttgtgtactgcctaaccaacaatggtgacaaattttacggcacaaaatagcccttatcaacaaccacccatt

SEQ ID NO: 184617 - DNA, 622 bp, Zea mays
  unsure (1)..(622): unsure at all n locations
  Clone ID: MRT4577_9995C.1
tanatgatttgtgggagactgagttctgggaagtggcctcatgattatgaacaagccaggggcgttaggttttgcatgctagcagctgcgactgtcttctcctattactatctgaagctctgaacttggaagataactctctcggccttagcggtttggtgctgactggtaaccactgcgcctgggattatgagctgtgggtgaagtttgcctcatgtggtccaaaaagactgaagatttaaatctggtgtacaaccaattggattggttcaccttggaaattatctcgagacgattaagaattgtgttgcactatagtcactgggtgctgtttttggctgagttagaagccccgactccaagtcggcagagcttgcttatcttgcacattttcctgcactcatcagtggtaaaactgttactatttctctctggaatgatcttgctactaggactggacaagagcttttggacatggttgaccgttcgcccgttgttgcgataaagagcctaaaagtatctgacttccaagtcttgtctctttcaactatcggcagaagtactctcgagattaatccagatctgcctgaggctaagaatcttaagtcctggcatgactctg

SEQ ID NO: 184618 - DNA, 248 bp, Zea mays
  Clone ID: MRT4577_99960C.1
ggagctcctgcaatgcccccatcttacgtttcctacccatctcgctctcgcatagagcgaggagaagctgaggcctagcgccggacccgccgccgcatcagtcatcagctatggcgctggccgctcgcctcaggctcacgctaccgacagctacatacggttcatgcagctatcgcgaatggaggtgtcactcaagtccggtcctttgccaacgatgcagctccagctgaccggcctcctgttagtgg

SEQ ID NO: 184619 - DNA, 250 bp, Zea mays
  Clone ID: MRT4577_99961C.1
gcgacggcagcggccgtcagaacggccacttgctagggacggctcggctctgagttccaatcatgagaccagtaagcgtgcgtaccgtacgtacgtagacgcagagcgcgcgcgtgcgatgagacgagacgagatgcacgcattcaatacggttcactccattcctgtgtgcgcagtgcgacgcgcgcctctctctccctcactcactgtctgtcgctcactagcatatccatgttccattccgtcacac

SEQ ID NO: 184620 - DNA, 508 bp, Zea mays
  Clone ID: MRT4577_99962C.1
cggccgcccttgtttttttttttttttttttttttttttttttttttttttttttttttttttgtgttttttttttttttttttttttagggacccggggggcaacccgggagattgggccgggaaccggggggcggcccaggtggccctaaaaggagtcctataagagctggggggaaacacgggaaaaaagggtgcctggggaaaaaggttagccgaaaaaaattcccccaacaaacgggccgaaaaaaaaagggggaaacctggggggccaaaggggggggccaacacaaataaatgggctggccctaattgcccggtgggaaaggggaaaacctgtggggccaattcatttaaggaacctgccatagcacagagaaaagcggccgggaaagggcccccaggggtggttcccttggggccggggaaatggcaaaaaggtgatgggccttaaccatttggcccagataaaggggccccaagggggggcccctggggggccccaggg

SEQ ID NO: 184621 - DNA, 724 bp, Zea mays
  Clone ID: MRT4577_99963C.1
atcggcaaataattccacggtccatctgtgcaagcaaagatggcacgagtgctgctcctcgtcgtcctggccgcctcgctcgctgcgctggcgtcgtccaaaggtcttccggtgctcgctccggtcaccaaggacaccgccacctccctctacacaatccccttccacgacggcgccaacctcgtcctcgacatcgccggcccgctcgtctggtccacgtgcgacggcggccagccgcctgcggagatctcgtgcagcagccccacctgcctcctcgccaacgcctaccccgccccgggctgccccgcgcccagctgcggcagcgacaggcaccacaagccctgcacggcgtacccatacaacccggtcaccggcgcgtgcgccgccgggagcctcttccacaccaggttcgaagccaacaccaccgatgggaataaaccggtgagcgaggtgaacgtccgggtcctggcggcctgcgcgccgagcaagctcttggcgtcgctgccccggggctccacgggcgtggccgggctcgggggctccggcctggcgctgccggctcaggtggcgtccgcccagaaggtcgccaacaagttcctcctctgcctccccaccgggggccctggcgtggccatcttcggcgggcggcccgctccctttgccgcaattcacgcagtccatggactacaccccgttggtcggcaaaggggggcaacccctggga

SEQ ID NO: 184622 - DNA, 306 bp, Zea mays
  Clone ID: MRT4577_99964C.1
ggtaccactcgagcctgccgggatcgcgtcttttcttttctgcttcgaggacgaagagggctcgagacgacgcacagggccgacgcacccccgaggccgactacgcttctcgccttctccctacatgtcgttctgccaacctgatacgaactgcggggacttcgacaacgagctcaagtcccgatacattcgaacggtctgtggacgtaggagtgtatctggagggacgggatgctgtacctattcataaccagtttgtttccgacgaggaccacgattgggggaaagatcgcgccttaggggcgg

SEQ ID NO: 184623 - DNA, 281 bp, Zea mays
  Clone ID: MRT4577_99965C.1
ggcccgccttttttttttttttacgaacagtcctctagtcatactattggagcctgccgatgcctacatttctttgcttaggcaaacagatgtccctcaatagtgtcactcattccgcatagcttgtggacaccactgaagccactcgtatcgctcatggatatacagcagacacgcaagagattacatacattgcttgcgcggaactggagcatatcgatcgtatttctacaaacactgaacttgctaacgctcgagacgacctcacaagacgctactgg

SEQ ID NO: 184624 - DNA, 304 bp, Zea mays
  Clone ID: MRT4577_99966C.1
catggttggtcataggcctagtctcgcatactgtagcgtaaaattcgcctcgagcaaactcacgcttgatacccctctggtctcgacgttgccgagctctaagacccgacaatatagggaacgcgtgtacacctgcagacaccgacacggaactaattgacgcgtcgacgagctaactagtctgaagccggcctataagatcttagctagcagtttgttttcatttgtctgatcgatcgaaggctgtaaaaaatgatacagagctaagaggtggttatgagaacttggctatagctgggcattt

SEQ ID NO: 184625 - DNA, 601 bp, Zea mays
  Clone ID: MRT4577_99967C.1
atgacgaaccgcattttactgaactgatttgcttaaaagattccgggggacacatgaccttgtcaaactatgactcatttatgggcttccaaccactttgtgacaccccccactttttacatacatttttatgcaataaagtttatggtgggatgcactttattccgtgggcggaacaacacgactttttctaatgaccggacctggacttattaattttacatggagctgatgatgtggcgtgtcacggcaaccacccgtgagctgattccccagtcttttgttgcccaagacgcaatctttacgaggctttaccccaaggctttgccaaccttagattcttattggccaaaaccggtgtctttttgggaggtgggggaaaacaggtcctcctctcagacaccgaccgtgcccttgatgctacctcatggctggttcttgggcgtagacttgatctccaaaggggtggtttttttgggaactccagcagtattatctccaacctggaccttgcttgttgaggcaccgcacagttttcctctaaactttccgtttgggacaggaagtattttggcttcctgcttggcagactcagagctgc

SEQ ID NO: 184626 - DNA, 246 bp, Zea mays
  Clone ID: MRT4577_99968C.1
gactagcacctccaccgacagatgagcaaagagagactcccgcctcccaatcgtgcggcctggacggtggtctccgcttcttcaggagctggtgctggccgtagaggcgtgactttttctaccgtagctagaggccgtgaggcctggagctatagactccacagaccaactgcgtctccgagtatatccagcccagcgtgccagagctcgccgactacgctatcatgtaccattcccaccccagct

SEQ ID NO: 184627 - DNA, 584 bp, Zea mays
  Clone ID: MRT4577_99969C.1
gggatacaagtcccattctccacgaaggcatctcctcctcatattcatgctgccttcatgtggccgacctccgcgcaaagcaccaaatcgtagatgtcccgcacagaagcagacagcacgcccgttaacaagaggccaggcgcggaggacccagctgccgaccatggcgctgcgcaggtgtgcgccgggcaccggaagcgcttacaagccccactggtgcgcggccgagatcgtggcacaaggtgagattcataagtgccataatagcacgggatagctaatccatctacagcccctacatcgtgtagaccgtcagacgacatgacttaagatccatgtccggttcctgacctacgtcgtctttgcgccgtatgaggccggctcggcctacctggtggcgctctttggcgacactacccggtgcgccatatcacgctatgcgcggaaccataactctcaacgacttgcacttcgcgcgccgcatgaggggagagcgggcctcaacgacgccagctcctctcatcggatgagatgatgttatatttgtgggcctgctttaggacttgggctgttcttgggttcct

SEQ ID NO: 184628 - DNA, 225 bp, Zea mays
  Clone ID: MRT4577_9996C.1
agaaaactctattctcttttaattttgtaattgaggaccattttacatagtactaatatttatataagagtttgttagtcatattatgtgagggaccaagaacaaatacccgcgggggccgaaacacttttttaaaaaaatataacgggggggcgtaccccccttttaataacacgaaataattatgtggggggccctgactctaaaactaaaaaaaatgggggg

SEQ ID NO: 184629 - DNA, 1360 bp, Zea mays
  Clone ID: MRT4577_99970C.1
aggccggccgggatactactagtagtacctacaagttgggggtatatcgatcgtctgatacgcacatggacatggtgccctgtatacatggatggatctaggggaacggccaacgacgtggagggcgccaagcgtcacagatacaatcatacaatccattctcgtggaccgtaccagcaccaccatgccccgagccatgttctctccggtcaaagctcctcctggctggattagaatagctaatcctccagtccaaatgcacgccactagtgaacaaaaatagcttggcattcagtgagctgcatcggcgatgattgccatcgctgtccctgtgacgagtgacgaggcaggtacaaggacgggtcggcggcgcgcggcacggtgggcaccgactcggcgaccatcgcgctgtcggggcggcgggccggcaagaagcagcggcaggctcaggccaagctgcagggcgtcgtgctgggctgcaccacgtcctacgacggcgagagcttcctggcctccgacggggtgctcagcctcggctacagcaacgtctccttcgcgtcccgcgccgcggcgcgcttcggcggccggttctcctactgcctggtcgaccacctcgccccgcggaacgccaccagctacctcaccttcggccccaacccggccgtgtcctcggcctccgagacggcctgcgggggctcgggctcgggctcggcggcgcccggcgcgcgccagacgccgctgctgcttgaccgccggatgcgcccgttctacgcggtcgccgtcaacggcgtctccgtcgacggggagctcctccggatcccgcgccgcgtctgggacgtcgagaagggcggcggcgccatcctcgactccggcacgagcctcacggtcctcgtgagcccggcgtaccgcgccgtggtggcggcgctgagcaggaagctggccgggctgccccgggtggccatggacccgttcgactactgctacaactggacgtcgccgtccacgggcgaggacctcgccgtggccgtgccggagctggccctgcacttcgcggggtcggcgcggctgcagccgccggccaagagctacgtcatcgacgcggcgcccggcgtcaagtgcatcggcgtgcaggagggcgcgtgcccacgggtgtcggtcatcggcaacatcctgcagcaggagcacctctgggagttcgacctcagggaccgctggctccggttcaagcacacgcgctgcgccctatgatgatttgctgacggacgccgcgaatgcatgattgattcctctatcgcatcgcattgataaaatttgtgacgaggtttttttctgaatgaaatgcaaacatgattcttagcgc

SEQ ID NO: 184630 - DNA, 289 bp, Zea mays
  Clone ID: MRT4577_99971C.1
attcggctcgagggcgcgccgcggcttgtttccggtaggagcgccattacaggtgggcgggccctttgtaaggaggtgagctgaatacacggccataacgatggtactgtgcttcaacggccagcctggtgaaactaacacacatttaccgacaccgctgcacaactgcgaggacgattacttgaggtttattctgcgcattatatagttggtcccggtaacgatttacacccgacgggctgacccacaacacattctgacgaccaagggcgtactttctgcagagctg

SEQ ID NO: 184631 - DNA, 431 bp, Zea mays
  Clone ID: MRT4577_99972C.1
gcagcggatccatccaaagcttcgttagattgctcacggtcccagttgctgctgccgaccaggccggacagcggatgactgctgcggctgcactggtgccggtccagggagcgagaggggcaacaccaggaagaccaccaagatgccggcggctggactgaggagggccggcggccggtttcctcttgcgcgggacgtcgggagcagcggcgccaatgagcgctcctcctcggtccgccgcggcttcggcggcggcgttgcaatgccgcgcgcgttgctggaggactcggcgccggcgatggacgcccccgcgacgaccggcagggagccgccgcccccggcctcagccgcggcgtcgagggtcacgccggcggtgctgttcgtcacggtggtcctggccgtggtgctgctcgtctccggcctgctccacg

SEQ ID NO: 184632 - DNA, 1144 bp, Zea mays
  Clone ID: MRT4577_99973C.1
atagattaatatgtacacatagaagtaagtggatatatacatgtaccaaataataaaatattggtctcaattacaacaaaataatgatgtgttcaaaaaaaagtttgcaatgaatttctgaatctacacaactaagaaggatcaaatcaaatttgtaatatttattttcacggggagtgggaacatagtatatgcaataatgcgtatgcacatatatgtatatgtagagacaacattcaaagttggagatcaacgatgtttcttttgtttcatttattacatagttgcaataaatactaaaagcattgcatcttttgttttaatttggtagtaagactggaattattaaaatgataaaagcaggttatggatgtctaaaagcttcagccacattttgaatttacagattagaaaaataaaatagaatctacatgttagactttttgaagattggtcaagctggcagtaactcggcactggttccatttcatgggtacttacatgcttcatatatatagagtgttggtggaatactcctttctgaatccttgcttcaccaacaaagtcatctgttgtatccattccctccaagaatccaacagggcataaagggtgtatgcaaattctcacatcccatatatgacaacacgttgatgaatgctaaacttgacccacaacacctggacacagaacctttgataatagggagtagcttctagaatagcaggattgaagtagtactatgtacgtgttgtcccgctggtaaagtatacaccttaaatagcagtgatctgtgtcatggtagccaaagccaaagcgaaccaaatggaagaacgacgaaatgacgatggcacactcgtggagccagtaatcaccatctcaggcctcggcaggctgcctaacacgctaacatgtacatgtggcttcctcctgcatggcgtcgcccacattaacagcctttgcctgcctgtctgcacgaagcagcgaaggaagcaatccatccaacacggtcaatgtcgcaaatccaatgatgaagttgctgacgatgagcacaaaaagaaaggtggccggcaaagaggtcagaagagtggatactgcaagtccaaagatggcgctggcgctattaaagtgaagtctcctaaaa

SEQ ID NO: 184633 - DNA, 379 bp, Zea mays
  Clone ID: MRT4577_99974C.1
ggagtatagtattagcttagctcgaggcaaataaacagtaattttaatgaattaaagggttagggttggggggcgggcattaattccctttttgcatcacggccacaccgatcagacaatcatgcatatagtactggggcacacgatgacgtcctaccagtacgaccgatcgagctagtaaccgctgctgcagagatcacgcgcgagttgggcaggtctattgtaagtacgatcacatgccacttgtccgagcctcgtgtcagtgtcacggctgagatgaagagaagccgagaggggtaccccttgacgccggtcgctaacacaacacgcaaaagagggaattattgaacccagtcgctaacacaacggaacttgaaaa

SEQ ID NO: 184634 - DNA, 372 bp, Zea mays
  Clone ID: MRT4577_99975C.1
aaatgaaataacaacatatagtataatcataccttgaatatacataaaatagtcttagctaacaactaagatagtgttgtgccacattcgggcataagacatagattcataaggggtgcaaagtcacatgacagggtttgctgtaacccgaagactgaaaaaatccaataccacttggacgacacgcataaaaaaccgtaaccaatcgctatcggtgcaataaaggtgctacttttataatgaggaactcctggcggccgggtgttaggttgctggggccggagcctgagcaagagaaagggtggggccaacgcatgcagctttttgtggaggtggacaagtaggaccatctttgggccccgggtacgtcag

SEQ ID NO: 184635 - DNA, 384 bp, Zea mays
  Clone ID: MRT4577_99976C.1
agcagtggtaacaacgcagagtacgcggggaccgcgaccccaagtcggtactgactagctcggtgtgatttatgtcatataaataagcggaagaaaacaaacttacaaggatttccctactgacagcgagcgaaccgcaagcagcctagctagtgaatcgggcggcctggccgaccggattgttgtatagacaggcttactgaccgaccgaccgcacccaatttgtatggaaagggacgcctgggagggagagagccccgtccgggccggtccctgtcgcaccaggaggcgccgccaacgagtcgggttgtttgtgcatgcaacccagatcgggcggctaactccgtgcatggctacatgcaggcgaccgaccgctagcgaaca

SEQ ID NO: 184636 - DNA, 318 bp, Zea mays
  unsure (1)..(318): unsure at all n locations
  Clone ID: MRT4577_99977C.1
gcggttgggtcttggcattaattatttactgttgcttctaatctaatcctgccaaaaaatgtgaaattgggaagggattttatgtgaaatggtgttttgacaggatatgaaactccaaccgaaattacacgacacctgatgtgaactaccagaaagttcacataaccgagctcattaggcattacgatctctttgcaatggttgctgtacaaggagtggaattgcatttacatgctctgaacctttgtcgtgaatattctgaatttaggcctgtgcatggagatggagagtgtttctacaggagcttnatatttttat

SEQ ID NO: 184637 - DNA, 515 bp, Zea mays
  unsure (1)..(515): unsure at all n locations
  Clone ID: MRT4577_99978C.1
tcttgnttatcgagagcgagcggtctcgcgggaagaagctaacttacgcgcgcgtgcgtgcgactacctattttatatagagagctaactacaattaattggccggccgtcgacaacacaacggactggcagaaccctgcctggacccacctaactcaccttgcttgacatacatctttcgtgagcgggcgggcttgttattaggccggcaccgaccgctcttcctaacaaacgcgcaccctgactggatggtgggacgcaccctccctggggccattcatcacgggcggtgtggggggtgctcacacccagaccgatccattcgccagccacctacctaccgctcgtttctttttctttctttcctttctttcctcgctcgtcggctttccctgccaagctctctctaaatggctggctttatggatgcgatctattgcttgactgaccctaccccccacacaactaacttggggtgatggatcacgcacggagccatccatctgcctgacaga

SEQ ID NO: 184638 - DNA, 446 bp, Zea mays
  unsure (1)..(446): unsure at all n locations
  Clone ID: MRT4577_99979C.1
gacctttgggctgatttatgtgcttgttggaacgatacttccttagaccctcctacctatcctcgggcgaggagaacggtctcagactgtaggaatcacaagtagtccgcggaaatcatagccgagacggtaaataaggccggagccgtcgacaccgccgggagggccgccgaggactcgaaagacgaaagcgagtttcatagaagaacggcgacggaaataactgagaaggcggcagttaatccgggcgtactagacaccgacgtctgctcggaggagtcgtccaccgacggcactccgcacgtcccttaagagtagatcagcgacgatgtanacgccacgtcaaacggccccggagtcgcggccaacgtatccggatagagagccaagtttcattccttctagacncgcggcatcactaagcggtgaccggaataatagagcgt

SEQ ID NO: 184639 - DNA, 260 bp, Zea mays
  Clone ID: MRT4577_9997C.1
tatatgtcttgccactacacatattttgggagcgcattgcattccatctgaggtcatactattctaatttgtgaccaccgtccaccatactctctttggacatcaccatgatggagtgcatcaccgtccacataggccaggccgggattctggtctgaaacgcgtactgcgagctgtactgcctccagcatagcattcatgctgttggtcacatgcccggtgacaagaccattgtgggaggtgatgttactttcaacatc

SEQ ID NO: 184640 - DNA, 613 bp, Zea mays
  unsure (1)..(613): unsure at all n locations
  Clone ID: MRT4577_99980C.1
tacaagcgaggcatctcgtgggaagacgagagggaacacatcttcgggaagcaggtgttcccgaggaatttccagaaaggagctctgatcggaggaggcacgcttgatccaaggatacctgtgagtgtactacagtacctctggaactttattactttactgggggaaaaaaacagggctgtgtgatgaagtcgaaattccacagctgagtgagcaagaagacctgatcgtgtggatgcggaccgcggcgctgccgacgttccggaagctgtacggcaggatcgaggcggacctccgcgccggcgagctggtcacggtgacgacgcagaataactacaacacctacagcttcggcgggaagaaggcgctggtgctgtccacggccggcgtgctgggaggcaggaacggcttcctcggccgcgggtacgccgtcgtcggcctggcctgcctgctgctggcgctgctcctcaccatgctctgcctcgtcttcccactgtgagttgccactcgcgaaatgtcgtgtgctgtctgaggcgaagtcagtcgcctctccgatgaactgttgcgcctcattgcttgcaatgcaaacatgcgntgctgcgtgtggaatgat

SEQ ID NO: 184641 - DNA, 371 bp, Zea mays
  unsure (1)..(371): unsure at all n locations
  Clone ID: MRT4577_99981C.1
gaacctttgggctgatttatgtgcttgcttatgtgcctgtgatttatgtgcttgttcctgtgcctggcgagttgttttgttgtcttcgagttacgtctcttactctggcgctatatatcttgtacatgtgattcatgagagctgagcgatagtgagtgagtgagtgagtgaagttacggtctcntgtatttcggtactgaagaatgtttcacttcctgtgtctggtggtgtggtttggttgctggtggtgcgtgtgaggggggcgatgatggctgtgtcttttgattctcttcatgatcctggtgtgtcggagttggttactctgggggagactacgtgttcgtattattagaagtattatgttattcatg

SEQ ID NO: 184642 - DNA, 869 bp, Zea mays
  Clone ID: MRT4577_99982C.1
ctctctctccctgctccctgcctcccctctcccctgctttgaccctgctgcccggccggctgcctggctttatctgcccgccgcgcctttccccgccgccgctcgccgcttggatttgtaggatccagcgacgcccgtccccgcgccgctcgccggggcattaggtggcccggccgtgccgtgtgggactcgcgggggaaggaagatgaccgtggaggggagggtcagcggcgggggggacggcggcggcggcaaggacaagttcccggcgggcatgcgcgtgctcgccgtcgacgacgaccccacctgcctcaaggtcctcgagaacctcctgcgccgctgcgactaccatgtcacaaccactgggcaggcagccaccgccctcaggatgctcagggagaacaaggaccagtttgacctcgtcatcagcgatgtccacatgccggacatggatggtttcaagctcctcgagcttgtcggtctggagatggacctcccagtcattatgttgtctgcaaatggggagacgcagacagtcatgaagggcataactcatggagcatgtgactacctgctaaagccggtgcgtcttgagcagctgaagacaatatggcaacatgtgattaggcggaataccaagaaccgtggtagtgacaatgatgatgccggtcagaaggggccaaatgctgaaggtgagaatggtggtgctaaccgcaacaagaggcagtcacggagggatagagatgacaatggagatgatggtgacgattctgatgagaacagtaatgacaacggcgactcgtcatcccagaagaagccaaagggttgtgtggtctgtggagctgcaccggaagtttgttgctgctgtc

SEQ ID NO: 184643 - DNA, 479 bp, Zea mays
  Clone ID: MRT4577_99983C.1
actcggggtctcgtgctgtcggactcggggtcgccagccgcctcccgcatcgcctccaaggctctccaaccggggcgcctgcctaaccggccgatttccttccttgcgtagctccattccactgcacaaacagcgcgccactttcccaattcccgtcgcgtggcctccttccgatcctggccactttgtgcgtcctgtagcgagggggtgatcggtgatggactgggggaacaggaccaaggccgccgccgccgctgcggcgccggacgagagggccgggggaggggaagggctcggaggatacgtcaaggtcatgaccgacgaacagatggaggtgctccgcaagcagatctccatctacgccaccatctgcgagcagcttgtcgagatgcatcgcgtcctcaccgagcaccaggacaccattgcaggttgggcagcgcagctgcacgcaaaaccaattgctactctctcagctctct

SEQ ID NO: 184644 - DNA, 369 bp, Zea mays
  Clone ID: MRT4577_99984C.1
gggggggcgggccggggtccccccactctcctgcctgaaggccataaagggagcgatggtctccaaccctggccacggtgactgatcacgcaacctttggggccatggcacgtgccgcgtgggctggggcgcccacaagcggcagccctgcctacaggggggggggtgaggcacacgcccgtcgctgccttcgccgtaaatagaggcgtcgcctgtggtcccgcgcgcacacaagtgtgcctgcgtgctgggcaagctggaggccccccgcgtgagcggcaccacagttgatattgacttgtgctagggcgagcacatcagggactactgcactgttattgtggcccctggacaccgctccttttttca

SEQ ID NO: 184645 - DNA, 1317 bp, Zea mays
  Clone ID: MRT4577_99985C.1
cgaacgagactgcagaacatcgacggttggcagagataatcgagatgattcacactgcgagtttaatacatgatgatgtcatagatgatagtgggatgagaagagggaaggaaactattcaccaactatatggtacacgtgtggctgtacttgctggtgattttatgtttgcacaatcttcgcggtttcttgcaaacctagaaaatattgaagttataaaattgatcagtcaggtcatcaaggactttgcaagcggcgagataaaacaagcttccactctttttgattgtgacatcacacttgacgactaccttctcaagagctactacaagactgcatctttgattgcagccagcacaaaatcagcttccatattcagtggcgtcagcaccactatttgtgaaaaaatgtatgcatatggcaggaatcttggtctatccttccaggttgtcgatgacatcctggatttcacccagtcagccgaacaacttggcaaaccagcagcaagtgacttggcaaagggaaacctgactgctccagtcatcttcgctttgcaaagtgaaccagagctaagggagatcattgattctgagttcagtgacacggattcgttagctactgcaatagagctcgttcatagaagtggtgggatacggagggcacatgagcttgcaagagagaagggtgacttggcaatccaaaatctgcagtgccttccaagaagtgacttcagaagttcccttgagaagatggtggaatacaatcttgagaggattgagtagtggattttacttgaatgctccatcaggtacatatctccatttggggtttggggtagttcccatatagatctttatattcagcccctttgggaagatacatttcaccgaaaaatcagatgaatcgcactatttcatacaaattctggggatagcctttgagcaggccactactatcatgttgattttgtaacagcttgtgcagaatcataagaaaccctaggacttgaccgcagccccttgcgcctacatgtatccgagcattctacttggcagttcttgtaaataatagaaccatacagtaacttagcattcatttttgttttgcaatctgcgcatgcttacaagcaacaaagtgtgtgctatatttgtacggatctacgtgcacctaacatcatgcacttgtacaattgctttgcactattatgtactatttccgatttaacagtaataccgatcatttactaaaaaaaaagaaaaaaaagcggaaaaaaaaaaagggcgggccgaccgagctagtgagcgtcgtataacccgg

SEQ ID NO: 184646 - DNA, 516 bp, Zea mays
  unsure (1)..(516): unsure at all n locations
  Clone ID: MRT4577_99986C.1
ggggggttttttttttttttttttttttttttttttttttttttttttttttttttttttttttttttttttttttttttttttttttttttttttttttttttaaaaaaaaaaccccgggggggggtaaaaattgggtttttgctccggggggggggggccttgtacaaaaattgggcaaacaaatattttgctggcccccatgggttgccaggcataaaacaacccctttggtaaggatttctgttctgctttttaaaaaaaaacccaaaaaaaaacgcccccccccccccccataaatttcacaaccccatcgggggggtaccactaaaaaccgagtacccgggttcctggagcactggggggggggggcccctttggaaaaaaaaaaacaccgggtcctccaccatgggagaaagggggccccggggggcaaccaccaaaccatgggggccccnggggaactgggactgggaggcctccacgtccacggggccccaaaggcccaaatccttt

SEQ ID NO: 184647 - DNA, 446 bp, Zea mays
  Clone ID: MRT4577_99987C.1
cacgtgatagcatcttctatagcgtcacgctaagttcaattactaggccggacttgtacagcgcattgactgggcaaaccctgccgtaacaccaacgctaatggccttgcagcgcacgccaccttctccaggtggggtactgtcgacaaggggcgacccgctcgccacatcaaacatcaaaacatcctgcaatggccaacggaccgcaccgtgtagccactcgttaagaacttctctgagccggctctacacaaaatgccccattcacaggccagcaccttatttgcctttacatgatcatggacacctttgttgctctcgccttagccacggtgccacctaaagatgactagctgaagatagatccaggggaaggacaaggacattactgcacctgtgacgcgaaagaacattcttggtcagtggtttataccagtgggccatcg

SEQ ID NO: 184648 - DNA, 375 bp, Zea mays
  Clone ID: MRT4577_99988C.1
ggcgggggcctggtacacaatctccaaggttaatgatgcatgatacatggatgttactaagctctgcaacttttcttgtgtggagccttaatacccatcgttcttctaatcattaaatatcaaaagaataaagaattcttttcactaaagaaaaaagaaaaacgtaatacataaaacattagtgagaagggagattgatatgcaatatgaagagctataagcaacacctatcaccccgttttcccaatttactacatatttcaattaactgagcgctgggagtctgggtgctatcgggtctttagtctatggtttactgtttacaccgtgagcattctttgtggtgcggggtgccctattgaggcatggggatcc

SEQ ID NO: 184649 - DNA, 485 bp, Zea mays
  Clone ID: MRT4577_99989C.1
gagcaaggcacataagggcaagcgtagggtggggtctgtagctacgtacagcgcaggcggacccaggtaggttaggatggccaccaagaagccaagctttatgagggatgcgagaacagaggctcctgttccggagagtccgtgcagcatgccagtatggacatgcacattggtcaagacatttacatgaacgcaaatggtaggtatcatttaagaacacactaggatccttatagaaacttcctgaagagcactgctcagaaggctgcatacaatacacttagagatagatctaggcccatagctggacttactgaacggaacccatgagaagaaaagtgataggatgtacgaaaggctgtgccagcgcgccaggagaaccaacatgacctgtcgaagaactagctccatatactggagaggcaaaaaaagcaaaaagagctgtatcggaaacaaagctttcgctggcctgtactatgtcacca

SEQ ID NO: 184650 - DNA, 142 bp, Zea mays
  Clone ID: MRT4577_9998C.1
agctgattgtgacagaggcaaggccacattgctagcgacacacaagtaaccctttgtatacattcaacacaactaatgcattattcagcgggtcctggcctaactaggcaaaaaggagttttagtgtcaaaacaaaaactgg

SEQ ID NO: 184651 - DNA, 411 bp, Zea mays
  unsure (1)..(411): unsure at all n locations
  Clone ID: MRT4577_99990C.1
caggtgactcgtaagatagctttgtgatgctaagaaaatttacatctgactccccccccccccacnnnnnnngggnngacacaacaancaaaaaaataattaggatagaaaagaagggaaaaaagtgagatagactgaaggctgttgccaggggttgaagtatgcaatagctggttctgaggatattgaagtatgtgtgataatttgaaaaagggagaaatgcctttttttatcttattaaagtttgaacgatgaaaacaaggttggtaatttgtttaaaaaagaaactataggaccgactttgtgccaaaaaggatgatggtttaggtgggggcacgtggattctggaggagggaagggtgcggggctcataaaacaaggaaaggtttaaagaaagaggggaaaagaggg

SEQ ID NO: 184652 - DNA, 295 bp, Zea mays
  Clone ID: MRT4577_99991C.1
ggcttggccaaggctgccgacaagctgcttccccatcaccatcacaaccaccaccaccatcatcattacagtgacaataataacactaccattacagagcatgttgaggttgatgttgtccgccacgatgctaattcttcttcgcgccgcccagctcctgccaccgagtcgcagcctaacactgtgtccatcccctgccaccacatccgtctgggtgacttcttgatgctccagggccgaccatgccaggtcatccgcatctcgacctcgtctgccactggccagtaccgctacc

SEQ ID NO: 184653 - DNA, 241 bp, Zea mays
  unsure (1)..(241): unsure at all n locations
  Clone ID: MRT4577_99992C.1
tnttttntttnttttttagctgaatgcagtccgaaacatgtctttattggtctgaatgttacattgcacttacacatcattaattcatgccggtgttagagtacaacttcctgagggcacccatcccttggagtattttacaagacatggttcttcttgttttgtgatgttgaaccgttcattggacaaggattaagtccgtccgtcaaagcccttgagtgttgtacacacggagtgacca

SEQ ID NO: 184654 - DNA, 292 bp, Zea mays
  Clone ID: MRT4577_99993C.1
gattgaaccacacaccgaacaggtggagggagaaagatatcgtttttttaattaattgtaatagacaaccagagagacaattgccccacatacatatataaccaattagtgcaccgcttgctggggggtcagatgattgggtatgcgtatatatgccaaagaaaaattgtggagccatattacaaaaaaaaacccgaacaaggtttcattcccccacaaatggtcgggggggattacgaacttacaaacgcgggcaggccatattaccccttttctcccgggggacaataaa

SEQ ID NO: 184655 - DNA, 688 bp, Zea mays
  Clone ID: MRT4577_99995C.1
actcaacgatctcatcattctacactctactactcgaaatcactagctcgcgagcttgcttctacagccacttcatactgagccgaggatgcgcacaacagaagacctcgacgaagtcccttgtcctcctggcgccaaggaacgagctggccaccaaggcggcgcgcaagtctgccccggcgaccggcggagtgaagaagccccaccgtttccgccccggcaccgtcgcgctccgggagatccgcaagtaccagaagagcacggagctgctgatccgcaagctgccgttccagcgcctggtgcgtgagatcgcccaggacttcaagaccgacctccgcttccagagctccgccgtcgccgcgctgcaggaggcgtccgaggcctacctcgtcgggctcttcgaggacaccaacctctgcgccattcacgccaagcgcgtcaccatcatgcccaaggacatccagctcgcccgccgtatccgtggggagagggcctatgctgtcctctcggtgcatgtggaatgagaactctcagtgtctggcatcactgtctggctacaagatgtatacatgtggcggaatatggaggttgtcatattgatcgaatcattatgaattctgaatcttcactgctgtaattctactatgactatgcaagtggcaatgaatgtctcggttatcactccccg

SEQ ID NO: 184656 - DNA, 683 bp, Zea mays
  Clone ID: MRT4577_99996C.1
ccgggaaaaaaaaaaaaaaaaacaccgcaatcttcaatctccccagcaatccctagcagaagccttccatcctcactcgctcgatggcccgcacgaagcagacggcgaggaagtccaccggcggcaaggcgccgaggaagcagctggcgactaaggcggcccgcaagtctgcccctgcgaccggcggagttaagaagccccaccgcttccgccccggcaccgtcgcgctccgggagatccgcaagtaccagaagagcacggagctgctgatccgcaagctgccgttccagcgcctggtgcgggagatcgcgcaggacttcaagaccgacctacgcttccagagctccgctgtctccgcgctgcaggaggcggctgaggcctaccttgtcgggctcttcgaggacaccaacctctgcgccatccacgccaagcgcgtcaccatcatgcccaaggacatccagcttgcccgccgcatccgcggggagagggcctaagcgtcatattctctgtcatcagtgcccgatcagaagatgtagagatgtgctgggttctgtagtttgggttactgtcgaatcatcgagtagttggttgttcactgctgtaacttaattatcatgatgcatatgaaatggcaatgagctctgttatcacgaaaaaaaaaaaaaaaaaaggcccctagggcc

SEQ ID NO: 184657 - DNA, 727 bp, Zea mays
  Clone ID: MRT4577_99997C.1
gaggctcggccgggcaagcgggaaagagtctgaaaccacacagcaatcttcaatctcccgagcaaagcaaagctctagccttccatcctcactcgctcgatggcccgcaccaagcagacggctaggaagtccaccggcggcaaggccccgaggaagcagctggcgactaaagcggcccgcaagtctgcccctgcgaccggcggagtgaagaagccccaccgcttccgccccggcaccgtcgcgctccgggagatccgcaagtaccagaagagcacggagctgctgatccgcaagctgccgttccagcgcctggtgcgggagatcgcgcaggacttcaagaccgacctacgcttccagagctccgctgtctccgcgctgcaggaggcggctgaggcctaccttgtcgggctcttcgaggacaccaacctctgcgccatccacgccaagcgcgtcaccatcatgcccaaggacatccagcttgcccgccgcatccgtggggagagggcctaagcatcatatattctgtcatcagtgcccgatcagaagatgtagagatgtgctgggttctgtagtttgggttactgtcgaatcatcgagtagttggttgttcactgctgtaacttagtatcatgatgcatatgaaatggcaatgaactatgttatcagttctgcaaaaaaataaaaaaaaaggcggcccttcgggcctctgccttttggttcccctttt

SEQ ID NO: 184658 - DNA, 552 bp, Zea mays
  Clone ID: MRT4577_99998C.1
aaatccccccaaggaggggctcgcgtctaattaaatagttggtgaggcaatagcttaccaaggcgatgatcagtaactggtccgaaaggatgatcaccccccctgggacttaaacccggcccagactcctacgggaggcagcagtggggaattttccccaatgggcgaaagcctgacggaacaattccgcgtggaggtggaaggcctacgggtcgtcaactttttttttcggagaaaaaactgcgccggttcggcacgagtaagcagcggctttctctgtgccaccagccccggggagacagaggatgcaagcgttatccggaatgattgggcgtaaagcgtctgtaggtggcttttcaagtcccccgtcaaatcccagggctcaaccctggacaggcggtggaaactaccaagctggagtacggggggggcgcaggggacgtccgctggggcggggtttggccctgtgatcggaaagaacaccaacggcgaaagcactctgctgggccgacactgacactgagagacgaaagctaggggagcaaatgggat

SEQ ID NO: 184659 - DNA, 752 bp, Zea mays
  Clone ID: MRT4577_99999C.1
ctcgaggccggccggggtttggatggatggatgaagaaggacaccgcaatcttcaatctccccagcaatccctagcagaagccttccatcctcactcgctcgatggcccgcacgaagcagacggcgaggaagtccaccggcggcaaggcgccgaggaagcagttggcgactaaggcggcccgcaagtctgcccctgcgaccggcggagttaagaagccccaccgcttccgccccggtaccgtcgcgctccgggagatccgcaagtaccagaagagcacagagctgctgatccgcaagctgccgttccagcgcctggtgcgggagatcgcgcaggacttcaagaccgacctacgcttccagagctccgctgtctccgcgctgcaggaggcggctgaggcctaccttgtcggtctcttcgaggacaccaacctctgcgccatccacgccaagcgcgtcaccatcatgcccaaggacatccagcttgcccgccgcatccgtggggagagggcctaagcatcgtatattctgtcatcagtgcccgatcagaagatgtagagatgtgctgggttctgtagtttgggttactgtcgaatcatcgagtagttggttgttcactgctgtaacttattatcatgatgcatatgaaagtggcaatgaactatgttatcaggaaaaaaaaaaaaaaaaaaaaaaaaaaaaataaaaaaaaaaaaaaaaaaaaaaaaaagaaaaaaaaaaaaaaaaaagcggcc

SEQ ID NO: 184660 - DNA, 151 bp, Zea mays
  Clone ID: MRT4577_9999C.1
caagaacagaaatggccaccgaagccgaagtccgtgagtcactcggcacgaagttcggtccgctcaaggaacaggcgaaagacatggcctccaggcaacccgtcgctggagcagcggccgtcatcggtgtcagcgccgtgggcgactactt

SEQ ID NO: 184661 - DNA, 246 bp, Zea mays
  Clone ID: MRT4577_999C.1
attcccgctgcagggactcctaccaggtctgggtctgctggctcttcgacctgatgagctgcctgtacaaggagggggacagcatgatggtcagcctcatggcggtggtggcgtcgtacgtctactcctgggtatcatagccaccagattcatcaagccatcagcatcgtatagctgcacaaggcgtccctcgagcttatgactctgccgattcggtccctgcagtatgatccacttgtcttactc

SEQ ID NO: 184662 - DNA, 347 bp, Zea mays
  Clone ID: MRT4577_99C.1
aagaaagcacacacagtataacaagaatgaaaagacttgattaagcagcatggcccaacggcatttacagaaggtagaaattgtcataaggagggagataaggcagaaagggctgacggccatatttacaatgcatagtacttgatttgttcgatgacctaaatagaggaattgtcatgacaatggctcgacatagttatgcgagtgtcaaagccttgtcttacaaagttgcacaaaataaacctggtgcacgcccaaaagtgtgcagagttgacgatctttagacccgatggccagaccattgctgtgacgcagcagagctgagaagctctcttcagcaagcagaa

SEQ ID NO: 184663 - DNA, 412 bp, Zea mays
  Clone ID: MRT4577_9C.1
ggggcccaactaccacccccgggccatgtttatcggggggggggggggcccagggccaaggcagttccgcccaccacccagggggtcgttttcggaaaaaggcaggggcacaaaccccaacaaaaagggcccaatctggaaaaggggctttatttaagctggccggggaaacccagctagaagggccccccccttttccttttgggggaaaaatcaaaaaccgggaactttgcggcaacagaaaacaacgaaattaaacccttaaaaaaaatactttaaccccctaaagggggaaatttagaccccccttaaggaaaaatgggggtggagggccccttagcccaaaaacccaagcctttaaccttttgggatttctcaacaacggggaaaaattttaatataacaggttttt

SEQ ID NO: 184664 - protein, 137 aa, Zea mays
  unsure (1)..(137): unsure at all Xaa locations
  Clone ID: MRT4577_100000C.1.pep
MARTKQTARKSTRRASAPRKQLATKAARKSAPATGGVKKPHRFRPGTXALREIRKYQKSTELLIRKLPFQRLVREIAQDFKTDLRFQSSAVSALQEAAEAYLVGLFEDTNLCAIHAKRVTIMPKDIQLARRIRGERA

SEQ ID NO: 184665 - protein, 86 aa, Zea mays
  unsure (1)..(86): unsure at all Xaa locations
  Clone ID: MRT4577_100001C.1.pep
MEIEEASRESGHVACGSWIRRPKKVNWVLIAKASKRXGSSVYCAALLNIFCFDPITASLSSYPLATHTLKDSDGDPVAASXHPGGD

SEQ ID NO: 184666 - protein, 70 aa, Zea mays
  Clone ID: MRT4577_100002C.1.pep
VVHMTLQLELPLEQSALCYSLVRLTLSTVVLDSSSISTCLTASSTTGAATKFSACGFGSSDPTICPVADC

SEQ ID NO: 184667 - protein, 47 aa, Zea mays
  unsure (1)..(47): unsure at all Xaa locations
  Clone ID: MRT4577_100003C.1.pep
AVVAGVQVFHPSXNVSHSSFQMIGTVSGPGGRAXSRFRTSSEXTGDR

SEQ ID NO: 184668 - protein, 80 aa, Zea mays
  unsure (1)..(80): unsure at all Xaa locations
  Clone ID: MRT4577_100004C.1.pep
PSRGCLVAAXXAGSVPSPSSSCXAWXCXCVXALLRLGSXXVXFXXFLLLFXARXAWLXWLGCRXALCLLCXVSPLLCWLL

SEQ ID NO: 184669 - protein, 59 aa, Zea mays
  Clone ID: MRT4577_100005C.1.pep
TKKPHPTLFCEYTNCPTSILNSFPSYVLWWHQHPIPCLHKNGPGGFPSGRLPLPQKKTQ

SEQ ID NO: 184670 - protein, 52 aa, Zea mays
  Clone ID: MRT4577_100007C.1.pep
MSDSCAISCYENPTTSVGMQSNVSNAQISPDAWVDREQRRAPWYIVPNAWVA

SEQ ID NO: 184671 - protein, 150 aa, Zea mays
  unsure (1)..(150): unsure at all Xaa locations
  Clone ID: MRT4577_100008C.1.pep
ADHHIHYFDLRNPSAPVHXFGGHKKAVSYVKFLSNNELASASTDSTLRLWDVKDNLPVRTFRGHKNEKNFVGLSVNNEYIACGSETNEVFVYHKAISKPAASHRFVSSDLDDADDDPGSYFISAVCWKSDSPTMLAANSQGTIKVHVLAP

SEQ ID NO: 184672 - protein, 47 aa, Zea mays
  Clone ID: MRT4577_100009C.1.pep
SCYSGYNLARPHRKPAQLSYPQVLLQSAQRFSPLFQLLVRYQQMVTA

SEQ ID NO: 184673 - protein, 65 aa, Zea mays
  Clone ID: MRT4577_10000C.1.pep
GTQGTHNSHTACHIPQHRIPDSMDSCCCPKSPKKKAFFRTIQTESNTHTHNKRGVNKIQQDAILN

SEQ ID NO: 184674 - protein, 71 aa, Zea mays
  Clone ID: MRT4577_100010C.1.pep
GATTVRRLGMGGGRLGLGCAISFLGRAPRSGTDTNLRQMRGLGGGRNPARFGEDGGGSCAATAVMLLVWYR

SEQ ID NO: 184675 - protein, 88 aa, Zea mays
  Clone ID: MRT4577_100011C.1.pep
YANTKKERGLGSNLSHHTGRYPPPLHDPYKCRVCATIHSRRWTPTSSTTPDETSLLAEDTMPLLISNEDLNKLLILVERTDTGQLFYC

SEQ ID NO: 184676 - protein, 124 aa, Zea mays
  Clone ID: MRT4577_100012C.1.pep
ARARIATDYLKGRVVETSYAELSDNQDSWRKIKLSIEDIQGRACMTNFHAMDMTRDRLCQFIRKWQTLIDANCEAKTNDGYVLRVFVTAFTGRQQNQARKTSYAQHQQIKLIRKKIVDIITAEA

SEQ ID NO: 184677 - protein, 180 aa, Zea mays
  unsure (1)..(180): unsure at all Xaa locations
  Clone ID: MRT4577_100013C.1.pep
MRASSVRYVITAIKKADRNDGAEPWFLSSTDFTDKAENVPAASAFAEGRATMRKTWKKAKPATTSGSPWYGPDRALYLRPLSGEPPSYLTCEITGDYRWNTVXCRQDPQTFDKKRQLEVIHSRWDMLGALDCVFPELLGRDXVKFAXRVXFKVASQIFREGVLNYLVNPSLIHAHSILAI

SEQ ID NO: 184678 - protein, 51 aa, Zea mays
  Clone ID: MRT4577_100014C.1.pep
SLTKRALAHHGNTCMHISYGKPFAMFVRNVVCIMYSVILWISFTHCDYSLY

SEQ ID NO: 184679 - protein, 65 aa, Zea mays
  Clone ID: MRT4577_100015C.1.pep
FSQGSRGKKVSWSRYSSSAAFAESCRDVLSPSSASDGAGTELVHAPVSRSWVNMDLTNDWGSPEG

SEQ ID NO: 184680 - protein, 126 aa, Zea mays
  Clone ID: MRT4577_100016C.1.pep
PSDLHQPAVTGRMEVEQQHHHIKSIILFMLVHQCQQHSQPKNEELQSLHCCLMVQKSSPWTAVDVGQTKCRVQPWTGSQAGGWAEPLVVERAEPLAAGSPEALVQRSSWIDASTRFASRVWDLGAI

SEQ ID NO: 184681 - protein, 70 aa, Zea mays
  Clone ID: MRT4577_100017C.1.pep
ARGGGKNPPAGGPFKGGWPRPLSCFYAIGPEENQRGWGAPVKIKGGPPAIVMFKSNRRLQGGDFMGSLFV

SEQ ID NO: 184682 - protein, 48 aa, Zea mays
  Clone ID: MRT4577_100018C.1.pep
LLSHTNYSKSEPLRATFLLCIVASGILQRICFLNAPSIKWIMPDITSL

SEQ ID NO: 184683 - protein, 164 aa, Zea mays
  Clone ID: MRT4577_100019C.1.pep
MSEVFEGYERQYCEASASLSRKCTAASALDGEKKKQKLSEIQSGVEEAESLIRKMDLEARSLQPSIKAGLLAKLREYKSDLNNVKSELKRISAPNARQATREELLESGMADTLALHGVDDNIGKSKKILAAMSKRMDRNKWIIGGIITALVLAILLILHFKLAN

SEQ ID NO: 184684 - protein, 65 aa, Zea mays
  unsure (1)..(65): unsure at all Xaa locations
  Clone ID: MRT4577_10001C.1.pep
GLAAFKYLGMNKTVFEGDKWRQFVFFVRAMAEGGGRPAIPRWDTGPLDLXVGFLDPPKKNKAPEA

SEQ ID NO: 184685 - protein, 195 aa, Zea mays
  unsure (1)..(195): unsure at all Xaa locations
  Clone ID: MRT4577_100020C.1.pep
MSEVFEIYERQYCTAASALDGEKKKQKLSEIQSGVEEAESLIRKMDLEARNLQPIKALLAKLEYKSDLNNKDLISPARHAYPPGPPGPXPXXLPPPPSPXPPHPPXPPXXPPPPPSPXXXPXPPPPPPPPPPPPPPXPPPPPPPXXPPPPPXPPPXXXAXPPPPPXPPLPPPXPPPPPLRPAXSVPPPPPYPPPL

SEQ ID NO: 184686 - protein, 188 aa, Zea mays
  unsure (1)..(188): unsure at all Xaa locations
  Clone ID: MRT4577_100021C.1.pep
PYSDPXADGPVIQASATRALAKGTTFEDVISMVKGVIPDLSCPVALFTYYNPILKRGVPNFMSIVKEAGVHGXLLTTPTTPNERMEKIAQASEGFIYLVSTVGVTGTRANVSGKVQSLLQDIKKVTEKPVAVGFGVSTPEHVRQIAGWGADGVIIGSAVMKTLEEAASPEEGLKKLEEFAKNLKAALP

SEQ ID NO: 184687 - protein, 221 aa, Zea mays
  Clone ID: MRT4577_100022C.1.pep
MSEVFEGYERQYCEASASLSRKCTAASALDGEKKKQKLSEIQSGVEEAESLIRKMDLEARSLQPSIKAGLLAKLREYKSDLNNVKSELKRISAPNARQATREELLESGMADTLAVSTDQRGRLMMTTERLNQSTDRIKESRRTMLETEELGVSILQDLHQQRQSLLHAHTTLHGVDDNIGKSKKILAAMSKRMDRNKWIIGGIITALVLAILLILYFKLAN

SEQ ID NO: 184688 - protein, 276 aa, Zea mays
  Clone ID: MRT4577_100023C.1.pep
SSRAAAAVAEDKRSISGTFAELRQQGKTALIPFITAGDPDLATTAKALRILDACGSDVIELGVPYSDPLADGPVIQASATRALAKGTTFEDVISMVKGVIPDLSCPVALFTYYNPILKRGVPNFMSIVKEAGVHGLVVPDVPLEETDVLRSEAAKNNLELVLLTTPTTPNERMEKIAQASEGFIYLVSTVGVTGTRANVSGKVQSLLQDIKKVTEKPVAVGFGVSTPEHVRQIAGWGADGVIIGSAVMKTLEEAASPEEGLKKLEEFAKNLKAALP

SEQ ID NO: 184689 - protein, 221 aa, Zea mays
  Clone ID: MRT4577_100024C.1.pep
MSEVFEGYERQYCEASASLSRKCTAASALDGERKKQKLSEIQSGVEEAESLIRKMDLEARSLQPSIKAGLLAKLREYKSDLNNVKSELKRISAPNARQATREELLESGMADTLAVSTDQRGRLMMTTERLNQSTDRIKESRRTMLETEELGVSILQDLHQQRQSLLHAHTTLHGVDDNIGKSKKILAAMSKRMDRNKWIIGGIITALALAILFILYFKLAH

SEQ ID NO: 184690 - protein, 97 aa, Zea mays
  Clone ID: MRT4577_100025C.1.pep
MLPISGSVSASASATGGAKARMITSCSGCRVLRKGCTDACTIRPCLQWMENPEAQANATFFLAKFYGRAGLLNLIAAAPDDADSRASVFRSLLYEAC

SEQ ID NO: 184691 - protein, 221 aa, Zea mays; identical to SEQ ID NO: 184689
  Clone ID: MRT4577_100026C.1.pep

SEQ ID NO: 184692 - protein, 123 aa, Zea mays
  Clone ID: MRT4577_100027C.1.pep
PEGVFGGGQGGSGGFPPPASLFFLGKGAPPSGRRRGFFPRPRLPPAPGLKKQFWGNPPLGEGGQIAPPRELPFSPPVEGENFLFARLNFLGLRPLGPPICEKKGSRLWGKANVPLAITPKVSF

SEQ ID NO: 184693 - protein, 46 aa, Zea mays
  Clone ID: MRT4577_100028C.1.pep
FHYVSLLYHWSTALLLFPPEAGSDPAEVVFLSLRLTAFLPSVQPFF

SEQ ID NO: 184694 - protein, 133 aa, Zea mays
  Clone ID: MRT4577_100029C.1.pep
CFFFFFLFFFLGFFFFFLFFFFPGKIDSLGVIFFHALLNSNLGFWEQQSLFFFFSPTTHNTIGRGPAFPPCGAPPPPTRGRCPLYLGFPPFKKNPNVYRVGPQFLLTPNIKKTPGPGFYSYFFTGPSWAPFSL

SEQ ID NO: 184695 - protein, 103 aa, Zea mays
  Clone ID: MRT4577_10002C.1.pep
GLFFFFFFFFCFFFRFFFFFFFFGASTRGWVFRREAPPRGPLAFGPAVAVQTKDGASDPSIFQPGGGGTAHRARGPGTRQRGSCELEQRLTSQSIIGKLNSTR

SEQ ID NO: 184696 - protein, 69 aa, Zea mays
  Clone ID: MRT4577_100030C.1.pep
RNMTSALTILAPLTLAPPFYIITQKQHEYSGTHPRLFSRVPPFYIYESLALAMRGNHLMLSFSILWNIL

SEQ ID NO: 184697 - protein, 56 aa, Zea mays
  Clone ID: MRT4577_100031C.1.pep
LLTATSSVDSCRWNVSTHSIWYALGLTICQWIPLRQRFCFCMGLCLWFGFRLGFCH

SEQ ID NO: 184698 - protein, 81 aa, Zea mays
  Clone ID: MRT4577_100032C.1.pep
SHSANFANGCLSPMWSTVSSQQHWHACLTPRFQTDRYTSRCHHVSDASTKLDRREQLEPPPTQDQYAFIVDLRLQATPVSS

SEQ ID NO: 184699 - protein, 317 aa, Zea mays
  unsure (1)..(317): unsure at all Xaa locations
  Clone ID: MRT4577_100033C.1.pep
APLGLQVSVEQRTPVSVPQIGFVKVVKNKAYFKRYQVKFRRRREGKTDYYARKRLVIQDKNKYNTPKYRMIVRVTNRDIICQIAYARIEGDMIVCAAYAHELPKYGVKVGLTNYAAAYCTGLLLARRLLNRFGMDKIYEGQVEVTGDEYNVESIDGQPGAFTCYLDAGLARTTTGNKVFXGALKGAVDGGLSIPHSTKRFPGYDSESKEFNAEVHRKHIMGQNVADYMRYLMEEDEDAYKKQFSQYIKNSVTPDMMEEMYKKAHAAIRENPVYEKKPKKEVKKKRWNRPKMSLAQKKDRVAQKKASFLRAQERAAES

SEQ ID NO: 184700 - protein, 800 aa, Zea mays
  unsure (1)..(800): unsure at all Xaa locations
  Clone ID: MRT4577_100034C.1.pep
FGTRRIGRGIFLSEYHDETEEPLQPYEPPKVFQWRSEFGSELLKLRLEGYQWSTPFSINANGVMCVLMNSTTGNDQAFVRVNVRSGTKSSRHEVVFQLDCWSSPYRVENRSMFLPIRFRQFGGDDHSWRNLLPNSSASFFLEDLSRRHLLEVLVDGTDPMNSMTYDINVVMDHQPLTNSDALKKALRVTVLKEGKLNVIQIIDWLPDNRNRGQITERMXITNLSAIRGRXGQSSPDLDSEFHVTLELTELGISVIDHMPEEVLYLSVQQLLLAYSSGIGSGVNRLKMRMHWIQVDNQLPFVPMPVLFCPQKIENQSDYIFKFSMTVQTNNSLDFCVYPYVGVQVPENCVFFVNIHEPIIWRLHEMIQHLKFDRIYSNQPSAVSVDPILKIGLLNISEIRFRVSMAMSPSQRPRGVFGFWSSLMTALGNMEHMPVRIAQRYREELCMRQSALMNSAISNIQKDLLSQPLQLLSGVDILGNASSALSNMSKGIAALSMDKKFIQGRMRQDSKGVEDFGDVIRDGGGALAKGIFRGVTGILTKPIEGAKSSGVEGFVQGVGKGIIGAAAQPVSGVLDLLSKTTEGANAVKMKISSAIMAEEQLLRRRLPRAIGGNSLLYPYDGHKATGQAILHLAECATFLGQIDIFKIRGKFASTDAYEDHFLLPKGKIFLITHRRVLLLQLPMMTQRKFNPTKDPCSVIWDVLWDDLVTVEMTHGKKDPPDSWPSKLILYLKAKPSNSKEIVRLVKCNRGSDQASIIYSAIDKAYKAYGPNSLKEFLRWKVPRPYAPRNSSGRSIQDLSFG

SEQ ID NO: 184701 - protein, 61 aa, Zea mays
  Clone ID: MRT4577_100035C.1.pep
LCPFIIFMDPKSFFLLPKIIFKKPGGHLKPPIREGPPLLFYSGTSKGGGIPWGKPLKTLVG

SEQ ID NO: 184702 - protein, 432 aa, Zea mays
  Clone ID: MRT4577_100036C.1.pep
MDGGPQLNSRNSWSWHHPACSSSSSAGLQPTRSMASVGIWDTLKHEEPSLFLTASAAAARTLTRARSPGIILARHDAGAGDLGDQRPLLPYTLRHSNLPLHSPLKDTRKPRLRTHQRGVGNNLVSELFSFWSELFHLAGVKLLLSSAFHPQTDGQSEVVNRIIVMYLRCLAGDRPKTWLQWLPWAEFCYNTSYQTVVKCTPFRIVYGRDPPTMLSYTPGTARVAAVDQQLQDRDVFLADIKQRLIQAQVTMKQAQDSGRRDVQYAVGDWVWLRLHQRSAVGVTPAATSKLGPRFYGPYQILQRIGEVAYKLQLPTNARIHDVFHVALLKKFQGEPPSALVPLPTILHGKVLPVPAQVVKARLNRGVWELLVQWLGREPADATWEQCNEFKRRYPEIQLEDGLFVGEEGNVIDAFVGRQFTRRRNRKEEISQE

SEQ ID NO: 184703 - protein, 67 aa, Zea mays
  unsure (1)..(67): unsure at all Xaa locations
  Clone ID: MRT4577_100037C.1.pep
FELAWHYIFLRIENHLYRYLELSGSALTWHAMIMIVKIKKRQTFVGLXGNXHKTSGIKDIDAVCFLI

SEQ ID NO: 184704 - protein, 95 aa, Zea mays
  unsure (1)..(95): unsure at all Xaa locations
  Clone ID: MRT4577_100038C.1.pep
PTRPSRRGSWVLSPKRTLPPHPPTSXPRSLLAPPXSTSTYTPTTTPSSPSLPLPSPAPTSPSPTPTXPVPPXTTPSTQPAARSAASPPAPRSTTP

SEQ ID NO: 184705 - protein, 121 aa, Zea mays
  Clone ID: MRT4577_100039C.1.pep
MSTSFNFGSSFRCCSSCKFSSIHFLSVLFSKKYPDLYETSTASHSTFILFVSPDNIFPPLFFLFLFIIFFIFLFYFYFFFLFSTLLTSFLIYLLFYIFLLFFIFFYLFFFFLYLYNFNYFF

SEQ ID NO: 184706 - protein, 207 aa, Zea mays
  Clone ID: MRT4577_10003C.1.pep
MHEQYQPVEEPWLFQSILELNETIVLADGKVEARDIIRKLRKIEKPLTPLDESKPTGGEPSSRVILMNSSVCTMQRIAVLEDGKLVELLLEPIKNNVQCDSIYLGVVTKLVPHMGGAFVDIGISRPSLMSIKQNRDPFVYPQVFKNRGTDHVGDYCNEENLAYENDDDMSDDEFADEEAHDGSSFSVENVTDNNVDDDEVDSISGYD

SEQ ID NO: 184707 - protein, 60 aa, Zea mays
  Clone ID: MRT4577_100040C.1.pep
ATPAPTEADERLETAYLLSWRNKTRWKAAADSIGTNASNDEFLAATASEHLNEPYSYPRL

SEQ ID NO: 184708 - protein, 124 aa, Zea mays
  Clone ID: MRT4577_100041C.1.pep
FKSLQGCGVQSFSTSPNVQIIPPPPVSYDALAFFFYLMGPSPFRFLLVKKVPFKVPVGRVNSPGPGFLAPFQSGEKIPRFKVMWFSHPLGCWGGVKKGGDFLVWKFPIPQGIPVVLLLYRTPDL

SEQ ID NO: 184709 - protein, 116 aa, Zea mays
  unsure (1)..(116): unsure at all Xaa locations
  Clone ID: MRT4577_100042C.1.pep
PAGLRSRRTYERTYTARTPNRNTVHCAREGRLINLHGLARHRISERRAHKGDHAYLHLRKESTVSWSGXRYILTPCASAEAFHDEDQTIYFDHDDICNSYGQREHYHCGACSPYHP

SEQ ID NO: 184710 - protein, 174 aa, Zea mays
  Clone ID: MRT4577_100043C.1.pep
LQCAAFLVETGRVDGQRLCVTGESAGGFTTLACLAFRQTFKAGSSLYGIADLASLRAGMHKFEAYYIDNLVGNKQAYFGRSPINFVENFSCPVILFQGLEDTVVSPDQATKIYKAIKDKGLPVALVEYEGEQHGFRKAENIKFTLEQEMVFLARLVGKFKVPDDITPIKIENFD

SEQ ID NO: 184711 - protein, 55 aa, Zea mays
  Clone ID: MRT4577_100044C.1.pep
LFDTVDLLHAPFLQTSLYQMLESPIDTHFCMHLGFNTRLLPSSYFILQQTCDIYH

SEQ ID NO: 184712 - protein, 74 aa, Zea mays
  Clone ID: MRT4577_100045C.1.pep
LYKCIYLSILYLVASDPKQLCLYFVQFIFLLSSSSFVNKNRQCYCSKGMTSFCLVFSEPCNNYMYLFTGINVFI

SEQ ID NO: 184713 - protein, 120 aa, Zea mays
  Clone ID: MRT4577_100046C.1.pep
IYCRVDLLLVGGRPDFGRGKLTTDTNTHVSTHAMATFACQAMEHASSAKLTDKRGAGLLWKHAPGANVPLGQDGAPHSPMRRGRMKQIFRAVAGDPWLDHLYEGPKTGQINMLISRAEFQ

SEQ ID NO: 184714 - protein, 90 aa, Zea mays
  unsure (1)..(90): unsure at all Xaa locations
  Clone ID: MRT4577_100047C.1.pep
LSNPSPCSILAAANPLPGLRNPPETSKKQMRRTRADGRGYRDRWRSDELSRTRVAARPVLRSLATTRXTXXRGGTGPXPTCERLMGDAAK

SEQ ID NO: 184715 - protein, 82 aa, Zea mays
  unsure (1)..(82): unsure at all Xaa locations
  Clone ID: MRT4577_100048C.1.pep
MGGNGAIGESDPLNWGAAAAELAGSHLDXXKRMVFSARQPVVKIEGSTLRVGQGAAVXSGKDASGVGRXLDKEARPXXXGGG

SEQ ID NO: 184716 - protein, 177 aa, Zea mays
  Clone ID: MRT4577_100049C.1.pep
MKTTKGGKVMNPTDAFRKEQRRKELKRNKKERKKVREVGILKKDPDAIKDQIEKLEKMKADGALDKARKHKKRQLEDTYNLVVKKRKEYEEKMKEKGEQPVMFSHLGPPKRRPAADEDDRAKNPMPEDSVYYHPTLNPSGAPPPGKPPMYKSSIGPRIPLPSSVGAGASSSMTESEE

SEQ ID NO: 184717 - protein, 184 aa, Zea mays
  Clone ID: MRT4577_10004C.1.pep
SLERICGAANFGSTRKHGKKNQKKTALSNLVKTLEECGLSKHRPMSHEWGDELAAPSPLFLEQSYDSAHLLQQINSQKMLEDVSINHSTLLNTDNWKHANQQYFKCLAMMQQLRQVSLKVNKDLGLEEVNKAMSFMSHLLTVLPEQRHLAYNLFDQRNQFKHAIFLLGSGGKRKSLSSSQNVLL

SEQ ID NO: 184718 - protein, 49 aa, Zea mays
  Clone ID: MRT4577_100050C.1.pep
KCEPKGKKVVGVGLRQKRGVPVIRNPLRFLGRGQKLCSKKSKTGFMCGP

SEQ ID NO: 184719 - protein, 55 aa, Zea mays
  unsure (1)..(55): unsure at all Xaa locations
  Clone ID: MRT4577_100051C.1.pep
MIEILHIQGGQCGNQIVAKYFXVVCDXHGIDTTGCFTGTLDLKLLRXINVHYNEA

SEQ ID NO: 184720 - protein, 56 aa, Zea mays
  Clone ID: MRT4577_100052C.1.pep
HVAHLSAPDVEVSHGEHVRKLDSEMRPVGSFRDSAADQPSAETVETCKQWSVVYAD

SEQ ID NO: 184721 - protein, 388 aa, Zea mays
  Clone ID: MRT4577_100053C.1.pep
MAHQDAGVGGKDHRELQAQHTTDTEELLAAHRELWSHALGYVKSMALKCALDLGIPDTIQRYGGGATVGELAAASNLPASSLPFLRRLMRTLTAMRIFAVHRDDDPSDDPADDAAAVVSYQLTATSRLLVNGGSYFSIRPNISALVHQGAVSPMFSMSEWMKQHHHHAPDMTLHEMVHGEPVWESFRANPAIRAWFYDAMDADARLVMHVVLSECPAVFHGLASLVDVGGGHGTAAAAIARAFPHIKCTVMDLPHVVAEAPAGTGLCFLAGVGACMLRFVLCIFLQWILHDWDDAKCIKIMERCKEAIGGKERGGKVIIIDTVIGSRPNEEDMIRREAQVLCDLGMMTTSNGAEREEHEWRRIFLAAGFRDYKITDTRGIPSIIEVYP

SEQ ID NO: 184722 - protein, 96 aa, Zea mays
  Clone ID: MRT4577_100054C.1.pep
RNRSNFESLFRYDKSVPEQDIGEPSGLNLEKKNVGDKPPCSSCEAKGALLCATCAGSGLYVDSILESQGIIVKVRCLGCGGTGNIMCSKCGGRGHT

SEQ ID NO: 184723 - protein, 150 aa, Zea mays
  Clone ID: MRT4577_100055C.1.pep
MEVSAGLRPPPVAAAASLLGCRSASVPPRVAASHSVRSVSRAVKIRAAAINGLQRNRSNLESLFCYDKSVPEQDIGEPSGLNLEKKNVGDKPPCSSCEAKGALLCATCAGSGLYVDSILESQGIIVKVRCLGCGGTGNIMCSKCGGRGHT

SEQ ID NO: 184724 - protein, 58 aa, Zea mays
  Clone ID: MRT4577_100056C.1.pep
QTSTQQLIMALGLALRTVMRRSGSNYSRVADAALRLYVSGSSAAYTAQKRQLDNWLIL

SEQ ID NO: 184725 - protein, 73 aa, Zea mays
  Clone ID: MRT4577_100057C.1.pep
LSTMPWPRQGRASVDLACRRWCDAAPATCGSGASESSDADGAPRAVTLTSEQAPLKKRNTVDFHRRMKQGRSM

SEQ ID NO: 184726 - protein, 73 aa, Zea mays
  Clone ID: MRT4577_100059C.1.pep
PPKAPKKGWWFISPKFIYGFPSPHLVFFYSTSLFKNQEWFAPTIHPDSPSSVRPDTSLAACSEGRGGPANPGP

SEQ ID NO: 184727 - protein, 73 aa, Zea mays
  Clone ID: MRT4577_10005C.1.pep
YSDLVTTYPGPKTTGVSALSKFKYVVALGACRVRLFLYRTGSGCQTLNAHYFAPLWPIPTAELRPDRVHIFMI

SEQ ID NO: 184728 - protein, 76 aa, Zea mays
  unsure (1)..(76): unsure at all Xaa locations
  Clone ID: MRT4577_100060C.1.pep
VSRMRWTEELYRLFVEAVXCLGGQXRXTPNRILQLMGAKGATISHIKSHLQMYRGSISCSSSTHHQSSLQKSYINR

SEQ ID NO: 184729 - protein, 103 aa, Zea mays
  Clone ID: MRT4577_100061C.1.pep
QCTPCKNLCLSFTGTDLLPVAVFITADHFRLRFCSFPVSSGACHFVAPILYDCVGYKASSPVSRWCYAPQNIVRCQVTPPLGFLLSNILPVDGITPYHCTKPP

SEQ ID NO: 184730 - protein, 133 aa, Zea mays
  Clone ID: MRT4577_100062C.1.pep
FIFLLFSCFLLLFPCRTKGLRINWYRPTGLMLLAQARFTTQAPGVVGQRLYAVLAGPTLSSYRWWHTGHFRWQLKAGKGLMILITRHTGTFSLTCSWEPPTPRPLVRRPYSAQEQSEMNCTVDGKKLKKMAAV

SEQ ID NO: 184731 - protein, 166 aa, Zea mays
  Clone ID: MRT4577_100063C.1.pep
MNSVPKPALGSETSWREDFAVGDKDAVVIVDHGSRRQESNLMLNDFVEMFRAKTSYSIVEAAHMELAEPTIKDAFGECVQQGASRVIVSPYFLSPGRHWKQDIPALAAEASKEHSNIPYIVTAPLGLHELMVDIMNDRIKYCLRHVAGDVDECTVCAGTGKCRLYS

SEQ ID NO: 184732 - protein, 160 aa, Zea mays
  unsure (1)..(160): unsure at all Xaa locations
  Clone ID: MRT4577_100064C.1.pep
MNSVPKPALGSETSWREDFAVGDKDAVVIVDHGSRRQESNLMLNDFVEMFRAKTSYSIVEAAHMELAEPTIKDAFGKCVQQGASRVIVSPYFLSPGRHWKQDIPALAAEASKEHSNIPYIVTAPLXLHELMVDIMNDRIKYCLRHVAGDVDECTVCAGTG

SEQ ID NO: 184733 - protein, 82 aa, Zea mays
  Clone ID: MRT4577_100065C.1.pep
MASPARPVAASVSGAFGLSPDPKRCSFDQALRHKERPVRSLLVAGDGGAPCCLVLVCANGCGVIVCVACNCGYGSSLAAFEA

SEQ ID NO: 184734 - protein, 126 aa, Zea mays
  Clone ID: MRT4577_100066C.1.pep
MLLVMGNPGRSRQLSALVASAAILLSLSALPICRPYTYEQDVFAINGLYTALGAPQLPNWTSNGGDPCNEGWQGVSCVASNITSIILSGANLGGQLGNTLGNFTSLITLDLSNNNIGGTIPDGLPL

SEQ ID NO: 184735 - protein, 212 aa, Zea mays
  Clone ID: MRT4577_100067C.1.pep
MHPVPVPSQPFTATPAKKLVSRSTAVRKAIHFVNLWTAGRSSGNLAMNSVPKPAPGSETSGREDFAVGDKDAVVIVDHGSRRQESNLMLNDFVEMFRAKTSYRIVEPAHMELAEPTIKDAFGKCVQQGASRVIISPYFLSPGRHWKQDIPALAAVASKEHSNIPYIVTAPLGLHELMVDIMNDRIKYCLRHVAGDVDECTVCAGTGKCRMYS

SEQ ID NO: 184736 - protein, 52 aa, Zea mays
  Clone ID: MRT4577_100068C.1.pep
RNVMPSTIGAVTGERRLFNYAWGPGFFAGDEHLPAAGVWEWRSLGLFHHQLR

SEQ ID NO: 184737 - protein, 776 aa, Zea mays
  unsure (1)..(776): unsure at all Xaa locations
  Clone ID: MRT4577_100069C.1.pep
MLLVMGNPGRSRQLSALVASAAILLSLSALPICRPYTYEQDVFAINGLYTALGAPQLPNWTSNGGDPCNEGWQGVSCVASNITSIILSGANLGGQLGNTLGNFTSLITLDLSNNNIGGTIPDGLPLTMQRFFLSANQLSGSLPSTLSSLTLLTSMSLNSNHLTGAIPDVFSALTGLANLDFSDNNLTGPLPPSMGNLTSLTSLHIQNNQISGTLNVLQDLPFQDLNVENNLFSGPVPVKLLNLPNFKKDGNPFNTSIAPSAQPPIAPTPLPSIPPSSGHVPSKEPAHSSSVPGGSTSGSGKHTTLKLVGYILIGVVLAVVLVLIAMYCLSKYKEKRSRDDIYMKNKIXGTSEAWRAXIKEPPLKLKNNAEKASNVVSDGREEHKLKVPTSETSNVVYDPSPRDGQNLDSSPTAVPLAVTMNKKEHVIDMEKADNFVEDQLHPPQPMALRTEKVTVNPSVRTRRGRVPSVEKVESTTTVKSFSIASLQQYTNSFSEENIIRDSRFGKVYLAKLPDGELLEILKIDSSNSKVPVDAFLELVVRISELRHPNILGLVGYCAEFEQRLLVYEYCSKMTLHDELRHVDDSSKPLSWNARLQVASEAAKALQHLHDGCQPPVVHQNFEPSVVLLNSTLVVHISECGLASLASKSVSQLSVHTLFHYEAPEVHESGSVSDRSDVYSFGVVMLELLTGRKPYDSSYPRAEQHLVRWATSQLYDIDAITKMVDPSIRGQCSDKALSRFADIISRCIQHEPEFRPPMSEVVQDLTRMVSNVSRASM

SEQ ID NO: 184738 - protein, 70 aa, Zea mays
  Clone ID: MRT4577_10006C.1.pep
RPTSTNYYRKFFYKLFYGQFTLAHVDELMDEALTIDYSCDSAMPFLQQRYLLEASETLLPTRTSLYDDYD

SEQ ID NO: 184739 - protein, 33 aa, Zea mays
  Clone ID: MRT4577_100070C.1.pep
PDTKGTGCYKTLLTNNTFFLLTPINLYYKVQYI

SEQ ID NO: 184740 - protein, 108 aa, Zea mays
  Clone ID: MRT4577_100071C.1.pep
MAVNVRTMWSSMRAQVAMVVALVFLVSGAWCVPDKGPPGKNIRATYGMDCLVATATWFGKVTDAGHDHNGGGFGCADVNKADWTSTGTCRVHGHSKDALCRDSCFEMI

SEQ ID NO: 184741 - protein, 105 aa, Zea mays
  unsure (1)..(105): unsure at all Xaa locations
  Clone ID: MRT4577_100072C.1.pep
MRTLSPADRLLLHCAQLRCLLRGERIPSQKSDPSKWTFITQEEHPHLSKPWLALHPCATSGWMKLLLEETEATDKDHXVQYLPAWLSVVGQAVGLKIPLELHSNS

SEQ ID NO: 184742 - protein, 36 aa, Zea mays
  Clone ID: MRT4577_100073C.1.pep
TAAELSSFPFFAIDSSTKIAGGSEARKSTPAFSVLK

SEQ ID NO: 184743 - protein, 88 aa, Zea mays
  Clone ID: MRT4577_100074C.1.pep
AVVTTQSTFFFFFFFFFLDFLRTKCFEKVLILHVVSSFFPHRFLNGIPKKSHLLFSKLIYDLSFPKGYICMFKLNNNTRIRNPTVSVD

SEQ ID NO: 184744 - protein, 44 aa, Zea mays
  Clone ID: MRT4577_100075C.1.pep
PPARPPTSRFPPCQSVMRDSGGSGIPLLLLLHDCSSCKGLGGIG

SEQ ID NO: 184745 - protein, 56 aa, Zea mays
  Clone ID: MRT4577_100076C.1.pep
TEFGIATVHISISVINAYIWMGIPVGSQSLQYRLSSISQSQFCHFHLWEIMKSDSD

SEQ ID NO: 184746 - protein, 157 aa, Zea mays
  unsure (1)..(157): unsure at all Xaa locations
  Clone ID: MRT4577_100077C.1.pep
RLQNAFPXLLPXXLRARPPASHPXPTHHHXREXAFAIHNXGQARYSRYXKRVXGXAVXCLEHXQFRLTVQMPGXQXTHWGRVHDXXFNTXSSVRXLVLGKARCXPCCXFVDXXEPXXSSMKGEETGYLSASFXSTLXAAHXSGKGXXCSQPNFXPVV

SEQ ID NO: 184747 - protein, 216 aa, Zea mays
  Clone ID: MRT4577_100078C.1.pep
MTSIYLTEPGTKVSYHNQQLQIKQKSRQVITRLAEIDLLVLFPGVQLTDVAIAVLMDQGIETIFLRRDGQFRGRLQGQFATNPLTRIAQYRVLDSTFGTALAQRLILGKVTNQRAILQRRHRDTGKKNNALAEAIDLIGAYRLSLRSGLGNSSRDQLMGIEGICAKHYYQVFQFCLPEGWSFTGRNRRPPKDPVNALLSWGYGVLLARVFSAIVQA

SEQ ID NO: 184748 - protein, 107 aa, Zea mays
  unsure (1)..(107): unsure at all Xaa locations
  Clone ID: MRT4577_100079C.1.pep
MIHIINTLRRGAGGDLVVTTIAKLFNNHFTKLNAHKHYMLDKLGESFASKPSSXPHKYRTCLSLILIIRNSLKYSLNYPWDIFILMQHHVLXDCKVTIHKTYPAEFT

SEQ ID NO: 184749 - protein, 103 aa, Zea mays
  Clone ID: MRT4577_10007C.1.pep
NFLTQNPKNRVPKRPENPQPFSKVGLAPQFSPLGAIMEILDLNRPNTHPKPFGSPLLKNKTPPGPGKTDPKNFFLKTPFYGTSPGRLNYPQVGGGAQKGWPHF

SEQ ID NO: 184750 - protein, 136 aa, Zea mays
  Clone ID: MRT4577_100080C.1.pep
KLVPPQVPVPEFPGWPPGPPLTPGGGPFFYPNRKFSLPKLAQVSPNFPRGRLPGFHPFFGAPPGPFYPPKVGPGLQKKPNFFFGPPPFFFGGVPGPLKLINKCFFGFPPLFFVFFFLFFIFFLITRGISPPPRPGL

SEQ ID NO: 184751 - protein, 229 aa, Zea mays
  unsure (1)..(229): unsure at all Xaa locations
  Clone ID: MRT4577_100081C.1.pep
GGQWTGYWQEIKLRTIIKSDKHCPSCFSIQSVICLNLPSFSGGLNPWGTPYVDDGLIEVVGFRDAWHGLILLAPNGHGTRLAQVEGTSLLCQHSAARHTVRLTRKGNXDLVMSVFWFQAHRIRFEFHKGAAEHTFMRIDGEPWKQPLPKEDDTVVVEISNLRQVAMLANDPCRSKSVNEPSSPSCHGHEDDDSNSLEDEDEDEWEDGRKKFGAAATFKIPDEVDIAHLS

SEQ ID NO: 184752 - protein, 316 aa, Zea mays
  unsure (1)..(316): unsure at all Xaa locations
  Clone ID: MRT4577_100082C.1.pep
MANQDIDSWHIIMRMXIPQEGPCDPIAPLDLPHSLHAFHRVSACDSLNLEGYHTFRGGFWNYFSLGMDAQVSYEFHSERKRNPEKFRHQLRNQGTYAKLGFKHSLNHLSSRNISQLAKVKIMKRPGSQWEELKIPRSIQSVICLNLPSFSGGLNPWGTPGTRKAQDRDLTAPYVDDGLIEVVGFRDAWHGLILLAPNGHGTRLAQAHRIRFEFHKGAAEHTFMRIDGEPWKQPLPKEDDTVVVEISNLRQVAMLASDPCRSKSVNEPSSPSCHGHEDDDSNSLEDEDEDEWEDGRKKFGAAATFKIPDEVDIAHLS

SEQ ID NO: 184753 - protein, 495 aa, Zea mays
  Clone ID: MRT4577_100083C.1.pep
MELHRNSTNGSCLSACGPLTDYYIPDYILKPAYEPVTVDNVPCCPVVVFINSRSGGQLGSSLIKTYRELLNEAQVFDLSEESPDKVLHRLYSNFERLKSSGDHVATQIQKSLRLIVAGGDGTASWLLGVVSDLKLSHPPPVATVPLGTGNNLPFSFGWGKKNPATDQAAVKSFLGQVKGAREMNIDSWHIIMRMRIPQEGPCDPIAPLDLPHSLHAFHRVSVCDSLNLEGYHTFRGGFWNYFSLGMDAQVSYEFHSERKRNPEKFRHQLRNQGTYAKLGFKHSLNHLSSRNISQLAKVKIMKRPGSQWEELKIPRSIQSVICLNLPSFSGGLNPWGTPGTRKAQDRDLTAPYVDDGLIEVVGFRDAWHGLILLAPNGHGTRLAQAHRIRFEFHKGAAEHTFMRIDGEPWKQPLPKEDDTVVVEISNLRQVAMLANDPCRSKSVNEPSSPSCHGHEDNDSNSLEDEDEDEWEDGRKKFGAAATFKIPDEVDIAHLS

SEQ ID NO: 184754 - protein, 499 aa, Zea mays
  Clone ID: MRT4577_100084C.1.pep
MELHRNSTNGSCLSACGPLTDYYIPDYILKPAYEPVTVDNVPCCPVVVFINSRSGGQLGSSLIKTYRELLNEAQVFDLSEESPDKVLHRLYSNFERLKSSGDHVATQIQKSLRLIVAGGDGTASWLLGVVSDLKLSHPPPVATVPLGTGNNLPFSFGWGKKNPATDQAAVKSFLDQVKGATHASGEMNIDSWHIIMRMRIPQEGPCDPIAPLDLPHSLHAFHRVSACDSLNLEGYHTFRGGFWNYFSLGMDAQVSYEFHSERKRNPEKFRHQLRNQGTYAKLGFKHSLNHLSSRNISQLAKVKIMKRPGSQWEELKIPRSIQSVICLNLPSFSGGLNPWGTPGTRKAQDRDLTAPYVDDGLIEVVGFRDAWYGLILLSPIGHGTRLAQAHRIRFEFHKGAAEHTFMRIDGEPWKQPLPKEDDTVVVEISNLRQVAMLASDPCRSKSVNEPSSPSCHGHEDDDSNSLEDEDEDEWEDGRKKFGAAATFKIPDEVDIAHLS

SEQ ID NO: 184755 - protein, 97 aa, Zea mays
  Clone ID: MRT4577_100085C.1.pep
KRRSSRRRKNGGWSPAWRGPESTPSPGGCKMVYRPGETKCFKQFILLPVAGCFLDEKKFRPEVSPSPLPQSLSPSLADKTTQQLRPSSVFKFQWELP

SEQ ID NO: 184756 - protein, 40 aa, Zea mays
  Clone ID: MRT4577_100086C.1.pep
RVHGFHHTVILDPKYSDGSQRSYPKPAVYQVCALAHIDFR

SEQ ID NO: 184757 - protein, 51 aa, Zea mays
  Clone ID: MRT4577_100087C.1.pep
HPLHVYQLTTIHVDLTGKPKSRNGIAASNFKNLKKQRFKPSALSTRADFLY

SEQ ID NO: 184758 - protein, 43 aa, Zea mays
  unsure (1)..(43): unsure at all Xaa locations
  Clone ID: MRT4577_100088C.1.pep
LFAXPXQPRGLINPSGSTTMFKENLHIHILAISTTYTHTIGTY

SEQ ID NO: 184759 - protein, 87 aa, Zea mays
  Clone ID: MRT4577_100089C.1.pep
VLQPQLSMTDPDASAVTRFGKVSTKDATLARWAEPGWTIPPRQGVSIQWDSRYLSQGDTPRAASMPPRNIRRGMTPYTASARGTSLI

SEQ ID NO: 184760 - protein, 37 aa, Zea mays
  Clone ID: MRT4577_10008C.1.pep
SFTCTLRTLSLATEENRHTHADVLTAHTDYDWSVFIT

SEQ ID NO: 184761 - protein, 102 aa, Zea mays
  unsure (1)..(102): unsure at all Xaa locations
  Clone ID: MRT4577_100090C.1.pep
GARARGLGCPCCRSARSRARRRPCRPSRPSAPASAPWSPRSSPAGCPLLRLPPAGASCLPRCRVRLSRRPPRVPGGXPPGGGSGGSLLNWPPLCVSAGGWSA

SEQ ID NO: 184762 - protein, 59 aa, Zea mays
  Clone ID: MRT4577_100091C.1.pep
SRGSRQPVQGFRSRVAKPPPPAISNQGGKANPLKGPKATRKGFNKQVLDICRRKKIRKK

SEQ ID NO: 184763 - protein, 81 aa, Zea mays
  unsure (1)..(81): unsure at all Xaa locations
  Clone ID: MRT4577_100092C.1.pep
SAASSYLLPGDIPPPSPTLRSDSPAPMPVLTAADDPPTSAIGFEGYDKLLEITFSDEPDFVDPHVSGLRAVSRXQNDSVLD

SEQ ID NO: 184764 - protein, 54 aa, Zea mays
  Clone ID: MRT4577_100093C.1.pep
SSGNNAEYFFFFFFFFFFYVTTVHLYYMHWDLHEYGLHNFCKILYCKVLVLCYD

SEQ ID NO: 184765 - protein, 58 aa, Zea mays
  Clone ID: MRT4577_100094C.1.pep
IESIRYLNSGDHLFHIDPSILKRFSLISIDPSYQTIVFLILIDPSYFNKILSYPNRSC

SEQ ID NO: 184766 - protein, 59 aa, Zea mays
  unsure (1)..(59): unsure at all Xaa locations
  Clone ID: MRT4577_100096C.1.pep
SDRSXRKXALQVVCVLNAAFGLLTALSPNYWAYAALRLLTGFSAGSVGVLXFVLATEPV

SEQ ID NO: 184767 - protein, 62 aa, Zea mays
  unsure (1)..(62): unsure at all Xaa locations
  Clone ID: MRT4577_100097C.1.pep
QTGHLCXPYIQGNQSYVFRKRKLRKITVQKKIQLAIRIFIIAGLCGNFKLSITGISVDRSIT

SEQ ID NO: 184768 - protein, 59 aa, Zea mays
  Clone ID: MRT4577_100098C.1.pep
LPETITVDERVRQHGFCKAAARCISWFSSFFVLFVWFFPCLGFFCRVIISLFIFFSHES

SEQ ID NO: 184769 - protein, 98 aa, Zea mays
  unsure (1)..(98): unsure at all Xaa locations
  Clone ID: MRT4577_100099C.1.pep
MMDGAMDVAAVAAAVLLCLHLPLHVPGQVQVQFYNTSYNNSXSMVHHVVPKALANDFGIDSGLIRLLIHHFFHKCCDTCWHVYLLNNSAENDAQPNNP

SEQ ID NO: 184770 - protein, 185 aa, Zea mays
  Clone ID: MRT4577_10009C.1.pep
LEAGRERFARDALNPRLSPTPPPCRHEGRLPLHRSPETGTAPPSQPAVERKGDETRRGSVGGRPRLPLRPPSVSRTRCPSSAGGKPLLPPRPPLTGAGEHRLSPALLSALRFRPPRLPGCVVDLETCTTTACDDYPNHRGSTLSPAPSTRQHLVSLYVFRGVTVLKIRKTPMVVSNPKEVLDSRV

SEQ ID NO: 184771 - protein, 79 aa, Zea mays
  Clone ID: MRT4577_1000C.1.pep
LRGLPMIVRLLVVHVDGGRVAAAGPIAAVAEVVIEIFVGLCLSRALPLVQVHDRLAFDVVVVRPDDDRQHGITGSKTLG

SEQ ID NO: 184772 - protein, 76 aa, Zea mays
  Clone ID: MRT4577_100100C.1.pep
VGTKHHRMVLRDILQGITNPAIRMLATNGSNERISALMYEDTRIVLDMLLDNVMLDSMTYTEHASRMTITGIDANY

SEQ ID NO: 184773 - protein, 429 aa, Zea mays
  unsure (1)..(429): unsure at all Xaa locations
  Clone ID: MRT4577_100101C.1.pep
MEGDGTNLDAAIESLLNVEKQMRLAGDVAGTRKAVIDIVELCYKAGAWKTLNDQIVLLSKRRGQLKQAITAMVQKAMEYIDLTPGIDTSIELIKTLSSVSAGKIYVEIERARLIKRLAKIKEEQGQIYEAADLMQEVAVETFGSMAKTEKIAFILEQVRLCLDRQDFVRAQILSRKISTRVFDADPSKEKKKPKEGDSIVQDAPADIPSLLELKRVYYELMIRYYSHNNDYLEICRCYKAIYDIPAIKEDPTKWIPILRKICWYLVLAPHDPMQSSLLNATLEDKNLSEIPNFRLLLKQLVTMEVIQWTSLWEFFKEEYEKEKDLGGALGAKASEDLRLRIIEHXGYFVFGLVILLYACPLNLISCSLQNILVVSKYYARVTLERLADLLCLTLQVCLFFHLCMILYFLCDANRGILCLNPLHDNHLNC

SEQ ID NO: 184774 - protein, 118 aa, Zea mays
  unsure (1)..(118): unsure at all Xaa locations
  Clone ID: MRT4577_100102C.1.pep
PVPRLAVLVVFLFVLSSWAGAWGSGSFRRSLLVPLVGGLFXSSSSAVFGVRGGCAXGGXXRGLGXPRLCPRXSXXAXAFXXVXCCXPPPRXQAXAFVGLCAVWXXXVXWXASVCPVGL

SEQ ID NO: 184775 - protein, 159 aa, Zea mays
  unsure (1)..(159): unsure at all Xaa locations
  Clone ID: MRT4577_100103C.1.pep
ERPPGQVQAFFFFVLTIRAQQLQQLVLPQINQVTLANLSPYSKQQQFFPFNQLYTLNPSGHLQERLLRSRPLATADCQRQKIVVFVTKRGGWPQTVSCRAXRLCFSQKLNKPASFLTQKQLVSFYQQFAGNPATLLQLQQMVRFVQLAXTDPAGXYQQH

SEQ ID NO: 184776 - protein, 443 aa, Zea mays
  Clone ID: MRT4577_100104C.1.pep
MEGDGTNLDAAIESLLNVEKQMRLAGDVAGTRKAVIDIVELCYKAGAWKTLNDQIVLLSKRRGQLKQAITAMVQKAMEYIDLTPGIDTSIELIKTLSSVSAGKIYVEIERARLIKRLAKIKEEQGQIYEAADLMQEVAVETFGSMAKTEKIAFILEQVRLCLDRQDFVRAQILSRKISTRVFDADPSKEKKKPKEGDSIVQDAPADIPSLLELKRVYYELMIRYYSHNNDYLEICRCYKAIYDIPAIKEDPTKWIPILRKICWYLVLAPHDPMQSSLLNATLEDKNLSEIPNFRLLLKQLVTMEVIQWTSLWEFFKEEYEKEKDLLGGALGAKASEDLRLRIIEHNILVVSKYYARVTLERLADLLCLTLQEAEKHLSDMVNSKSLVAKIDRPMGVVSFRTTQDSNGTLNSWATSLEKLLDLVEKSCHEIHKETMIHKTALKV

SEQ ID NO: 184777 - protein, 83 aa, Zea mays
  unsure (1)..(83): unsure at all Xaa locations
  Clone ID: MRT4577_100105C.1.pep
LTIKRMGKQKESEEFKTFEYERKEGIGSVKGKGYSCDINLVFFCISNRCCCCINISHHCRCRIRWFILIIYAHXGILTRNRPA

SEQ ID NO: 184778 - protein, 93 aa, Zea mays
  Clone ID: MRT4577_100106C.1.pep
PFLTRKTVHSLWRRQLRLPGLHAQLQLVQVAPFSGSWNRVLGPADPCGLSSSRRLTFQGFNHFNRALCQHKHAVRGHDARFHQQNLVWGLKVG

SEQ ID NO: 184779 - protein, 84 aa, Zea mays
  Clone ID: MRT4577_100107C.1.pep
DFWCTSASVDMKTSSYRILILQYVVSVFDIIDDINRSCDKLLISELPLYMQQIRPYGRMSSARVRIPLVTLPSRETANVQRYMT

SEQ ID NO: 184780 - protein, 67 aa, Zea mays
  Clone ID: MRT4577_100108C.1.pep
IIGWGVTTMGKQRISWTYYTIFQNHYFNKSFIYYTLVASTLFTSHKSILITLLFVFLMELFTFRNLT

SEQ ID NO: 184781 - protein, 70 aa, Zea mays
  Clone ID: MRT4577_100109C.1.pep
FFLYMFPFYLFLKPGAHEPQATVLIVKGPMQKSIKSQKQRSISRTQRLHLIVHRALGAHRAPRDLTISCE

SEQ ID NO: 184782 - protein, 87 aa, Zea mays
  Clone ID: MRT4577_10010C.1.pep
PPARPKKKHLSPPPLYSTCPRFLPREKFPWKKKKRPVSTFPKPSKPPCMFREPIPNLLGLKGFLAVKFWKGVFARKLKNQKKICLSP

SEQ ID NO: 184783 - protein, 97 aa, Zea mays
  Clone ID: MRT4577_100110C.1.pep
TLGFHRTKSIVPRIQWGLGNNITAKNRFETTNELKRCISYTGLVRLVCMAQGTKERAPKETLKGTPGCLLEATKARKGAMKQKKPFWRKPPRGLHIA

SEQ ID NO: 184784 - protein, 129 aa, Zea mays
  unsure (1)..(129): unsure at all Xaa locations
  Clone ID: MRT4577_100111C.1.pep
ARXSTLLLLQVRXGPSDGVFGRRAQGRGGAILLQGGHLAPLRSGLWWFLFLDDTPTQPDRGESTRLQVHPSLQKPTLPMNLGTCSPLSLSLKRCWWSPLSFFLPPTMDEAQGGEVKGGTIFVASGFCWY

SEQ ID NO: 184785 - protein, 81 aa, Zea mays
  Clone ID: MRT4577_100112C.1.pep
GRNLQAAHLSSASEWVKNYLRRPVFISHLPWFAHMLNGDHMIGIKPPRRNWNDENKMKFPNHVLIRKLLQRLEIKRMYVSN

SEQ ID NO: 184786 - protein, 367 aa, Zea mays
  unsure (1)..(367): unsure at all Xaa locations
  Clone ID: MRT4577_100113C.1.pep
MAQLPCPAAAAAANVAAGKEETTTWEDALDLDDSXHLLRSPSXSPTHSTPPPPSPSRTNPRTLSTTSPTASPAXCRRPGHDSSPXAPRPPLSSRRGDADFLLPPWLCALQFLGKDRAWERPGIRTIKDNKELIRAPLVAGVVTLCRPNGLGDLFLVLKDPTDSIGASVHKKVLLEENNGHDISIGCAVVFIKVAVFRPSDKLCYLNVTKGKVIKVFSKNCAAPAKQVISPNTAERSQGEDSASNTMTRILGREDMMPSNEMTVTDVSHEHSATPDSTNCTSTWDIYGRFSLGSNKEDKLLVGDPHNKHTSSCSTDGHPQQNLSIPNTIGCFSTPKENVNTSSGSHLKRKKVVSEWTDEQLSELFADY

SEQ ID NO: 184787 - protein, 73 aa, Zea mays
  Clone ID: MRT4577_100114C.1.pep
APPEAMSSLAEQGAGSHCRGAGDGGLAERAAHGEVPPSEHAAGWRWCGEGRDGDGQAEQRETMRDRQSRPASR

SEQ ID NO: 184788 - protein, 87 aa, Zea mays
  Clone ID: MRT4577_100115C.1.pep
LRGPWAPNEKKWTRYFVTFPTKTRGRGGEEEKFWQANNLGGPNTKNFPRANTGCTPECSRRSKKVAQDTPGEGPNGNRRGGHGPGGL

SEQ ID NO: 184789 - protein, 127 aa, Zea mays
  Clone ID: MRT4577_100116C.1.pep
MGRGRTEMKKIQNDVSRRATFGKRRRGLLKKAHELAVLCGVDLGLLVFDDDGAGKLFDYCAPNTSWSELIERYESITKHQFQFQGQGIHHDDHQQQPSADIIAGLRREGDHLEASVTRQTGENLSST

SEQ ID NO: 184790 - protein, 57 aa, Zea mays
  Clone ID: MRT4577_100117C.1.pep
PGKKNFPNTQQMGLRGRVGTIFKHLWESKTQSFLAFFQTLFKGVPKIERLICNFWNC

SEQ ID NO: 184791 - protein, 79 aa, Zea mays
  Clone ID: MRT4577_100118C.1.pep
LAPQLHQLGQDKYCTLTSTKLHQLGQDKYCTRTSTNAQLNLQRPTDPFSCPLTNTSSGGRGIPDNHAALRFIKEQFNFQ

SEQ ID NO: 184792 - protein, 129 aa, Zea mays
  unsure (1)..(129): unsure at all Xaa locations
  Clone ID: MRT4577_100119C.1.pep
MKLRSTVVSALNMSGPETDRKVLRNGIQKSTRTVMRDIMQRITKTRIRRLMHQDTLKRIXMLMYNETRDVLKNFLHNLMRNAVTYTEHSRLKTESRMVYGYALXRYRRTLYXFCGYACRAALRLLCGSG

SEQ ID NO: 184793 - protein, 130 aa, Zea mays
  Clone ID: MRT4577_10011C.1.pep
RDLTRLRRWQAPSSSTSSLRLENQMSELRRRQAPSSSTPSPHRRGGAPPQPGPALRPPLPPAAPPRVRRGSGDLHHHGMRRLPQPPWIHAVSGAVDPTTPRLSLCVSWGHCAENQEDPNGCVKSERSFRL

SEQ ID NO: 184794 - protein, 49 aa, Zea mays
  Clone ID: MRT4577_100120C.1.pep
HASAHASADAWGTVHADLYLLVRHACTFIFCQTKGTFVIQYCLYFSMII

SEQ ID NO: 184795 - protein, 57 aa, Zea mays
  Clone ID: MRT4577_100121C.1.pep
TYSVDQAGQTSNSRSTCLCLQSARIKGVSTIAWLQIGTLFNGGTLQDQGLGYSCLWS

SEQ ID NO: 184796 - protein, 127 aa, Zea mays
  Clone ID: MRT4577_100122C.1.pep
GLRPLASLTTKSWTEVAVEEAGGPNPGHSCVCEQIDRMGSEPQFQRDRRGSAVDGAETSSSTIAGAALPPANPTSRDVLGERVRRSEDIRRGGFGGNLVVGGLGGGSRLVVGASRRGELECLMGPAG

SEQ ID NO: 184797 - protein, 70 aa, Zea mays
  Clone ID: MRT4577_100123C.1.pep
ATARWEVNRNRVYRRVARIAVSSNQSPTLELSNYPDPDLLPWCPMPARRKPRRRRPPPPQRGEPSPAPLP

SEQ ID NO: 184798 - protein, 68 aa, Zea mays
  Clone ID: MRT4577_100124C.1.pep
QLSGKDITELIAAGREKFASVPCGGGGVAVAAAAPAAGGAAPAAEAKKEEKVEEKEESDDDMGFSLFD

SEQ ID NO: 184799 - protein, 40 aa, Zea mays
  Clone ID: MRT4577_100125C.1.pep
LWQNYRANNLTSWKLIPKKETIHVKLVTSMDFQTIKMGNL

SEQ ID NO: 184800 - protein, 76 aa, Zea mays
  Clone ID: MRT4577_100126C.1.pep
TRQLAHQNTSVKPPSNSVGHGIQRDTPRVGRARARARAVTHCKKFRVTRLSPGNTHTCTRARSVPNRSETHTDGSH

SEQ ID NO: 184801 - protein, 59 aa, Zea mays
  Clone ID: MRT4577_100127C.1.pep
AIQSAQTSLRLVLSNTKSGHLQCRTSQQWRTRIDATAPRNRDDTDLIKTRQKYIVPTRG

SEQ ID NO: 184802 - protein, 129 aa, Zea mays
  unsure (1)..(129): unsure at all Xaa locations
  Clone ID: MRT4577_100128C.1.pep
GKVGGPGRFWPPRGGGPPARCQGKVRGGXRLPGPXNPPPPHGPPGGPGXWCASPGSGGPSPPAPAGSPSPGGASPPGLIEQPGGPXPRPFGPAWGPYXSVIGQGPRXARGRTGPPPPPVRISPISSCPE

SEQ ID NO: 184803 - protein, 93 aa, Zea mays
  unsure (1)..(93): unsure at all Xaa locations
  Clone ID: MRT4577_100129C.1.pep
SAKSPFTTAARARHRAIFFICVMFLCVLFFFVGRQLSVMVILCSFRPCNCFFLLFSFWLVVGGGIXVPFAAFFFDGGRCYAVDLLFXYFGGGG

SEQ ID NO: 184804 - protein, 133 aa, Zea mays
  Clone ID: MRT4577_10012C.1.pep
MIIFFFAIRFAVPRKDLLCRRACTAVRSTHGGTTVVRSSSSPAASKLSGMELNDTLGYQLSSLQALKTMDLSNNYLHDSIPYQLPSNLTYLNLAKNNFSGNLPYSISNLVSLEYLKSENCLEASVHSQNCKAY

SEQ ID NO: 184805 - protein, 219 aa, Zea mays
  unsure (1)..(219): unsure at all Xaa locations
  Clone ID: MRT4577_100130C.1.pep
MVKEEEEVMAEAAGGGRGGYMDLLGLGEEDYLLCLSPSSSYFTPSVVSVTGATITTTTTPAAPSPTCCAYYLDLAPAHHHTLGFADREQQYHGDDGALGFQHSGDDRAVPAAVPHKSSTTTECSSSVSSMSSSPPATAVSAVSSSKPQAPKKKGSRSSSDQRKAASAAAPATAAGATNKRPXVRXRERLGERIIALQQLVSPFGKSDTASRLHEALGYI

SEQ ID NO: 184806 - protein, 134 aa, Zea mays
  Clone ID: MRT4577_100131C.1.pep
VRSAGRASPEIIAEEDEKSCKSNAALEADIEQIKATVLSLHTDLTKLRESTLSMADAHSQILAEIHAKLDGVTPRRQTNFEPRSELLLKKATRGGSSNSSSSSKEQSYQYQWQADVLMNHFIEVPLDFGLGRRD

SEQ ID NO: 184807 - protein, 114 aa, Zea mays
  Clone ID: MRT4577_100132C.1.pep
MADAHSQILAEIHAKLDGVTPRRQTNFEPRSELLLKKATRGGSSNSSSSSKEQSYQYQWQADVLMNHFIEVRGLTFSATTVVRPLMKAAASMSLFRCLLILGLAVAIRKVLINS

SEQ ID NO: 184808 - protein, 73 aa, Zea mays
  Clone ID: MRT4577_100133C.1.pep
KKRNPFLLLDKGGLQFFETQETLTLMGRGPNRGARPPTFRNTHFNIHRNCNGGTPHHKTETEAQGWSPPVEIP

SEQ ID NO: 184809 - protein, 290 aa, Zea mays
  Clone ID: MRT4577_100134C.1.pep
MDCCICSPVASVYRLPRNAICAPCHQGAKAIIGFLDRDGEREEDDGGGRSVQLQPRGSAKGLRDAWEQVKEMRAREEETRQRAAFLQHGFASAWKEGIHTDIVVKPGTGPAIPAHKAILAARSEVFRHMLSGDDRCKAPAGGSISLPELSHDDLSLLLAFLYTGALEAPGEGGGEASQDQERQLHALLVAADKYDVPFLRRACEARLAAGVAPRNALRTLEVAELSSSAALMERAMGAVVEHAEEVVFSAEYERFAARNAGLCVEITRALLARMPTPARSDGPCLELGSS

SEQ ID NO: 184810 - protein, 147 aa, Zea mays
  unsure (1)..(147): unsure at all Xaa locations
  Clone ID: MRT4577_100135C.1.pep
MCEENHLHQLVHHREAEDEEGASCEGDYYKKEKHHKRMEKLGELVAIAVGAYALCRXNDEGKKDPENERVHRIKEEAGDDAAESSADIAFHXEHHDNRDGRKRAPQLIRRHDCLSRDISTIVWSAVSSDLPASSSSTACRLGLDLRL

SEQ ID NO: 184811 - protein, 48 aa, Zea mays
  Clone ID: MRT4577_100136C.1.pep
LVILYVLHIFINFIVRYFISLLHLNGIIFPSFFISGYSFWGQAIYFCV

SEQ ID NO: 184812 - protein, 46 aa, Zea mays
  Clone ID: MRT4577_100137C.1.pep
FQSRYVIYTVKPRHPINLAPVSGRHPHRPFYFFFSSSFFFFFFFSA

SEQ ID NO: 184813 - protein, 43 aa, Zea mays
  Clone ID: MRT4577_100138C.1.pep
GKIYPVDGRDLQIERVELTSGRPTKNNPCLIGEPGDGKTAIAE

SEQ ID NO: 184814 - protein, 203 aa, Zea mays
  unsure (1)..(203): unsure at all Xaa locations
  Clone ID: MRT4577_100139C.1.pep
MLSFYSKNTPCRSSTFDVLSATDAKMWALFALTCPLXVSTTEALIIGQXSLAANDIIXPQVLPPFALMGXFERTDQRAYTLQLVLAVSALQQPLAQLRHQYLAHXTLLTIATQQQRQQTRLLPXLNHLAEENPVTYLQHLVLAXSNPIAMANVAAYQLHHRLQTEMXVLSQLGMVNPACYLQLXLSCSPVAVGNAPTYLQRQM

SEQ ID NO: 184815 - protein, 213 aa, Zea mays
  Clone ID: MRT4577_10013C.1.pep
MGQGRRMKKQGMPDVLDESLVTRKRKDAPVAVNPERKKRSRTAAREAKEAKAKATPKTRVAGKPVKQPLKTAAAVVNGAKAKSKKSAPQPPSDDEEDVSDIDDSDMENINVTGLDALGSASEDEDDEEMNDDEFDSDVVDSDDDIRRGAAMWSDDDDEEDAEEKLTAANIAGLSTRLDMQKAIEEAEAQAELEENNMQTNLANERPKILEDEE

SEQ ID NO: 184816 - protein, 113 aa, Zea mays
  Clone ID: MRT4577_100140C.1.pep
MSTPARKRLMRDFKRLMQDPPAGISGAPQDNNIMLWNAVIFGPDDTPWDGDILQNQWSPIYDVAAILTSIQSLLCDPNPNSPANSEAARMFSENKREYNRKVREVVEQSWTAD

SEQ ID NO: 184817 - protein, 58 aa, Zea mays
  Clone ID: MRT4577_100141C.1.pep
SLFRLRCDIMQGAYFLASGVQPRVSNITHQGTWHYTGVAMKLRKGVDEKNKSSTQMTR

SEQ ID NO: 184818 - protein, 109 aa, Zea mays
  unsure (1)..(109): unsure at all Xaa locations
  Clone ID: MRT4577_100142C.1.pep
YDTPWXGGTFKLTLQFNEEYPNKPPTVRFVSRMFHPNIYADGSICLDILQNQWSPIYDVAAILTSIQSLLCDPNPNSPANSEAARMFSENKREYNRKVREVVEQSWTAD

SEQ ID NO: 184819 - protein, 152 aa, Zea mays
  Clone ID: MRT4577_100143C.1.pep
MSTPARKRLMRDFKRLMQDPPAGISGAPQDNNIMLWNAVIFGPDDTPWDGGTFKLTLQFNEEYPNKPPTVRFVSRMFHPNIYADGSICLDILQNQWSPIYDVAAILTSIQSLLCDPNPNSPANSEAARMFSENKREYNRKVREVVEQSWTAD

SEQ ID NO: 184820 - protein, 78 aa, Zea mays
  unsure (1)..(78): unsure at all Xaa locations
  Clone ID: MRT4577_100144C.1.pep
MRECXXVHXXNPCXQXGNVWGEFYCLEHXIQSDGQVGGDMTVGYXDDVFSXFFEXIGVGNVVFCAVLVVVEVIVVDEV

SEQ ID NO: 184821 - protein, 125 aa, Zea mays
  Clone ID: MRT4577_100145C.1.pep
RTRTHMRVRRKLWSKNSAARGHWRTAKPCARVAAGRADADADLPPWNGRVVPWWLVSRALDGGCPCWVCAGSRYGAICKIRHSLFFILLLSFFLIGFVPLCSTKERNVQDCFADYRRLEAMILTS

SEQ ID NO: 184822 - protein, 114 aa, Zea mays
  unsure (1)..(114): unsure at all Xaa locations
  Clone ID: MRT4577_100146C.1.pep
WLGFSSPCGSVTGSRGSAEFWFGGERIHRVVADVXHRCFVXGLDWATDDHSLNSAFTHRTGEDLXSKXILDRETHRSRGLGLVPFTTVDVMQNAIEGMIGKELHGXHMTVNVAH

SEQ ID NO: 184823 - protein, 86 aa, Zea mays
  unsure (1)..(86): unsure at all Xaa locations
  Clone ID: MRT4577_100147C.1.pep
DYNHRLTPGGVFKDLVASNEQMINTYLNTLVNGLHSNEEAVQILFSFRTTTYRDFQCTMDKETXDKCKGHPGVLXLLADCYTDVNN

SEQ ID NO: 184824 - protein, 90 aa, Zea mays
  unsure (1)..(90): unsure at all Xaa locations
  Clone ID: MRT4577_100148C.1.pep
PPPLPPPPPPPPPPPPPSPSPPAPDIAKRVFFKXHPXAHTIITPGLVHTTRLRWPCHGLPRKPKLGIHSLWTWPVANLPAHREGLFYPPS

SEQ ID NO: 184825 - protein, 127 aa, Zea mays
  Clone ID: MRT4577_100149C.1.pep
SNGHDTCWGVGFLWVLLSSFIYVVVAFTCGCRVSLAIKNPCSEELIFKTGGRSEIIPTVWLEHAVVQLHAWSFKSSLVWFSSLPMQAHRMQDMSFGQAPQIRRWSAYWRVQAPSLPPACSSAKYKIL

SEQ ID NO: 184826 - protein, 126 aa, Zea mays
  Clone ID: MRT4577_10014C.1.pep
HGANAHTDYGMLTLLSTDGTPGLQICRDKDGRPQLWEDVHHIDGALVVNIGDLLERWTNNVYRSTLHRVLMVGKERYSVAFFVWPSPDMVVTCIESCCSEANPPRYPPIRSDEYLEQRLTSTYKYK

SEQ ID NO: 184827 - protein, 40 aa, Zea mays
  Clone ID: MRT4577_100150C.1.pep
GLHFVSLVPLGVISFSNGVAGGYPVKLFRFNSDQIPLWKG

SEQ ID NO: 184828 - protein, 201 aa, Zea mays
  Clone ID: MRT4577_100151C.1.pep
MPLPLAKARRGSSPQPSPQPARSSCRSQLEQDVKRPRKALQDETALHAVLEGALGRAAVTLADMAYLPTNAQELLSTICILETAVTKLEEEMVSLHFQLTQERNERRLVEYRLKHLPPPPSACSCHSGKLGPDDPTGEKCSSQAEEVYPRAVLHEQAVKLQRQISVKSFAHPNQLSEDIVRCMRNILFRCQILQGLLRNSN

SEQ ID NO: 184829 - protein, 65 aa, Zea mays
  Clone ID: MRT4577_100152C.1.pep
PASDSPYLIHPEGGGIRRGVMRRCYTSAAAQYRVSGRNYPKSGPRMRYQVPRTTPIASTSRRPIM

SEQ ID NO: 184830 - protein, 45 aa, Zea mays
  Clone ID: MRT4577_100153C.1.pep
RGRQPREDRQRPGHFTGAVLLMADRSHGLACAIPHGRVSRSPCHV

SEQ ID NO: 184831 - protein, 134 aa, Zea mays
  Clone ID: MRT4577_100154C.1.pep
KKKGVKKLAKKVPPVGFFKFGGVFKAQKGIHLFVFKAQKVLNEIRGGFYEETVMKLNFRPYGGWDPLLKLVYWAAANATHYRGFAKTNFFFPKAEGGGGFFMKKFSPRGGGGSFFIKKTMGKKTIGLNMGKKSK

SEQ ID NO: 184832 - protein, 63 aa, Zea mays
  Clone ID: MRT4577_100155C.1.pep
PPFFFFIYFKGGFLSEIGGTPPPESHKRYRGPKPDEHGRKPPTENSSTLRQEATPEKGCQKTS

SEQ ID NO: 184833 - protein, 142 aa, Zea mays
  unsure (1)..(142): unsure at all Xaa locations
  Clone ID: MRT4577_100156C.1.pep
ENLAVLWRPWLCKNPAVTEGGGGRALGEAVPAGKSPXRTQAVNRLPAGXSCGKDGGDKXKGTKKGTTSVRDLQEYLFTVLKHVHPYIMMYCNAMCIMNFFINDMLQKLDEMAVMLARYNMKATITSRVIQXTSVRLVLRGEL

SEQ ID NO: 184834 - protein, 273 aa, Zea mays
  unsure (1)..(273): unsure at all Xaa locations
  Clone ID: MRT4577_100157C.1.pep
MAQLQETYACSPATERGRGILLAGDAKTETIAYCSGRSVIFRRLDAPLDAWAYTEHAYPTTVARFSPNGEWVASADASGCVRVWGRNGDRALKAEFRPITGRVDDLRWSPDGMRIVVSGDGKGKSLVRAFMWDSGSTVGEFDGHSKRVLSCDFKPTRPFRIVTCGEDFLANYYEGXPFKFKHSIRDHTNFVNCIRYSPDGTKFITVSSDKKGLIYDGKTGDKIGELSSEGSHTGSIYAVSWSPDSXQVLTVSADKXCEVWDIXEDGSGTLNRT

SEQ ID NO: 184835 - protein, 42 aa, Zea mays
  Clone ID: MRT4577_100158C.1.pep
KKKKLLEIKKKKKKKKKKKKKKKKKKNKKKKKNPRKKKKKKR

SEQ ID NO: 184836 - protein, 102 aa, Zea mays
  Clone ID: MRT4577_100159C.1.pep
LAGLGRRQVNSEKNYRGGRALQAELQGPGAETGRRRRRLRCRGQDPPPKPPSSASSQASLASSRAVTAPRRRPSRRPTPSGRTSGNAAAALRRHRRRSATCP

SEQ ID NO: 184837 - protein, 420 aa, Zea mays
  Clone ID: MRT4577_10015C.1.pep
MHPVRPRAVVPRVPSSPAANLNIGGDYWAAPGCAAVPAGHGKAPAGSATFQPIGFLELNQLTPTPRPSKASKASEQDQPPATTTSSGTASVYPESPSFQAYSAIPPHAFFPPTVAANPQAHPYMWGAQPIVPPYGTPPPPPYVMYPPGTVYAHPSTPPAMHPFGHYPMPTNGHVETHGAAPSAPEISGKSEPGRTSAPSANGITSHSESGSESESEGSDDNSQNDSHSKDNDGKEDGNSQNGMSYSGSQGVVNQTMAMLPMQPGAMVGGVPSSTAANLNIGVDYWAAPGSAAVPAAHGKAPAGSARGDQWDERELKKQKRKQSNRESARRSRLRKQAECEELGQRAEALRSENSSLRAELERIRKEYEQLLSQNASLKEKLGAASSDSLPDMNEQNDQNDGDGGYRKQPDSDGHQPGSES

SEQ ID NO: 184838 - protein, 1265 aa, Zea mays
  unsure (1)..(1265): unsure at all Xaa locations
  Clone ID: MRT4577_100160C.1.pep
MSGEHAKREMVTGEKPGSSRKKNEERTPSKEASDKHKEHKEESAGSIKSHKKGDKKKNKMKKVVYYETDSSSPSTSGAESISSKRQERKKYNYCMWSDKIRHHLTSLHESIWDIVEFGAQEEYNKVQGFKSAKEIWDVLKTTHKWDEVTKITKRETIKGELGRSILNKGEEPQAMYNRLKTMVNQVRNLGSTKWDDHEMVKVILRSLILRNPTQVQLIHGDPRYKQMSPKEVIDKFVSFELMIKDSKHIVTLEQGATSTPEVHPIAFEATEEKKEESTPTSRLPIDAFKLDNKEMALIIKSFRQILKQRKGKDYKPRSKRVCYRCGKSSHFIAKCPYTSDSDRDDDKKGKKKMEKRRYYNKKKGGEAHMGWEWDSDESSTDSSSDEDAANIAINKGLLFPNVGHKFLMAKDSKNKKIHSTDTPKYSTSDDEGSSSDNDDDLTSLVANLTKEQKKKINELIETINEKDDILECQEDLLVKENKKIVKLKDAYALEVEKCQNLTKERVTCNDSIPCLRTKNASLTAKIEELNTCKVPTSIVERVTICTRCIDINVDAMNDHLAMIKEQNDHIAKLNAKTVEHELENKKFKFARSMLYNGRRPDIKDEVYASDGTSWIIDNRCANHMTGEKSMFSSYEKNDDPQRAITFGDRNQGLVKDDEEAPCVALRNLSIRVVCPKEPEEPSQAQDQPSSSIQASPPTQDEGMAQEGDDQDNEPPQEEDIDQGGDEDDQDKEDDQEIQDQIPPHPRVHQAIQRDHPINSILGDIHKGVTTRSRVAHFCEHYSFVSFIEPYRIEDALRDPNWVVTMQEELNKFMRNEVWHLVPCPNQNVVGTKWVFRNKQDEHDVVTRNKARLTAKGYSQVEGLDFDETFAPVARLESIRILLPYVTYHGFKVFQMDVKSAFRNGPFKEEVYVEQPPDFEDSEYPTHVYKLSKALYGLKQAPRAWYECLRDFLFTNGFEVGKNDPTLFTKTIDKDLFICQIYVDDIIFRSTNKSSCEEFSRIMIHKFEMSMMGELKYFLGFQIKHLQEGTFIYQTKYIQDILKKFGMKNAKPIKTPMGTNGHLDLDTGGKSIDQKVYRSMIGSLLYLYASRPDITLSVCMCARFQANPKEIHLRVVKIIMRYLVYTPKFGLWYLVPKGSTFDLIGYSDADYAGCKIDRKSTSGTCQFLGRSLVSWASKKQNSVALSTAEAEYIAAGHCCAQLLWMRQTLRDYGYKLSKVPLLCDNESAICMADNPVEHSHTKQIDIWYHFLRDHQQKGXDIEIAYV

SEQ ID NO: 184839 - protein, 127 aa, Zea mays
  Clone ID: MRT4577_100161C.1.pep
TPPPGKRNPPPVVPPFYLWGKKVFCVFKKKNLVPQCEKKERAPRTQPNFLFPPRFYCGIRGLKFSQRKKKGSGTLKGDRTRKWASASLTTKNAVFVKLLQVLAFFFYHPQGLFPIFFSRPIIVWNRQ

SEQ ID NO: 184840 - protein, 149 aa, Zea mays
  unsure (1)..(149): unsure at all Xaa locations
  Clone ID: MRT4577_100162C.1.pep
MSIFEXNASAMKTMXGKNCFTITMYRRLSVQLSTISTDFRTDDSSVHXSFYIGFSXLATDAHTLHCRVLFRYWMDQMREXMDMKPQAFASLVSDLLYERRLVPYFXQHVLVXLLDMQEPIICTMNCLVAEVLLKETEASXTASKMLYGG

SEQ ID NO: 184841 - protein, 84 aa, Zea mays
  Clone ID: MRT4577_100163C.1.pep
LFFLNSFLGFQNTPWYTNFDPYLSMPKKRRHPNLKKNPAFNLQILKGGGRPTFFCPQKATFHFRPHTKNPKQEFKHSLPPALTE

SEQ ID NO: 184842 - protein, 80 aa, Zea mays
  Clone ID: MRT4577_100164C.1.pep
EIKSNEAYKLLYGSQRPLSKRFIFYRGCHIHNLESHGNLHLHCKNIYCSTTSSKHVKRRGGTPRTAYIWGHSKNENNLCQ

SEQ ID NO: 184843 - protein, 304 aa, Zea mays
  Clone ID: MRT4577_100165C.1.pep
SILPSLTCSTSLGTPIMDTPTSNFPDLRNAAVSCPLSPCSPPEIRHSVAARLPKPAGADVQYSRCSERGIARGEMELSPVGRWADLPEDIAVAVASCLQEADVCALGGCSRSWRRACDADCIWERLFRCRWPSAVASASPVQGWKALYISQHRRMAVAISNVVEFVGSSLNNESLESEYYLKAIADLALIPDIGFLDVQFFLFSRNHSAIINLIGLHYSIASLHVLPTEVSKALQAHRVAERVVCVNLVIRWFYGFRLPDEYECHRISLGELTVAEGAEFFAILNRGAVHTVFLLRISLVNVDK

SEQ ID NO: 184844 - protein, 34 aa, Zea mays
  Clone ID: MRT4577_100166C.1.pep
GCRPSRWPEEEEAFRQDQGVACQGDGLRLRCLRT

SEQ ID NO: 184845 - protein, 293 aa, Zea mays
  Clone ID: MRT4577_100167C.1.pep
MNVCELTLAVSHPPTQVKNSEIVALDKITMPITFGYVHNTRTEQVVFDIVDMDYPYNAIIGRGTLNAFEAILHPTYLCMKIPSDQGPIAVHGSQEAARRAEGSWTDSKAIHNIDEAEAHQQYKHKRDKAASADQPKPMLLCEDIAEQKVLLGSQLSDELETTLLRFLFNNKDVFAWSANDLCGVNRDVIEHSLNVDPTIRPRKQKLQKMSDDKAEGARNEVKRLLSARVIREVTYLEWLANTVMVKKANGKWRMYIDFTDLNKACPKDEFPMPRIDSLVDAAATSKLMSLLDC

SEQ ID NO: 184846 - protein, 314 aa, Zea mays
  unsure (1)..(314): unsure at all Xaa locations
  Clone ID: MRT4577_100168C.1.pep
MAAQMPFLALLQGAGVVVEAEAEEQQQQHEHDGRKRQAFARAVSKLDLLESCLTQAVDPAAEACAPVASRTTERRRKRPRTRARAAPPPEKRSKPEEAESQRMTHIAVERNRRRLMNDHLASLRSLIPSRYIPRVSHAMQSPCMHAAFRFDLTTQRLHAMQGDQATVVGGAIDYVKQLEQRLVALQAAXRARGAAAVPRRTTACSSCPRSTRATXSRGGGGGLGVDVEATGAVGGHVRVRVAGRRWPGRLVRAVAALEGLRLAVLHLAVTSVGRDAVVCCFNLKMEEGCEVATADEVATVVHQIFACSAAGACC

SEQ ID NO: 184847 - protein, 157 aa, Zea mays
  unsure (1)..(157): unsure at all Xaa locations
  Clone ID: MRT4577_100169C.1.pep
KXELLDINGIGKTKLKKYGDRVLATIEDFLSKHPNPRRNISGSGGKEHSEAAKKRRGSTASSAVSCGDDDFEEPTGQSKKRAAKTRTVSDAASMVHGARCIDADLDGPEVVDVDEHCSVPKPVASGRVLPKWAPAKAKSKGSSVPPSNLFHEFGYAK

SEQ ID NO: 184848 - protein, 108 aa, Zea mays
  Clone ID: MRT4577_10016C.1.pep
MEGGKRRIRSASVCVATRCGGSEWAPSFFVLHELFPRPSRPAIAAVTIFCPWRNLCALNQSCQSFSPPSAGSDWGPYPDTLYWFLPYEGLGLRKEHQRTNTGFPFGFF

SEQ ID NO: 184849 - protein, 85 aa, Zea mays
  unsure (1)..(85): unsure at all Xaa locations
  Clone ID: MRT4577_100170C.1.pep
YKLLFTPLACGLIEPTMVIASIALGCMTAATXYLMTLMMTASMRMXRTIILHALGDGLDLNDPLLKMEXAVARRXEIQAETPKSY

SEQ ID NO: 184850 - protein, 99 aa, Zea mays
  unsure (1)..(99): unsure at all Xaa locations
  Clone ID: MRT4577_100171C.1.pep
ARXAPPPPAPRPPPPPLAAGTSPRPPSRTRKGSIPPTPRLRRTPRRRSSRRPRSLRRSSGSGGRGRRAGEAPRRRFTHVLLQRDRCVYYDEWAWVGSCV

SEQ ID NO: 184851 - protein, 114 aa, Zea mays
  Clone ID: MRT4577_100172C.1.pep
RTRGRTRGRLRALVYGGVSALVVLFTSRISVKTPPLVQSCVQLCRAAGETPPRRCSIPCAWSCGCTSVREIRPCPRDELGDPESGGIPHRSARHEQNYLSPWSARLRRQFLTSQ

SEQ ID NO: 184852 - protein, 83 aa, Zea mays
  unsure (1)..(83): unsure at all Xaa locations
  Clone ID: MRT4577_100173C.1.pep
FGEVGGILGYFWWAAVEILMEGALPPGPEPQLKGGLKDLPGGPREVQKGFAATLVTEAXFKLAPIKGVSKSPWNFAGGNKPSE

SEQ ID NO: 184853 - protein, 291 aa, Zea mays
  unsure (1)..(291): unsure at all Xaa locations
  Clone ID: MRT4577_100174C.1.pep
ICLHGATPSAPVGLTSRSGVIPITXSSDTIGPMCRTVSDAVRVLDVIVGYDELDAEATGAASKYIPHGGYTQFLRTNGLRGKRIGVPDVFFQGYDDTQLAVYEKHLDTMRQQGAVVIMDLDIATNFTDLGEQEILLMAAEFKISIKAYLSGLLYSPVRSLAQVIAFNEAHPVEERLKDFGQPDLIAAEKTNGIGTRERAAIRRLREISTNGLEKLMKERRLDAIVAPNSDASSVLAVGGYPGIAVPAGYDEQGVPFAICFGGLQGYEPRLIEIAYAFEQATKVRRPPTFKR

SEQ ID NO: 184854 - protein, 183 aa, Zea mays
  Clone ID: MRT4577_100175C.1.pep
MAAPAPTVAKSPPALVPPAGPTPGGTLPLSSIDKTAAVRVMVDFIQVFQSAPSSADDQVAAMRQGFARALVPYYPVAGRIAEPSPGEPLVDCTGEGVWFVEAAASCSLADVNGLEDRPLAIPKADLIPRPPADHKLEDQILLAQITKFSCGGYAVGICFSHLVFDGQGAAQFLTAVGEMARGL

SEQ ID NO: 184855 - protein, 114 aa, Zea mays
  unsure (1)..(114): unsure at all Xaa locations
  Clone ID: MRT4577_100176C.1.pep
NLKNCFEFLRHQFPPFVIPFSQSRFKHPRSCQVFHPQCCFVFRRFGPQTISQAIXNMVQSIIRGGRPPPPFWFCGSPQAXPKGGGNFGTVPKPPPNVGLGPLPPPKKSLPPPCH

SEQ ID NO: 184856 - protein, 65 aa, Zea mays
  Clone ID: MRT4577_100177C.1.pep
GLAHHGTPGTLYIYLGITAFGRAQKSYMGTGAITLKLHGGLFIKVYARMVFFGFTITRKLGKERL

SEQ ID NO: 184857 - protein, 83 aa, Zea mays
  Clone ID: MRT4577_100178C.1.pep
FKSYREGLMSPQTETKAGVGFKAGVKDYKLTYYTPEYETKDTDILAAFRVSPQPGVPPEEAGAAVAAESSTGTWTTVWTDGLT

SEQ ID NO: 184858 - protein, 56 aa, Zea mays
  Clone ID: MRT4577_100179C.1.pep
QHNCFILNCVLNRTLSLNPLISIVQEQGFFTFPTNVSFSFYETLLMDKLLMSLDHF

SEQ ID NO: 184859 - protein, 157 aa, Zea mays
  unsure (1)..(157): unsure at all Xaa locations
  Clone ID: MRT4577_10017C.1.pep
GVDYWAAPGSAAVPAAHGKAPAGSARGDQWXIHPTHHRLCLYHVQIVQDERELKKQKRKQSNRESARRSRLRKQAECEELGQRAEALRSENSSLRAELERIRKEYEQLLSQNASLKEKLGAASSDSLPDMNEQNDGDGDGGYRKQPDSDGHQPGSES

SEQ ID NO: 184860 - protein, 101 aa, Zea mays
  Clone ID: MRT4577_100180C.1.pep
KTVVINQKGIDPPSLDLFARAGLLLFELSRGGGAINSVDDLTENCLGSSDLVYEYVLVEEKYTFVGNVKNPCSCTILIKGFKDDVLLRTQLRMKQLCCYHP

SEQ ID NO: 184861 - protein, 61 aa, Zea mays
  Clone ID: MRT4577_100181C.1.pep
TLTGTKRKGSTTSRSQSISEHVVCISLHSINPHTQRGHEVLHIYEANLYKSPVWINMNLDI

SEQ ID NO: 184862 - protein, 166 aa, Zea mays
  unsure (1)..(166): unsure at all Xaa locations
  Clone ID: MRT4577_100182C.1.pep
MEVTITCVYVRHTFDSLLDPTGEADAILNDLCYIRGDEPNDASPGIYEALVLVAWRSDYLGKGVLHDVNPVXNIIGPAIVGKYPTEQGETDCFMGQQLDQTSYECXDANTTLGADDLLEGSLAECKAXGAMVEQXPLYHHIXEIXGNKTLXLPVPAFNVTIGRPHA

SEQ ID NO: 184863 - protein, 98 aa, Zea mays
  Clone ID: MRT4577_100183C.1.pep
MVDWQDFLLRRPPVADPTSYQSLAGALQYLVFTQPDITYTVQQRQLAVFRSSAEAVYRAVANGVAEAAWLRQFANIFTKGLPTSVFEEFRPSLNICRG

SEQ ID NO: 184864 - protein, 55 aa, Zea mays
  unsure (1)..(55): unsure at all Xaa locations
  Clone ID: MRT4577_100184C.1.pep
ENNMNEIKRFNKERXQGWVEMFLGFVSDQATYSDHFASIWTKVAEETKGYAKSSS

SEQ ID NO: 184865 - protein, 49 aa, Zea mays
  Clone ID: MRT4577_100185C.1.pep
DRNLRPRQSRDPVSPRHGNTPPTYQGNKYITHFVAAGPIVAPMGTAAVT

SEQ ID NO: 184866 - protein, 89 aa, Zea mays
  Clone ID: MRT4577_100186C.1.pep
VHETSVPGGPFTNHRWLVPNKPRWISIFSAPQGDFLINHIVVPPLASHMSKHLFLCWVQKPLTQLGRHPFFNPNCPTSLRKCFAPPCFP

SEQ ID NO: 184867 - protein, 80 aa, Zea mays
  unsure (1)..(80): unsure at all Xaa locations
  Clone ID: MRT4577_100188C.1.pep
AHITIQTIGTQQQXQQLLPALTHLCMVNPAAYLQXRWLAXTDLLSANRGVNQTQQQLQQFLPGLTKLGMVNPAXYLQHNN

SEQ ID NO: 184868 - protein, 207 aa, Zea mays
  unsure (1)..(207): unsure at all Xaa locations
  Clone ID: MRT4577_100189C.1.pep
AAYYPCMDILYECYEDVSSGSEIRSVVLAGRXFYEKEGLPAFPMGKIDQTRMWKVGERVRSTRPHGDLGPLHPFTAGVYVALMMAQIEVLRKKGHSYSEIINESLIESVDSLNPFMHARGVAFMVDNCSTTARLGSRKWAPRFDYILTQQAFVTVDKKAPINQDLISNFMSDPVHGAIEVCAQLRPTVDISVTADADFVRPELRQSS

SEQ ID NO: 184869 - protein, 84 aa, Zea mays
  Clone ID: MRT4577_10018C.1.pep
DDVALSLDSTHNAFKDAMDEWDSHTAARSIDDMDAYLQHLRKDVPMVQHCNHNASVETSVTADTTLNDMIQLDVGIQMLEYVIT

SEQ ID NO: 184870 - protein, 68 aa, Zea mays
  Clone ID: MRT4577_100190C.1.pep
PPPFFFDRVCDRTKSESFDTIDRGLKAADVPKRFSGIPSSLIKTLDSAVGWESGFRFHSGLKSWYCQP

SEQ ID NO: 184871 - protein, 111 aa, Zea mays
  unsure (1)..(111): unsure at all Xaa locations
  Clone ID: MRT4577_100191C.1.pep
GGRGGAHQQPGGGEKTHKNRGGXGQXDAGKGTTTGHXXXKRGGXDKRENERXEEGGXEXXKRXKKXAXGRDKHKXERERXXTKXKXXXKXETTKXXXTGXEAXGHXDXXKN

SEQ ID NO: 184872 - protein, 89 aa, Zea mays
  Clone ID: MRT4577_100192C.1.pep
GQRYLVLFFFFSNNFVPWRDPLTVPLILFGKGFCPPSVFSNLNLKFYREWVFSALVSGGSRVPPHLKCCLVSAGSQAVLGALLFLFAAD

SEQ ID NO: 184873 - protein, 122 aa, Zea mays
  unsure (1)..(122): unsure at all Xaa locations
  Clone ID: MRT4577_100193C.1.pep
KVFHDDFFKQSTSKAFXVVWNPGLFKRVGICPGVNGKAYGFFSLYRVTGNVEPLFRAKAFACFFLEKTDQFITQGAMQGGDRPFSLFXGKXGMSNLLLDKVDPFETRFPGYELLDKLLPSDL

SEQ ID NO: 184874 - protein, 139 aa, Zea mays
  unsure (1)..(139): unsure at all Xaa locations
  Clone ID: MRT4577_100194C.1.pep
FVGGCRVWVWLRLRVFGVRLRFSFASFFAFVLVRLGVRWVVFVLSWCPGGCFGSLAGLLFVPWWPVLRFVVCAVGGWVFFAFGSCFRVSSFSVLFFLGWFGCPLLPRXWAPLWGXVWFVFNSIFCEVGSXFSIESXPGG

SEQ ID NO: 184875 - protein, 83 aa, Zea mays
  Clone ID: MRT4577_100195C.1.pep
PESSRVAPHVGREQAEREAPDAELVVRGGVGAATRRSPRGRARARAHAARTETRSAERNRAVQLCGSETVESWRQERNGRGET

SEQ ID NO: 184876 - protein, 130 aa, Zea mays
  unsure (1)..(130): unsure at all Xaa locations
  Clone ID: MRT4577_100197C.1.pep
LGRPRRCGFCLGWVFVLGCFFGVLFPLGAVWLSWPPWFPCGGDFFLRKKFFFLRFFPVWVLDPQVLGLFCSRFFALPWVASFSGFCFAFSFCWLVLSPCFCPRRFFFAEKTAETLKKPPFCXFXXVIKKG

SEQ ID NO: 184877 - protein, 300 aa, Zea mays
  Clone ID: MRT4577_100198C.1.pep
MLRCAYTQRRWAHRRGGFVTGSTGWSKPPPPGLGRAAGVGTKKSEWWTVDGEMHEIGESVPHRERFAIPRDNLPNRRRKQMREQFMRRTRLVLKDSEHETWCKNYMELYQELRENWERLYWDEGYSKKIAESHANYDSAEEDDIDFSPYSRRRQSNVEPNKDLGFGVNKRGETWERVTQIRDKFEYDRERRMRERAFAPMNTENNYARRDPRFRSQDDSSFAHTNLSDDFGLHVQTFGNRSDQSYENESNFRNKRDSSFQHEPSDRNQRNLNIQNEPSFRNHRYPDFQNQGGTRSQTFDE

SEQ ID NO: 184878 - protein, 195 aa, Zea mays
  Clone ID: MRT4577_100199C.1.pep
LEVVVRCRDRPKLLFDTVCPITDMKYVVHHGTVSAEPGGGAYQEYYIRHVDGHAIRCEDEQQRLVRCLAAAIERRTADGLELEVRTGDRAGLLSDITRIFRENGLTIRRAEISSSDGEAVDTFYLSDPQGLPVETKTIEAIRAQIGEATLRVRNNSFGTGDHADVAGAGTTAFIFGNLFKFYRPFQSFSLIKLYS

SEQ ID NO: 184879 - protein, 111 aa, Zea mays
  unsure (1)..(111): unsure at all Xaa locations
  Clone ID: MRT4577_10019C.1.pep
FIFSGKQLEDGRTFPGFNIPKERPLPLFFPPRGGLPIFVKALAGKTLTLGVXRSGPLPHVKGKIPGKEGLPPGQQGFVFSGQQLEDGRPLAGFHLPKESPPPPVVRFRGGP

SEQ ID NO: 184880 - protein, 128 aa, Zea mays
  Clone ID: MRT4577_1001C.1.pep
MAHARAARVPQNPPQILHRRQSVQPQSSPHRGDCVHAPASRPRVDRPAPTAYIKPRSQHRTPACVPAPAQSGGPCPLHPSEISPSPRSWRRRWRGYVRRRRLQRTPRATVPLQCALLAPVGQVAAPGA

SEQ ID NO: 184881 - protein, 109 aa, Zea mays
  Clone ID: MRT4577_100200C.1.pep
SPNPRDGNTPNHNLISFFGLYRPLYRTDRSAIDHSEALTTDSEIGRPQDFSRQQLLDCCQKSIEDGRKRNFTTGSAGVYMQNGAEMMIASDIPERDWFLYDLNLGGDTG

SEQ ID NO: 184882 - protein, 524 aa, Zea mays
  unsure (1)..(524): unsure at all Xaa locations
  Clone ID: MRT4577_100201C.1.pep
MDIIYQDSSCLALEQALHDEGVGPIDLPFMLLRAITKDFSDTQLIGRGGFGEVYKGVLPNGMVVAVKKLLDKIDVLEANFQSEVACLIEVKHKNIVRCLGYSSETQHVRAPYEGRFVWADLRQRLFCFEYLSKGSLADCLTGASFALHWSVRYQIIKAICEGVGYLHQHNIXHGPSEPQNILLDDNMLPRFGDFDLSTRLSENQSTIITKSVNVTPPMSPERFGFCHYXIGFTKLPLVSQVTPIIKEXNAITFKADIYSLGVIIIEILTGHKECTSVDKVLESWTDMFQTLGSHPLLEQVEVCAEIAINCMNDDPSNRPTIQDIISSIDETDARSVTSSSPGGQVITMAGSESSSSRSRSPCASCRMLRQQCTQECVFAPYFPAEEPHKFAIVHKVFGGSNVFKLLQELPAHQRGDAVSSMVYEANVRTRDPVYGCVGAISVLQQQISQLQMQLSMARAETLTSALQQQMDVNGSLLSQNSFDRYGNGDLKPDSPPEILPLEDDDEEVSSPMSPERFGFFHYKE

SEQ ID NO: 184883 - protein, 216 aa, Zea mays
  Clone ID: MRT4577_100202C.1.pep
MDIIYQDSSCLALEQALHDEGVGPIDLPFMLLRAITKDFSDTQLIGRGGFGEVYKGVLPNGMVVAVKKLLDKIDVLEANFQSEVACLIEVKHRNIVRCLGYSSETQHVRAPYQGRFVWADLRQRLFCFEYLSKGSLADCLTGASFALQWSVRYQIIKGICEGVGYLHQHNIIHMDLKPQNILLDDNMVPKIADFGLSRRLSENQSRIITKTIIGTP

SEQ ID NO: 184884 - protein, 25 aa, Zea mays
  Clone ID: MRT4577_100203C.1.pep
YFLLGFMVLKFCSVHVWFKRTGCYG

SEQ ID NO: 184885 - protein, 46 aa, Zea mays
  unsure (1)..(46): unsure at all Xaa locations
  Clone ID: MRT4577_100204C.1.pep
KNGPTHTNGMVFVNKTQFQIFCSFIRCCRVFLKGTWAYLNTXFNIT

SEQ ID NO: 184886 - protein, 70 aa, Zea mays
  unsure (1)..(70): unsure at all Xaa locations
  Clone ID: MRT4577_100205C.1.pep
SQAKTPQHPPLRGACPTSASARSRHRRPPTGFAHRRAPTAVRGGEGEGAAVAAFRVPVVTAPXXRXLALV

SEQ ID NO: 184887 - protein, 41 aa, Zea mays
  Clone ID: MRT4577_100206C.1.pep
YDPAPALTTPRLHHARVSAGGAGAGAGGVGASEGVRVRLPR

SEQ ID NO: 184888 - protein, 62 aa, Zea mays
  Clone ID: MRT4577_100207C.1.pep
SACVEPITLAPLTSAIDICRHGLQTRRAARGIRERTIARHDVARRRLLLMSLGPGCSSLFVY

SEQ ID NO: 184889 - protein, 640 aa, Zea mays
  unsure (1)..(640): unsure at all Xaa locations
  Clone ID: MRT4577_100208C.1.pep
MEITYSNSQPASRLERAVFPYKTAPTRPVPGRANPIQTVPCPSLPRNAAMGTRPRGVVLAPWAVVLVLVLALRLAGASHVIHRSLEAEAAPSVPASIVSPLLRTGYHFQPPMNWINDPNAPLYYKGWYHLFYQYNPKGAVWGNIVWAHSVSRDLINWVALEPAIYPSIPSDKYGCWSGSATILEDGTPAILYTGIDRPDINYQVQVLALPKDASDPLLREWEKPEEYNPVATPAAGGINATQFRDPTTAWRHAGXHWRMLVGSVRGARGMALVYRSRDFRTWTKAKHPLHSAALTGMWECPDFFPVSGPGLQAGLDTSAPGRKYVLKSSLDLTRYDYYTIGSYDGGKDRYYPDDPAGDYHHRRRYDYGNYYASKTFYDPVERRRVLLGWANESDSVPDDKAKGWAGIHAIPRKIWLDPTGKQLLQWPIHEVEKLRGKAVSVDAKLVKPGDHFEVTGIATYQADVEVSFELELEAGTSLLEKAEAFDPAYDDDAQKLCGVKGADARGGVGPFGLWVLASADLQERTAVFFRVFRDGHGKPKVLMCTDPTKSSLSPDLYKPTFAGFVDADISSGKITLRSLIDRSVVESFGAGGKTCILSRVYPSIAVGKDAHLYVFNNGEVDVTVSGLTAWEMKKPLMNGA

SEQ ID NO: 184890 - protein, 63 aa, Zea mays
  Clone ID: MRT4577_100209C.1.pep
SGDDDLQMQLAQVPVPPLGYRNLDWGHKDQAQEQPGREVGASTGAEMSTQRWRMGKRERELGT

SEQ ID NO: 184891 - protein, 64 aa, Zea mays
  Clone ID: MRT4577_10020C.1.pep
MWPWLLRLEAVADVDNPASQRVLEKAGFAREGVLRKYVLLKGQPRDMVMFSIVVETEQDKPDGP

SEQ ID NO: 184892 - protein, 88 aa, Zea mays
  Clone ID: MRT4577_100210C.1.pep
PLKKAYGVRRPLYKGPYFFLRPLGPPVGAFLPQSCSPSFICRCWNYLSWWGPISVYEPPPAPRAFGFCLGYRKWNGGAAPVPFGCLCF

SEQ ID NO: 184893 - protein, 183 aa, Zea mays
  Clone ID: MRT4577_100211C.1.pep
DAWADAWEVSFELELEAGTSLLEKAEAFDPAYDDDAQKLCGVKGADARGGVGPFGLWVLASADLQERTAVFFRVFRDGHGKPKVLMCTDPTKSSLSPDLYKPTFAGFVDADIFSGKIALRSLIDRSVVESFGEKGRTCILSRVYPSIAIGKEAHLYVFNNGDVDVKVSSLTAWEMKKPLMNGA

SEQ ID NO: 184894 - protein, 772 aa, Zea mays
  unsure (1)..(772): unsure at all Xaa locations
  Clone ID: MRT4577_100212C.1.pep
MGTRPRGVVLAPWAVVLVLALRLAGASHVIHRSLEAEAPPSVPASIVSPLLRTGYHFQPPMNWINDPNAPLYYKGWYHLFYQYNPKGAVWGNIVWAHSVSRDLINWVALEPAIYPSIPSDKYGCWSGSATILEDGTPAILYTGIDRPDINYQVQVLALPKDASDPLLREWEKPEEYNPVATPAAGINATQFRDPTTAWRHAGHWRMLVGSVRGARGMALVYRSRDFRTWTKAKHPLHSAALTGMWECPDFFPVSGPGMQAGLDTSAPGRKYVLKSSLDLTRYDYYTIGSYDGGKDRYYPDDPAGDYHHRRRYDYGNYYASKTFYDPVERRRVLLGWANESDSVPDDKAKGWAGIHAIPRKIWLDPTGKQLLQWPIHEVEKLRGKAVSVDAKLVKPGDHFEVTGIATYQXVLYSSYVLNSMDHKTVFFYLVTSGKLRPAPGGNMCACARTQLVTCQASIRSLSVVYTTLVLAGYLSSQPSCQDPMVHACLLSAAVKXPARLLRYTHSHLPATPRRFVRFLFSFTSAVRVVYVVHLFLIXVRKQTMKQSSATHTHTHTRTRTCRVRNRGHDMRRRRIFRCNETHTYASTLFXVVMMXADVEVSFELEAGTSLLDKAEAFDPAYDDDAQKLCGVKGADARGGVGPFGLWVLASADLQERTAVFFRVFRDGHGKPKVLMCTDPTKSSLSPDLYKPTFAGFVDADISSGKIALRSLIDRSVVESFGAGGKTCILSRVYPSIAVGKDAHLYVFNNGEVDVTVSGLTAWEMKKPLMNGA

SEQ ID NO: 184895 - protein, 136 aa, Zea mays
  Clone ID: MRT4577_100213C.1.pep
TDQPDAESGSASGRVERAHQEAQQDVTATALRATSLPPPEPGPRLAAGATRTLLLVATAARATQIGQGSHPPVGAARRRRQGKQISFRGGSTSTGGDGSRLGGGDGANGVQSGGRSSRHWSVEERRGEASRRLRSQ

SEQ ID NO: 184896 - protein, 88 aa, Zea mays
  unsure (1)..(88): unsure at all Xaa locations
  Clone ID: MRT4577_100214C.1.pep
MAGDNDLIALGVRTSPIVIRVRIELNLKGLAYXYAEEDLSNKSXALLLRSNPEHMSVPELLHAERAINESEVIHADIDXVXSGTGPDV

SEQ ID NO: 184897 - protein, 51 aa, Zea mays
  Clone ID: MRT4577_100215C.1.pep
GSGTYITRSATTLIFVSMAWFFKLSAGRYHPEHNNGCFFFIGYTETFVCSP

SEQ ID NO: 184898 - protein, 167 aa, Zea mays
  Clone ID: MRT4577_100217C.1.pep
YLTSLTRGWGHGDPAQRPSFASVCRVLRYVKRFVVMNVNPAPAEQPDAVVPPPVPAVDYLDIEASLQRRFPAWQPGSGNAAPRVSDVPFQMFAYRVAEKERSRAAILHIGGGKGASDSSSDGNSLCGDESGGTVLSEAEALTVSSRGATTTRSLPEPAGNRKVDGSR

SEQ ID NO: 184899 - protein, 125 aa, Zea mays
  unsure (1)..(125): unsure at all Xaa locations
  Clone ID: MRT4577_100219C.1.pep
FIGRIGRXIEDYKCSWLVVQALERADESQKRILFVSRLQTSLKRLEVCCLKVYTIDGSXENYGKKDPACVAKVKNLYKELDLEAVFQEYENESYKKLIADIEAQPSIAVQKVLKSFLHKIYKRQK

SEQ ID NO: 184900 - protein, 94 aa, Zea mays
  Clone ID: MRT4577_10021C.1.pep
NTRVVGPGKFPPILSVGNCFFKGSVVRDVLLPQDGGGMNIPPDAPRREAPGGFSLWAPAPPPGGWCFIPHCSKHACSVCGKQMPPFSSLGPPLP

SEQ ID NO: 184901 - protein, 98 aa, Zea mays
  Clone ID: MRT4577_100220C.1.pep
LVRPGGVIVYSTCTINPGENEALVRYALDTYKFLSLVSQYPKVGGPGIVGSCELFNKTYTEEWLREDEADLVQRFDPSSSVDTIGFFIAKFDVGEKDE

SEQ ID NO: 184902 - protein, 51 aa, Zea mays
  unsure (1)..(51): unsure at all Xaa locations
  Clone ID: MRT4577_100221C.1.pep
MAQKAQLSDDEKLHLVDQNFINSPVSHADXDATRLVWLPSEKQAFKAASIK

SEQ ID NO: 184903 - protein, 45 aa, Zea mays
  Clone ID: MRT4577_100222C.1.pep
NGNFPTPMCVKMFKYCSYSQIYYCHLQQFIKANTHLQIEVAKPNS

SEQ ID NO: 184904 - protein, 71 aa, Zea mays
  Clone ID: MRT4577_100223C.1.pep
MAGRFGLARGGAAVAASLQHESVDTHLMKVLPTLILTDLKELGVAKWTGARGKNSEKRGNYTKAIERQWER

SEQ ID NO: 184905 - protein, 91 aa, Zea mays
  Clone ID: MRT4577_100224C.1.pep
KKIPHLIQSYSRPKRGPPQVASQQGISGNKKKNVLHNWSKTVQSLSFFKTKTCMGTSPINYKKTKPGPLSPIFCQRGTHLKKKGLRGRGNP

SEQ ID NO: 184906 - protein, 255 aa, Zea mays
  unsure (1)..(255): unsure at all Xaa locations
  Clone ID: MRT4577_100225C.1.pep
MTVPNGSAKGNTFLFTSESVGEGHPDKICDQVSDAILDACLKEDPLSKVACETAAKTGMIMVFGEITTKAHLDYQKIIRNAIKDIGYDSSEKGFDYKTCNVLVAIEQQSPDIAQGLHYEEALEKLGAGDQGIMFGYATDETPELLPLTVLLSHKLNAAMTSARKDGSLPWLRPDTKTQVTIEYAHDGGAVIPLRVDTVVVSAQHSEDITTEKLXREEIXEKIXQKVIPANMLDDXTVXHIQPSGSFIIGGPQGDA

SEQ ID NO: 184907 - protein, 87 aa, Zea mays
  Clone ID: MRT4577_100226C.1.pep
WMTYICKLRMLFCKTMKWQLHDRMLLRFLRFLCSHLNFACISVCLTRDFAGTNNQVFEQYLGTILQASTLRFATSTKITLPSRNCRR

SEQ ID NO: 184908 - protein, 98 aa, Zea mays
  Clone ID: MRT4577_100227C.1.pep
NPRFLTALRREKDGPSRPPRGFWPVFSGFVTTNPKGGQHTEQGPPPQKKSSLRGKTSPGRSPIYNRGPGGFFPGGIPTNFPTYYTPLKHTLFWFFRPL

SEQ ID NO: 184909 - protein, 274 aa, Zea mays
  Clone ID: MRT4577_100228C.1.pep
MIAHFLGFGASVGRNSLAPSPPPVRGARSVHLGRGDLRGDETMLRLSRFLPSACRRGFDLKESLWSGSLTFQQAVSTAATNLDGNLSGKKFASYTVFKGKAALSIHPILPSFSKLESGGSRVSKNGSVMLTFFPAVGQRKYDYTKKQLFALSPTEVGSLISLGPAESCEFFHDPSMKSSNEGTVKKSLSITPLGSDSGYFVNITVVNSAERTNDRLSVPITKAEFAVIRTTLSFALPHIMGWDQALTNHHPAPAPPASSRPTVERPHPDSEWER

SEQ ID NO: 184910 - protein, 95 aa, Zea mays
  unsure (1)..(95): unsure at all Xaa locations
  Clone ID: MRT4577_100229C.1.pep
VKPEVAXGAPEKRTFRKYSYRGIYLDALFDMSTDDLVQLFPARARRRFQRGLKRKTMALIKKLRKCKKDAFCXEAIXPVMTHFRNMIIVSXMIGS

SEQ ID NO: 184911 - protein, 137 aa, Zea mays
  Clone ID: MRT4577_10022C.1.pep
TCYRKSNSWRPGESRGAGSWRGGCGARVAALLGGRLPGSGWRRGGERSEEREPLGRERSLASWREQGRWFLARRAWGSGGCAARRPVAWQRLEKRRGEKRGERGRAAWEREEQGEATATRGGGGLRENRAGTTFFFF

SEQ ID NO: 184912 - protein, 141 aa, Zea mays
  Clone ID: MRT4577_100230C.1.pep
AHSVCSHHRCIIMLLQSQLIGKHYINKTSHCMAVYHQLLPNTCPTTLVRALVTGDVRVGSGRQRGQLHMLCCHPRPKFLHQVSPSYGSDCGMLSVSVAATDSGRRRPSADRACSRASDSSQPGRQVASELLLRQTPGAGRP

SEQ ID NO: 184913 - protein, 101 aa, Zea mays
  unsure (1)..(101): unsure at all Xaa locations
  Clone ID: MRT4577_100231C.1.pep
NHSNKLLFQQLQSHFNQQQQLYVYTLLSRQQAMELRXVRGGDDMRLHYLCEKLGVKLVGRKGLGPGADAVIASIKAERNRSRTRPGPSKLKKSLKPNVAAS

SEQ ID NO: 184914 - protein, 95 aa, Zea mays
  Clone ID: MRT4577_100232C.1.pep
FGRPRDAGMVGAVCDCWGRRESGLGPTVTDTKGLYDSHGVHTGRCLVLLGRLLPDCSWPHRRGHDPGSETPSVNHEEPVRQWPGGITPGENRQER

SEQ ID NO: 184915 - protein, 71 aa, Zea mays
  Clone ID: MRT4577_100233C.1.pep
VCGRYVVSPCQGRVLSTATRSPGCRVWSAPSGFGVLARKDSVDMTARSEGAIGSYIIGRRRAALYLPEWRA

SEQ ID NO: 184916 - protein, 38 aa, Zea mays
  Clone ID: MRT4577_100234C.1.pep
RAANGQIVALLVLIILIGETPVKKKDMNVYALVVVSYN

SEQ ID NO: 184917 - protein, 85 aa, Zea mays
  Clone ID: MRT4577_100235C.1.pep
VWTTTRCQQDIDWRIKALQLAANAVQEPKATKHYDKPSWEGGSIFLPMKIKLDIAKSFKQHIQRTYALGAAWAEKIAPPLLLNDA

SEQ ID NO: 184918 - protein, 51 aa, Zea mays
  Clone ID: MRT4577_100236C.1.pep
KKKEKQKKRGKGSSALAVSRSYSTPACGPHSRFNGWHLILNYTEGQTYNVT

SEQ ID NO: 184919 - protein, 115 aa, Zea mays
  Clone ID: MRT4577_100237C.1.pep
SLPAHTDALQIPLRVLQSRLIKKGGATVAQVKVTWSGMDESLATWEVLKALQDRFPHAPAWGQAAFQERGNVSSGVQDSRAVDRDADGESEEGAAPRPQRVKRRSVKVFGPEWVV

SEQ ID NO: 184920 - protein, 67 aa, Zea mays
  Clone ID: MRT4577_100238C.1.pep
FHDTVNIFVINVELIEYYDNYCVQYFVIFSWHCEIMFGTLVLHLRVIDGVKILCSSINKECSARTFH

SEQ ID NO: 184921 - protein, 60 aa, Zea mays
  Clone ID: MRT4577_100239C.1.pep
CWFFITGGGVVILGVGVFSLRRGFLWFNGGGGGLKVGGARLGHPALENFLYPMGGGLFFQ

SEQ ID NO: 184922 - protein, 199 aa, Zea mays
  unsure (1)..(199): unsure at all Xaa locations
  Clone ID: MRT4577_10023C.1.pep
MQVQVQVQQRGSPAPTAELEVSLREFALSDADTRAFMSWASDPRVVRFQRCDAYXARGXARRYITDHVLPHPWYHAICAGAGAPLPVVGSISVKAGPAEDGGPFRASVGYRLARAHWGRGMATRAVRAEAAAMFAARPWLLRLEAVADVDNPASQRVLEKAGFAREGVLRKYVLLKGRPRDMVMFSIVVETEQDKPDGP

SEQ ID NO: 184923 - protein, 138 aa, Zea mays
  Clone ID: MRT4577_100240C.1.pep
NSARAPAFVCHFYNVYFAHASGGRIIGKKVAEKLSLQKELEFYEWEGDLSQLQRNVRSRLNRVASVRPPLTEATICLPFRSCDLRLSPSVRRFAETNLHAPALFCCQGWSRVEKDRCLGEMEKAFTCSVDLRRHMFPC

SEQ ID NO: 184924 - protein, 38 aa, Zea mays
  Clone ID: MRT4577_100241C.1.pep
VAGVLYGLALSLTSYPLFTGDKSGQTITNEKNMGGADT

SEQ ID NO: 184925 - protein, 260 aa, Zea mays
  unsure (1)..(260): unsure at all Xaa locations
  Clone ID: MRT4577_100242C.1.pep
APKEVRSWKRHSVALPTNATIPAVQETGLCKNLLQEYAQKMNYAIPSYTCNKQGPYICTVEXWWNXQYIGATARTKKEAEIKAARTALLAIQGQSEGCANGTTKYIVVPGKRQGKEIEKKPVETPKSLKTKKGGFKKQRNKNKFIKKNGQEVNEEKDETGVPGDAHHSDVPVKPAVTTEDPLTNTVMMQPDEAGPFEHEPTGDTAMLQPDEDAWPSEPEPTGHTAMLQPDGEATKVEQXEQLSDTAMLQPEDEGGKRKPE

SEQ ID NO: 184926 - protein, 133 aa, Zea mays
  unsure (1)..(133): unsure at all Xaa locations
  Clone ID: MRT4577_100243C.1.pep
QQSSLRPPAPRGRGARGFGGRFGDQPRRIFCLFCXKQKEIAEAAAQQAQPKQVMHTASYHSPYIPEYEGNHPAVSAASASQPSASRQQPPPPPPLQQGQQPEGSQYAPHQRDFREQSEARTVNSTVPESKHIY

SEQ ID NO: 184927 - protein, 459 aa, Zea mays
  Clone ID: MRT4577_100244C.1.pep
MPPKKASTTGAGTLQSLDPNQDVISLREARSQKRKAVSPTPPDDDLDQEIQNLEILQQQVQRRKEKMARLADLQRQIDEASEEVRHFVQGDQTRRPPRRELHQEDFRNEDDWYEDLHHGNFAFDDASPLSTELQATPWPQTYKPPQLPIYDGHSDPKQFLMSYEATISSYGGNTAVMAKSFVMACTQDHEEYLQAYVRRFLRLRAQAPTVPNEIVIEAMIKGLRPGPSAQYFARKPPQTLEKLLQKMDEYIRADNDFRQRREEAFRFSEMTRGFGGRFYPRHVRSIHNSNQNDDKGSQQQRPQYSSQASGQQQSSFRPPAPRGRGARGFGGRFGDQPRRIFCLFCGENKGHTTRMCHVTIQKQKEIAEAAAQQAQPKQVMHTASYHSPYIPEYVGNHPAVSAASASQPSASWQQPPPPPPLQQGQQLEGSQYAPHQRDFREQSEARTVNSTVPESKHIY

SEQ ID NO: 184928 - protein, 505 aa, Zea mays
  Clone ID: MRT4577_100245C.1.pep
MPPKKASTTGAGTLQSLDPNQDVISLREARSQKRKAVSPTPPDDDLDQEIQNLEILQQQVQRRKEKMARLADLQRQIDEASEEVRHFVQDDQTRRPPRRELHQENFRNEDDWYENLHHGNFAFDDASPLSTELQATPWPQTYKPPQLPIYDGHSDPKQFLMSYEATISSYGGNTAVMAKSFVMAVRSVAQTWYSSLRPGTITSWQKLKDMLITSFQGFQTKPVTAQALFQCTQDHEEYLQAYVRRFLRLRAQAPTVPNEIVIEAMIKGLRPGPSAQYFARKPPQTLEKLLQKMNEYIRADNDFRQRREEAFRFSEMTRGFGGRFYPRHVRSIHNSNQNDDKGSQQQRPQYSSQASGQQQSSFRPPAPRGRGARGFGGRFGDQPRRIFCLFCGENKGHTTRMCHVIIQKQKEIAEAAAQQAQPKQVMHTASYHSPYIPEYVGNHPAASVASASQPQASWQQPPPPPPLQQGQQPEGGQYTQNQRDFREQSEARTVNSTVPESKHIY

SEQ ID NO: 184929 - protein, 543 aa, Zea mays
  Clone ID: MRT4577_100246C.1.pep
MEEAHLTPATPSPFFPLAGPHKYIALLLVVLSWILVQRWSLRKQKGPRSWPVIGATVEQLRNYHRMHDWLVGYLSRHRTVTVDMPFTSYTYIADPVNVEHVLKTNFTNYPKGIVYRSYMDVLLGDGIFNADGELWRKQRKTASFEFASKNLRDFSAIVFREYSLKLSGILSQASKAGKVVDMQELYMRMTLDSICKVGFGVEIGTLSPDLPENSFAQAFDAANIIITLRFIDPLWRIKRFFHVGSEALLAQSIKLVDEFTYSVIRRRKAEIVEVRASGKQEKMKHDILSRFIELGEAGDDGGGFGDDKSLRDVVLNFVIAGRDTTATTLSWFTHMAMSHPDVAEKLRRELCAFEAERAREEGVTLVLCGGADADDKAFAARVAQFAGLLTYDSLGKLVYLHACVTETLRLYPAVPQDPKGILEDDVLPDGTKVRAGGMVTYVPYSMGRMEYNWGPDAASFRPERWINEDGAFRNASPFKFTAFQAGPRICLGKDSAYLQMKMALAILFRFYSFRLLEGHPVQYRMMTILSMAHGLKVRVSRAV

SEQ ID NO: 184930 - protein, 277 aa, Zea mays
  unsure (1)..(277): unsure at all Xaa locations
  Clone ID: MRT4577_100247C.1.pep
MHYSAHDPDHPAGGDPWASSPQANRSSFGQPPTNDIPSSPLPAQASPYGENSEQYGYLGEQDAQSRPSTAPENGDQSQQQQAHGQDAPRSPQPQQQGQQGQQPQRYHGTRPQRQQQQQYKLQAKVTGLERNGKKDPIIRFDVYTNLPKFRTTQFRDVRRLHSEFVKLGEHLISACPEAIVPAVPPATTSAGAGTDEDEARLKISIQRWLNIVCSNEILIRDGEMVFFVESDFXANSPVVRRKQPATGVRRKMIKQFAPPPDDTPELAAXRPVXKAFY

SEQ ID NO: 184931 - protein, 78 aa, Zea mays
  Clone ID: MRT4577_100248C.1.pep
ERITMKSAGIIPTTVDLTASTYLEVNVNGDSDSGCYCRFSQTDEVIIPEANHELSKHVTLDDAPAAAAVSAHASVLPP

SEQ ID NO: 184932 - protein, 81 aa, Zea mays
  Clone ID: MRT4577_100249C.1.pep
GRGTSYQSHWTKIAANKNLAHSSLVRPHSGGKHREQQGYQHLIRRWNGHCHCRQNRTVSRFYRKLKSLHRGRDGVRNLFGT

SEQ ID NO: 184933 - protein, 66 aa, Zea mays
  Clone ID: MRT4577_10024C.1.pep
PCYDATVMWDHTSGRFKRVGCRLFRNQLDAQSGINDLTGKRVGNPEILCNRAMNGANAGEEIQTLD

SEQ ID NO: 184934 - protein, 54 aa, Zea mays
  Clone ID: MRT4577_100250C.1.pep
RVQMNKQMTLTELSAAIHVDYRARASNNPSYRLAAHVAENRGHSKFHKTKRNCP

SEQ ID NO: 184935 - protein, 64 aa, Zea mays
  unsure (1)..(64): unsure at all Xaa locations
  Clone ID: MRT4577_100251C.1.pep
VXRVLYTVPCLENLENSELQVTAPTFNHNTPSRTKVASSALNLTSSLDYARGRSHPRRHPIRWR

SEQ ID NO: 184936 - protein, 53 aa, Zea mays
  Clone ID: MRT4577_100252C.1.pep
AGKTTIGQLQITNQVTRAIFEIYTGVVPMNYIALRAPERTQTNLLTGTGFTNL

SEQ ID NO: 184937 - protein, 172 aa, Zea mays
  Clone ID: MRT4577_100253C.1.pep
TGGAQFPTPFEFGPFSPKPSFFQGNGFTLWVKNTPRARGGVSLLARARGVPGTKPSMGSSRGPKDSLRARGLKSKPQPKLGARGVFGFNPFPTRGKLVLGFYGAPGVIFFSLKGGLTPMGPTLGRKNTGGRALREGSPPGHFAMAGFFAPPLVFKFYPGWGGPPPPWLVGKF

SEQ ID NO: 184938 - protein, 87 aa, Zea mays
  Clone ID: MRT4577_100254C.1.pep
RCPSIETISARRTHKVPCVQFAFSDDTILSESIGRAVDMRLYPNRISCVTPRQTCPPPEGFGRNLRSKTRWFAGLCVVTTANEPSKY

SEQ ID NO: 184939 - protein, 161 aa, Zea mays
  Clone ID: MRT4577_100255C.1.pep
TASPPPGRTFRRPCTRGPECRWLCAGSGSTHRLWASDKEAVGLVVSHLKKMLPDATEPTQYLVSRWGSDPNSLGSYSCDLVAKPADVCARFAAPVENLHFAGEAASAEHSGSVHGAYSSGIAAAEECRKRLLALKGIPDLVQVAAWEEMAGAVAPLQICRT

SEQ ID NO: 184940 - protein, 49 aa, Zea mays
  unsure (1)..(49): unsure at all Xaa locations
  Clone ID: MRT4577_100256C.1.pep
NLNLYXTKFIYHSRYFPGIIFDIFMYKILYAYVLRVCSCQMLFFDLSTF

SEQ ID NO: 184941 - protein, 487 aa, Zea mays
  Clone ID: MRT4577_100257C.1.pep
MDPNGLKTGGLLLPTIERRCTSPPSVIVIGGGISGVAAARALSNSSFKVTVLESRDRIGGRIHTDNSFGCPIDMGASWLHGVCNENPLAPLISYLGLRLYRTSDDNSVLYDHDLESYALFDKDGNQVPKETVDKVGETFERILEETVKVRDEQEHDMPLLQAISIVFERHPHLKLEGLDDQVLQWCVCRLEAWFAADADEISLKNWDQERVLTGGHGLMVNGYYPVIEALAQGLDIRLNQRVTEITRQHNGVKVTTEDGTSYLADACIISVPLGVLKANVIKFEPELPQWKSSAIADLGVGTENKIAMHFDRVFWPNVEVLGMVGPTPKACGYFLNLHKATGNPVLVYMAAGRFAQEVEKLSDKEAVGLVVSHLKKMLPDATEPTQYLVSRWGSDPNSLGSYSCDLVAKPADVCARFAAPVENLHFAGEAASAEHSGSVHGAYSSGIAAAEECRKRLLALKGIPDLVQVAAWEEMAGAVAPLQICRT

SEQ ID NO: 184942 - protein, 106 aa, Zea mays
  Clone ID: MRT4577_100258C.1.pep
VIARQCLEALVYLHRLRIIHCDLKPENILIKSYSRCEIKVIDLGSSCFLTDNLCLYVQSRSYRAPEVILGLPYNQRIDIWSLGCILSELYTGEVSMFYLIEMLGGL

SEQ ID NO: 184943 - protein, 109 aa, Zea mays
  Clone ID: MRT4577_100259C.1.pep
ARAAFTSPCYCTSSISAGVHAAFMAAWFLESLSSSQCDACIGQRSVRGSVSQHFGCCESLCNGSCFPPGHARDASVARYVHIHSALPAQALSSLSGHAVQEHVQGIAAA

SEQ ID NO: 184944 - protein, 92 aa, Zea mays
  Clone ID: MRT4577_10025C.1.pep
DRPGMARLDQPTRRSFSDPPAAAAGRAEGAPVADPPAPAKLKGEQPTWRKAPTRQTRDVHRRTTENKRNRGAVSDGSESNCTVTTDGEEQDN

SEQ ID NO: 184945 - protein, 63 aa, Zea mays
  Clone ID: MRT4577_100260C.1.pep
MVAACQSTASTYALLLLLLFAAAVAVSSSSGLRRVQDQDRSALLQIKNAFPAVDLLQQWSPDS

SEQ ID NO: 184946 - protein, 67 aa, Zea mays
  unsure (1)..(67): unsure at all Xaa locations
  Clone ID: MRT4577_100261C.1.pep
TPLYFPFFTXKPQETSSKYMTSKPILPIDENVHKVNKYGGKKLPPPTITLFWGNKINPFCTQFKRSP

SEQ ID NO: 184947 - protein, 114 aa, Zea mays
  unsure (1)..(114): unsure at all Xaa locations
  Clone ID: MRT4577_100262C.1.pep
KRVYFKKKQTGSKTKMAPGNPKGFFSPFLARAVKNGVWVSHKKKWGPGPMLLLNPPPISGFLKNPGPKIWAFNCYSRRLKSWKRGPKKKKKKKKKKKKKKTKKKKKKKKKXRKN

SEQ ID NO: 184948 - protein, 136 aa, Zea mays
  unsure (1)..(136): unsure at all Xaa locations
  Clone ID: MRT4577_100263C.1.pep
TESYYGGNSVWTRPASRKGKKKARQPGGLGHGSGGPAGAARGSNPRPNAGGEEEFLLVPATRLAAERSDDAPGQPVLLSRVFKSERIELSEDRLTAASTKGFRMVRATRGVAAGAWYFEVKVVHLGPTGHTRLXGW

SEQ ID NO: 184949 - protein, 80 aa, Zea mays
  Clone ID: MRT4577_100264C.1.pep
RPRVRGGSQREERLDVLDKRLEEVKLDKEAYWWYRDLRKYGTVPHAGFGLGFERLIMFCTGIENIRDVIPFPRWPGHADF

SEQ ID NO: 184950 - protein, 94 aa, Zea mays
  Clone ID: MRT4577_100265C.1.pep
KRTSLSFGGSVPFPFLLWPRRSTPLELPASDSRTDLGFFFRPAGLCQLPGTEKKAAVSPLYRFEVLLASLYQVRCICCGNACRCFGVFPGRELL

SEQ ID NO: 184951 - protein, 132 aa, Zea mays
  unsure (1)..(132): unsure at all Xaa locations
  Clone ID: MRT4577_100266C.1.pep
SASSLSPAGLVERRARRRRMGXGRGVSYGGGQSSLSYLFGGGGGDEAAGGPAKPAGGGGGRAPVPAAADGEKLKGIPGGVRGNQSQTNNYLRAQGQNXGNXLTDRPGSKVHAGAGGGXWVGYLXGGGACGSK

SEQ ID NO: 184952 - protein, 32 aa, Zea mays
  Clone ID: MRT4577_100267C.1.pep
PMTLLSGAIPFAIGSSCGLSTSTMACTLLNCC

SEQ ID NO: 184953 - protein, 135 aa, Zea mays
  Clone ID: MRT4577_100268C.1.pep
NASGGGGVAVGLFSPVWQIPRPATKPAPVPSASEPFTDRPAPPSPWHKEKPASAARKPGLGSGVRGLNLSVNFCIGYRNQVSCRRADVGTARGPGPGGGGGGLVGIKGVFSKKVHSIVCKLESCNDSVYCWSQKL

SEQ ID NO: 184954 - protein, 57 aa, Zea mays
  Clone ID: MRT4577_100269C.1.pep
DLRALPAPLRGLSCELMAWGPQVCAQPLIPVRPATMPADATLGRWLDMVPFLTLFTS

SEQ ID NO: 184955 - protein, 204 aa, Zea mays
  Clone ID: MRT4577_10026C.1.pep
MGFESSAETERFLCERLLDAAQPIAERFRALFSLRNLRGDGPRHALLQAARDPSNLLAHEAAFALGQMQDVEAIPALEGVLKDLSLHPIVRHEAAEALGAIGLEKSISLLKESLAADPAVEVQETCELALRRIEGQKNASGAESTTISPYLSVDPALPAKQGLSVEQLRELLLNEQEKMYERYAALFALRNDGGDYAVSAIIES

SEQ ID NO: 184956 - protein, 46 aa, Zea mays
  Clone ID: MRT4577_100270C.1.pep
YHYLIMKRKGTNKSQRFYKFSQHYYLVLLLYFFSYQFWPLHIIVLS

SEQ ID NO: 184957 - protein, 71 aa, Zea mays
  Clone ID: MRT4577_100271C.1.pep
HGQPRLRLTAEGAHGQRQQPLRAELQVPRRRRQEAQLCLRHAGVQCGRCLACVQLCVADEYRHRVVQCRVM

SEQ ID NO: 184958 - protein, 92 aa, Zea mays
  Clone ID: MRT4577_100272C.1.pep
ACFLSVSPHACGDRVHRTCVMSPGRTLIQLHSGNDMPRNGVRGAEQEPWHNGRDVRERAQAAHVSDHAGLHCPVPHGLAVDPQPSFLVREKE

SEQ ID NO: 184959 - protein, 93 aa, Zea mays
  Clone ID: MRT4577_100273C.1.pep
SRWVFISSHAHRTFRCTMTNTPTHGLNYRLNTLPDQMHEKNTCLLSNKPLLAAHKTCLGHNHHWDPLNLVVPFAMIGPTLGFVGCLAKIGRIV

SEQ ID NO: 184960 - protein, 165 aa, Zea mays
  Clone ID: MRT4577_100274C.1.pep
MHQPWVPPLEETLETTEVTEASDEPMEEGDDKEPKLKEWIARSITHDTSPECHFHEELDYLLYHVFGPSGCEYGVDDGLDIKYYLCHPSGSEAGAIVSPLDYALNELKRSRKEIWQFGIEMVESRHRDRGPPTCAKVQYPHQSPQHPQHTYDSLAVVKVCLGELH

SEQ ID NO: 184961 - protein, 64 aa, Zea mays
  Clone ID: MRT4577_100275C.1.pep
MFLQYYLNEQGDRVYTLKKFDPMGQQTCSAHPARFSPDDKYSRHRITIKKRFKVLMTQQPRPVL

SEQ ID NO: 184962 - protein, 90 aa, Zea mays
  unsure (1)..(90): unsure at all Xaa locations
  Clone ID: MRT4577_100276C.1.pep
MATKGFTGIMLHAVSTCLVNATIIXQCSQASYSSXILESYFPSIIASICQNPDLXPYTLQQAIVASIISLSSLKFIQXSPILRQSLRQTI

SEQ ID NO: 184963 - protein, 185 aa, Zea mays
  Clone ID: MRT4577_100277C.1.pep
GTCLIFIPYPVHRKSLEGNFSACSFIFPSVLGVSGMLVDQPVTPCLPGTPHGCRPRSSPRQGQPRRRLGEEDTHAQGMLVKFGDVLDVFAFTCVAVLKLLHRVGMRALSSVRESRLSSRHAQGTVQRRQSTSATLPVWPWISPSPLRAPPVRPRRPRSSPQLLVFVHRRSSQAVVGSAPPSRPGF

SEQ ID NO: 184964 - protein, 101 aa, Zea mays
  unsure (1)..(101): unsure at all Xaa locations
  Clone ID: MRT4577_100278C.1.pep
XAVACVCXFXFRLAXSSSXRFAGPPGXXARLCCVFXFRRPLXWXAPGXSXWLWSAARCAAPXCGAGSFRWPSWAGRPCCPPSWAPXXSPGSVGXAXAPSRX

SEQ ID NO: 184965 - protein, 89 aa, Zea mays
  Clone ID: MRT4577_100279C.1.pep
EGINVPCMFYMVAIPERSVTERLGVVTVGTLGTSLASSIMKGAGHQSNPPEKHKLAPSTEDKAGIRWSPRGIEAGARTKGERAMPIACS

SEQ ID NO: 184966 - protein, 68 aa, Zea mays
  Clone ID: MRT4577_10027C.1.pep
GSFPVMFFEPVLVIMVILYDLLLGFRVSVSFTIVVGFIFLVILCAGRLGASTIRIQHECPPDVECVSR

SEQ ID NO: 184967 - protein, 77 aa, Zea mays
  unsure (1)..(77): unsure at all Xaa locations
  Clone ID: MRT4577_100280C.1.pep
RSSWGDPEIKLFEFYKVEDPEHLFGEDQGWASGISAPAXQGLLEVXGEGGADNVSQGXXEATPYGSTELGRDLLXES

SEQ ID NO: 184968 - protein, 118 aa, Zea mays
  unsure (1)..(118): unsure at all Xaa locations
  Clone ID: MRT4577_100281C.1.pep
SSAYDDQFKQLISAGKDPGRAYWELVIKDIQKSCQLFXPSTIKLIGLIGIFSXKGSXRWPKTLKGLVKXGKWVHKMVKPPKGYIKNPTSXKGVLSFKKVFVIALTVNATLIFSIAKNK

SEQ ID NO: 184969 - protein, 46 aa, Zea mays
  Clone ID: MRT4577_100282C.1.pep
LTVPFTLFSILNPEPFLNIIVPLNKTPPLYSFLSGCLQFKKTPPPR

SEQ ID NO: 184970 - protein, 88 aa, Zea mays
  unsure (1)..(88): unsure at all Xaa locations
  Clone ID: MRT4577_100283C.1.pep
LYTALTQLAVAKLAHFLQQLLPFNHMSVSTSDGYVQQRHQFLNPLPVANPLVAXAFHQQQQLLPYNQFSLMTPALLWQQPIVGXGAIF

SEQ ID NO: 184971 - protein, 110 aa, Zea mays
  Clone ID: MRT4577_100284C.1.pep
MRRNHGRQWIWGRVLHLGILDADRCARKTVPSAYWWPRGNREDTGSPHLTQWIRHGPYLAVEGVHHGIFANEQATVESEVQQVEIAEQELIEGEEQVVQEELQGEEFDLI

SEQ ID NO: 184972 - protein, 35 aa, Zea mays
  Clone ID: MRT4577_100285C.1.pep
KVWCGFQHLMLLEWLIPLPCYRVIRNNYGCLNCCF

SEQ ID NO: 184973 - protein, 128 aa, Zea mays
  unsure (1)..(128): unsure at all Xaa locations
  Clone ID: MRT4577_100286C.1.pep
CFMTFISIHSVIIYVVFFGACMRCTRLCSLKPGVTEVVSEEMLTVGRNLDRNGQTLTYLSYSNSFYTYLTLILSILILILSHLLLFHSDXLYLFYSKTRWISHLGILQLMNFLRDREPRTKFKTIFSI

SEQ ID NO: 184974 - protein, 69 aa, Zea mays
  Clone ID: MRT4577_100287C.1.pep
MAMAVSGRWTRVRTLGRGASGAEVFLAADQASGDLFAVKCAPAAAGAELLRRERALMAGLRSPHVVPCI

SEQ ID NO: 184975 - protein, 51 aa, Zea mays
  Clone ID: MRT4577_100288C.1.pep
LHVTRVVMPLFGSKILALKINWPAIYHTWSVDSSKPVFRSLAADFNHYADS

SEQ ID NO: 184976 - protein, 578 aa, Zea mays
  Clone ID: MRT4577_100289C.1.pep
MATVSLALSLRFAPSSRPLSLHRRRPDAVTCRATTTTFHRLDAVAVREEESKFRRAAAEGCNLVPITRSIFSDHLTPVLAYRCLVKEDDREAPSFLFESVEQGSEGTNMGRYSVVAAQPAMEVLAKANKVTVMDHELKSRREHLVPDPMKIPRTIMEQWNPPQVTDGLPDAFCGGWVGFFSYDTVRYVETKKLPFSKAPHDDRNIPDMHLGLYTNVIVFDHVEKKMHVIHWVRTDCYQSLDEAYEDGTNRLESLLSKLHCFNVPTLSSGSIKLNVGGFGSATLKSNMSKEEYKNIVVQAKEHILAGDIFQAVLSQRLERRTFADPFEIYRALRIVNPSPYMAYLQARGCILVASSPEILTRVQKRTVVNRPLAGTIRRGKTKAEDKVLEQLLLSDEKQRAEHIMLVDLGRNDVGKVSKPGSVKVEKLMNIERYSHVMHISSTVTGELRDDLTCWDALRAALPVGTVSGAPKVRAMELIDELEADMRGPYSGGFGGISFNGDMDIALALRTIVFPTASRFDTMYSYANGKSRQEWIAHLQAGAGIVADSKPDDEHQECLNKAAGAARAIDLAESTFLQE

SEQ ID NO: 184977 - protein, 53 aa, Zea mays
  unsure (1)..(53): unsure at all Xaa locations
  Clone ID: MRT4577_10028C.1.pep
LPPFSTSTXPGEPRAVTKTSKQGDLSTCLLLLLPTDSVATNVDYCTKNDYLVK

SEQ ID NO: 184978 - protein, 141 aa, Zea mays
  unsure (1)..(141): unsure at all Xaa locations
  Clone ID: MRT4577_100290C.1.pep
MEGEAVPKNERKAAGGGGGGVSNDGGASANARRRWKGGGGRHHPIIQAYPALLPLPLHARRNGIIALPLPPPVLVYLHQPPPPPLLFPKVPACYGKPTGPPLLRGPPWRSRKPSSXTXAVTAELVPLPHDTELIQHKCFIH

SEQ ID NO: 184979 - protein, 249 aa, Zea mays
  unsure (1)..(249): unsure at all Xaa locations
  Clone ID: MRT4577_100291C.1.pep
MEEEVAALVIDNGSGMCKAGFAGDDAPRAVFPSIVGRPRHHGIMIGMGQKDSYVGDEAQSKRGILTLRYPIEHGVVTNWDDMEKIWHHTFYNELRVAPEEHPVLLTEAPINPKSNREKMTQIVFETFNAPAFYVSIQAVLSLYASGRTTGIVLDSGDGVTHVVPIYEGFALPHAIARVDMAGRDLTDYLMKILAERGYTFSTTAEREIVRDIKEKLCYVALDFEQEXQTAAQSSGLEKXYELPDGQVIT

SEQ ID NO: 184980 - protein, 53 aa, Zea mays
  Clone ID: MRT4577_100292C.1.pep
GSLNYQNRVSHKITVECWFKCRFLAPLRVNVFGRLDKSDDVICWDAWLVARIQ

SEQ ID NO: 184981 - protein, 60 aa, Zea mays
  Clone ID: MRT4577_100293C.1.pep
SVPSVIDTDPSEDPVAGNDHTTPPNLDEHLMPDGSGNELEPHKSDWKSDAPPAMSNGTIS

SEQ ID NO: 184982 - protein, 264 aa, Zea mays
  unsure (1)..(264): unsure at all Xaa locations
  Clone ID: MRT4577_100295C.1.pep
GRVCSERIFQCKRECGGMLDCGKHKCERGCHGGKCGECPLRGRRTCPCGKKNYPRLECDAEAATCGSTCEKVLGCGRHRCPERCHRGPCDGTCRLVVTKACRCGGLKKEVPCYQELTCERKCQRLRNCGRHACKRRCCAGDCPPCSETCDKKLRCGNHKCLSPCHRGACSPCPLMKTISCACGKTCFEVPCGTEKNQKPPKCSKKCNIPRLCRHKLECRPHKCHYGACPPCKLICXERFPCXHTCKERCHGPISPPTPXXTLKP

SEQ ID NO: 184983 - protein, 235 aa, Zea mays
  unsure (1)..(235): unsure at all Xaa locations
  Clone ID: MRT4577_100296C.1.pep
MARGREGEVRTLVLGKYELGRMLGQGSFAKVYYARDLRDGQSVAIKVIDKARLRQTDGMVEQLRREISVMRMVRHPNVVGIREVLASRQRVFVVMEYARGGELFAKVARGRLTEDAARKYFQQLVAAVAFCHSRGVAHRDLKPENLLLDEEGRLKVTDFGLAALPEQLRHDGLLHTQCGTPAYVXAPEVLRKRGYDGARADMWSCGVVLYVLLCGFLPFQHDNYVKMYQKIFKGE

SEQ ID NO: 184984 - protein, 109 aa, Zea mays
  unsure (1)..(109): unsure at all Xaa locations
  Clone ID: MRT4577_100297C.1.pep
MFSLLMLPTLSTYVTNTTIFPQCSQAPITSLFPPYLPSIITTISXNPTLQPYTLQQTISTNNIPLYPLIYQQSPTLSFIQSLIQTIISQQLQQLLLPFINQLTLTKLST

SEQ ID NO: 184985 - protein, 190 aa, Zea mays
  unsure (1)..(190): unsure at all Xaa locations
  Clone ID: MRT4577_100298C.1.pep
VTGTDKANDDGPQSACDTRTHSPCLADTALTRRRRHSRGDAGXRIPLRRIRRSRTQSIWCTPDRPKDLGPFSQKTPSYLTGESPASIPWSTPRGLSGDADTFARRRELEVIHSRGAMLEAAGXVIPQILANNGRRFRGGHAVWLXAQIFCEAGVHYLGNPKLVHAENMQAICAXQVALMAYVEDIYLNFD

SEQ ID NO: 184986 - protein, 110 aa, Zea mays
  Clone ID: MRT4577_100299C.1.pep
ITFNLVRLSISQRHSYPNRSLVVRPPREVQCPTAWVDRTGSAKFLSPPPANKTSSRWPDTVAKMRYMKCHKLLIKRLHAQHNLVMDKKYIYDLLRLLLNVLMYGTVGLHR

SEQ ID NO: 184987 - protein, 230 aa, Zea mays
  Clone ID: MRT4577_10029C.1.pep
MAFESSAETERFLCERLLDAAQPIAERFRALFSLRNLRGDGPRQALLQAARDPSNLLAHEAAFALGQMQDAEAIPALEGVLKDLSLHPIVRHEAAEALGAIGLEKSISLLKESLAADPAVEVQETCELALRRIEGQKNASGAESTTISPYLSVDPALPAKQGLSVEQLRELLLNEQEKMYERYAALFALRNDGGDYAVSAIIESLGVKSALLRHEVAYVLGQLQNKAASD

SEQ ID NO: 184988 - protein, 61 aa, Zea mays
  Clone ID: MRT4577_1002C.1.pep
TLCARFVFLPVKGDTRRATMVGSCCFFGRKSTAFGVASPAESERPASCDVAKLKEVESEVC

SEQ ID NO: 184989 - protein, 83 aa, Zea mays
  Clone ID: MRT4577_100300C.1.pep
LSSSSVGSSVGYVCWVLCGVIGKDFCRNCGLGMQLELGAGETRIWYGSRDRWHDVRHDGVSNNWCRSHRWSERVPSKRRRMRV

SEQ ID NO: 184990 - protein, 143 aa, Zea mays
  Clone ID: MRT4577_100301C.1.pep
MSISSRSARHPFARQASRNSGAFKLRSRSTRAPAVLPPPDEEKPARLRSRRGGENPSVTTERGIHLRIRSLRKRGVGASAAGTAGFVVPAVALRHQKTLEKNKSQRLYNNLIEETATRLVKTRKSRVKALVGAFETVISKIAK

SEQ ID NO: 184991 - protein, 155 aa, Zea mays
  unsure (1)..(155): unsure at all Xaa locations
  Clone ID: MRT4577_100302C.1.pep
DSSYYTPVLXTEETDILTAFKVTPYLGVPSXEAGAEFTAECCTGSMVQTVCTDGLTILDCYKGRCYHIESLSXDPDXYILYVTYXIDLFEEGSDTNMNTSIVXNAFYLKALHALRLDDLRHSPDYSKTSKGPADGIQDGRCNFDTYGXRPLLRCT

SEQ ID NO: 184992 - protein, 105 aa, Zea mays
  unsure (1)..(105): unsure at all Xaa locations
  Clone ID: MRT4577_100303C.1.pep
DTYSLHXTYVRMFVELLVRRLNDASVVDSPKGPSVSSVIAELLRYMVLAVPDTFISLDCFPLPSFVVPDVYGRGALXKITSSGGISSSKRCIAYRYLSXGYAVCP

SEQ ID NO: 184993 - protein, 71 aa, Zea mays
  Clone ID: MRT4577_100304C.1.pep
SFLGQCYQNLCLRRVLSWYHYNMEETAVGFVLLLWKNTVPKALGGAKDCVIEGPKSSWYKLAQVWKRHRVA

SEQ ID NO: 184994 - protein, 54 aa, Zea mays
  Clone ID: MRT4577_100305C.1.pep
DPSEAVKSDVDRARGCRRGQDQRLVGAYGRCWVGRGADLHLKRPVPAARRVPIP

SEQ ID NO: 184995 - protein, 61 aa, Zea mays
  Clone ID: MRT4577_100306C.1.pep
QRLLSVDVLVLAGRGCVWASVVASAPFLKDASSSSKCLACLHCEWVYTSLVTDDPQIAAIE

SEQ ID NO: 184996 - protein, 87 aa, Zea mays
  Clone ID: MRT4577_100307C.1.pep
MHNFVKTLTGKTFTLEVDLSYTIDNVKAHIQDKEGIPPDQERIIFVCKQLEDGRTLADYNIQKGSTLHLLLRLRGGMQIFLKTLTGK

SEQ ID NO: 184997 - protein, 75 aa, Zea mays
  Clone ID: MRT4577_100308C.1.pep
PGNTRFSRQIITPQTKKKKKKKKKKKKRVVVSEDLSPCMCVRDATVSSQRYSNLTYRLLPHNAAIGKISVPFNPT

SEQ ID NO: 184998 - protein, 84 aa, Zea mays
  Clone ID: MRT4577_100309C.1.pep
SIHRYLYVITAYIMQLHTLYTGEECPHKYHDSLFIYFISVVQNESKVHGLNNGTAALASVLSNTDATLPLLSECGSINYFFFTR

SEQ ID NO: 184999 - protein, 67 aa, Zea mays
  Clone ID: MRT4577_10030C.1.pep
NFQATLTKVPSHVVFNLFYRLFHSSNDVPPLEASVFCFLSPISDRVCSLCFKRFIFCSSRLAPFNQM

SEQ ID NO: 185000 - protein, 75 aa, Zea mays
  unsure (1)..(75): unsure at all Xaa locations
  Clone ID: MRT4577_100310C.1.pep
PTRPPTRPAYAMAIAPYSNTQGTCDKTTAAAVLXYAPTTSRNKTLPPLPALPLDNETGAVSNFSRNFRSLMSARD

SEQ ID NO: 185001 - protein, 85 aa, Zea mays
  Clone ID: MRT4577_100311C.1.pep
LSPFLPLSPGHIDLCFGQGRPRKRPRREMMLAILDRRPAGQDKTPTIKGWLVRLEGVRGGGLGERCGGAVYNLPPIIHSNVLLVA

SEQ ID NO: 185002 - protein, 153 aa, Zea mays
  unsure (1)..(153): unsure at all Xaa locations
  Clone ID: MRT4577_100312C.1.pep
KTYIFQNGKKEKKLYNRGERLRGKGGGGTESGKGEGGKSKKDGGREAARGKGGNQPGYRRQRGTAGPTTKGNQEPAGRSRGKAALRKKGGGSGAPRGERPGEGKRKRPTSKNPRXGTLGKTTPPKGGRGKTRKKGGKEQPQLRGGKKQKGGRR

SEQ ID NO: 185003 - protein, 117 aa, Zea mays
  Clone ID: MRT4577_100313C.1.pep
MWDIVARSSWNLMAYFFPQVALQCAYPWGREPAGSSCSHLYCRASYTFSSSSARSEPHCSADCIHSVIHLAIHVGSHSSCRSGCTSCEGSLSRSSRAHHKCYNNGLQVVGTQYARFL

SEQ ID NO: 185004 - protein, 79 aa, Zea mays
  Clone ID: MRT4577_100314C.1.pep
ASRQRELLQGLGTKWAPVLSTTRGTRGRVKLGDDGGSGPAKTAGGGSGAAITGVGGRGPPSTLLDRSTSRRFLEIKTGW

SEQ ID NO: 185005 - protein, 172 aa, Zea mays
  Clone ID: MRT4577_100315C.1.pep
MAAEGKTPSLAEEYSLPPQEVPVEKAAEEKPSSGTESEAAPSTNDETPPSVEDKNGTSEVQDAAENPEAEETNTAAEETPAVEEASETTEEEEAEKPEIKIETAPADFRFPTTNQTRHCFTRYVEYHRCVAAKGEDAPECDKFAKYYRSLCPGEWVDRWNEQRENGTFPGPL

SEQ ID NO: 185006 - protein, 106 aa, Zea mays
  Clone ID: MRT4577_100316C.1.pep
FLPAPFISNSGSVRTGSAKKAFNMILLSMRMKSGIVSVRLTPVQQRNDSSIPCDAARWVNESLHVWGSKPISGRGDHAERVDLSRWIMALALRSASTWATHHAVHL

SEQ ID NO: 185007 - protein, 193 aa, Zea mays
  unsure (1)..(193): unsure at all Xaa locations
  Clone ID: MRT4577_100317C.1.pep
MAAEGKTPSLAEEYSLPPQEVPVEKAAEEKPSSGTESEAAPSTNDETPPSVEDKNGTSEVQDAAENPEAEETNTAAEETPAVEEASETTEEEEAEKPEIKIETAPADFRFPTTNQTRHCFTRYVEYHRCVAAKGEDAPECDKFAKYYRSLCPGEWSLSFSCYRLGILSSAELCSIXVDRWNEQRENGTFPGPL

SEQ ID NO: 185008 - protein, 73 aa, Zea mays
  Clone ID: MRT4577_100318C.1.pep
FIGGGITWIWASHTRNILHTWYKLITCLCSAKNTSKLSKSIGTAHIIVGDTLQHPQIPAYKTVGLYKPEYLLL

SEQ ID NO: 185009 - protein, 70 aa, Zea mays
  Clone ID: MRT4577_100319C.1.pep
NLMSMTAASALRSGLAFHWKQGQHGASLKEDIGLDTAVDASYSRLRSARPLQPTAVCYGGRPDPELASIL

SEQ ID NO: 185010 - protein, 74 aa, Zea mays
  Clone ID: MRT4577_10031C.1.pep
LLTHDVTEPLLVEVYQIYHTWLACLHTIFYMHNPDKIIYTNVIGSLNMLELTNRVGARIKMTSTSEVYCDPLEH

SEQ ID NO: 185011 - protein, 111 aa, Zea mays
  Clone ID: MRT4577_100320C.1.pep
MAPPQPKSGLFVGINKGHVATKRELPPRPCHRKGKSTKRVSMVRGLIREVAGFAPYEKRITELLKVGKDKRALKLAKRKLGTHKRAKKKREEMAGVLRKMRSAGTHTDKKK

SEQ ID NO: 185012 - protein, 183 aa, Zea mays
  Clone ID: MRT4577_100321C.1.pep
VPPPVCGAAVAHRTHLRRALPPNLLALLHSSGQGAHFSGPPPYSSPPPHPLPVLCFSKTAAWCSAAAASELMVREPTSSMEAVARGSSSSMEGGHLIGKVLELQIGVAVAITMQMQVVPKDLAKPKAQRWGCNLKKKETQIQVEKDAPPRDGNLETRRSVRLVKKKTKEQGRQQPIPCCLESA

SEQ ID NO: 185013 - protein, 117 aa, Zea mays
  Clone ID: MRT4577_100322C.1.pep
GKGSYSWAPPQPKSGLFVGINKGHVVTKRELPPRPCHRKGKSTKRVSMVRGLIKEVAGFAPYEKRITELLKVGKDKRALKLAKKKLGTPKRAKKKKKEMAGVLRKMRSAGTHTDKKK

SEQ ID NO: 185014 - protein, 111 aa, Zea mays
  Clone ID: MRT4577_100323C.1.pep
MAPPQPKSGLFVGINKGHVVTKRELPPRPSHRKGKATKRVSMVRGLIREVAGFAPYEKRITELLKVGKDKRALKVAKRKLGTHKRAKKKREEMAGVLRKMRSAGTHTDKKK

SEQ ID NO: 185015 - protein, 111 aa, Zea mays
  Clone ID: MRT4577_100324C.1.pep
MAPPQPKSGLFVGINKGHVVTKRELPPRPCHRKGKSTKRVSMVRGLIREVAGFAPYEKRITELLKVGKDKRALKLAKRKLGTHKRAKKKREEMAGVLRKMRSAGTHTDKKK

SEQ ID NO: 185016 - protein, 120 aa, Zea mays
  Clone ID: MRT4577_100325C.1.pep
FFFFFFFFFFVGFFYFLVGFFFFFPKYSFLNLYFFNLSPPKWTLNRTRYWGVFFFLKPQNKGPIKGTPKRGRPRVHNDPLPPQRGGGVIYGPQDPELYGQAHPPASRGGKWKKTGTTKKH

SEQ ID NO: 185017 - protein, 111 aa, Zea mays; identical to SEQ ID NO: 185015
  Clone ID: MRT4577_100326C.1.pep

SEQ ID NO: 185018 - protein, 133 aa, Zea mays
  unsure (1)..(133): unsure at all Xaa locations
  Clone ID: MRT4577_100327C.1.pep
IGRLVARVALKSDVXELVAVNDPFFSTDYMTYMLKYDTVNGQWKHHEVKVXDSKTLFFGEKEVAVFGCRNLEEIPWXSVGQKESVRPHGAAAAEVGPLRGHQQGPCRHQARAASAPVPPQGGKQRRGCPWSGA

SEQ ID NO: 185019 - protein, 169 aa, Zea mays
  unsure (1)..(169): unsure at all Xaa locations
  Clone ID: MRT4577_100328C.1.pep
MYCLRWMPELVKDVYCDNQLIVTQYRDTRYPAFKEVSSIDIKQVMIYSTAAYALWQTLYYLFIMVGRRDKVESGIRLTSYSWLLNDPHGKKGFIQRSAFLFVEKYKLEMFMLLQLIYNVVTSLPTLYLYHXWLHTAFLICMYAVSVWNGANYYIEVFSRRYINELDKIK

SEQ ID NO: 185020 - protein, 73 aa, Zea mays
  Clone ID: MRT4577_100329C.1.pep
MKVLSRALVLLALAASAASSTSGGCGCQTPPFHLPPPFYMPPPFYLPPHQQPQPWQYHTQPPELMPCQQYGSC

SEQ ID NO: 185021 - protein, 112 aa, Zea mays
  Clone ID: MRT4577_10032C.1.pep
FCFTLTSIAGLRREEKMSDDMTRSWYYQSPCCCVTTHETPYTHHMSKTGGNHAALGTTQWAQPSDLRDRHDGDCTLGHYLHRPTAVTKDQGRQRTQYLSQLQRSCRGLKSPW

SEQ ID NO: 185022 - protein, 54 aa, Zea mays
  Clone ID: MRT4577_100330C.1.pep
LRQTKGWLPGGGLKKVWFGPPPKGGKTHAPKKKPPLFLTGGFNRPGGGGKIPPV

SEQ ID NO: 185023 - protein, 82 aa, Zea mays
  Clone ID: MRT4577_100331C.1.pep
RFKGWVNYTKRNNMSLYTVDGLMRNQQSVMSYPDAAGSLFQPRHMRISDYATCVLTPSEQNFHACGTWSGLSSARGWGGCLI

SEQ ID NO: 185024 - protein, 193 aa, Zea mays
  unsure (1)..(193): unsure at all Xaa locations
  Clone ID: MRT4577_100332C.1.pep
VRRILCVGQNYAXAHAREMGADPDKPXLFFAKPGDALVVDGADPTYPXATQNLHYEVELVVALGEDARPVGWAVGVDLTRRDLQAEAKAKGRPWEAGKAFDQSAPCGALSRTPPAPDALIELKVNGAVRQSSRLSDMIWDVDGVLSKAAELWALQPGDLIFTGTPEGVGPLSPGDRVEAVIAGLPPLNFTVQS

SEQ ID NO: 185025 - protein, 133 aa, Zea mays
  Clone ID: MRT4577_100333C.1.pep
SHAGTRRRFRRSQQRRRLPGRSFRARGAAPTRTPRRRRRGGRRRTASSGRRAWRRATPEPAGAAGQDAQIDGWIDQCSLLSGQAMHACARSCFLIRTMYSGFCFVLFDLFACALDSVYKFVHIWRVKRDHDRG

SEQ ID NO: 185026 - protein, 93 aa, Zea mays
  Clone ID: MRT4577_100334C.1.pep
GRDIQASISQSPLLNVKMLSRAATRTTTSLVTKRGFQTTRARMSSPYHYPEGAYSNIPFNPRSKWFGVGYWTFMATGFFAPFGIAVWQTYKPQ

SEQ ID NO: 185027 - protein, 79 aa, Zea mays
  Clone ID: MRT4577_100335C.1.pep
KQSSSIIEHQNWRGILVLITQKRVKIYQCSKKEKKGEIAALLKGFYLQQIASTILPKRDTGGGGEKRTPPKLRRVNCLS

SEQ ID NO: 185028 - protein, 141 aa, Zea mays
  Clone ID: MRT4577_100336C.1.pep
EEEEEEEESSSEGLEAEDWAQGVVEAGGSFGGYGAQEEAQCPTLHFLEGEEDSESDSEEEEEDDEEEDEDDEDDEEDGDEVPVPSFGEAMAYFAMVKRYLTSFPIDDRVQSHILHLEHDLVHVTRKNHARQARVRGLGHQS

SEQ ID NO: 185029 - protein, 234 aa, Zea mays
  Clone ID: MRT4577_100337C.1.pep
ALSMRQKFDKYWEINNVALAVRAFLDPRYKHRMIELYISKMYDIDKAELEKLVFMNVINELFAYYSAVINAKSTTKGSSSRESEFVPHKNTCLVDEEEDEVDLDELYATTSNDKKVSELDLYMSEDLVKVNDNEATFDILSWWKGQVTNFPILSTLARDVLSMQVSTVASESAFSSGGRIVDAFRSRLKPEFIEALVCCKDWKIASEKDLEIEIKTLSEPMNDVDLEDAAAIGT

SEQ ID NO: 185030 - protein, 213 aa, Zea mays
  Clone ID: MRT4577_100338C.1.pep
CLSMRQKFDKYWEINNVALAVRAFLDPRYKHRMIELYISKMYDIDKAELEKLVFMNVINELFTYYSSVITAKSTTKTSKGASSKESEFVPHKNTLVDEDDDEVDLDELYATTSKIDLYMSEDLVKVNDNEATFDVLSWWKGQVTNFPILSTLARDVLSMQVSTVASESAFSSGGRIVDAFRSRLKPEIIEALVCCKDWKIASEKGIWRLKLKP

SEQ ID NO: 185031 - protein, 47 aa, Zea mays
  Clone ID: MRT4577_100339C.1.pep
TKRKALSLPNCPRLKRPAPPALVESIEPVIPENLRTLVSPHVFVHGI

SEQ ID NO: 185032 - protein, 66 aa, Zea mays
  Clone ID: MRT4577_10033C.1.pep
VKNYKSYDLECKGREAWVWERLGHCCWFLSVLMCLIFISLLNYVCGQAQFVVLSEALLKTSQRTRG

SEQ ID NO: 185033 - protein, 51 aa, Zea mays
  Clone ID: MRT4577_100340C.1.pep
GDPFCLPGAPLCLFFTSRKTALACCSHGASLGNGPYHFFLSLRIEVYGASC

SEQ ID NO: 185034 - protein, 63 aa, Zea mays
  Clone ID: MRT4577_100341C.1.pep
LTLKGVPGFGCYYRKRGSCFRTASDRCMVDLQGILFRFSPSFVVLAGEGMSVHYRGLIWFGVK

SEQ ID NO: 185035 - protein, 166 aa, Zea mays
  unsure (1)..(166): unsure at all Xaa locations
  Clone ID: MRT4577_100342C.1.pep
VKCVEMHHEAFQKAIRGNNVGFNVKNVAVKDLKRGFVASNSKDDFAKEAVSLTRQVIIMNHXGHIVIGYAPVLVCNTSHIAVKFAELITKIDRRFGKELEKEPKFLKNGYDGMVKMIPTKPMVVETFXSAYPPLGRXAVRDMRQTXVAVGVIKSXEKKDPTGAKVT

SEQ ID NO: 185036 - protein, 87 aa, Zea mays
  Clone ID: MRT4577_100343C.1.pep
KKGGNFFASISSFIIGMLGRLGSCSAGSGPAAIPRHLGVEQETLVTVPRSRMPGEVFMGMAVVLYKWCTMLHYALASSLRWSSPCRR

SEQ ID NO: 185037 - protein, 68 aa, Zea mays
  Clone ID: MRT4577_100344C.1.pep
YSSAISQMQFFFSKSNSINGACFITGLCAQIEQDYQPLDEIHSSHDNLRSIDSTLPLHNHYFIQHILK

SEQ ID NO: 185038 - protein, 113 aa, Zea mays
  unsure (1)..(113): unsure at all Xaa locations
  Clone ID: MRT4577_100345C.1.pep
XXXXXXXXXXXXKIFFFFFFFEKSTILIKSIAYSTVYHDMKTLFPRRVQRIYLLPNSFLTPCKSMMIRRRVGGWWEGSTSALSFLVSLYILHSVTPSQKGYCEKLLVNKCTPG

SEQ ID NO: 185039 - protein, 77 aa, Zea mays
  Clone ID: MRT4577_100346C.1.pep
KEVITRGFIMTIQLCRSQNYCFNIWTVTYTCASHKRGTQWRVRKFFGKPTLGLLNLLWELNILSHHTVPRDFALYKP

SEQ ID NO: 185040 - protein, 129 aa, Zea mays
  Clone ID: MRT4577_100347C.1.pep
CPSARCTCPCTGSCRTAPGWTAGRARRTPCTRPGPSPSCPRTASSRSRPGSSSPPPPRRSPPLSSSLPPLPVGRWPPLARGLAPRARPMMPCCGSSLFSRAWLLLSLVVMEEMTAGLLVGFPAACGPRP

SEQ ID NO: 185041 - protein, 121 aa, Zea mays
  unsure (1)..(121): unsure at all Xaa locations
  Clone ID: MRT4577_100348C.1.pep
SSYITALLVKLFWQLQLHDLCLGXXXXXXQSVGFSXXXXXXXSWSSFSXXXXXXXXXXXXXXXXXXXXXXXXXXXXXPWSSFSGSCSYMILSRCSSSRSPXXXXXXXXXXXXXXMECLPSG

SEQ ID NO: 185042 - protein, 130 aa, Zea mays
  Clone ID: MRT4577_100349C.1.pep
GTVLKQLHIKKERSGRLKPPQNKKKPQGGPSKKQKKKRPTQGDTNKKEYMRLNTKKNKCNKKSRPHTTNQGRKNKKRGADLFKQQQKNHTSSAGRKNQPRKSPPGPAGPPAPPKKSPTTPGGKPGHRRSP

SEQ ID NO: 185043 - protein, 81 aa, Zea mays
  Clone ID: MRT4577_10034C.1.pep
MTAQATAGFARSATTGFRAPNPRAQAKAAAAMAAQQARAARAAAWLAQHEWRPCEAGAQVRGIREAAWLPGARAARPPPTP

SEQ ID NO: 185044 - protein, 92 aa, Zea mays
  unsure (1)..(92): unsure at all Xaa locations
  Clone ID: MRT4577_100350C.1.pep
MQEKHRDTTVLNGVIDVLEYHLVQCTARGKYQVLYLKMNDDYHMDLAEFKTSAKRKDTFYSTMNAYTNGHDIGLGKMGVTXHPIKLGLGFNL

SEQ ID NO: 185045 - protein, 86 aa, Zea mays
  unsure (1)..(86): unsure at all Xaa locations
  Clone ID: MRT4577_100351C.1.pep
RYRAGTCPKSGSSARPAPAGFRFPTTDQTRHCFTLCVGYHRCVGAKRGDAPGCGEFAEXCRSLCPGGWVGLWSEQREXNGSLPGGV

SEQ ID NO: 185046 - protein, 101 aa, Zea mays
  Clone ID: MRT4577_100352C.1.pep
RAGESQVDTGGQGAGGGQKKIPCHLSKSAARRWSWSVTAPAPAPLLRPPPGREFAAPDRGISHSNLTSLDPAWSGWPVADYIESGAASLAAELRPPTRVRA

SEQ ID NO: 185047 - protein, 62 aa, Zea mays
  Clone ID: MRT4577_100353C.1.pep
LGFQKVTRHFTACGPQSQSCGCVLVPVIRLCFSWWVSLLNEKVRCLTPPWNLVHHGRPLKTP

SEQ ID NO: 185048 - protein, 57 aa, Zea mays
  unsure (1)..(57): unsure at all Xaa locations
  Clone ID: MRT4577_100354C.1.pep
XXFFIFFFFSFFFFFFFFXXXKXXXHSKGPFRALFTLTLPPMGMPDPFFPNYPPLMT

SEQ ID NO: 185049 - protein, 85 aa, Zea mays
  Clone ID: MRT4577_100355C.1.pep
QKTPRCPPKKGRLGKKGNPKVKPPNFVACFVLFSQNKMLLPSRACSKFFLGAGKKDPPKILGSHCLKPCICLRTQPSNGLMNFWR

SEQ ID NO: 185050 - protein, 464 aa, Zea mays
  Clone ID: MRT4577_100356C.1.pep
MAHVAGDIAVLVLFLSLSCQSTVSAGAAVLGRKAGGSSPATTHEGTNPAGTGMGTGTAQYAVIFDGGSTGSRVHVFKFDKQLDLVKIGDDIQFFAQVKPGLSEYAGEPQEAARSIAPLLEKAQGAVPASLQSRTPLKLGATAGLRLIGDEKSEEILEAIRDLVKSKSEFEYNPNWITVLEGSQEGSYLWVALNYLLGKLGGDYSDTVGVVDLGGGSVQLAYAISDDASANAPAVPEGQDPYVTKEHLKGKHYNLYVHSYLHYGLLAARAEILKANNGPFSPCILRGFSGTYTYNGEEYEAAAAPEGASYEKCRDGAVAALNLGARCEAKNCTFNGVWNGGGGAGQADLYVASYFYDRASQVGIIGGDAPNGRSTPAAFADAALKVCSLSVADAEAAFPDAWDAEYLCMDLVYEYTLLVDGFGLEPTKEFTLVTKVKYGEYYVDAAWPLGDAIETLSSQKLNQIA

SEQ ID NO: 185051 - protein, 65 aa, Zea mays
  Clone ID: MRT4577_100357C.1.pep
LGKNLVIYCTERNLYHPNHPEHGTPERFRVSSPRFPLRMRCFCVMMKLSTAPLSHFIVSSSHKSN

SEQ ID NO: 185052 - protein, 47 aa, Zea mays
  Clone ID: MRT4577_100358C.1.pep
RGRLGANKSADLLRHNPLTKKVPELVHDGKPHAEYTIIIKYIDQACK

SEQ ID NO: 185053 - protein, 217 aa, Zea mays
  Clone ID: MRT4577_100359C.1.pep
MPTRRGRTRKGERRIDAAIDHFVVMGYDARDISAVVADLLKVYGGPDAWPLLEEGSYEVVQNRLFEIEDEEKQKQDQQLLLEHHDQQLLLEHHDHQLLLEHHDQQQLDCQQVEDERPQHQEPAADEGVEVPMFIEPQDNISISKVPAETKSADDEVEGPMSIEPPVCEAVLPLNVAIRTRPRRPCYGWLSESEDEEEEQPTGQKHEVHVLSRGERAQ

SEQ ID NO: 185054 - protein, 55 aa, Zea mays
  Clone ID: MRT4577_10035C.1.pep
RCFNVFPFQVESGDLIAYGLIPEFIGRFPILVSLTALNEDQLVQVSPVSTVFYLS

SEQ ID NO: 185055 - protein, 167 aa, Zea mays
  unsure (1)..(167): unsure at all Xaa locations
  Clone ID: MRT4577_100360C.1.pep
MATTSARRPSGPVLSAAHYRSASPTRVSLAGQPVSVSVSSSSRGRRTCMCSPTNHPGSFRCSLHKERVKPAAGPHGXGTGTGTASRARRRRXSRLCAGAGRRMGSALVRIGAVEGRPVRXRALXATXRPSPTAQHRRRAGAARPRPSRLSAVSSAGDRAGDNGRPRQ

SEQ ID NO: 185056 - protein, 46 aa, Zea mays
  Clone ID: MRT4577_100361C.1.pep
IRDEALLSPYVCSRLNGPPNVRRGPAQPSPLDRGGALILLPQCQAA

SEQ ID NO: 185057 - protein, 107 aa, Zea mays
  unsure (1)..(107): unsure at all Xaa locations
  Clone ID: MRT4577_100362C.1.pep
DLLRLLGLSASAATXTNHPKSSQATIYILLSSYLSPTKSSVCENPILQPYMIQQAITASILPLSPLLLQQSSALLHQVPFVHVLAQNIMAQQLQQLVLANHAAYYYQ

SEQ ID NO: 185058 - protein, 92 aa, Zea mays
  Clone ID: MRT4577_100363C.1.pep
LLKSSLEKLPPLTKKNSFKLRFFVLELKTQDRWVGGSMCALFPYWYFVVRPLSPGSIGACLLSLFVGGPRTAFACQRVLSCTYQYRTKCNPL

SEQ ID NO: 185059 - protein, 107 aa, Zea mays
  Clone ID: MRT4577_100364C.1.pep
TEFRVAVHWKWLRHKGLQNAIEMPYVRHATKAGSNNWNINTVARTQVPYHPKGLHIHFGGAKDPANLGAGQGDSDGRGLRNPLGGPEIGARHGGAGTCYGCHGQSKT

SEQ ID NO: 185060 - protein, 78 aa, Zea mays
  Clone ID: MRT4577_100365C.1.pep
CLHSDHAARVLLHITLDSLTNMFRNTPDMYNTELLPLQNNLIPTFIPLTTVTTPLSCFCYTRSSDMCRHTTIFGLRQL

SEQ ID NO: 185061 - protein, 115 aa, Zea mays
  unsure (1)..(115): unsure at all Xaa locations
  Clone ID: MRT4577_100366C.1.pep
MTEPAWEAARCSPPCSRGAGKCTAMEPSMMHAGDLERNGRITCLTHTQDWLRMDLSDIGSSVIKWMGTYNAPAINRNSLTALFFCSMCQKLNYFTTPAAVISHFXLWLVTCHLSL

SEQ ID NO: 185062 - protein, 63 aa, Zea mays
  Clone ID: MRT4577_100367C.1.pep
PASSTNVSKELSACRPSTRWLSRRQSSTSIVISSGNSIVVNHHASPRPDPDGRKGRRIDLFET

SEQ ID NO: 185063 - protein, 47 aa, Zea mays
  Clone ID: MRT4577_100368C.1.pep
LIKRFPDLLTPRVISFISYRSHTSRFLFSKHDLKSFVGNQHFKHMEA

SEQ ID NO: 185064 - protein, 87 aa, Zea mays
  Clone ID: MRT4577_100369C.1.pep
STWSLKCFHNFPCVGHSAVCSGYQMLHSSIVTIHSSCMCHFEHVPLFVCRLRKGCALRCFFAYQSTHVVCTLHCLVHSMLSHFVASG

SEQ ID NO: 185065 - protein, 140 aa, Zea mays
  Clone ID: MRT4577_10036C.1.pep
VFPKRFKSGANSSQITIRNVFLLWMNYLSTMYFSCSWSSRQKLYIFTYFCLWSIIVMVISYKHNFKYIVATSGGQQLRPGLDEESCPHEHNKHIRIKYHFITSCLDGRSVKANYINTGSTHRLSNQVTWKARVLGASHQD

SEQ ID NO: 185066 - protein, 199 aa, Zea mays
  unsure (1)..(199): unsure at all Xaa locations
  Clone ID: MRT4577_100370C.1.pep
MMGEAKENDVYEEELLDYEEDDDKTVDGSAAKPTGEVAKKGYVGIHSSGFRDFLLKPELLRAIQDCGFEHPSEGTLSSLEQNMVTLSINMDXRLNFYSLGXAPISFGSTSVQHECIPQAILGMDVICQAKSGMGKTAVFVLSSLQQIDPVAGQVAALVLCHTRELAYQICHEFERFSKYLTEVKVAVFYXGGVHIRKHK

SEQ ID NO: 185067 - protein, 156 aa, Zea mays
  Clone ID: MRT4577_100371C.1.pep
VAQILELAEPQSRTSAPVGAPKLEWVCPWLADVAASTVGAEVALATPSTRCWSVGLDRRLFLLHALPLCWDVYLLHALPLCRDVFLLHALPLCWDVFLLHALPLCFLRSFRLFYHLFLLCTMAFAMSLFFHCTKLICSSGPECRPQVGSSLESSIR

SEQ ID NO: 185068 - protein, 429 aa, Zea mays
  Clone ID: MRT4577_100372C.1.pep
MMGEAKENDVYEEELLDYEEDDDKTVDGSAAKPTGEVAKKGYVGIHSSGFRDFLLKPELLRAIQDCGFEHPSEVQHECIPQAILGMDVICQAKSGMGKTAVFVLSSLQQIDPVAGQVAALVLCHTRELAYQICHEFERFSKYLTEVKVAVFYGGVHIRKHKDLLKNECPHIVVGTPGRILALARDKDLSLKNVRHFILDECDKMLESLDMRRDVQEIFKMTPHDKQVMMFSATLSKEIRPVCKKFMQDPMEIYVDDEAKLTLHGLVQHYIKLSEAEKNRKLNDLLDALDFNQVVIFVKSVSRAAELNKLLCECNFPSICIHSGMTQEERLTRYKNFKEGHKRILVATDLVGRGIDIERVNIVINYDMPDSADTYLHRVGRAGRFGTKGLAITFVSSASDSDVLNQVQERFEVDIKELPEQIDTSTYMPS

SEQ ID NO: 185069 - protein, 104 aa, Zea mays
  Clone ID: MRT4577_100373C.1.pep
NPFPGAKTGIKGFKQTPPLEENFHPLSLGAPHEGKNWAMGRALGNNGESLVSICIRGGPLAGIGKLNKNFLSWAGGLFSRGYILFRRGVAPQNSPFGFAPTWGG

SEQ ID NO: 185070 - protein, 39 aa, Zea mays
  Clone ID: MRT4577_100374C.1.pep
LCAALNVSKRSVDRDLDVYRNILSKLVQAKELLKEYVDR

SEQ ID NO: 185071 - protein, 94 aa, Zea mays
  Clone ID: MRT4577_100375C.1.pep
EGVFTREAERCMFTERSHGGRILKSYIILNLSPVVSSSAARHPTSSDHGVIIDSLQITTVVAPTNCDSFPVLRKLIAGWAKVVVTVRDLHVVDV

SEQ ID NO: 185072 - protein, 115 aa, Zea mays
  unsure (1)..(115): unsure at all Xaa locations
  Clone ID: MRT4577_100376C.1.pep
RQLEGTXCGVGRPPILGQSFKFLRIKCSPTATPYXCSPQCQSLRQQCCQQLKQVEPQHRYQAIFGLVLQSILQQQPQSGHVAGLLAAQIAQQLTAMCGLXQPTSCPYAGGGGVPH

SEQ ID NO: 185073 - protein, 106 aa, Zea mays
  Clone ID: MRT4577_100377C.1.pep
ICSTNRILTGTKSWMTPAGRAISLGDKYAHIYPLDILTTTGWVMDHPHLSTMHMRMKQPNTVARLLECIVPREELLLQTNDVISGGPDECGHRRARQRLAGHHSVL

SEQ ID NO: 185074 - protein, 113 aa, Zea mays
  Clone ID: MRT4577_100378C.1.pep
GKKARRVAPPLSCEEWLVPDDICLDERNAVHGGVQATDATVADVPTGDPAPEVALRLLHSQKEWLVWALALDAYVTLCGLLHDEMGIGKTIQAMSLGLTVRRLRSGDHHSGVS

SEQ ID NO: 185075 - protein, 48 aa, Zea mays
  Clone ID: MRT4577_100379C.1.pep
FNYQNVGKLLNLFIKLGKNYVLGRWFLTVIISPPDKYRGYKELVPLVW

SEQ ID NO: 185076 - protein, 135 aa, Zea mays
  Clone ID: MRT4577_10037C.1.pep
QGMGSATITWGEPPFFVGWFGSKTRHLAEGGGWIKVLEVSLVKNRSLLEWGVLWVGKEDGSQFSFSWAGVWNRGGVSFGPVLPLLGVGARPFCLARHRCPRRGPGGVGCCCLGCLGPPYWFWARFPLNPGPFFFF

SEQ ID NO: 185077 - protein, 59 aa, Zea mays
  Clone ID: MRT4577_100380C.1.pep
VTAIRSLSLLGVLQRWRIPASRHSICGAKISQVKEKLEDDPFYSMLHPVACITTRWRGD

SEQ ID NO: 185078 - protein, 305 aa, Zea mays
  Clone ID: MRT4577_100381C.1.pep
MANAADDLDLLLSLGEAVPETPPASPRTADVPVCDGAFTPPRTAPPGGTDMSVFRDAVKDYLEAAPETTSPLANRPKRPKATEILVDKYSGLRIKHLTLSPLEISNRFADIRFVRITALKNSVGSDRFSGCWATAGVLLDKGVQRVSAKGSSYSIWKMGALDETDVSLFLFGDAHVHYSGAAVGSVFAVFNGNVRMDNGGKGFSMSVASVGQMLKMGVASDFGLCKGKRKDGVACTMAINKSKGSYCKFHSSKTSQKYTTGRVELKGGNFKFASKLRSEGIYMVNPFSERPNPRNFFATGESNVN

SEQ ID NO: 185079 - protein, 65 aa, Zea mays
  unsure (1)..(65): unsure at all Xaa locations
  Clone ID: MRT4577_100382C.1.pep
KPSVSIPNLETCLESLVLVLRVFCGNPWCFAQNITPPHGVLIFDKKTPLVEIGVDPFFAXGPSFF

SEQ ID NO: 185080 - protein, 131 aa, Zea mays
  Clone ID: MRT4577_100383C.1.pep
PSRRCRGTSSHLYKIEGVFSRHCFRLASELIISWSRVDRVADDGPHMLSGHGWSHHLPNALNNGAAHPGHAPNQARSCVPYAPALPLRRAFLVLTIRSPKMSNPRMLPNLARFYARLCWRGHGRCLPRAKF

SEQ ID NO: 185081 - protein, 234 aa, Zea mays
  unsure (1)..(234): unsure at all Xaa locations
  Clone ID: MRT4577_100384C.1.pep
MEQYEVVEQIGRGAYGSAYLVLHKAERKRYVMKKIRLSKQNDKFQRTAYQEMSLMASLSNPYIVEYKDGWVDEGTSVCIVTSYCEGGDMAERIKKARGILFSEERVCRWFTQLLLALDYLHCNRVLHRDLKVVGTPNYMCPEILADIPYGYKSDIWSLGCCMFEILAHRPAFXATDMAALVNKINRSFISPMPPIYSSALKQIVKSMLRENPRHRPTAXELLRHPHLSPYLSES

SEQ ID NO: 185082 - protein, 77 aa, Zea mays
  unsure (1)..(77): unsure at all Xaa locations
  Clone ID: MRT4577_100385C.1.pep
MVKYSQEPGNPTHAAKAIGRDLRVHFKNTRETAFARRKLSLTKAKRYLEDVIAHKQAIPFRRYCGGVGRTXQAKSRH

SEQ ID NO: 185083 - protein, 45 aa, Zea mays
  Clone ID: MRT4577_100386C.1.pep
PTKRKKKGGFKNDVRRKIHYSLTYLGLEGTWPNPEGGRGGNHPSL

SEQ ID NO: 185084 - protein, 228 aa, Zea mays
  unsure (1)..(228): unsure at all Xaa locations
  Clone ID: MRT4577_100387C.1.pep
MEQYEVVEQIGRGAYGSAYLVLHKAERKRYVMKKIRLSKQNDKFQRTAYQEMSLMASLSNPYIVEYKDGWVDEGTSVCIVTSYCEGGDMAERIKKARGILFSEEVVGTPNYMCPEILADIPYGYKSDIWSLGCCMFEILAHRPAFKATDMAALVNKINRSSISPMPPIYSSALKQIVKSMLRKNPEHRPTAGELLRHPHLQPYLSESXHCSPIYLPGEATGNLVDKQS

SEQ ID NO: 185085 - protein, 103 aa, Zea mays
  Clone ID: MRT4577_100388C.1.pep
SYSGLRHFCKSTGLCSVKQPTLKGSKPLSQHRCKIPTILIPLIYVISAHWFCYMRSFTVPVLRSWSSDMYHEMDMSRPIKEHHLFDWTVFGLLRQQAGLYQEH

SEQ ID NO: 185086 - protein, 273 aa, Zea mays
  unsure (1)..(273): unsure at all Xaa locations
  Clone ID: MRT4577_100389C.1.pep
MEQYEVVEQIGRGAYGSAYLVLHKAERKRYVMKKIRLSKQNDKFQRTAYQEMSLMASLSNPYIVEYKDGWVDEGTSVCIVTSYCEGGDMAERIKKARGILFSEERVCRWFTQLLLALDYLHCNRVLHRDLKCSNILLTRDNNIRLADFGLAKLLMEDLASSVVGTPNYMCPEILADIPYGYKSDIWSLGCCMFEILAHRPAFKATDMAALVNKINRSSISPCPXIYSSALXISFYAHLWENLTCLPKQIVKSMLRKNPEHRPTXELLRHPHLL

SEQ ID NO: 185087 - protein, 47 aa, Zea mays
  unsure (1)..(47): unsure at all Xaa locations
  Clone ID: MRT4577_10038C.1.pep
SSLNXLSIARXXVYXGYTSITVVSAIERTLLRIGTAGXRSLHTPRQY

SEQ ID NO: 185088 - protein, 115 aa, Zea mays
  unsure (1)..(115): unsure at all Xaa locations
  Clone ID: MRT4577_100390C.1.pep
GGGIFGLFLAGRAARFAADPQFRFKVLMEELEGVTACVXGDMAAPHFCSTVTSLSPVGVHLLHYVLCRRAVSRSAQHMSAGVCSIRCHLGQGATLGXVGFADGLAGTALYNGLMA

SEQ ID NO: 185089 - protein, 52 aa, Zea mays
  Clone ID: MRT4577_100391C.1.pep
MASGHEKALVLGPLLAFGGIETGRSGATGGAHEARTGRNAGGGVCGARPASR

SEQ ID NO: 185090 - protein, 73 aa, Zea mays
  unsure (1)..(73): unsure at all Xaa locations
  Clone ID: MRT4577_100392C.1.pep
ATGDRYTYECSGVRAXSDGXLELTVGVRGTGGAAAAAADHLAPISLGRLILAGMGGGGXRRGWARQLSLLTPY

SEQ ID NO: 185091 - protein, 52 aa, Zea mays
  Clone ID: MRT4577_100393C.1.pep
NINKNAPEITLGLSKYYPQRTGGVCHFMTGVNTAKQVHYYGKCSTYNYLFFL

SEQ ID NO: 185092 - protein, 261 aa, Zea mays
  unsure (1)..(261): unsure at all Xaa locations
  Clone ID: MRT4577_100394C.1.pep
MAYCYYPARACYLLFLIYQPVVYYLLLMAPHTIALSFSYDFSNPGDLDRANLTYLGNSIAGDGIINLTNMNDTWSTGGVAYPQPVRLWDHRTGRRASFTTNFSFAISGERTYNRADGMAFFIGSFRSAVPLDSGGGFLGLISNITPPPLSTVGVEFDTNRNIWDPQDAIDHFGIDVNNITSIVXTSRWDKISQTRSLVXSAGVNYDGSSKVLSVSLRLANGDVHDLATSVDLXAAGVPQYATIGFSAATGNHVESHPALVL

SEQ ID NO: 185093 - protein, 96 aa, Zea mays
  unsure (1)..(96): unsure at all Xaa locations
  Clone ID: MRT4577_100395C.1.pep
QHRNWKNLGFTKLNRFEENPLFASWLNSKRAPPYRLSKQWPTLNGKGNPPCTGAXKPRGVXFTPRGTFTFASALAPGLLVYCLFFLATWAGFPRKL

SEQ ID NO: 185094 - protein, 153 aa, Zea mays
  unsure (1)..(153): unsure at all Xaa locations
  Clone ID: MRT4577_100396C.1.pep
GQPRHPAAGGRAQENSHRNGGKTDKKPRRPXEKERQEAEXKQGGEEGPRXKREQRSEQXAGGRTRKAAREKHTPEEKNPRQQXEGEAXXRGTNRQGQRGEGQNKXKQSRTHTGENDRQSRQQTTEPKKGXAKXNHQARDQTRQRHNRAGRQGE

SEQ ID NO: 185095 - protein, 140 aa, Zea mays
  Clone ID: MRT4577_100397C.1.pep
HPRCGFHFDAGGPPSGGGEPTHNCSQNNPIHRHRRPRGPHAGRTGAPGTPRRGRPPTAGRPALRHTNGATRRRPGRSRTGTRTRPGPRRQRPGTRTTTRARPPPTRRPRAPSARRRRTTSPTLWRPRTTARGGQTRAGAP

SEQ ID NO: 185096 - protein, 141 aa, Zea mays
  Clone ID: MRT4577_100398C.1.pep
MMRETYMDVLPPVDHIAASRSGGWFPGAVRLWTAAENKQFERALAGLDLCRPDWEKVARAIPGRTVREVVSHFKSLQVDVQQIESGLVPMPVYGAGAGSFTLQWDGCYGPADSRHNGYRFGNGGCGRRHHGRTPEQEQKKG

SEQ ID NO: 185097 - protein, 74 aa, Zea mays
  Clone ID: MRT4577_100399C.1.pep
MAPAPCGRSSQRAFHLRKGKSEGNKNMNELMGRKGANLAEMASIGLYAPPGFTVSTEAYHPNHEAGRDLPPVLW

SEQ ID NO: 185098 - protein, 73 aa, Zea mays
  Clone ID: MRT4577_10039C.1.pep
SLRALWNASFPDTELTSLVSEQRKDMWWQGINQRLISSYFEFFVYLCSILGCQKYVSHCSFLVFSCEFFYNSP

SEQ ID NO: 185099 - protein, 145 aa, Zea mays
  Clone ID: MRT4577_1003C.1.pep
RFWAPFPAQKFAGLFWKAFGPAPEEPREAMAKEAKKNLALPKGHLRGQRFFGGEAMGLGEIPPCARAPWGGATKEPPGGALAGGGGFPPPPEGADPYNNDPPVNQGLRTPAELVDYFPPRKEMSLLRARAPPAPSPGPMFSPRSQ

SEQ ID NO: 185100 - protein, 192 aa, Zea mays
  Clone ID: MRT4577_100400C.1.pep
MMRETYMDVLPPVDHIAASRSGGWFPGAVRLWTAAENKQFERALAGLDLCRPDWEKVARAIPGRTVREVVSHFKSLQVDVQQIESGLVPMPVYGAGAGSFTLQWDGCYGPADSRHNGYRFGNGGCGRRHHGRTPEQERKKGVPWTEEEHRLFLLGLKKYGKGDWRNISRNYVQTRTPTQVASHAQKYFIRLN

SEQ ID NO: 185101 - protein, 169 aa, Zea mays
  Clone ID: MRT4577_100401C.1.pep
MMRETYMDVLPPVDHIAASRSGGWFPGAARLWTAAENKQFERALAGLDLCRPDWEKVARAIPGRTVREVVSHFKSLQVDVQQIESGLVPMPVYGAGAGAGSFTLQWDGCYGPADSRHNGYRFGSGGCGRRHHGRTPEQDRKKGVPWTEEEHRSYILYVVMMRELHQTPV

SEQ ID NO: 185102 - protein, 129 aa, Zea mays
  Clone ID: MRT4577_100402C.1.pep
MMRETYMDVLPPVDHIAASRSGGWFPGAARLWTAAENKQFERALAGLDLCRPDWEKVARAIPGRTVREVVSHFKSLQVDVQQIESGLVPMPVYGAGAGSFTLQWDGCYGPADSRHNGYRFGSGGCGRRH

SEQ ID NO: 185103 - protein, 305 aa, Zea mays
  unsure (1)..(305): unsure at all Xaa locations
  Clone ID: MRT4577_100403C.1.pep
MMRETYMDVLPPVDHIAASRSGGWFPGAARLWTAAENKQFERALAGLDLCRPDWEKVARAIPGRTVREVVSHFKSLQVDVQQIESGLVPMPVYGAGAGSFTLQWDGCYGPADSRHNGYRFGSGGCGRRHHGRTPEQDRKKGVPWTEEEHRLFLLGLKKYGKGDWRNISRNYVQTRTPTQVASHAQKYFIRLNSGGKDKRRSSIHDITTVNLTDDERAPSPSRSSLITTTTSQPNAPAPAAVVIGGPFSSAAAAEAKQHQHGAGNLPPNRTSVVPGVYMDXDSHDHGLQCGPLRHQLVASHHSVLF

SEQ ID NO: 185104 - protein, 152 aa, Zea mays
  Clone ID: MRT4577_100404C.1.pep
MAEKLTPEQVDECKEIFDLFDADEDGRIATGELVTALRSLGQNVDEAEARRFLEDAGVAAGAGDIDLAAFLAVAARKMGARQSEARLAECFDVFDDACSGSIPAEQLRQVMVSHGDRLTEEEADAMLREADPRGEGRVEYKHYVKVLLRDKK

SEQ ID NO: 185105 - protein, 364 aa, Zea mays
  Clone ID: MRT4577_100405C.1.pep
MDGDHRRQAAAAVTVTQVSPARRLIAWLRLLFRAFVHRYGKVASWNAAGRPVFVVLAVFFLQRSLRRRYLSWKESSRLPLMAAAAVTVQTTVRAMAAQRELSVRKQTRAATRIQAQWRAHRAVWSYLTTKRAAVICQRAWRQSVARKELRKLRLCVQENLEREMLEEVCRLREMVDVLQQAVNDAETRAVNEREAAKDAMAQLEAASAIEETVVMVEDTEKVKSLSAEVDRLKDLLGAEMSETFAAKKALSEAELRNEKLARLLGVEEVKNKRLQDTLKRMEEKASSLDEENRMLRQAVASNPAIVRSPSGENHEAPGIQAAPDNEKSRNGTVNPIAVDREANVHEKGAEQPSSNGQEAGKQQQ

SEQ ID NO: 185106 - protein, 52 aa, Zea mays
  unsure (1)..(52): unsure at all Xaa locations
  Clone ID: MRT4577_100406C.1.pep
MFPKKDTGPRPSSKPAKSSDXKQKKKKWSKGKQKEKVNNMVLFDQSTYDKLL

SEQ ID NO: 185107 - protein, 102 aa, Zea mays
  Clone ID: MRT4577_100407C.1.pep
MGEREVRMDPEDILLKILHVHLGCVTPFALINYSASADTLLLDLGFESKQSCYFHPLTNDVTIALSLSNLDKFLISLGKQPAYVDLEAAPAVGKDNAPDLAH

SEQ ID NO: 185108 - protein, 112 aa, Zea mays
  Clone ID: MRT4577_100408C.1.pep
GRPPPHRAPARDFDPRARLPPARESHPLASPSPPGIPPAPGTPPPARRDARRRVSRPRQRTPRPHPRLRRALLSSSAPPARRHPPNPCSMLDSPDYRGAAPRIFREVAVVCR

SEQ ID NO: 185109 - protein, 130 aa, Zea mays
  Clone ID: MRT4577_100409C.1.pep
PPPPPAPPMTSRRCRSNRRCRFWTSLRADSSWVAHRLQRSADRRWRPPPRLLLPVCRCLTSRTRIAEQARRVALLRLTDLLILPSMHVCLPALTADHDASLVLDLWSHLVGTQNRLFFLSRVNKWKSVPH

SEQ ID NO: 185110 - protein, 49 aa, Zea mays
  Clone ID: MRT4577_10040C.1.pep
ASTLRARSKLEYSVIHGIDSTKKVCTTAIPLVMYQNLDPTPLIRAELQK

SEQ ID NO: 185111 - protein, 94 aa, Zea mays
  unsure (1)..(94): unsure at all Xaa locations
  Clone ID: MRT4577_100410C.1.pep
GRLQAPGRTTRGDPPRPXINTAXRGRAGRAXETGEQGGKGRPKRPASTAPQDHRQRARPLTRETLGCGWEAQNMRAQQTTTTCASKPCCLLSAA

SEQ ID NO: 185112 - protein, 61 aa, Zea mays
  Clone ID: MRT4577_100411C.1.pep
SRQMPRGTFVFFSHCVRLNHCGDELRTQFYILWLPHRRSSTTPYSGRPQSQTGPMSPAWLK

SEQ ID NO: 185113 - protein, 53 aa, Zea mays
  Clone ID: MRT4577_100412C.1.pep
SIIKHTIIITDSITNLLNSNFIQLFQKKLNRNAPGAIARLLARYLSYLTLSNR

SEQ ID NO: 185114 - protein, 76 aa, Zea mays
  Clone ID: MRT4577_100413C.1.pep
LLAHSSPSSPSSVALAAVSPTQSSPRMTLRGLHVPWMTSQSHGRPQISPPCSGPCRGTTRTPASSARPASVYTTHY

SEQ ID NO: 185115 - protein, 348 aa, Zea mays
  Clone ID: MRT4577_100414C.1.pep
MASLSSPSLLSSFLGDRLALSTRPLLLRSAVPGSRRLAYQATRTLCNLVDILFNRRNQDDAPENNPRRLRPGKVSPRLSVPNHIQRPPYVNSRQQRPGMNNGPEIHDENGIECMRASGKLAAQVLKFAGTLVKPGITTDEIDKAVHQMIIDNGAYPSPLGYCGYPKSVCTSVNECICHGIPDSRPLEDGDIINIDVTVYLNGYHGDTSATFLCGDVDDEAKKLVKVTRECLDKAISICSPGVEIKQIGRTIQDHADKFKFGVVRQFVGHGVGKVFHAEPVVLHFRNNEWGRMMLNQTFTIEPMLTIGSINPVMWSDDWTAVTEDGSLSAQFEHTILITEDGPEILTQC

SEQ ID NO: 185116 - protein, 147 aa, Zea mays
  Clone ID: MRT4577_100415C.1.pep
MTDVTIPEDYLPIVDGLLWKKILREGSGESPSIKSNVNVHYVGTLFTTGEKFDSSRDRSSPFNFKLGVGQVIKGWDEGVKTMKIGELAELVCAPEYAYGAQGSPPKIPGNSTLKFEVELLDFQESADKPTAKLALAQKKNDQRNASF

SEQ ID NO: 185117 - protein, 76 aa, Zea mays
  Clone ID: MRT4577_100416C.1.pep
MFFHWLVNKVKHMKLSHFITLFYHSMSSEPMLTIGSINPVMWSDDWTAVTEDGSLSAQFEHTILITEDGPEILTQC

SEQ ID NO: 185118 - protein, 111 aa, Zea mays
  unsure (1)..(111): unsure at all Xaa locations
  Clone ID: MRT4577_100417C.1.pep
STHANAFPFTADNLEMXKKLCLAXISFNVKAGGISNNTPXPXFQRTNLMIHRTXKRRERXGALYVRSERTLNFYENDCIDYAAVTVLITGGKLVTFLLNIKKLIGTLKSNI

SEQ ID NO: 185119 - protein, 132 aa, Zea mays
  Clone ID: MRT4577_100418C.1.pep
KNSPKTPRFKHAKKICCMGALDPPGAMFAFLFGVICSKRDGSNFGAKIFWAFPMAPQTVLPVNSPDWGGVIQGRFLCLPPPRDIGINDLGGGPCVAPDPFNTPIPFVKKKKKKKKKKKKKKKKKKKKKTPPP

SEQ ID NO: 185120 - protein, 95 aa, Zea mays
  Clone ID: MRT4577_100419C.1.pep
FFMGLFRGFFCVFFGAYKKTHDFLYTTIFPITPCDKKMNFLPKTKTLPARFDISIYKVQETFTTPTSLFTYQKQPTARKASSLFETLTPHPHTSR

SEQ ID NO: 185121 - protein, 144 aa, Zea mays
  unsure (1)..(144): unsure at all Xaa locations
  Clone ID: MRT4577_10041C.1.pep
GSRFQRPAQRTPTGRPFQPRAPRKGAXGTGGEXPAXAXEEXXENXXXGKKATAAXAXGXXGSGKGTQGANXXEHXGXTXXSAGDXXRAETKXGXENGTTTENGTKEGKNAPAEATTKPXQEATTKKENDKXPSDGPPRKEENRA

SEQ ID NO: 185122 - protein, 149 aa, Zea mays
  Clone ID: MRT4577_100420C.1.pep
RSASSRPFSQDIFVRDRAPAAFEALRVRRRLTASRNARSARSSLARSSSSVRVASAASKSMSMGSGEWRRRARHGGGGGVRISAGVARAGTGRSGAERDEAGRGSVRFGGMGVVCFVVLCGRRWSLWRAGEKTPQKTPVLVWRNGDSGP

SEQ ID NO: 185123 - protein, 162 aa, Zea mays
  Clone ID: MRT4577_100421C.1.pep
ETLKPGKRAQAPQKKKQGNKWKISGLFPPGIPPKPRGPRGLIKQKNYFNPTLKGSKKKTCPLQKKKGPKTKKNPAVRGKQKKPTTGLKEKKFPSTTIFWPGFKECGTGCFQEKKQLVPRRKGLSTRTETITRGLKNPLWVFPFGGALRGSLGQTLLNRKNRG

SEQ ID NO: 185124 - protein, 83 aa, Zea mays
  Clone ID: MRT4577_100422C.1.pep
MHRIAFWSLFGLGARFWQMGIEMRPFFNKSSLWVYPVYAAGGASFGYWLQGVDDRQTDTLKERKNILLEKRARKAEKDAQAEA

SEQ ID NO: 185125 - protein, 219 aa, Zea mays
  Clone ID: MRT4577_100423C.1.pep
MAVAAAAHHLPVVPHRLVPVRHTSSSPPPHPASRCSAAGKPPVQLHAAQARASGFAARVAFNPSGNYDLSLSMGEDETPQVQPPPPPTQGRFEIVINNDNIRTLDLSPVEAALGDLSSLTPAASRTLLDQTVGHHQRESTRHNAAMLVPHQMSMRMGVVFNPEALELFVMKKVFAVDAWLKQQSHPKPRLKTADMARMLGFGVGDELFDLIEKYPAHRS

SEQ ID NO: 185126 - protein, 83 aa, Zea mays
  Clone ID: MRT4577_100424C.1.pep
FFIPAEDGASPQAHSRDMRVRMLISGSRRLCPGWHYQISIGEPDQRYPRHLLLRTGATERDRSSRPSPHVSIRTRQQRPKKSR

SEQ ID NO: 185127 - protein, 259 aa, Zea mays
  Clone ID: MRT4577_100425C.1.pep
MAVAAAAHHLPVVPHRLVPVRHTSSSPPPHPASRCSAAGKPPVQLHAAQARASGFAARVAFNPSGNYDLSLSMGEDETPQVQPPPPPTQGRFEIVINNDNIRTLDLSPVEAALGDLSSLTPAASRTLLDQTVGFTISYEREDEYDTRELSEFPDIRLWFVRLDAAYPWFPVVLDWRAGELARYAAMLVPHQMSMRMGVVFNPEALELFVMKKVFAVDAWLKQQSHPKPRLKTADMARMLGFGVGDELFDLIEKYPVHRS

SEQ ID NO: 185128 - protein, 66 aa, Zea mays
  Clone ID: MRT4577_100426C.1.pep
CGLPTRSLRPCQGFNNLDTRNSIALSKGSWYLLPTIKILGNPSPVHENPSVKTSGRTRGRTPGGRV

SEQ ID NO: 185129 - protein, 78 aa, Zea mays
  Clone ID: MRT4577_100427C.1.pep
LSLVDEISFRTIQDNLCLKYPHHSDLCKLLIEKRVQIKRVYGPVHRLLHFNVIYLPTLLYISTPKAKKGQKDKLWGKK

SEQ ID NO: 185130 - protein, 93 aa, Zea mays
  Clone ID: MRT4577_100428C.1.pep
LTDMSPCLCSLRPTFITLPVAITLLKTLSQVASLEHVACKGACRACHHLILVRERRSLYALQSSTLYATDVCCRFEPVQTRVAGGGRRLHEDR

SEQ ID NO: 185131 - protein, 69 aa, Zea mays
  Clone ID: MRT4577_100429C.1.pep
MDMGTVEDLILQLMNLKTHIATERKVQMTDTEIQHICITAKEILLCQYSLLELVAPINVCGDIHWQFSD

SEQ ID NO: 185132 - protein, 122 aa, Zea mays
  Clone ID: MRT4577_10042C.1.pep
MQALVSSVRKLLEKQNVEQMEQTIATREREKWNKILEKKTVEINKEADVLNRKLALIPGRHSRLPSAQTYQEHLLDASSLQSSLHRVVQALESFTSNSLQAFEQTLRHAEEERSSRERAKVS

SEQ ID NO: 185133 - protein, 231 aa, Zea mays
  Clone ID: MRT4577_100430C.1.pep
PEKKKKKKKKKKKKKKKKKKKKKKKKKKKGKGFFSGFSANRIQATPIPLDPEKPDPVGPKAGKKPGEKKPGAGEKGGKTTGGKKPKSEKGLAALKSFGKGGGGKKGKKKAKKRGGTYKIYIFKGLKQGPPDIGIFFKGMAIMNFFINDIFQKLAGGAPKFGGDKKEPTITFRGNQTFGGLGLPGGVGKNAGFGGTKGGPKFPNNWTAWRGHGFVRAPLFTRVFWRGLYPSP

SEQ ID NO: 185134 - protein, 148 aa, Zea mays
  Clone ID: MRT4577_100431C.1.pep
LFGDPGQTTSYLLPPPVELVQRLGMRSTAGAVLRALLLIHICKAIQGNLTSGSAEKGLAHLKRKEDDYQLTAITTLTTTRNQALMASLQSRCMFRSLQSFKLSLSCIVFLLRKVLKNMAKYPLGCSNNFYCFLKYSRLQFNHWKLLDV

SEQ ID NO: 185135 - protein, 138 aa, Zea mays
  unsure (1)..(138): unsure at all Xaa locations
  Clone ID: MRT4577_100432C.1.pep
NSKTFFRSSYTQYMELDDAIHSVIFTVKKEYXGQFSAXDIKIVLIPLGREFKVLSPSEIXGFLDKVGVSCLYDCSLFQTKTAASLMNIQREHVFLFLALCVGVYGLLTSMWFQLPEACFAPTACGLYGSAPTVARTVY

SEQ ID NO: 185136 - protein, 52 aa, Zea mays
  Clone ID: MRT4577_100433C.1.pep
SPQRIHAHSRAPHLVNVAMMSREPNNMITRLVTAGTTPADAVDTFYHLFLPQ

SEQ ID NO: 185137 - protein, 78 aa, Zea mays
  Clone ID: MRT4577_100434C.1.pep
ADDLRDPLRLELGEKHRPLGPHHRAAARPPPSILSTTRRPTTSPAAPRSLLTTPPAPTTATISTTVANRRCHGATNCT

SEQ ID NO: 185138 - protein, 98 aa, Zea mays
  unsure (1)..(98): unsure at all Xaa locations
  Clone ID: MRT4577_100435C.1.pep
RCAAALWCYSTGWRTWSAVAVQLPWSRYKHRQTLRQLSFYPPRXRHLSSCFSIKQWPQFLYPAILTVLQSLQVDDIKRVYQGLSGPCAFSSEAKRNET

SEQ ID NO: 185139 - protein, 54 aa, Zea mays
  Clone ID: MRT4577_100436C.1.pep
SLFVTSFFFKDYQSIPRIKKPVGGIFFFFWMIKKPNNVFFFSQKPQTFGINSLS

SEQ ID NO: 185140 - protein, 105 aa, Zea mays
  Clone ID: MRT4577_100437C.1.pep
EKKKKKKKYKKKKKKKKKKAKFKKQKRPTYFIHPTFIYHPSNINSLILPHLNHNSFPLQFPTLTILKTLYLPNLIIFHNIHLSPPYQISNSPYFISLTNYFSTLF

SEQ ID NO: 185141 - protein, 41 aa, Zea mays
  Clone ID: MRT4577_100438C.1.pep
QGTCTFGDSSFVLAIIITQYMTIILCGYNNLLMVNMRYWQV

SEQ ID NO: 185142 - protein, 95 aa, Zea mays
  Clone ID: MRT4577_100439C.1.pep
WCNVAQTRRHQMSWLVGPSRQRLTPRTVARELSGGAPRAESNGGLRLVGPCGVEGSGVSGPSAEFGPKGVSFSFFFFFYNFLFEFPHNSKLSILN

SEQ ID NO: 185143 - protein, 74 aa, Zea mays
  Clone ID: MRT4577_10043C.1.pep
DRPEIIYRGEPLEVGGVSVSAKVRKDLGNEAINHGLAEESPSLFGVLLEVEGVGSGQQSSYSRPWVFEARTAVS

SEQ ID NO: 185144 - protein, 63 aa, Zea mays
  Clone ID: MRT4577_100440C.1.pep
QQATSGVCRQPSCHRIITTTSLTTTRMTRSILLDSTGTPRPMWSPPPARASTRGTRMRRKSTS

SEQ ID NO: 185145 - protein, 86 aa, Zea mays
  unsure (1)..(86): unsure at all Xaa locations
  Clone ID: MRT4577_100441C.1.pep
ATKILPLLMLLALSTCVANATIFPHCSHAPICXLLPPYLPYIIATVCQNPGLQPXRLLQCLAHTATCRRSYLARFNINLAHFCSCH

SEQ ID NO: 185146 - protein, 112 aa, Zea mays
  unsure (1)..(112): unsure at all Xaa locations
  Clone ID: MRT4577_100442C.1.pep
KTHQAKRTSNNLTTEGTNILALLELVELFWSATHGSIIPQWLLTSTTIIAQILPAVTSMGYVHAAAQGFRLQLALAVSVXQQPIVQLQQQSLAHVNLQTIATQQRRQFLPSL

SEQ ID NO: 185147 - protein, 152 aa, Zea mays
  Clone ID: MRT4577_100443C.1.pep
MGKNNKRKREPTPPSEDFGDSEYSEEEFSSESEGSPAPIPLRESSDDSDDSQGLAAEVWTYIRAVERSGLEGSDESEYSSDEEDSSEEDGGGDGGGDDYDDDGGGGGNDSDGGDDSDGGGRGGSSGSKDGDGGSSRGGSGGGGSKGSNKASG

SEQ ID NO: 185148 - protein, 134 aa, Zea mays
  unsure (1)..(134): unsure at all Xaa locations
  Clone ID: MRT4577_100444C.1.pep
IRLEAQQIFFSSEVLXPSHCGGAPNTLARGLNLMGDKTHVQDRIEGAHFFSPQHDMPLLERCDTHDTPTDLDVEXLDVVNKIKRTPLVVGHXPGFEVNRMFLQYTQLGLFDLDLVLDTHKIEPACTKFKMRTGP

SEQ ID NO: 185149 - protein, 128 aa, Zea mays
  Clone ID: MRT4577_100445C.1.pep
PVGGPDPQAVGKIQPFMVQPHLERRVIFPPRPAVAVDQPPPLPWRAVLASAGFVPVQARPFPQFPAQALLQRMALIGFRVQKGGGALFLFWQPGELVSVSAWRFLPPGVPPPPRHPKPTVNFPPGRVN

SEQ ID NO: 185150 - protein, 117 aa, Zea mays
  Clone ID: MRT4577_100446C.1.pep
KVLAGRKPFDRARPRPEQSLVPWGSPQVPDIDALGPMVGPPLQGLVPSKSLSRFAEALALCVQPEPEFRPPMSEVGPSLGRLGPRGNLTRMPQSPFRGPGESGGGFEFLARQNWALA

SEQ ID NO: 185151 - protein, 57 aa, Zea mays
  Clone ID: MRT4577_100447C.1.pep
LFWAIKRGQGSSQVKTTRGNRSYQTEIRDQNLGHRKSVTLIQGNINTKRPPGRGKHR

SEQ ID NO: 185152 - protein, 119 aa, Zea mays
  unsure (1)..(119): unsure at all Xaa locations
  Clone ID: MRT4577_100448C.1.pep
MSPRPVYATTYAAGGCPDPTGWTASRPRSKHDPAYGTPENXRPLVXRLEPIPEKSAGGALXPTSVVNLDIYRTREILSIGAQVSEREAAKKVLFSYISANDVNLGTYDERYXFCRESHL

SEQ ID NO: 185153 - protein, 75 aa, Zea mays
  Clone ID: MRT4577_100449C.1.pep
SNYVSMLLQLQIDVLHIQKPIVFSYTSKAPTQWLDSPNHLREQNQTFEQPAMTYRRGTIFPGSVFTAGSICILKT

SEQ ID NO: 185154 - protein, 209 aa, Zea mays
  unsure (1)..(209): unsure at all Xaa locations
  Clone ID: MRT4577_10044C.1.pep
MAGTGVFADVLDGEVYKYYADGEWRASASGKTVAIVNPTTRQTQYRVQACTQEEVNKVMDAAKVAQKAWARTPLWKRAELLHKAAAILKEHKTPIAECLVKEIAKPAKDAVSEVVRSGDLVSYTAEEGVRILGEGKLLVSDSFPGNERNKYCLSSRYLLGVVLAIPPFNYPXANLAGXSKIGPALIAGNSLVLXPRLQGAVAALHMVHC

SEQ ID NO: 185155 - protein, 71 aa, Zea mays
  Clone ID: MRT4577_100450C.1.pep
TGQQSLSQPRPTLGVDPACLSEAPRARNQTLPRRRSQSTVVGLHPTASERRPSSTVSCSSIPCTCRLINTP

SEQ ID NO: 185156 - protein, 67 aa, Zea mays
  Clone ID: MRT4577_100451C.1.pep
PPSLKQIIRKSPALFLRHPQRGKGKHLHSTRRNNWLRFRSRQQQRRPSPKPNPSSPLLPRLTTQTSP

SEQ ID NO: 185157 - protein, 128 aa, Zea mays
  Clone ID: MRT4577_100452C.1.pep
MSFLETAVSQNPTNHTCCIAFSSLLNLLSSYLLATTIATMGIGGAVLKFGSTALYALEFCCAAVILGIYSYFLAVQADRDVNIPVWQHAVTGLAGATVLYTIFAVLLTCCLGGKKIFAFLGILLDILC

SEQ ID NO: 185158 - protein, 65 aa, Zea mays
  Clone ID: MRT4577_100453C.1.pep
PHCVVYLLFISYLHIFVHTFQFSLHEALSLQAFPSLDGAILLVFTFHFVLVQWCSFILTMFFLCT

SEQ ID NO: 185159 - protein, 87 aa, Zea mays
  Clone ID: MRT4577_100454C.1.pep
KPTIYHKILTQNIRKQSDPQKLTTNTTTKKKQNKKHHQTKATKKPTPPYPKDPPRRPLKGKIQHTGSPHQWIRTTHQAGPKKGKNPP

SEQ ID NO: 185160 - protein, 75 aa, Zea mays
  Clone ID: MRT4577_100455C.1.pep
LEAAGPFPSRLVSFGAGSSTQPHPNPSRSSSPPQEKKLNHGGRDSQMPTPPPKKRMDELATDCSCPFCHHRSKAE

SEQ ID NO: 185161 - protein, 141 aa, Zea mays
  unsure (1)..(141): unsure at all Xaa locations
  Clone ID: MRT4577_100456C.1.pep
MAALRLASFTLRPAAAASSASSGATPAVFGSDCFARAARGLPSLRLAPPRRRGXDLARPHATAEAAAGSYASALTKVAVXNGTLXQTVSDLKKLQKEFADEASTETFDNPTRPREDESRGSWHEIASSSELQPHHRNCLNA

SEQ ID NO: 185162 - protein, 114 aa, Zea mays
  Clone ID: MRT4577_100457C.1.pep
SDECVEAACAAAPGRLAGRIRHGSGGVSLTDVHVAEAWAEVARVSASTLLCIFRSQNAVASSTNSSIHARFLLLIDRAVFLTGNLATAGRYDYLLPDFLVSVAVSVACFRTIGL

SEQ ID NO: 185163 - protein, 243 aa, Zea mays
  unsure (1)..(243): unsure at all Xaa locations
  Clone ID: MRT4577_100458C.1.pep
LSNRDNNIRYVALNMLMRAITVDALAVQRHRTTILECVKDADASIRKRALELVYLLVNDTNVKPLTKELIDYLNIADPDFIGDLTVNICSIVEKFSQEKLWYLDQMFNVLSLAGNHVKDDICHALIVVLSNTSELQGYSVRSLYKALQEYGKQGSLLRVAVWCIGEYGEMLVNNVGMLDGEEPLKVTESDAVDAVEVALNRYSADMTTGAMCLVALLKLSXRFPLTSERIKQIVAQNKRTVVL

SEQ ID NO: 185164 - protein, 510 aa, Zea mays
  Clone ID: MRT4577_100459C.1.pep
SVDFALTFLCTLVLELLYYPKLSLPGFLICGFLLWIASRELIPAGYVEHGTEDISESVFEAIMGPVRHILSERKSRKIAVFLLINTAYMFVEFGCGFVSDSLGLISDACHMLFDCAALAIGLYASYIARLPANGMYNFGRGRFEVLSGYVNAVFLVLVGVLIVLESFERILEPREISTSSLLSVSIGGLVVNIIGLVFFHEEHHHAHGGTCSHSHSHSHHGHEHHQHHGHEEHKHHNHDHHGANNVKACCDHHGDDNHRHDHHGNSKSEGIHNNIMDNTCKEKHSHSHSHSHGHEHHHYEHSEHCHQSREHSHQNCNNITVEQQLLDIPLSNISSHDTESHSSKEGLRPSDSGNSNKPGHRHHIDHNMEGIFLHVLADTMGSVGVVISTLLIKYKGWLIADPICSVFISVMIVSSVIPLLRNSAEILLQRAPRSHEKDLAVALDDIMKIEGVLGVNNFHVWNLTNTDIVSTFHLQVSAEADKSSIRNKASQIFHEAGVQDLTIEIECVKR

SEQ ID NO: 185165 - protein, 92 aa, Zea mays
  Clone ID: MRT4577_10045C.1.pep
VPSRLFREEHYFPTLLDMADPGGVARYTLTRVNWTGSVAGHPHTYAAPEVSPRLVADLRASNHTHPHMFARKFAPDCLGPLLAIADTVIFKD

SEQ ID NO: 185166 - protein, 107 aa, Zea mays
  Clone ID: MRT4577_100460C.1.pep
EFQLLLFPSSSPTANSDPPRSRSASSPPLARRPTSARLRPSPALSPSPSMRRRLATEPSELNGISHKLRHGVSVLRHKDRTSGTLSTTYKTIPLRSAWDTRATINIS

SEQ ID NO: 185167 - protein, 141 aa, Zea mays
  unsure (1)..(141): unsure at all Xaa locations
  Clone ID: MRT4577_100461C.1.pep
MLRLSYSRRLLQSSSDSGGAIPDPNPKRIPGIPPADPPAAVNSDVVVILTALLCALICVVGLAAVARCARSRRNRGAGAGDDGAPASPSXTPAXHRHHAHHQATGASTAATTTTATATAASKGLKKKALKALPRLAYADAV

SEQ ID NO: 185168 - protein, 78 aa, Zea mays
  Clone ID: MRT4577_100462C.1.pep
GGADKNWGPPGAEDCGRGRPQRPREADPPARLTADSAHRLGERLGSHLSPPHPKELIALVYRHVHQAGECCRCISCLR

SEQ ID NO: 185169 - protein, 58 aa, Zea mays
  unsure (1)..(58): unsure at all Xaa locations
  Clone ID: MRT4577_100463C.1.pep
SGRXLGFPPPNPNXATXARSAAPGXPGGCPGMCSARRPPTKPWPLLLSSMCLRLVVSL

SEQ ID NO: 185170 - protein, 69 aa, Zea mays
  Clone ID: MRT4577_100464C.1.pep
AKGKIIGRVFPNLKFFYSFIYFQSACPSIFTNLPYSFIRHYISNFVSPNSNLLALSFTSSQLLTLSHFP

SEQ ID NO: 185171 - protein, 42 aa, Zea mays
  Clone ID: MRT4577_100465C.1.pep
LQRASMSQAAFECLSAECCQTHEHDAAMSLPATIAVGGAGGN

SEQ ID NO: 185172 - protein, 77 aa, Zea mays
  Clone ID: MRT4577_100466C.1.pep
FLALGHTDQTRFLPKQGILGHTLGICMPADIHSSPQGPEPTYIFLRTHVRPPGTIFECPPPPLSGGLGRSPAGGRRP

SEQ ID NO: 185173 - protein, 39 aa, Zea mays
  Clone ID: MRT4577_100467C.1.pep
SSIEIHRPCQKEKETVMTNGFLTLVVDNDRESDSATVND

SEQ ID NO: 185174 - protein, 44 aa, Zea mays
  Clone ID: MRT4577_100468C.1.pep
IPSNLHASRPRIYLLRAEPLLMPHSMVHIFFSQARKLIETLRMT

SEQ ID NO: 185175 - protein, 178 aa, Zea mays
  unsure (1)..(178): unsure at all Xaa locations
  Clone ID: MRT4577_100469C.1.pep
VRFXCPSLMNMVHLYTQRMLPRMHYLHPXXTVTQLDALRYQAMGIVAARLGRAEPPLHREVVEYMLDVESHMWSMRRSKANFFRAVSLFSGVAGAARWFGDVCRWRNVATTALVHVLLLILVWYPELILPTVFLYMFLIGLWNYRRRPRHPPHMDTKMSWAEAAHPDELDEEFDTFPT

SEQ ID NO: 185176 - protein, 100 aa, Zea mays
  Clone ID: MRT4577_10046C.1.pep
LPPSCSCTSCRWPGGFYDTHQMCSVEPKWCSEATPCPHVLHRRRHTGVISIQSSRGMLIQAGTGIDMQVKSHSYCIPYCCAIRFRCCHSLCLIHLRSDRS

SEQ ID NO: 185177 - protein, 85 aa, Zea mays
  Clone ID: MRT4577_100470C.1.pep
REKEPRPRRGFLLKLRNPPGGQLPKGLGGSKNSKTGVKGKKIQLGHDPHLKKKTPHRPYNPLFQGFLKKPIFTRVPKHPFWVGFF

SEQ ID NO: 185178 - protein, 61 aa, Zea mays
  unsure (1)..(61): unsure at all Xaa locations
  Clone ID: MRT4577_100471C.1.pep
KFPKVCVMDRSSWGGMSSGSVQARRDXSASACHPSIRGVRGFEPIRSILSRTPSSLMPLFS

SEQ ID NO: 185179 - protein, 234 aa, Zea mays
  Clone ID: MRT4577_100472C.1.pep
MTDVMIAARATTPTSRRNKSRRDGLLDPSLVTPLAGCHFYDALDTLLRQALDRCTWSIEYRCVVFQHSREAYPDRWEATCLVRHPEDSLRGAEVCSEHYFIFERDSSEVAIQYVARRALSHYCLVFGGVADGLDLRYYPHRLPGSIGGMIVSPIGEDNPRLSSTLNLAVVLNTERDHALDELSRAHAEIAQLRTERAERRHLEDVSPAPVGTQHHTALLNVDTMPTTTPTVGPR

SEQ ID NO: 185180 - protein, 202 aa, Zea mays
  unsure (1)..(202): unsure at all Xaa locations
  Clone ID: MRT4577_100473C.1.pep
GYPXGPAGISSPVALSPTRYRLLLQPPPFFSLLAARQSSSSVRCSLHLQSELPSLLPMAFLPYSSGAASSQHGRVLCSEFPRRSVPSVVASRPSSGSDWSSVARSSELLSSRALPASPARISTFLHGRASSSSLVDLLSRSALHRRAPWCRALLGSPPSARISTFGPARSSFVGRAGHRPPFATRSRRFSLTRAPPCRLPAR

SEQ ID NO: 185181 - protein, 81 aa, Zea mays
  unsure (1)..(81): unsure at all Xaa locations
  Clone ID: MRT4577_100474C.1.pep
AIRPAVPSPPFNPIRVAASLVPRVIAQQRLAQRSKRGIGRRPVNADAGATPADSSEEQXXCAAGVRSPRNTRDGQAEVTMF

SEQ ID NO: 185182 - protein, 226 aa, Zea mays
  unsure (1)..(226): unsure at all Xaa locations
  Clone ID: MRT4577_100475C.1.pep
IVSARSEISPDAWTAARPPAGKKNRRRCCPACQSASRRRSPASFAASALPRCRNPSPHLNPSPRPTWTRSPRSSRASSTRATSPPPAASSPRSSSSRAPRTASPSIPSPRTLPRFRPSPLPSRSSPRCAITXRPSPXPAGVAAARQPPLPAXRAKPPPCCAGSAARTPRAGPTPPPTLTPSRGSAALRTPEARWLRSGRWQRTGCRPRGSCGMRCGTRCCKTPGSR

SEQ ID NO: 185183 - protein, 109 aa, Zea mays
  unsure (1)..(109): unsure at all Xaa locations
  Clone ID: MRT4577_100476C.1.pep
MTLTERLREKISQAFYNHGLLCASYPIPIILFTGLCILACCXVGAPVAYIQQIFVKSSVSPWHKNLLAVDVFRSPLSRAFQLVEEIRNHVLRDSSGTRGLEEVCLQVTD

SEQ ID NO: 185184 - protein, 74 aa, Zea mays
  unsure (1)..(74): unsure at all Xaa locations
  Clone ID: MRT4577_100477C.1.pep
ANVSVEAPLYEPMSVVSCSHFHLEGYDDTVEGIPDMTIITEQLGWCPQSPFKNVLNPTLKXEHKTYTVAVNRLM

SEQ ID NO: 185185 - protein, 291 aa, Zea mays
  Clone ID: MRT4577_100478C.1.pep
MTSAHSKLYSDDVSLVVVVVDTNPFFWAAAALPFADFFAHLIHFVNSLLLLNHLNRVVVIAAGVSSCAYILDSSDASPSGGVAVSDTFDKASRKAEEFIAQDARATAGNGSVASANAASLLSGALSISLCYIQRIFRSGSRHPQPRILCLQGSPDGPEQYVAVMNSIFSAQRSMVPIDSCIVGTQDSAFLQQASYITGGVYLKPQELNGLFQYLAAVFATDLHSRAFLRLPKTLGVDFRASCFCHKKTIDMGYVCSICLSIFCKNQKKCSTCGSEFSRAMPDLNSVPDQSK

SEQ ID NO: 185186 - protein, 109 aa, Zea mays
  unsure (1)..(109): unsure at all Xaa locations
  Clone ID: MRT4577_100479C.1.pep
KIYAYLSIFSRGILKLLEGGLMASSTATKSDAFYLMMKGDYHRXLMHLILAADRKESAESTVVAYTAAHDIALSDPSPTHPIRLGLALNFSVFYYEIMYSPDKACNLAK

SEQ ID NO: 185187 - protein, 89 aa, Zea mays
  Clone ID: MRT4577_10047C.1.pep
NSESVCMKFSLVRPGIDKPGMPMYLSYINVFSEAWSCFLSRLIVGTIRIGTLLLIKGRFCYHMLFGYNDTWCVSGYIELLQGVKKKLYC

SEQ ID NO: 185188 - protein, 43 aa, Zea mays
  Clone ID: MRT4577_100480C.1.pep
NHQIFLLHSRFHPKGCGPGKRLLNTNALVLWTSRRAAAAAYPV

SEQ ID NO: 185189 - protein, 95 aa, Zea mays
  Clone ID: MRT4577_100481C.1.pep
AACLCTSNRERQRAVRIDFSAEGHRRILFFYPVRGLSIWCRVSALRHQKLKTKSTETDHQRSSRVANCWTRALLVCRRHTGMRFLAPVFPANLLP

SEQ ID NO: 185190 - protein, 92 aa, Zea mays
  Clone ID: MRT4577_100482C.1.pep
MQVPTNVSINDDQVAKAAMKTAEGAFNFMRSTISGQPGAQRNESDTGKEESTDMGTNLNLDSDLAALLNSWYAAGFYTCRYLTLQSTRNSRP

SEQ ID NO: 185191 - protein, 80 aa, Zea mays
  Clone ID: MRT4577_100483C.1.pep
SAAEEPVPPAHSRLLPSFSSLSQARGTLLFSTPKDLSLLQEYLIRPSQQVWSNRRRLARRLPPAPVSREGMIHLVEGPAY

SEQ ID NO: 185192 - protein, 99 aa, Zea mays
  Clone ID: MRT4577_100484C.1.pep
LGTSRPAGNLILPGVSSQLPLHAAGMELAARPRPDHDPCALQPCASPSAGARLPNESSTPTGKLPQGRYMLPDSTSSLTRTCSEKDRQVRHLLPPRSRP

SEQ ID NO: 185193 - protein, 186 aa, Zea mays
  unsure (1)..(186): unsure at all Xaa locations
  Clone ID: MRT4577_100485C.1.pep
RTQASQYIHTREAGSASPPTVMMGWTTTGVCTCQGLKCTXSLCLGRRLCTRLRDVSNGXRIRCMQAWTAYWNNKFKMLTYLPTLSTDNLLKQVYYLLSNGWIPCLEFRKVRLMYRENSTYPCYYDGQYWTMWNLSMFGCNDSTHVYKELNEAIKCYPDTLHRMIRFDNIKHTHCVSLIVYNAQGSY

SEQ ID NO: 185194 - protein, 347 aa, Zea mays
  unsure (1)..(347): unsure at all Xaa locations
  Clone ID: MRT4577_100486C.1.pep
MTSVVHGKLTKFLLSTREDYKAPPVCEFVIKTALSMVERGRALPNRGMQIQYNRSSSVRFLNGFFLVLRERCEALQLSNTALEDHSLSKTSCAVNAARYCENVLREWGEDTTFLDMGPQGSLFTDEISFLVKXLGTDHLEQILSWVLLEFEDLSWEYVQSIGSWSGQTCHXDEILDEENTGVSPGFVHSLDVLTDRTSKLKLYLNSKDFLDLWRSVAEGLDYFIYNIIRWGEVCFSDPAPAAIQLIRLDTKALXLHIFRPFCSRPEAFLPFLSESXRLLTMNLLEMLTXHNGVTNXKCLKHQGLHHVNASQAGCNKKKKHQEVLWAILVSTECRRVAENDLRRRQMH

SEQ ID NO: 185195 - protein, 139 aa, Zea mays
  unsure (1)..(139): unsure at all Xaa locations
  Clone ID: MRT4577_100487C.1.pep
VSLFVAYLLLKVALPGGLRALSAPPLPFRISLSSSWPFLLSSPAAACLLTSLLFASPSSALPGSPFFGFAPLLPLLISPATPLCGSCPLRSRPGYVSLFSSLCYMLLPFNGVPSPTPXAGAPSLGAPRLRACACAVISL

SEQ ID NO: 185196 - protein, 89 aa, Zea mays
  unsure (1)..(89): unsure at all Xaa locations
  Clone ID: MRT4577_100488C.1.pep
VNMNIHSVRRFRLEYTLLQLRATXXRADRPVYQVLHPGRSKASNNQGSDPDGLIVDVPFSRTGLYPNREHYHACCRVSIMARPMCILTE

SEQ ID NO: 185197 - protein, 67 aa, Zea mays
  Clone ID: MRT4577_100489C.1.pep
LLFLAPSASFFLMKAFHLGETEHGVCFEFENKILRLAVKHGIYCSLPAEHCVIDNEKVLLIIVASDM

SEQ ID NO: 185198 - protein, 57 aa, Zea mays
  Clone ID: MRT4577_10048C.1.pep
HRDYGWSVPRCCCRPLMVPRSCYKGPGQALAGAWLQRTVYKLEPNSELRTQHHVKAL

SEQ ID NO: 185199 - protein, 67 aa, Zea mays
  Clone ID: MRT4577_100490C.1.pep
KKIKRGGKKIFFKQILFHLNGKKRGNFFLKENNIALLTFLGRKTRISLNLGENPGKGNLTSTPKIIL

SEQ ID NO: 185200 - protein, 369 aa, Zea mays
  Clone ID: MRT4577_100491C.1.pep
MAPTAAKDSGSADRWREVQAFEDSKLGVKGLVDSGVKSIPAMFHHPPESLKDVISPPALPSSDDAPAIPVVDLSVARREDLVAQVKHAAGTVGFFWVVNHGVPEELMASMLSGVRQFNEGSLEAKQALYSRDPARNVRFASNFDLFESAAADWRDTLYCKIAPDPAPRELVPEPLRNVMMEYGEELTKLARSMFELLSESLGMPSDHLHKMECMQQLHIVCQYYPPCPEPHLTMGVRKHSDTGFFTILLQDGMGGLQVLVDRGGGRQTWVDVTPRPGALMVNIGDLLQLVTNDRFRSVEHRVPANKSSDTARVSVASFFNTDVRRSERLYGPIPDPSKPPLYRSVRARDFIAKFNTIGLDGRALDHFRL

SEQ ID NO: 185201 - protein, 70 aa, Zea mays
  Clone ID: MRT4577_100492C.1.pep
SISRLLHSYSTPTYLFWSIGGEYSHYTSARTFYTLLIIDEYPFDPFVRVQWLTTTTILELAVSNHWGTLM

SEQ ID NO: 185202 - protein, 100 aa, Zea mays
  Clone ID: MRT4577_100493C.1.pep
NQGLGCPVLHGPNLNFLPKIKRRGLKKMGALFFGEKGKQLVFKKTNVLSLWEKGKKTGFYQNKCPPLTARVVKTTIFTAFSQKGLTRAKTTIGVLTQLGP

SEQ ID NO: 185203 - protein, 116 aa, Zea mays
  unsure (1)..(116): unsure at all Xaa locations
  Clone ID: MRT4577_100494C.1.pep
MTRIRGGGGRNKEAGEKVXRSDREIPAVHPERVIQKKWHGPENKRXVDIXNGIALARHNAGINTTFIARALWSGIRVNSAFPLYLPDIVQIKILDREKGRRAKLCYLGDRVNAINK

SEQ ID NO: 185204 - protein, 407 aa, Zea mays
  unsure (1)..(407): unsure at all Xaa locations
  Clone ID: MRT4577_100495C.1.pep
MAAAANGGDGEELLLLSAVEAGRGGGVPTEVEDSWRLNFEGFRPPEAHQERPPNGPLHHCLGVLAQGPEDVVAEYYQQQVEMLEGFSEMDTLTDRGFLPGMSKEEREKVARSETLAIRLSNFANMVLFAAKVYASVRSGSLAIIASTLDSLLDLLSGFILWFTAFSMQTPNPYRYPIGKKRMQPLGILVFASVMATLGLQIILESVRSLVSDGDEFSLTSDQEKWLVDIMLSVTLVKLALVIYCRSFTNEIVKAYAQDHFFDVITNVIGLVAALLANYIEGWIDPLGAIVLAIYTIRTWSMTVLENVHSLVGQSASPEYLQKLTYLCWNHHKAVRHIDTVRAXYTFGSHYFVEVDIVLPSNMPLREAHDIGEALQEKLERLPEIERAFVHLDYEFTHRPEHALSHEK

SEQ ID NO: 185205 - protein, 109 aa, Zea mays
  Clone ID: MRT4577_100496C.1.pep
GFHSRARPSLTPSPPELTVVTVVEPHRNLRAQQALSLTPAPVRTPSASLLASMSPAVPPSALCARQQVVDLVVKNQDIFLSVEEPQVFSKQDCNLADGEYVLVPEQGAA

SEQ ID NO: 185206 - protein, 120 aa, Zea mays
  Clone ID: MRT4577_100497C.1.pep
VPSGRPGQCCPLVKGIAAPLRACPTPRRGCHRAAGGAGVGRLCLHLYGVAGAVHAHAHAGLDPHPCGPIHRADVLQWFWANATKMLDMLAQYWHFLPHSITMKAVDYGVFMSDMRRLGAD

SEQ ID NO: 185207 - protein, 148 aa, Zea mays
  unsure (1)..(148): unsure at all Xaa locations
  Clone ID: MRT4577_100498C.1.pep
RKRRRKKERERSRGRRGRSTKHGASTSTAWTTAAGGGAAPARRGAASXPPPPKVYRVEPRDFRELVQRLTGAGTPAAAAAXGAGDPGRAPEGAGDAGHGRGAARAXTAEQFDYAPWFSAPLLSPASYGAPGFGAAAGYPHHGSGGPLL

SEQ ID NO: 185208 - protein, 115 aa, Zea mays
  unsure (1)..(115): unsure at all Xaa locations
  Clone ID: MRT4577_100499C.1.pep
MAGDGELKLLGMWASPFVLRARLALSFKGXLKYEYVEEEIFGNKSELLLESNPVHKKVPVLIHNGKAICESQIIVQYISEVYDGTGPSLLPVGAYDRAVARFWAAYVDEKVFSSF

SEQ ID NO: 185209 - protein, 72 aa, Zea mays
  unsure (1)..(72): unsure at all Xaa locations
  Clone ID: MRT4577_10049C.1.pep
ATSNDSLRTAFGSYGXTLDSKVITYRGTKSYCGLXLLCLIRXNYMLDAIENMNSKDLDCRSITLNYDPTIGC

SEQ ID NO: 185210 - protein, 60 aa, Zea mays
  Clone ID: MRT4577_1004C.1.pep
RTGLLLAIGGEEQNAFEERRRRCGSSGLHQRQATHNRVCKARPQDWSRLNGKLSHQQQGN

SEQ ID NO: 185211 - protein, 56 aa, Zea mays
  Clone ID: MRT4577_100500C.1.pep
FFFGPPTKPGPLYFSFMENINWPAGRPCLARDPNFLKTLQKTLNNYKLKPFLENPN

SEQ ID NO: 185212 - protein, 55 aa, Zea mays
  unsure (1)..(55): unsure at all Xaa locations
  Clone ID: MRT4577_100501C.1.pep
EIMTMIHGHIKITTLYIVLLSWCADRLCESESERAATPLIXNMSQGPLPEVRANP

SEQ ID NO: 185213 - protein, 145 aa, Zea mays
  unsure (1)..(145): unsure at all Xaa locations
  Clone ID: MRT4577_100502C.1.pep
HFLSILFRTVEDRSGGQKRSSPDKTHRSTMDGVYHHHHHQESPLTGNGVATAGEKLGVERFELPLIYISLSRKEKEDDFLAMKGTKLPQRXMKRAKNVDQTLQSVLPEMWLSDLTRGRYEVREKICVTKTRNSVKGMESMDSDSE

SEQ ID NO: 185214 - protein, 114 aa, Zea mays
  Clone ID: MRT4577_100503C.1.pep
RLSALWTVEDRSGGGAAVVGQKRSSPDKAHRSTMDAVYHQESPLTSNGAATAGEKLGVERFELTLIYISLSRKEKEDDFLAMKGTKLPQRPKKRAKNVDKTLQFVFPGMWLSDL

SEQ ID NO: 185215 - protein, 146 aa, Zea mays
  unsure (1)..(146): unsure at all Xaa locations
  Clone ID: MRT4577_100504C.1.pep
YKTQFVIYIGEHPLHVELLVDPSASALIPTLRTEGNIATGDDMQTQSVIDNQALPCLXNLLTTNHKRMMPQESYWTIXHITSNNGDQIKAVINANIIAPLVPLLQTCXFDIKKEAAWAISKATVGGTHEPINVLGDQGCFKPPLGT

SEQ ID NO: 185216 - protein, 79 aa, Zea mays
  unsure (1)..(79): unsure at all Xaa locations
  Clone ID: MRT4577_100505C.1.pep
ELRLHWALGTGLARLPCLTLARIPELAGYGHIACWWYEMGVYAYGMRACMHAGGLDKNWKGWLYRTGXAGRMKLDGCHG

SEQ ID NO: 185217 - protein, 75 aa, Zea mays
  Clone ID: MRT4577_100506C.1.pep
ELPCTLRYGHYLRMMVSRGVRCPAVLVGLLSLQTHIKHTRLKQAVKDSLAHGGLAGKPKRMARTHDKNMTVAQHG

SEQ ID NO: 185218 - protein, 67 aa, Zea mays
  Clone ID: MRT4577_100507C.1.pep
GLLLQEGGEPDKFFAPHSARSWSLRIVGAHALNEFSTSRKGGFLVVAPSEDKSEGSVEPLLVIQKFM

SEQ ID NO: 185219 - protein, 113 aa, Zea mays
  Clone ID: MRT4577_100508C.1.pep
QNLAVAQKKVRPSLCATQFCPPPQLWFYRNPTLVPPPFLCLKRQSALPSDWVRGYPPKGREEHYPPLNGNPLEHPSPVTRTKLRWPAPPRAYVRTQFHVRCFPGTWACPFSEL

SEQ ID NO: 185220 - protein, 87 aa, Zea mays
  Clone ID: MRT4577_100509C.1.pep
SVRDPRSSGLQQPSLWRLVGGRRPGPKRVPQSCLHPLQVLSGAVRAYRVGCASNTVRMDQDKEGARDGCRRHVAPCSCRREATGKGD

SEQ ID NO: 185221 - protein, 163 aa, Zea mays
  Clone ID: MRT4577_10050C.1.pep
LGPLGHVAGDGAPVVIKFVLDRAKKFLPEQPSGPKYGAPNRPLWQGWFNAFFGVLPKYCISKFYSMVPPMPKLGVVFATPIRKELPVEFLGATLPHRDEHQRRLLFEFAQGPVPVFGHGSARPPCYKQAAPNKLALVVVSHAPLGAPSPPRWKNVRGPDKRVF

SEQ ID NO: 185222 - protein, 63 aa, Zea mays
  Clone ID: MRT4577_100510C.1.pep
AAARRTHRFPGFSIYAFLRRHGRHPLAAAAPTPPRRRSRRIACSLLPPRTLISWTNTCKAMGG

SEQ ID NO: 185223 - protein, 42 aa, Zea mays
  Clone ID: MRT4577_100511C.1.pep
VLKLLSIPSSCMYFYISVGTCSSIIIEPIIVRDQNSGCYNIK

SEQ ID NO: 185224 - protein, 66 aa, Zea mays
  Clone ID: MRT4577_100512C.1.pep
NFKFNSPQIQSSLVQGGNLKCQTYSLILEGAALLLNRIAGWTPQGFSSLVGASEVLWANFAPIFEV

SEQ ID NO: 185225 - protein, 123 aa, Zea mays
  Clone ID: MRT4577_100513C.1.pep
VRKKKKKKKKKKKKKKKKKKKKKKKKKKKIKKGGPVLEVTSFMYAPHANVSAPFFGPRNFLFNALGFSQRLCLGNPLAFPPFVALPHFPFSPAVLIAWGPSLVPFPIPFAAFLARGPPLLPAL

SEQ ID NO: 185226 - protein, 81 aa, Zea mays
  Clone ID: MRT4577_100514C.1.pep
LKHAKSKRGKQSIRRPLCFSKQEMLARELKQNSSPGNQGKKNEQQNGIFSLFPTELQIDQAGSTRCVSCSAASNYWVGFII

SEQ ID NO: 185227 - protein, 367 aa, Zea mays
  Clone ID: MRT4577_100515C.1.pep
MFFLKDPPPTMSPPQPPHPVPRETVASAVASLTTWMKKRAAEARPNLLADERDDIVVLQLSLRRIPASRSTKPRLLPMPHPVVGHDGASVCVISDDRTKSRSPSASDLHASMSLHRFPVSEVIPLSTLRTDYRPYESRRRLAASHDLFVADRAILPLLPRVLGKAFYSTKKAPIGVDFTRIGWPEQVRRVLGSAFLYLRSGTCSGIKVGRLDMEEEDIVDNVMAAVEEAVEKVPKKWGNVRALHLKAVDSVALPIYQVVPELGMKIEVPEPDIVGSGEVIEKKANAGADGREVFANVSSKRKRNKKEQIEEGVVMQEEVQVDTEKKKKTKSIMVDDGHEVGKKGRVKGKRATEEGKKRKKSIKGDRL

SEQ ID NO: 185228 - protein, 92 aa, Zea mays
  Clone ID: MRT4577_100516C.1.pep
VVSSMLSATTVPLQQGGGLSEFSGLRSSASLPMRRSAASDDVMSAVSFRTHAVGTSCRSRRAPTEAKLKVAIIGFGRSWRKFLRCWHGRGDA

SEQ ID NO: 185229 - protein, 119 aa, Zea mays
  unsure (1)..(119): unsure at all Xaa locations
  Clone ID: MRT4577_100517C.1.pep
GRWYAPXGDLILAGGSGSXPACASVVWPNRSCSRTRRWCWSKRTTRQPPPTVWFLFGGASSAAGEADAARAPGRPATRTAATMAAAAAVGSSRAMDLAGGLERSVSAERSLAVSCWCDL

SEQ ID NO: 185230 - protein, 122 aa, Zea mays
  unsure (1)..(122): unsure at all Xaa locations
  Clone ID: MRT4577_100518C.1.pep
SDANYYDSKMHELLNTGDTDEFFTSYDEVFKRFDDMGLQXNLLRGIYEYGFEKTFAIHQRGIVPFCKVLDVIQKVQSGTGKIATFCCEILQHLEYVLVEXKACFLDGEREIXHQIEKVFQGL

SEQ ID NO: 185231 - protein, 75 aa, Zea mays
  Clone ID: MRT4577_100519C.1.pep
HDVFAWTRWLVMHVVDLDPDPNCMILTYMNRPFSLSSTGAHLVSIYIRRADRRRIFHAIFCALQPFIRTRQGEIS

SEQ ID NO: 185232 - protein, 135 aa, Zea mays
  unsure (1)..(135): unsure at all Xaa locations
  Clone ID: MRT4577_10051C.1.pep
ALGIAKAXYAENDAPSPALPTIAKLPLHAGGMXIDAXHTDPHAAHDPQAETGILTLTYLTDDRIVSYCYDTXKSCDHTFYNYITITPKKDPVLLSEASLNLPANRXMMTLIMLETFQCXPAMHVAIQAPLSLYAS

SEQ ID NO: 185233 - protein, 168 aa, Zea mays
  Clone ID: MRT4577_100520C.1.pep
MLHGARFLCSAVARLAHALMRSILLLMPLCSPTSTSAIPAPTWQQPARAAPYMKVHPAGPLMALDDPKDQLTALSSSAQPAVVVVVPALKHQQPAERVAETKTAKAARGRPTRLAIPPPLPCAPGVDPFGAVEAELATELEVQGEGFCLASRRGVRHAMEDGYGGITD

SEQ ID NO: 185234 - protein, 112 aa, Zea mays
  Clone ID: MRT4577_100521C.1.pep
FIVCAFHVSSCRCGSFTISVLLSLCTECSFSCLLCLSGCFFMYCVLAPYVLLVQLPRTVWSSLLSLSSFLFHFACAYVVHKPYRCMRSGVGSSAGSLRRCCCWSVVAPGTKM

SEQ ID NO: 185235 - protein, 111 aa, Zea mays
  Clone ID: MRT4577_100522C.1.pep
LSFPWGLPSRVLGFTTSLSAQPVGGGLIATTCLCSKRRGQPPPGWAFEVPFRIPLMQIQDGIVSSGLHFLFSPLFQTVFGGSEILFRFFQYVNLYFFMGIAFFPFRCLPPC

SEQ ID NO: 185236 - protein, 246 aa, Zea mays
  Clone ID: MRT4577_100523C.1.pep
SLALKYDVEFEPLRKRFPEVISRFDQIMSNGMEAPTICSTSDAVDEMSRLNSRIDSLYCENQHLRNLLAEKTKNVQELSCQISDASKKMSSQYYLEKEHLRQVKNIKEEHEDLYVESTIRDEIYQTVTSKLVDSHRDILEETTQILHAKVSSLEAAHSEKDMALCLSNEENRKLKEKLSILEKVHFIKDNQHDQLLMKQESEEMILRDIEMEPHVPPQRSCQISDQDMQYEELIKLNQTLEMASTT

SEQ ID NO: 185237 - protein, 71 aa, Zea mays
  Clone ID: MRT4577_100524C.1.pep
RMILVVRFMHVFCVFTSCSFQSNRRRYLVRLPCLRASIGDRIMPNKKNVGRPPDNSSSSKLIQFRAGALRA

SEQ ID NO: 185238 - protein, 97 aa, Zea mays
  Clone ID: MRT4577_100525C.1.pep
MGCLLKAMKDSGFMVKKYGDCRFTVTVTELEFKDSASALISFIENFTSKLDDNAKKLKKGDKDWLEPYKKSTVAYLVCHTENKVVLPDDIVKYKQNK

SEQ ID NO: 185239 - protein, 94 aa, Zea mays
  Clone ID: MRT4577_100526C.1.pep
LIQIVPNYSVVRCTRCLRLCFLSCSRAPSLENIIILNIICSLSTLVCACVYSHDAGLEKKRKKGLKIKEKCRESCSIQWSPYVETQEPPVIFPT

SEQ ID NO: 185240 - protein, 97 aa, Zea mays; identical to SEQ ID NO: 185238
  Clone ID: MRT4577_100527C.1.pep

SEQ ID NO: 185241 - protein, 36 aa, Zea mays
  Clone ID: MRT4577_100528C.1.pep
LEIAVTHEYSVHMKATSSTYGSLSVDRVTHLYDPLF

SEQ ID NO: 185242 - protein, 161 aa, Zea mays
  Clone ID: MRT4577_100529C.1.pep
FGTREREREREREREREREREREREREREREREREREREPRAEFGTRASRCVGGWSWSVSRARGSERRRPWRRVISGCWVGRRWCGFDRSRVCRGSISIRKLFLPDILGWVCFWAANCYRRCSGLDFEEEPNLLGGKFPAFVFGAMVLDSQTLRIREFLPQ

SEQ ID NO: 185243 - protein, 88 aa, Zea mays
  Clone ID: MRT4577_10052C.1.pep
MCIERNKKYIGVHFYRIYRQFHKRIHCEYKYLCELTISRRVPNPHVTSQGFIAKIQARDHNTRPNHLRLPPTSAPRAQMNRQSYFHGL

SEQ ID NO: 185244 - protein, 93 aa, Zea mays
  Clone ID: MRT4577_100530C.1.pep
CPPSVFFPGLPVSLLPLVSAPRGPGSPGGWPGWGSPWVWPFAGWPWGRGPLGSRGGPFFFFFCWFFFSLFWLLRLCVFFFLRVSSLACFSVFF

SEQ ID NO: 185245 - protein, 41 aa, Zea mays
  Clone ID: MRT4577_100531C.1.pep
DILGPMRCAETASRQVSRWIGTQMRTLCFRISPPTSFKKPP

SEQ ID NO: 185246 - protein, 27 aa, Zea mays
  Clone ID: MRT4577_100532C.1.pep
LLTLGPCLLFLCAPMVMRDTLLLNHRR

SEQ ID NO: 185247 - protein, 134 aa, Zea mays
  unsure (1)..(134): unsure at all Xaa locations
  Clone ID: MRT4577_100533C.1.pep
MSASPELYRPAEAPAFSPSCATQPLVFAGDDYCCRTPTGSGICYLREPTTCPPAPRKPPPPPPMCRKRLFQAADQQLAEAGPVPVISIRLDELERLFRXVRRRPPPPPTSGAAPAPAPAPDPPRNMVLSCSCAA

SEQ ID NO: 185248 - protein, 71 aa, Zea mays
  unsure (1)..(71): unsure at all Xaa locations
  Clone ID: MRT4577_100534C.1.pep
GQLTPSTPTTPVTPLLLKTPRGAGNVWGSVFPPGSNLAPKGMGANLFDGPQPNSPPVXDWFYSDETRSNPR

SEQ ID NO: 185249 - protein, 68 aa, Zea mays
  Clone ID: MRT4577_100535C.1.pep
QVQMTWLKSQLQGDSELAEEAHVIHVGVKAPVHEIFMICKLLISGYVSSVVSMAATAPLEPSKILLDV

SEQ ID NO: 185250 - protein, 87 aa, Zea mays
  Clone ID: MRT4577_100536C.1.pep
QSQSEGGCIDANGTERDNRRLIPITAIIFQPNQAPKASAAKQRKPLGHWPGRLGAHQPNPAAQRPITIAFRTRDRSIRVSSGGLVVV

SEQ ID NO: 185251 - protein, 61 aa, Zea mays
  Clone ID: MRT4577_100537C.1.pep
VAQAGMRVTIIEVHLICNLKDGSSNDVVQQGRVQCRQLVNGSNCVVRVGRKVCQSCLVDQR

SEQ ID NO: 185252 - protein, 55 aa, Zea mays
  Clone ID: MRT4577_100538C.1.pep
LSNSSSTVDIVEAQSKYGFFGWNLWRQPIGFLVFLISSLAECERLPFDLPEAEEE

SEQ ID NO: 185253 - protein, 41 aa, Zea mays
  Clone ID: MRT4577_100539C.1.pep
VQLMLHPDLRNIIMHEPEAYIFIKHGESFPVVGLVQIAASA

SEQ ID NO: 185254 - protein, 87 aa, Zea mays
  Clone ID: MRT4577_10053C.1.pep
EILCMQWKVMNGGPSTACVKHTAAVYKHKPAPEALFTLCEGLYEPYEKPTHAIGTRDGIGDQNNYSSTEQGYSISIKHMTFHATIEM

SEQ ID NO: 185255 - protein, 90 aa, Zea mays
  Clone ID: MRT4577_100540C.1.pep
MNLGHVEEEVGKLREEIQRLGQQQPDGSYKVKFGVIFNDDRCANIFEALVGTLRAAKKRKVVTYDGEMLLQGVHDNVEITLFPPPTVAAT

SEQ ID NO: 185256 - protein, 118 aa, Zea mays
  unsure (1)..(118): unsure at all Xaa locations
  Clone ID: MRT4577_100541C.1.pep
MAAIAASEVLVDSAEEGSLAAAAXLAAQKREQRLRKFRELHLMRNEARKLNHQEVVEEDKRLKLPANWEAKKARLEWELKEEEKXKECAAXRGEDYERVKLLXESSAEDAGGWETEKK

SEQ ID NO: 185257 - protein, 163 aa, Zea mays
  Clone ID: MRT4577_100542C.1.pep
MAEKPPKPKPPLPSKPRPAAGIPTTTPVPGSRSAAPPLKKPTLAPPPPPQVLPLKPPPAHQYRQQQPGGARKPRGYRQQQQAHRRGGGCSCRRACCLATGLALLALCLALAAACLAYLYYRPRAPSFHLRSLAPVRLRLGGNSSPAVPAMDATVRARLVSWNP

SEQ ID NO: 185258 - protein, 205 aa, Zea mays
  Clone ID: MRT4577_100543C.1.pep
MESRRLFLTRRLSISSGAQSSAAFIADEIYALLTTRSFRASVNRTELFIRSKSVTASGVAEMYRSVAVAGPPGQPLYLGRAASVLVEASARAALPDGALRLLDLLILTPNAPLPSGASCGHLMAKLFSLGRHADARRVFETLGDRQRRDAVTTVWRVGRAADAVKVFGETAATTTAPKYSSDRYVTMNMMTDCLMKGDLEAAWKC

SEQ ID NO: 185259 - protein, 39 aa, Zea mays
  Clone ID: MRT4577_100544C.1.pep
MSKQGGKAKPLKAPKADKKEYDETDLAYLQKKKDGEEAL

SEQ ID NO: 185260 - protein, 86 aa, Zea mays
  unsure (1)..(86): unsure at all Xaa locations
  Clone ID: MRT4577_100545C.1.pep
MASGDVXYLFFLRGLSWATNNESLENAFCFYGXILYSNVITYRXTGRSLGFCFFTFSSQNFILYPIDNINWKDLHWRNITLNHAHS

SEQ ID NO: 185261 - protein, 176 aa, Zea mays
  Clone ID: MRT4577_100546C.1.pep
QMIDTTKDYIQALSIVPTRELALQTSQIFIEVSKHLKARVMVTTGGTNLKDDIMRIYENVHVIIATPGRILDLMEKKVAKMNNCQMLVLDEADKLLSRDFQGLLDRVISFLPQERQILLYSATFPMTVEEFMRRHLKNAYEINLMEELTLKGVTQYYAFVQERQKVHCLNTLFSKL

SEQ ID NO: 185262 - protein, 98 aa, Zea mays
  unsure (1)..(98): unsure at all Xaa locations
  Clone ID: MRT4577_100547C.1.pep
MICFFRSLKHGDRRITTQYLKCGCIVEIHFEDGDGVLFNRXEPAFVLEHXARIMPRRTLRFDESPXNPYNANFDGGEMNLYVPRIEEARIEVFMLMAV

SEQ ID NO: 185263 - protein, 52 aa, Zea mays
  Clone ID: MRT4577_100548C.1.pep
NRRQTCLQFQIRSHFEAQLVAPSRSVKLKPPQREGCKVFVFNKKKKGGRSRS

SEQ ID NO: 185264 - protein, 56 aa, Zea mays
  Clone ID: MRT4577_100549C.1.pep
RNTAKYKNIIELFKKKVYNGIRKQKSKYTKGDNHSKVLYQWCSRRFYIPWSLDAFQ

SEQ ID NO: 185265 - protein, 110 aa, Zea mays
  unsure (1)..(110): unsure at all Xaa locations
  Clone ID: MRT4577_10054C.1.pep
MATTAQYRLLKYTLEGSRLALVTHTXTTPVTVAVDTPRAGGSHIRTTIYXSHTKTYHLTCFRLNHIMESILSREMTXRYKTDMITDADTDMLIEGPGHLCLGCAHELCND

SEQ ID NO: 185266 - protein, 94 aa, Zea mays
  unsure (1)..(94): unsure at all Xaa locations
  Clone ID: MRT4577_100550C.1.pep
MADYKHXLRGLDDGSPDYRDELYKGKLRAAKKLLKLCEVNGGLYVKYGQYVSTLTQVPKEYSLTLFCLQDQATAFKLQDIKAMVEHNFGKELYD

SEQ ID NO: 185267 - protein, 63 aa, Zea mays
  Clone ID: MRT4577_100551C.1.pep
IITLKLYLLTAIITIECIHYSKYICQQYDLYPQKSNFPYLDTLIPKLQTQHASQCSTTTTDTD

SEQ ID NO: 185268 - protein, 102 aa, Zea mays
  unsure (1)..(102): unsure at all Xaa locations
  Clone ID: MRT4577_100552C.1.pep
PRGLSMGAPFMGNSTSFQGMFRRVREQFPPMFRRKGFLPWYPGEGMEEIVFSEGESNMEALVXGVPQYQDASSPEGGFQGRGGVRPHSILGGGCFCLNPCGP

SEQ ID NO: 185269 - protein, 85 aa, Zea mays
  unsure (1)..(85): unsure at all Xaa locations
  Clone ID: MRT4577_100553C.1.pep
MDAGQTAALKDAMSCEGCDAARKRGLLQAXGIEXNHSYIQPSTSTKETDKGYDKPEDVSQTISKTLKRTSNWDVESTAPDAAATP

SEQ ID NO: 185270 - protein, 85 aa, Zea mays
  Clone ID: MRT4577_100554C.1.pep
HLLALLQNIIEQSVWPILLAESLKALGGLGLLSLGGKYFIRRVFEFVAESRSSEAFVALCLLTVAGTSLITQKLGFSDTLGAFLA

SEQ ID NO: 185271 - protein, 355 aa, Zea mays
  Clone ID: MRT4577_100555C.1.pep
MGGGGGSSGPELSTDNMKGIVLALLSSGFIGASFIIKKKGLRRAAVASGVRAGVGGYSYLMEPLWWVGMIIMIVGEIANFVAYAFAPAVLVTPLGALSIIVSAVLAHFILNERLHALGVLGCVMCIAGSVVIVIHAPQEQEITSVKEIWNMATQPAFLLYVASVIVIVFVLVFYFSPLYGQSNVLIYTAICSLMGSLSVMSVKALGTSLKLTFEGTNQLIYPETWFFMLVVATCVLTQMNYLNKALDTFNTAIVSPIYYVMFTTLTILASVIMFKDWSGQSPGSVISEICGLVVVLSGTILLHVTKDYERIPQSRSVYAPLSPSLTTRLNGELLKHVVDERTSDEEKALRRQEMY

SEQ ID NO: 185272 - protein, 70 aa, Zea mays
  Clone ID: MRT4577_100556C.1.pep
GAASVLGVLATFWLQTRGGDALASCRPHALKQASRGRPYSPMKAFLKPSYFALEAMPQEVPPPTLNPYPS

SEQ ID NO: 185273 - protein, 84 aa, Zea mays
  Clone ID: MRT4577_100557C.1.pep
ALVASVRLVGNHMPCCRGLVGLGFLRPGPARASSFHRIHPGTKMCSLILWFGAAMFFSKKNKKKWLDSWYVDYKGQYGPVPLSN

SEQ ID NO: 185274 - protein, 140 aa, Zea mays
  Clone ID: MRT4577_100558C.1.pep
VVSPPFLGRGGMFSRDQVSPRGAPRFFPPAPLVRHECFHPPCPGEVHPRVQAVFGLGLQGIFTEHPVNVRVPGLLPAPIAPPPAPVCGFEQPIPFPSIAAGGVPPYRNFGLGNSPWPPQSLWASPAAFVIGMLPRPPGRD

SEQ ID NO: 185275 - protein, 46 aa, Zea mays
  Clone ID: MRT4577_100559C.1.pep
KWRWGLKPIYIIYLTQRTASCRVLSYVKKTNDSNLINGLTRLGTIY

SEQ ID NO: 185276 - protein, 105 aa, Zea mays
  Clone ID: MRT4577_10055C.1.pep
LLQLVLSSSPEESCPPEEAFFLANDLLDIAPAVESFAGSRFAPSIVSALKQWLPVLLLGLVCRWLIGSHNEMAPNVFHFADSVLPLWVTAVFFIELADSKEPGQD

SEQ ID NO: 185277 - protein, 52 aa, Zea mays
  Clone ID: MRT4577_100560C.1.pep
AMALGSVIVQGRPWTEQAFASVSHGQWLRLANSRGGFVSGMRGVSYSLAAQR

SEQ ID NO: 185278 - protein, 363 aa, Zea mays
  Clone ID: MRT4577_100561C.1.pep
MASEVVRPSDAELLQAQADIWRLSLSYLTPLSLKCAVVLGIPAAIYRHGGAASAAELITALSLPSAKLPFLRRLLRLLAASGVFTVDRQSTDEERYRISPVSYLLVEGIPHEDHMNHTSFVLTCTSSRYIEPAIGLAEWFRKDTATSPFEELHGATLFHESMGSLDADFHDMASDALDTHDNFGVEMALREFRDLFEGIQSMTYCCGNFGDDKGARAIAKAFPHIKCTVLAPPKIIAAKPADGVKINYVEGDMFSFIPPAQTVVLKLVLHHLTDEECVKLLAQCRKAIPSRKDGGKVIIGDIMIDHSGPMLETQLLMDIGMMTMTKGRQHDEKEWRQLFTKAGFSEYKILKEFGTRVAFEVYP

SEQ ID NO: 185279 - protein, 217 aa, Zea mays
  Clone ID: MRT4577_100562C.1.pep
MASEVVRPSDAELLKAQADIWRLSLSYLTPLSLRCAVELGIPTAIYRHGGAASAAELVTGLSLPSTKLPFLRRLLRLLAASGVFTVDKQSTEEERYRISPVSYLLVDGIPHEDHMNHTGLVLTCTSTRYIEAGIGLAEWFKRDVVTSPFEELHGATLFHESMGSLDADFHDMASEALDAHDNFGIEIAMREFRDLFEGIQSMTYCCGNFGDDKGCQA

SEQ ID NO: 185280 - protein, 88 aa, Zea mays
  unsure (1)..(88): unsure at all Xaa locations
  Clone ID: MRT4577_100563C.1.pep
KASMKXLGTDEDSLIEIICSRTNQELQEINRVYKEMYKTDLEKDIISDTSGDFRKLMVALAKGRRAEDGSVIDYELIDQDARDLYDAG

SEQ ID NO: 185281 - protein, 58 aa, Zea mays
  Clone ID: MRT4577_100564C.1.pep
GLRDRHSRYINIKPSVILSAKAFTSQYRVIFGCYYIFRKHSCFQWYCCSRLATEGFSS

SEQ ID NO: 185282 - protein, 80 aa, Zea mays
  Clone ID: MRT4577_100565C.1.pep
VLGDRQGAVHRFLPRMWNYMNVVTLYWQPMFESQNIVGLPQETVSGLVCSAHPLRPCASGSLSGQHASSRSTDPCRLKIK

SEQ ID NO: 185283 - protein, 347 aa, Zea mays
  Clone ID: MRT4577_100566C.1.pep
MGMAMVLTDGEVGALIKVSAAVWVAMSYARLAAARLRPGALRLLALLPVVALLCAIPFAFSTSTFRGTSGFFLAWLGSFKLLLLGAGIGPLDPSLRLSHFVCSATLPVKLRRQSKEKSQAPARGPARILLSGPVSAGVIYAYQFKSSMGRYQLLALYSVHIYFSLDLLLATVHTVIHDLLGMEMEPQVDRPYLASSLRDFWGRRWNLMVPSILRPSVFRPVRARLGNAAGVQATFLVSGLMHELMFYYIMRSAPSGEVTAFFLLHGACAAAEGWWASHAGWWRPPRPAAVPLTLAFVAGTGFWLFLPAMVKGGLDEMVLRECQGMVVFMEQAARRLAGATDLVSSTM

SEQ ID NO: 185284 - protein, 203 aa, Zea mays
  unsure (1)..(203): unsure at all Xaa locations
  Clone ID: MRT4577_100567C.1.pep
MASDAPAEQPATQQKPTRVSLSYEEISKLFSLPIAEAASILGVCTSVLKRICRTHGIVRWPYRKLVSGKAGDDTKGPDSDKANELLEVSKIAKQKAPSASGPSVVSSSTSQGAAKSQQGNSKAGQFSXFATNSDTDYVPTKDGSHEPHESTTHEPSXGMTDDDELDWXADEAEAEADGTVTAEASAQLCSLRXEAVDDGRKLL

SEQ ID NO: 185285 - protein, 284 aa, Zea mays
  Clone ID: MRT4577_100568C.1.pep
MASDAPAEQPATQQKPTRVSLSYEEISKLFSLPIAEAASILGVCTSVLKRICRTHGIVRWPYRKLVSGKAGDDTKGPDSDKANELLEVSKIAKQKAPSASGPSVVSSSTSQGAAKSQQGNSKAGQFSVSPPTGKHNASLSLTHSQAKAIPCYMDDFKYGFPSSGLSCETMKWWGTSSDTDYVPTKDGSHEPHESTTHEPSKGMTDDDELDWGADEAEAEADGTVTAEASAQLCSLRRKAVDDGRKLLNGHNRRGQEFSRLNKRQKTALAQVFGASLPECCITRV

SEQ ID NO: 185286 - protein, 89 aa, Zea mays
  unsure (1)..(89): unsure at all Xaa locations
  Clone ID: MRT4577_100569C.1.pep
PVCVFLQNFLSGGGLIHQGCKGLLRIRCPEGVLSTTITSETTDEKFINNTGEDRGPXFLLLPKVCATPMLVALCSCGPCRSRLCCCCWG

SEQ ID NO: 185287 - protein, 65 aa, Zea mays
  Clone ID: MRT4577_10056C.1.pep
NNVPFIVPWKNSPIQIQMPGDYNLPSFTDFNYHSRQNSTGKTCILTNPTPFRGRKEFSYRHPLNQ

SEQ ID NO: 185288 - protein, 521 aa, Zea mays
  Clone ID: MRT4577_100570C.1.pep
MPPAQAPSSGGAAWRQLLLLLTVLPLTLAALAFVLQWRGGGGVDDPTTRWPSHAFPGMAEPTPPSLPSSDCADVLVGSSAPSFPYIRGWSFPSDSGAAMGSVEEHLQPKVCVQTSTSAGLEQILPWLFYHKVVGVAQFLLFVEGKAAKPNVAGVLESIPGVKVVYRTKDLEERQARSRIWNETWLSGFFYKPCNYELFVKQSLNMEMAIVMARDGGMDWIIHLDTDELLYPGGAAEYSVRRLLAEVPRDVDMVIFPNYESSVEHDNIKDPFSEVSMFKRNYDHLPKDTYFGMYKEATRGNPNYFLTYGNGKSAARIQDHLRPNGAHRWHNYAKSPNEIKLEEAAVLHYTYTKFSDLTSRRDRCGCKPTKEDVKRCFMLDFDRAAFIIASTASEEEMLRWYNERVVWTDKQLNLKLLRKGVLTRIYTPMTIVQSLRESGVFTSAIAAGQPAVNAKLSPKETNAQSQNVTASGNMTRVVRSTDSKASGRKILQAVDLAFSDTNVTAVPPLSPPSLDEHRHHSE

SEQ ID NO: 185289 - protein, 75 aa, Zea mays
  Clone ID: MRT4577_100571C.1.pep
YVDFDTSDSMQLLGMLLVALAHFLFLLMCTVKAFLPIMNSLVVLFSFLALNVCLSFYCMSLFRHNLYHFLSMLQQ

SEQ ID NO: 185290 - protein, 246 aa, Zea mays
  Clone ID: MRT4577_100572C.1.pep
MFFDRVFITHLCHLPDVFYCLGSSRIWNETWLSGFFYKPCNYELFVKQSLNMEMAIVMARDGGMDWIIHLDTDELLYPGGAAEYSVRRLLAEVPRDVDMVIFPNYESSVEHDNIKDPFSEVSMFKRNYDHLPKDTYFGMYKEATRGNPNYFLTYGNGKSAARIQDHLRPNGAHRWHNYAKSPNEIKLEEAAVLHYTYTKFSDLTSRRDRCGCKPTKEDVKRCFMLDFDRAAFIIASTASEEEMLRW

SEQ ID NO: 185291 - protein, 73 aa, Zea mays
  unsure (1)..(73): unsure at all Xaa locations
  Clone ID: MRT4577_100573C.1.pep
MAIKRRKGKKKIENAKKQSRPHKEYKKENIAPVDKEGSKQHQDKRRGIRGDKKENTRKKKLIRRXIEVYAEKT

SEQ ID NO: 185292 - protein, 77 aa, Zea mays
  Clone ID: MRT4577_100574C.1.pep
RASRTPKMWLVFYEQQNLIQAWQNPIKTQQLLYASHHSPFAYLSFYLLAIYYSIVNYWLCCSGEKRCMHIVEANWIM

SEQ ID NO: 185293 - protein, 80 aa, Zea mays
  Clone ID: MRT4577_100575C.1.pep
PLFFFFFSFFFFFFFFKETKTRNMPLWAGYTYLPFRVNFTDHIPFFVLSKLYTWNKNSKVQIDLRFVLLILSLFENIGLL

SEQ ID NO: 185294 - protein, 163 aa, Zea mays
  Clone ID: MRT4577_100576C.1.pep
MPPGGRRGAKQRPNWTREPQLGDLVLAKIKGYPRWPAKISRPEEFNHEPTPKKFFVYFYGTDEIAFVPLADLEEFTEKTKNDLLDRAPNMKVKRKYVQVFNDAVEQICKAYNELPKTSEAANGALPDQSEKPSEHLVRSQDVGEIPGLGQMEGDSPTDYSHTS

SEQ ID NO: 185295 - protein, 31 aa, Zea mays
  unsure (1)..(31): unsure at all Xaa locations
  Clone ID: MRT4577_100577C.1.pep
ILRFLXQGXKIHLIVXXRRALYAIQAASIHR

SEQ ID NO: 185296 - protein, 153 aa, Zea mays
  unsure (1)..(153): unsure at all Xaa locations
  Clone ID: MRT4577_100578C.1.pep
MPSPRLPFSFLSDTPISHSPHHTKQTRLPAQSLPLLSSPLLWADIATEGSHDYARHYDSKMXELLNTDNTDXLFPSYDDVYKISDQMRLQENLLRCIYRXGSHKYSENKLKGIDPFLKVLDVLLQRHAXTGETADYXAVILHELDYGLIECQD

SEQ ID NO: 185297 - protein, 417 aa, Zea mays
  Clone ID: MRT4577_100579C.1.pep
MPALSDVALQAAIAGNLRLLKLVASKMNLREAKDAAGRNALHLAAEMGRLEVCRFLVEESGFEVNFACAEGGSPVHCAAAGGSESVLGYLLDHGGDPVMPDSMGSTPLHDAAEEGHCAAVRMLLSKGVDVDPHGCRGTPLHLACSNDRDQVVRILLEHGADPNKVVGHVLPPLMMAYCGGSLRCMKLLIEAGADVNLIAPSGVILAQAVCDGSTEIVKFLLEVGADPNIPDEDGKIPIMYPAFNGHRELVEILFPKTRPVSSLPDWSVDGIIRSMKDLFFKPQDAAVVEKKIADAKSQGKEAFARGEYPAAVYFYTMVLENDLDATAFANRSLCWLRLREGAKALLDAQQCKMIRPRWSKAWYREGAALSLLKDYQGAVNAFTEALKLDPASLEIKKALREATDSLANVGRSGEQNP

SEQ ID NO: 185298 - protein, 60 aa, Zea mays
  Clone ID: MRT4577_10057C.1.pep
TSFKADSLDMELEGITVHIKTIHYKGYTLQPINGGRTRRSKLTYPCMQHRRPVNMPPKVN

SEQ ID NO: 185299 - protein, 103 aa, Zea mays
  Clone ID: MRT4577_100580C.1.pep
GVRRLPGKRRPACAARASSRLQQWKTESLGRPAAVGVEPAPHSLAPACCECQAPGRVAGVERVHSSSVLPGPLCGCLQGSWPVLESRVAAAGTPVCAELAFPG

SEQ ID NO: 185300 - protein, 48 aa, Zea mays
  Clone ID: MRT4577_100581C.1.pep
FYGPEEQRHGRGHQRDLRAQPDDDQELRTPGRATRAEPATTTCTRRNR

SEQ ID NO: 185301 - protein, 66 aa, Zea mays
  Clone ID: MRT4577_100582C.1.pep
FRVFFLFTILPNRAFFQTYLIWESQDFFQSTIFKSVPYFLFFRCPNKNPLLFFKPVLKIIIMFHSF

SEQ ID NO: 185302 - protein, 374 aa, Zea mays
  Clone ID: MRT4577_100583C.1.pep
MQVTFDLQSIPLYLSEMAPPQYRGAINNGFELCISLGILFANVLNYFVIKITAGWGWRISLSMAALPAAFLTIGAIFLPETPSFIIQRDGNNTDKARVLLQKLRGTASVQKELDDLVRASDLSRATRYPFRSILERKYRPQLVVALLVPFFNQVSGINVVNFYAPVMFRTIGLKESASLLSSVVTRLCATSANVVAMVVVDRVGRRKLFLAGGVQMILSQFTVGAILAAKFRDYEEMGDGYAYLVLTTLCVFVAGFAWSWGPLTFLVPAEVCPLEIRSAGQSIVVAVVFLMTFVISQTFLEVLCRVKSATFFVFGGWICLMTLFVYLFLPETKKLPMEQMEQVWKTHWFWKKVVGEEADRKETGAGKIALSGLS

SEQ ID NO: 185303 - protein, 212 aa, Zea mays
  Clone ID: MRT4577_100584C.1.pep
MTAVPPSCQILDGKALAQKMQGELQRDIAQLVAQGHRSPGLAVLMVGDNPASAVYVRNKEKACEKLGMVSFGKHFSADTDQETLTAAIASLNEDERVDGILVQLPLPDHLDAVKLLHTIDPSKDADGLHPVNLGHLVRGEEGLRSCTPAGVMALLAEYNLDLTGKNAVVLGRSILVGKPLALMLLEKNCTVTIAHSRTQNLADITRQADILV

SEQ ID NO: 185304 - protein, 191 aa, Zea mays
  unsure (1)..(191): unsure at all Xaa locations
  Clone ID: MRT4577_100585C.1.pep
EAVRVLRRDSPXAGGGGFKFAETRGAPWLKPARAAADGLLPLSGQQQQQQVWNDSMPHVAHQEDFDGFTVTAFKGISPKTLDHQGAGVEACAAVSSPDGVPDLQRALSLLSNSPVGGGGTNTNTNHPPSSPAGELHHHRAAPRCPEQLARRRLRLRAAGGLVAGAVAGRRMQLQLERGPRPPRARAASDSR

SEQ ID NO: 185305 - protein, 416 aa, Zea mays
  Clone ID: MRT4577_100587C.1.pep
MRLPLLPRSPLLAAAAAMPPRRRRVVKATPLKPSSPQLSSTPPPTPSVEVPKPEPPDHHDPTPSARRRLPLAAGAVEAQEEWHPLPLSTADLSLPLTLPTGQTFLWRRTSLSPLRFTGAVGSHLVSLSHLPDPDDGRLAFLLHNDGGCPASSLPAARAALLDYLNAAVSLADLWRQFAAADERFADVSARLGGGGARVLRQEPVDNFFQFLCSSNNNIARIEKMVWTLAGYGERLGEVGGFVFHRFPTIERLALVSEQELREAGFGYRAKYIVGTAKELQAKPSGGQKWLASLREKELSDVIEALCTLPGVGPKVAACIALFSLDQNHAIPVDTHVWKVATQYLLPELAGKSLTPKLSVVVADAFVTRFGSYAGWAQNVLFIGQLPTQKVVVAQVTSDNGTTKPTKRKRRVQPEPC

SEQ ID NO: 185306 - protein, 272 aa, Zea mays
  Clone ID: MRT4577_100588C.1.pep
FGGPEGPEFPGRPTRPSLIPYQAKIPMQALSTPGHQSQSSLSMSSSKMAPVTNLSTGGGDLSRSSNAPVASGSPSNSVSKSTGGSPPATGNAKGVQQPVQLPSPQQQLAKNSVSTCGSKSTPANHFSMAMPSILGQQPNSSPGSNTGSKQQSHMSSSMKQQPFPQGHFFISSTYAPQAPGAGGAAALGLYQKRPGDKTQPQAPHQQNALSAAACSNMKSLHSSSGGFMHLAAATQSAGGGMPHTHMPAGQMSFGTKPVPLKPSSDQKPAVGK

SEQ ID NO: 185307 - protein, 48 aa, Zea mays
  Clone ID: MRT4577_100589C.1.pep
SLQRGNGNWFLRLISPWRRWPAPLKKPPGILIIERAWPPLWVVKYIGS

SEQ ID NO: 185308 - protein, 175 aa, Zea mays
  Clone ID: MRT4577_10058C.1.pep
MEKGKGLARRWAVELPDASSSSPAVPDPPGFTRSAPDADDAAGARQRKDSEAAWKAQKAWEVAQAPFKNLMMMGFMMWMAGSTVHLFSIGITFSALWQPLNALRSVGKVFEPFKDPRVDTIAPKLLFIALNLAAMGLGIWKLNTLGLLPTNPSDWVSSLAPAREVEYAGGGLPLI

SEQ ID NO: 185309 - protein, 140 aa, Zea mays
  unsure (1)..(140): unsure at all Xaa locations
  Clone ID: MRT4577_100590C.1.pep
THVDSFLLGQFSSKSCYKAFFVGSITFKPWKGLXKTWAPPKCKLFLWLAISNRCWTSDRLQKRGLDYPEVCPLCDQEPENIQHLLCNCIXARQFWHCILSSLRLXXISPVSNDSSFAXWWRKVCKQVHKSKRRLIVSSSW

SEQ ID NO: 185310 - protein, 162 aa, Zea mays
  unsure (1)..(162): unsure at all Xaa locations
  Clone ID: MRT4577_100591C.1.pep
LFLCFFIYLLLLFLFYSIIVYNFLYSFFYCCLIYLSCHTILFLYCITFIYIFIFFFIYFYFFCFSFSYFLLLSIIFVLFYYYIFFFXNYVFLIFFFFFFVFFFFYFLFYFFFFIFFFLIFILFFFFXFYFILIFKLXXFFXFFLVFFFFFFLFYFFNFSVFF

SEQ ID NO: 185311 - protein, 81 aa, Zea mays
  Clone ID: MRT4577_100592C.1.pep
KKASKNGAQAPQERKSFNFRSTSVCTGIKRRGEKSEQDKLKLETEKQVWVSFVYRVVYVYFFLSFSLSLFLFIFLFNFFFF

SEQ ID NO: 185312 - protein, 37 aa, Zea mays
  Clone ID: MRT4577_100593C.1.pep
VSNECSISWGGYFHILFADYVKQCMNQFYFVNLNKKK

SEQ ID NO: 185313 - protein, 66 aa, Zea mays
  Clone ID: MRT4577_100594C.1.pep
DAAPLHSPPPPGKWWPMSASATHRCMSSTTSTRAIQRRLFSPFLGFIRAARRMLRNCRVVSPRRRR

SEQ ID NO: 185314 - protein, 109 aa, Zea mays
  Clone ID: MRT4577_100595C.1.pep
SRWDDSLDMSGVQCSSTSGWVQAMGSEASVTCQVAKMWRIVAVGHLRDQCQQNLGEHSHDACGCHHKTCRGVEASLWGTSSHRTWLVSHGVMFFTVRSSSLPPHPAAVC

SEQ ID NO: 185315 - protein, 84 aa, Zea mays
  Clone ID: MRT4577_100596C.1.pep
NALYVFSFYKFSIHLTSNGGGKGGTHFFFSTPERPNRKGRGQAGAPSLQRNRGKGPLGPRGLKISDTGPKRWGTPGGTKTTSKI

SEQ ID NO: 185316 - protein, 52 aa, Zea mays
  Clone ID: MRT4577_100597C.1.pep
VYVKPSINVRVSRMLHPKHHSEGNKCASHLYPTPRMKLVLILNISGPDRMSK

SEQ ID NO: 185317 - protein, 71 aa, Zea mays
  Clone ID: MRT4577_100598C.1.pep
SNRVLLEPNCRAKLKPQTLYYKPVHSTNAAQTGRDHNFSSGSSWPSPLVDNFRFRDSSGPMLTKLSSQFDF

SEQ ID NO: 185318 - protein, 52 aa, Zea mays
  Clone ID: MRT4577_100599C.1.pep
TLAAATLNPYRRRKLDYYICTYNPMKLFRGLKALTRVGLVNVQSQGKTRVSP

SEQ ID NO: 185319 - protein, 406 aa, Zea mays
  Clone ID: MRT4577_10059C.1.pep
HASAPGAASHGPNLLRSSPWRALRSPDLLLLAPSCSLRAPPVQLAERPLPASASSHAAACSPSFSLLCFPCSPWNSLRRARLLLQIAQLLRADAGALDSPAKVIRCMPLFAEHFRWGRQEDAHEFLRYVVDACHTADLRMHKRLRAAAASGNCGEDVRGQGVCLVMRETFGGALLRQVKCLECKGESNKTDEIMDISLDLPGSSSVADALARLCPMLQLTPSVCSHYWVGSAWRAHHHARGIPRTSLLRVGRSHRNSLLRPAEFAQVTSIYVLASSCSLVVHPCSSLLVIASARSGKTELIKKKAKPYSSCIHLVWNWCYEFWGRNSEKLVDGDDDVRAILVRRSTKKPNSGVATPSFSSCGNRRADTSIPSIVIPCSISSSSFASALVVVFHPAARHETSPSSSS

SEQ ID NO: 185320 - protein, 193 aa, Zea mays
  Clone ID: MRT4577_1005C.1.pep
KKKKKKKKKKKKKKKKKKKKKKKKKKKKKKKKKKKKKKKGGAPFKGPNFTSPSLQRISFFLGPPKSISRPVFYHRGVWKTPGVPQFNRLETNPLFPSWLIRKGARPVPLSKHLPTLIGKGTPPFTGPLTPGGGGVPPRGPLPFASPLAPVLWVFFLSFFPRCAGFPRKVLIGGLLLGSRLRVLRPLAPKKLVW

SEQ ID NO: 185321 - protein, 296 aa, Zea mays
  Clone ID: MRT4577_100600C.1.pep
MAAAAGGGAVRALSQKEQDIQMMLAADVHLGTKNCDFQTERYVFKRRSDGIYIINLGKTWDKLQLAARVIVAIENPQDIIVQSARPYGQRAVLKFAQYTGAHAIAGRHTPGTFTNQLQTSFSEPRLLILTDPRTDHQPIKESALGNIPTIAFCDTDSPMRYVDIGIPANNKGRNSIGCLFWLLSRMVLQMRGTILPGHKWEVMVDLFFYRDPEEAKEQEEEVAVAPEFAAITDYQRTDQWGGDQWTSDWGAAPAPVPTGDGWDQAGAPVPADGTAPPVVAPTGWDQAAPPTAQGWE

SEQ ID NO: 185322 - protein, 45 aa, Zea mays
  Clone ID: MRT4577_100601C.1.pep
STSTRCPVTVQPLRGFRCHPPLLLIHNIWEISSIHLSLSINVIMQ

SEQ ID NO: 185323 - protein, 308 aa, Zea mays
  Clone ID: MRT4577_100602C.1.pep
MAAAAGGGAVRALSQKEQDIQMMLAADVHLGTKNCDFQTERYVFKRRSDGIYIINLGKTWDKLQLAARVIVAIENPQDIIVQSARPYGQRAVLKFAQYTGAHAIAGRHTPGTFTNQLQTSFSEPRLLILTDPRTDHQPIKESALGNIPTIAFCDTDSPMRYVDIGIPANNKGRNSIGCLFWLLSRMVLQMRGTILPGHKWEVMVDLFFYRDPEEAKEQEEEAAAAPEFAAITDYQGTDQWGGDQWTSDVAAPPVAPTGADWGAALAPVPTGEGWDQAGAPVPADGTVHPVVAPTGWDQAAPPTAQGWE

SEQ ID NO: 185324 - protein, 308 aa, Zea mays
  Clone ID: MRT4577_100603C.1.pep
MAAAAGGGAVRALSQKEQDIQMMLAADVHLGTKNCDFQTERYVFKRRTDGIYIINLGKTWDKLQLAARVIVAIENPQDIIVQSARPYGQRAVLKFAQYTGAHAIAGRHTPGTFTNQLQTSFSEPRLLILTDPRTDHQPIKESALGNIPTIAFCDTDSPMRYVDIGIPANNKGRNSIGCLFWLLSRMVLQMRGTILPGHKWEVMVDLFFYRDPEEAKEQEEEVAAAPEFAAITDYQGADQWGGDQWTSDVAAPPVAPTGADWGAAPAPVPTGEGWDQAGAPVPADGTVPPVVAPTGWDQAAPPTAQGWE

SEQ ID NO: 185325 - protein, 308 aa, Zea mays
  Clone ID: MRT4577_100604C.1.pep
MAAAAGGGAVRALSQKEQDIQMMLAADVHLGTKNCDFQTERYVFKRRSDGIYIINLGKTWDKLQLAARVIVAIENPQDIIVQSARPYGQRAVLKFAQYTGAHAIAGRHTPGTFTNQLQTSFSEPRLLILTDPRTDHQPIKESALGNIPTIAFCDTDSPMRYVDIGIPANNKGRNSIGCLFWLLSRMVLQMRGTILPGHKWEVMVDLFFYRDPEEAKEQEEEAAAAPEFAAITDYQGTDQWGGDQWTSDVAAPPVAPTGADWGAAPAPVPTGEGWDQAGAPVPADGTVPPVVAPTGWDQAAPPTAQGWE

SEQ ID NO: 185326 - protein, 102 aa, Zea mays
  Clone ID: MRT4577_100605C.1.pep
QQQPRVRRHPSSPHQPQGAHKLTAATDVEGQCVSQRQRRRLHAQPRVGGICNGHRPQRKTRCRPPRHTNGAHREPRTRLTKGSRGTTRTSGYRTATTRRPAT

SEQ ID NO: 185327 - protein, 308 aa, Zea mays
  unsure (1)..(308): unsure at all Xaa locations
  Clone ID: MRT4577_100606C.1.pep
MAAAAGGGAVRALSQKEQDIQMMLAADVHLGTKNCDFQTERYVFKRRSDGIYIINLGKTWDKLQLAARVIVAIENPQDIIVQSARPYGQRAVLKFAQYTGAHAIAGRHTPGTFTNQLQTSFSEPRLLILTDPRTDHQPIKESALGNIPTIAFCDTDSPMRYVDIGIPANNKGRNSIGCLFWLLSRMVLQMRGTILPGHKWEVMVDLFFYRDPEEAKEQXEEAAAAPEFAAITDYQGADQWGGDQWTSDVAAPPVAPTGADWGAAPAPVPTGEGWDQAGAPVPADGTVPPVVAPTGWDQAAPPTAQGWE

SEQ ID NO: 185328 - protein, 70 aa, Zea mays
  Clone ID: MRT4577_100607C.1.pep
PVKLMHYKKNLSIKKYIMRILGHDGNHYTLPLTNNMLLLMVLDVRKKLGICNYLMHISLQCKHFQLLEMA

SEQ ID NO: 185329 - protein, 84 aa, Zea mays
  unsure (1)..(84): unsure at all Xaa locations
  Clone ID: MRT4577_100608C.1.pep
AFVPTGAAYIGSKGHMLFTLKRRVQVSSTTRPXTRMRYLPIHKGASAPHQTPIDVLCFMTRCTLPTDDPIPLFAGLYAHDMTLS

SEQ ID NO: 185330 - protein, 117 aa, Zea mays
  unsure (1)..(117): unsure at all Xaa locations
  Clone ID: MRT4577_100609C.1.pep
PLEQQPRQLRALAAPCFAQXQWTAPPLPPLWLKHARPYTAQLLAAEISPTTPQHWRFAGVRCNARVKLYVMNGSEVTVTVTSPLCVARIAPRRRRVSLQACGLTKTLFACEWRTSMK

SEQ ID NO: 185331 - protein, 249 aa, Zea mays
  Clone ID: MRT4577_10060C.1.pep
MSPAPSRPRIRPWLVVGDLALAAAWVCAGALVKLLVYGGLGLGGRPEAEAVKVSLSLVYMFLFAWLEAASGGASYNPLTVLAAALASHGGPAVYLFTAFARIPAQVIGAVLGVKLIQVTFPNVGKGARLSVGAHHGALAEGLATFMVVMVSVTLKKKEMKSFFMKTWITSIWKNTIHLLSSDITGGIMNPASAFAWAYARGDHTTFDHLLVYWLAPLQATLLGVWAVTFFTKPKKIKEQKVDENKIKKE

SEQ ID NO: 185332 - protein, 97 aa, Zea mays
  unsure (1)..(97): unsure at all Xaa locations
  Clone ID: MRT4577_100610C.1.pep
TGGTKGWGPPGQVFLFAPVLFSPAQRVYFRWSGDGCCPHVFLIKGRSGSVVNIVFFLGSSRPKHQPACXPPPWEEKTPARLFFKLNPKKKNGAFWFC

SEQ ID NO: 185333 - protein, 57 aa, Zea mays
  Clone ID: MRT4577_100611C.1.pep
GGRPTMIELNASRREMAIVGSQYAGEMKMGLFGVLQYLMPRRGILWLQSGCIMGKDK

SEQ ID NO: 185334 - protein, 61 aa, Zea mays
  Clone ID: MRT4577_100612C.1.pep
HISWLPHISGTVFLGGMQYQKNSTTCAFSTSHETPLQGRIPPAQNGGWSGKKTGCQNTTFL

SEQ ID NO: 185335 - protein, 78 aa, Zea mays
  unsure (1)..(78): unsure at all Xaa locations
  Clone ID: MRT4577_100613C.1.pep
FVHWXYVGXGMEEGEFSEARXDLAALEKDYEEVGAEFYKGEDGHQGDQYYTLYWRGVVGLVFLSVLIYLSLCGLQPTL

SEQ ID NO: 185336 - protein, 88 aa, Zea mays
  Clone ID: MRT4577_100614C.1.pep
LEHHIFPQLHLTHLTSTKGDISHRHTMVRKTRILVTDRYLYLCSFSGLLLDLPSSSLPLGRISQPCGSALDLLPPDCGAYYIELVRNS

SEQ ID NO: 185337 - protein, 63 aa, Zea mays
  unsure (1)..(63): unsure at all Xaa locations
  Clone ID: MRT4577_100615C.1.pep
PPPGHTASSTHASHAPSLLHDAPXLISGTQPRSRPRRLTGXRTLHSLGSHEPPLARRQPSALE

SEQ ID NO: 185338 - protein, 70 aa, Zea mays
  Clone ID: MRT4577_100616C.1.pep
MREVVQMLAELPRHESSSLPQTSPSTISSSSSSSAAAVAPPPPQAGEESSPDDGKESPANCYKLFPDLLA

SEQ ID NO: 185339 - protein, 56 aa, Zea mays
  Clone ID: MRT4577_100617C.1.pep
FIHTCRQSLGGQENTFKTRLTRAGIPVLMRRITLGGTVRLFQAEPGEVVDLASGAR

SEQ ID NO: 185340 - protein, 84 aa, Zea mays
  unsure (1)..(84): unsure at all Xaa locations
  Clone ID: MRT4577_100618C.1.pep
HEAXQEALPXDSDCSNAKNAAVKDLKHDYVASISKDDPAIEASXWTSQAIIIIHPEQIGSSYAPELDCHTSHIDDKIADLITNI

SEQ ID NO: 185341 - protein, 110 aa, Zea mays
  unsure (1)..(110): unsure at all Xaa locations
  Clone ID: MRT4577_100619C.1.pep
ALGGYDREEKAARAYDLAALEYWGPSTHINFPXNSSGFSRGASMYRGVTRCRAASLLAHFCTPPAAFSNTPKLLAISHPSLGTALCLSLLGVLSFLNSHARTRLLLVYKV

SEQ ID NO: 185342 - protein, 87 aa, Zea mays
  Clone ID: MRT4577_10061C.1.pep
SGPRVAHLGTVKSTAAQSLSFIQGEELRGGGGPLCVLFPALQMSPHSPERPYEAVMSDSSRDGNDGCRILLIQGPPKVSTKAGLEVG

SEQ ID NO: 185343 - protein, 89 aa, Zea mays
  Clone ID: MRT4577_100620C.1.pep
RRGATYKPTLKLTLLPSAKTQAHRAQAIRSTQRSHTTKIHTAPLAHSSWLNDHCHTGQHNFRFFTGVVGALRNRQGVLMTCSLCITYKN

SEQ ID NO: 185344 - protein, 188 aa, Zea mays
  Clone ID: MRT4577_100621C.1.pep
MGGGTPRSSIGHILPGAGFLAVGLWHLFNHIRLFSLRPDAYVAPVWFPAPRVRHLELILVIAGSAAEFSMEMFVDHSTFLPFDADGSIPSDRLHNHEHAIICLALLVYAASALHLDRARARCRDALSLLLVAAVFAQELLVFHFHSTDHAGLEGQFHWLLQLVVAACLATALLGIGFPRSFAVSWVRS

SEQ ID NO: 185345 - protein, 90 aa, Zea mays
  unsure (1)..(90): unsure at all Xaa locations
  Clone ID: MRT4577_100622C.1.pep
VPRPSSSFFFFFFFFFFFFFFFFFFFFFFFFFFFFGTRNGSKFLLGGDAGXTPRPILKLLKMGGAKIGFNPIKERFGGIFPDNFPPVFWA

SEQ ID NO: 185346 - protein, 55 aa, Zea mays
  unsure (1)..(55): unsure at all Xaa locations
  Clone ID: MRT4577_100623C.1.pep
WLFLVYPVALLDAAFXVCIFISLAKTIGKLQVNKTSSLDPLLVLIQDQYCYTLYF

SEQ ID NO: 185347 - protein, 110 aa, Zea mays
  unsure (1)..(110): unsure at all Xaa locations
  Clone ID: MRT4577_100624C.1.pep
MGVARDLARGRNTCFEHARQAYSXGNTALXATEPSTKGRAYNAQMIPANEKSRKAIFLQMNPVSCQRGGGDHLIDLHGLHLNQEPQIIKGELTGSKMLKWASRDRKQEMV

SEQ ID NO: 185348 - protein, 65 aa, Zea mays
  Clone ID: MRT4577_100625C.1.pep
KKKKKKKKKKKKKKKKKKIKKKKKKKKKKKKKKKKKGGPLLGGSKFTSPVLAKKKIFFWGPQKLN

SEQ ID NO: 185349 - protein, 56 aa, Zea mays
  Clone ID: MRT4577_100626C.1.pep
PKRNLTLLELCNDRLIKKPFGQKGKRVQPALDGVYKFIQFIVQLHNKSKITSHLPI

SEQ ID NO: 185350 - protein, 58 aa, Zea mays
  Clone ID: MRT4577_100627C.1.pep
EELKAIGLSSRDDSPRNDVMVPVAHCNRSPVLLLMGGGMGAGKSTVLKDILKEENECC

SEQ ID NO: 185351 - protein, 162 aa, Zea mays
  unsure (1)..(162): unsure at all Xaa locations
  Clone ID: MRT4577_100628C.1.pep
PMPAGLPSGKLFCSLKMLERCQFDEKWGHIQPTADQGGTSNFFVLPAQPILLAITGPIIQSGPFHFKKKPPYPTLISWAGGQFLRWGEPFLSMAPARPVFFWDLDLGLALGGTSPIRHAENGMLPREQAWGFTSLAFXEKLSCQRRFDSPNLTIHFLHVAGL

SEQ ID NO: 185352 - protein, 55 aa, Zea mays
  Clone ID: MRT4577_100629C.1.pep
RALTHWQLNGILLYCVLPILIYHRCSWWLLNVVTISSLLNTIKHYASSGETRVPT

SEQ ID NO: 185353 - protein, 61 aa, Zea mays
  Clone ID: MRT4577_10062C.1.pep
HDDQHTIRHLHLSTSLSLIVVALLVRLRQSSLGFMCMRNIKLPAVGSPLGLLRTSGSPTRP

SEQ ID NO: 185354 - protein, 52 aa, Zea mays
  Clone ID: MRT4577_100630C.1.pep
AVKVISYDTLQHNGWCLCLLACIPWVAVGAVVVQQRVFKKPRRLKADQRDIQ

SEQ ID NO: 185355 - protein, 70 aa, Zea mays
  unsure (1)..(70): unsure at all Xaa locations
  Clone ID: MRT4577_100631C.1.pep
MXTSTSVPVLLLLDDXXGLLLXPXSXXWXXXKCXXXXXXSGSXMWPSPGFXSGXGHRXPAMYXPGKXXKC

SEQ ID NO: 185356 - protein, 110 aa, Zea mays
  Clone ID: MRT4577_100632C.1.pep
PSPPPRAQVTPGLCEDQIALHNILNTACTCSPSYDMNPASIFEVQTLFPCTNLYGLLGAGHNLTNNIVALTVDNLPRKADANTWLQRWHGQLHYHARVLITSVNQGWHAN

SEQ ID NO: 185357 - protein, 149 aa, Zea mays
  unsure (1)..(149): unsure at all Xaa locations
  Clone ID: MRT4577_100633C.1.pep
KHLVKLIGYCIEDDQRLLVXEFMARGSLENHLFRXMKIALGAAKGLAFLHGGPKPVIYRDFKTSNVLLDVEYNAKLSDFGLAKAGPQGDKTHVSTRVVGTYGYAAPEYVMTXFGVVLLEMLTGRRSMDKKRPTGEQNLVAWARPYLNDR

SEQ ID NO: 185358 - protein, 408 aa, Zea mays
  unsure (1)..(408): unsure at all Xaa locations
  Clone ID: MRT4577_100634C.1.pep
MTSPKRAAGREGCGCLAAVARGLRGACFRPAVTADGDGGGSAKGSHVHDAAETRYLNASNRELGDHFQTKRDGENGVDASIEKRTPKLLQFTFQELKSATLNFRPDSILGEGGFGYVFKGWIEPNSTAPAKPGTGVTVAVKSLEPDALQGHREWXSDMXYLNYLGXKHLVKLIGYCIEDDQRLLVYEFMARGSLENHLFRRALPLPWSYRMKIALGAAKGLAFLHGGPKPVIYRDFKTSNVLLDVEYNAKLSDFGLAKAGPQGDKTHVSTRVVGTYGYAAPEYVMTGHLTSKSDVYSFGVVLLEMLTGRRSMDKKRPTGEQNLVAWARPYLNDRRRLYQLVDPRLGLNYSVKGVQKVAQICHYCLTRDSKSRPSMDEVVKQLTPLQDLNDMASASPRPRSTQRGKVHR

SEQ ID NO: 185359 - protein, 226 aa, Zea mays
  unsure (1)..(226): unsure at all Xaa locations
  Clone ID: MRT4577_100635C.1.pep
TPKLLQFTFQELKSATLNFRPGNILGEGGFGYVFNGWIEPNSTAPAKPGTGVTVAVKSLKPDALQGHREWXEVDFLGQLHHKHLVKLIGYCIEDDQRLLVYEFMARGSLENHLFRRALPLPWSNRMKIVLGAXEGVAFLHGGPKPVIYRDFKTSNVLLDVEYNAKLSDFSLAKAGPQGDKTHVYTRVVGTYGYAAPEYVMTDAFFLGPSPMGNNGDDQRLGLSRGS

SEQ ID NO: 185360 - protein, 75 aa, Zea mays
  Clone ID: MRT4577_100636C.1.pep
PPVVTGASPPTLGGGLMRAFFSLCFCFNPWVHSPVDPLPIIMGVVAPAPGSGVRGSPPPPRALCYFCRWPSVHWR

SEQ ID NO: 185361 - protein, 85 aa, Zea mays
  Clone ID: MRT4577_100637C.1.pep
KKPLFVPITKVGSQPPREDKKPGASPQSRGQFKNPKRREKKKLNPDPWGVFNSVGPQTISFFKKKKILAVVVFFPLAPFPGKKPS

SEQ ID NO: 185362 - protein, 210 aa, Zea mays
  unsure (1)..(210): unsure at all Xaa locations
  Clone ID: MRT4577_100638C.1.pep
LPEHVLHLLRVSQDLFQSPSTLPPSRSCDHTIPLIEAARPVNIRPYRFSPAMKDEIESQVAEMLQTGLIQHSHSSFSSPVLRVKKKDSSWRFCVDYRHLNALTIKSKYPVPIIDELLDELFGASWFSILDLRAGFHQILLKEGESYKTAFQTHSGHXEFRVMAFGLIGAPGTFQKAMNHTLAPLLRKCALVFFDDIPVYSASXEEHIHHF

SEQ ID NO: 185363 - protein, 138 aa, Zea mays
  unsure (1)..(138): unsure at all Xaa locations
  Clone ID: MRT4577_100639C.1.pep
NAFYGYGAREGAPAVVHVNFYRNYGKTFKKPRRSYXKERFDAXLKLCGEYGLRCXSXLCRVQYALSRIRNAARXLLTLDEKNPRSIFXGEALFFLYEXYWLVAEGQNMLDYVFVLIDEDFLVGRFXTLFFKVGIVYFI

SEQ ID NO: 185364 - protein, 207 aa, Zea mays
  Clone ID: MRT4577_10063C.1.pep
GADNRWNDQALATSVWCCELHGHVSTKLRRPTRNWHATQVADIGSSVGEGRLGWARRGAGTMIYRGEEGASRGKKKRWPVFINGHQWRLLPPLKERGRGEGKRGEETAAVSGLGTRVAVGALLDGASGWRGPCSAPGLLRGRGKVFGSRRTGCGQAGARAAQSSAGLLGIGLSGRGAGGLGARERREEMRRLAGCVGRFPAGLEVPN

SEQ ID NO: 185365 - protein, 72 aa, Zea mays
  unsure (1)..(72): unsure at all Xaa locations
  Clone ID: MRT4577_100640C.1.pep
SYQXVPPXEPYPPPGHPRSQAHPYPPPPDVYPPPPRGHGHPPPPHGVYGGAXXGPYPSPQXXXGGYQGYXND

SEQ ID NO: 185366 - protein, 34 aa, Zea mays
  Clone ID: MRT4577_100641C.1.pep
NQLTYSYFTFTGPNENRRVSQLFDSRQPQPYIIQ

SEQ ID NO: 185367 - protein, 85 aa, Zea mays
  Clone ID: MRT4577_100642C.1.pep
TKKTTRGGGKKNKKRQPDAEDTETYNGELGELSGGARAAKLYCPVPGCLPYSRGFICVRDVFAVGQQCFCLQGRSMSDVSAVIIL

SEQ ID NO: 185368 - protein, 100 aa, Zea mays
  Clone ID: MRT4577_100643C.1.pep
MARILITGSSDGLGLAAAQRLISQGHTVVLHARNPQRAADATTACPGAETVVTGDLSSLSETKALAAQVNKLGPFDAVIQNAGLYRGPVRKTSDGIPALA

SEQ ID NO: 185369 - protein, 123 aa, Zea mays
  Clone ID: MRT4577_100644C.1.pep
AAPVQKAPRRHGTTDVRNELLINASRSGRRHAHVGARCHVSSMRPRPRTVWTCDSRRLSRAGDCLVQNQLAVRVHVGALVTDLLLTHLDAAPEANRPGATAVAERLWDVHLPLHAVHVPARDG

SEQ ID NO: 185370 - protein, 124 aa, Zea mays
  unsure (1)..(124): unsure at all Xaa locations
  Clone ID: MRT4577_100645C.1.pep
RHTLNQGQQEKHQHHHLXHHMEAQEHLAAGGYGESAEHTAATVTEAVCTVENQYDESEEGEKDHNHNQHLGEAGASAPGAFALYEKHARXRTPEHAXHRHTIEPGGRGEPAARRTAAVLALAPS

SEQ ID NO: 185371 - protein, 69 aa, Zea mays
  Clone ID: MRT4577_100646C.1.pep
SRQHSSLGAAGSRSVCERGHSATARLHVIVLVWLMTHGPYDQDRRPPCPASASVLQEVPQVCRATHVVH

SEQ ID NO: 185372 - protein, 434 aa, Zea mays
  Clone ID: MRT4577_100647C.1.pep
MLSSSSSAANTSTVEASSEDNSSNVAAAELHRGDTVEFGVSQISSVRVQDMQQLGYFGNGVGRVPGAEEVPEPEGELVVFEAFFTASLRLPAHRFMAEVLRRFEVQVHQLTPNAVVALAKTGKTSMEVVELVPCARNKWGNWWDFWFYVSEGEVEGHPGLPVAIMCSHYYVAYPQFEVAEDDENEGALRSAVRMSSGRDLVDEFLGYGVWPLAHGWALGEVCPREMPSLGGQRVRSPAFALDLRGRDPAVVVREAEDRAVRIVGRYVPRTEALWSWDIRGSNVRLNRVFELNRLSYSGYPGDDAVDRRGKRPVAVTEEDPSQEAAPATKKRKLAMNKDRQDAAQKHRAVVRIADPSVEDYFVGSGEGQLVVVLPSVATTAPTAVVGVKGTARDPSAAFCASGEIMLAAAARDVAGSMSQRLKETSQQLSQQLKQ

SEQ ID NO: 185373 - protein, 82 aa, Zea mays
  Clone ID: MRT4577_100648C.1.pep
VDDCGSIDISKSRYTEQKLSFTRHWLTLIECPLSPRHQHSLQFRIAVDSGKIVKDERLELACLNMPNPYTRFFFIDATHRLT

SEQ ID NO: 185374 - protein, 45 aa, Zea mays
  Clone ID: MRT4577_100649C.1.pep
GMGIHTQNTTEQKLQSKVVSGRKCCTYVYIRRARIRRIWGSTGAI

SEQ ID NO: 185375 - protein, 83 aa, Zea mays
  Clone ID: MRT4577_10064C.1.pep
TKKKSEKKATKNGLNLKPLASDAIFGKAARTRTKGFHILECPKNHNYIRLAVHAANLISLLMKDHSPLTRMNPTEFKCYSNRT

SEQ ID NO: 185376 - protein, 65 aa, Zea mays
  unsure (1)..(65): unsure at all Xaa locations
  Clone ID: MRT4577_100650C.1.pep
NFLRVCCDDSGXADAAAEAAAYVGTTTSRGGLGYGETDALEALVVEAAKRIDRHLRNLFECLRQS

SEQ ID NO: 185377 - protein, 76 aa, Zea mays
  Clone ID: MRT4577_100651C.1.pep
TKNDRKNFLEPKPRIKTNLTNLGLVSLKKIVPYFQPQKIWDFHLVKTPKTPLFLKKKKRAPSKTFFYKQENGPRGP

SEQ ID NO: 185378 - protein, 75 aa, Zea mays
  Clone ID: MRT4577_100652C.1.pep
FLVVDLARPPRAAIGSSAVTSPLSSFFTAEYQLPAGRPSLRGGSVKLLLSEWTDTDLPSRGLVDGDQSDHSDASR

SEQ ID NO: 185379 - protein, 261 aa, Zea mays
  unsure (1)..(261): unsure at all Xaa locations
  Clone ID: MRT4577_100653C.1.pep
KKIQICAETRLSAASAAAEMAIRYWPMAGAAVGFRLVLVLFGGDLHLASRPEVSTPLTSLRRLAEGYWLKQASVSPYSGSMYHGSPLLLSVLGPLTSSRPDGHHAHIYCSLIFVAVDFLAAMLIRATGHELQMARNRSLKSLDLTKAVKDTVNVSAGDVASLIYLWNPWAIVTCVGSCTSPIENLMAVIMIYGSCSRXILSLGYFLDAPPPXVFLIKGSIARKSDVSDNDXTSRQRVVQQFSWKPVLHFIFWLFIWSCHVL

SEQ ID NO: 185380 - protein, 50 aa, Zea mays
  unsure (1)..(50): unsure at all Xaa locations
  Clone ID: MRT4577_100654C.1.pep
XKKKKKKKKKKKKKKKKKKKKKKKKKKKKKKKKKKKKKKKKKKKKRGGRF

SEQ ID NO: 185381 - protein, 68 aa, Zea mays
  Clone ID: MRT4577_100655C.1.pep
MLIFTADFLAAMLIRATGHELEMARNRSLKSLDLTKAVKDTVNVSAGDVASLIYLWNPWAIVTCVGSC

SEQ ID NO: 185382 - protein, 94 aa, Zea mays
  Clone ID: MRT4577_100656C.1.pep
KKKNILATQAGPDYGGKKNPPNRFFFIGEGNGSGTNKGGTGPFSQMAKTPHPPIRDYYSKKAIQAGPACWGKKHQPPESKRKGPSQGPQGGLAQ

SEQ ID NO: 185383 - protein, 491 aa, Zea mays
  Clone ID: MRT4577_100657C.1.pep
TPVQICAVREQGYPGDSGPSRDETSSSRLLRSAASAAAEMAIRYWPMAGAAVGFRLVLVLFGGDLHLASRPEVSTPLTSLRRLAEGYWLKQASVSPYSGSMYHGSPLLLSVLGPLTSSRPDGHHAHIYCSLIFVAVDFLAAMLIRATGHELEMARNRSLKSLDLTKAVKDTVNVSAGDVASLIYLWNPWAIVTCVGSCTSPIENLMVVIMIYGSCSRLAPLAAFGYVMATHLSLYPAILIVPVILLLGYGLDAPPPKVFVIKGSIARKSDVSDNDKTSRQRVVQQFSWKPVLHFIFWLFIWSCHVLLLSSVILKKVGGLHEMIEASYGFILTVKDLSPNIGVLWYFFAEVFDFFRNFFLMVFNMNIIFMVLPLAIRLKHRPCFLAFVYTAIVAILKSYPSAGDSALYLGLLGLFVNELAEMQFTFFLFFGYIGVSLLSPVMHNLWIWRGTGNANFYFATGLAYTCLQTVLLVESVSSMIKHDRKLRLLVTS

SEQ ID NO: 185384 - protein, 60 aa, Zea mays
  Clone ID: MRT4577_100658C.1.pep
VIGYVNHRRFMLRTIDENGGNYHQWLVTITVGDSPSLSSVHVTNEWSGPCYWLRTKSLSR

SEQ ID NO: 185385 - protein, 112 aa, Zea mays
  Clone ID: MRT4577_100659C.1.pep
KLFVPCVWQTKRRFFPPSVFFLLPCFSIINRSVSPGLAFLLLLFFLICPPIVCRVYSPPPAPLTFPPCALFVPSRASPSPGENAWFFWEKKKKKKKKKKKKKKKKKKKKKKK

SEQ ID NO: 185386 - protein, 39 aa, Zea mays
  unsure (1)..(39): unsure at all Xaa locations
  Clone ID: MRT4577_10065C.1.pep
VXXXPVVLXPLXMXGLSSXSXXISDSSXRPLXICVLLSX

SEQ ID NO: 185387 - protein, 42 aa, Zea mays
  Clone ID: MRT4577_100660C.1.pep
LLSLKSIEVFQALWTLFEGQGCTKLGTIICTIYKYSKFYSSS

SEQ ID NO: 185388 - protein, 83 aa, Zea mays
  Clone ID: MRT4577_100661C.1.pep
SISIPISSSKITLPLLVQFRREHTLLTSDQPSTRASLYGATRQFKSTSSLGKYYGEKNTNQKSWCCPGLGLHFKLTPETPNEI

SEQ ID NO: 185389 - protein, 83 aa, Zea mays
  Clone ID: MRT4577_100662C.1.pep
VNWVSNNLKSKESVMEIVDKKIGEMYREDAVKMLRIAIICPARLPGLRPTMRSVVQMIEDPEPCRLMGIVISKKSDVKVKEIS

SEQ ID NO: 185390 - protein, 58 aa, Zea mays
  Clone ID: MRT4577_100663C.1.pep
KACKLKGPSWTKLLKKGYTCINRPSPAAFTGIHHSPKLYPVIPRGTKPWETLCERVIK

SEQ ID NO: 185391 - protein, 62 aa, Zea mays
  Clone ID: MRT4577_100664C.1.pep
NLIGGDEQHPSAHLGGLNLQGRSFKHRTIFGKRRNDPFTHVKEKAADHLDPVGKNKVDLVHP

SEQ ID NO: 185392 - protein, 67 aa, Zea mays
  Clone ID: MRT4577_100665C.1.pep
FTAPMLCDMQKVLIMNTTSLINTSCIIYSSNAMRHAKIERLIRDVAFIILLTWFSSMLVDKNNEPWN

SEQ ID NO: 185393 - protein, 137 aa, Zea mays
  unsure (1)..(137): unsure at all Xaa locations
  Clone ID: MRT4577_100666C.1.pep
LRLLLSRACSCECKPVPHASLDXERPDQRERLPGPVPPPGRALVARPDPGGAPRRGGEAPPSLLPERLGWVGGSPSRGWTPSPTDRTLVVHGVGSYNISYVSRAPAVCMALTTTLLPCDPTSYLPAPPPHGRLCMHA

SEQ ID NO: 185394 - protein, 155 aa, Zea mays
  Clone ID: MRT4577_100667C.1.pep
PTRPPTRPVIVTDIMSGLDKRLAGMVDVAVVNPPYVPTPVEEVGCRGIASSWAGGLNGRQVIDRILPAVREMLSERGWLYMVALEDNDPSDICHLMSEMGYASRVILKRCTEEESLYVLKFWRDPHAVTSVSPKSSGSESWFSQLHFKSLWHKGS

SEQ ID NO: 185395 - protein, 67 aa, Zea mays
  Clone ID: MRT4577_100668C.1.pep
GDSDKPQQNHLNLVYAVDIRYNLVRGGKGPLTWCSTIRFHTDALHATEPVNGHSGSSMMDHGLPDAR

SEQ ID NO: 185396 - protein, 422 aa, Zea mays
  Clone ID: MRT4577_100669C.1.pep
DILSKLKSSVELDHRQAAVWNILGLVLLRGGQIQSAISVLSSLTAVAPDYLDSLANLGVAYIQSGDLELSAKCFQELLLKDQNHPAALVNYAVLLLCRYGSLSAGAGGNVSTGPYVHQKEALVVAKECLLAAVKADPRAASVWVNLANAYYMDGEHKNSKRCLEQAAKLEPNHMPARYAIAVHRIRDAVRSQCSDDQLLWAANEMATVLKEGDPSAVDAPIAWAGLAMAHRAQHEIAAIYDTENINLNDAEERAQYTLKQAIQEDPDDAVQWHQLGLYNICMTRFSRSVNFLKAALARSPDCSYAWSNLGIALQLSDDPSSETVYKRALVLSSTQQLHAIFSNLGILYRQHRNYEFARKMLLRSLELCPGFAPASNNLGLVFVAEGRWEDAKSWFEKALQSDPLLDAAKSNLLKVLTLSTKQ

SEQ ID NO: 185397 - protein, 651 aa, Zea mays
  Clone ID: MRT4577_10066C.1.pep
GLTGGAILHYRPDIKLQLFKFYHHKRVILQQDNKEHRGKRHFEPPADTVDWRLPRPSLQSIDEAPKGPISVEGRNSKDTNESAGDYKAEPKNEDRFRDKDRKKKDEKHRDFGAREGDRNDRRTGVPLGSSGVERREMQREDRDAEKWDRERKDSLRDKEGNDREKDSARKDSSVVIAKDNPILEKASSDGAVKSAEHENTTTESKAPKDDVWKAHDRDPKDKKREKDVDAGDWLEQRNKYNDKELDDNAIEGDMEKDKDVFGSVQRRRMVRPRGGSQVSQREPRFRSRMRDGEGSQGKSEVSAIVYKAGECMQELLKSWKEFDVTQDATIAESLQHGPTLEIRIPAEFVTSTNRQVKGAQLWGTDIYTNDSDLVAVLMHTGYCSPTSSPPPSAIQELRATVQVLPPQESYTSTLRNNVRSRAWGAGIGCSFRIERCCIFKKGGGTIGLEPRLSHVSAVEPTLAPVAVERTMTTRAAASNALRQQRFVREVTIQYNLCNEPWLKYSINIVADKGLKKSLYTSARLKKGEVIYLETHINRYELCFSGDKPCIIGSSSNASDSETEKHQSGSHHSQNGDRGCVEHELRDVFRWSRCKKAMPESAMRSIGIPLPADQLEVLQDNLEWEDVQWSQTGVWVSGKEYPLARVHFLSAN

SEQ ID NO: 185398 - protein, 68 aa, Zea mays
  Clone ID: MRT4577_100670C.1.pep
LLKETPKHYPRHKQRFFNTTTLFYSQTNSFKQINFPPPLRPNNFPPLREPSLNPFSGRPSPCVPWKTP

SEQ ID NO: 185399 - protein, 79 aa, Zea mays
  Clone ID: MRT4577_100671C.1.pep
SKLLLPIPHTLQSSLLPYCRLQCSCLLLGALAICINPSLAVLSYTNAKVTNTQFHKLYLALLIPLIKCLHFGQARCKRL

SEQ ID NO: 185400 - protein, 85 aa, Zea mays
  unsure (1)..(85): unsure at all Xaa locations
  Clone ID: MRT4577_100672C.1.pep
KTRSKVSGSLCVGAXPNRNWDAGFGGPGASSNPCSDSYHGPSANPEVEVKSIVDFIKSHGKVKAFITLHSYSQLLMFPYGYRCTK

SEQ ID NO: 185401 - protein, 87 aa, Zea mays
  Clone ID: MRT4577_100673C.1.pep
WNACFLCARDQTNRDSFSEIVSLFFPCILDTFGCSIVIELCSSDMSGAQEILGNSLQFASDELLSQPSENALKAMLFLEFLSLLSPE

SEQ ID NO: 185402 - protein, 96 aa, Zea mays
  Clone ID: MRT4577_100674C.1.pep
PHFITDVKNRCPTFRSNAELLLHFLVHSCKNVMCCICRNIETTKTKFVDKSWIYRTLYYKSDLECWNVLIGQRALQYRRNIYMLMRICMRTLYKHW

SEQ ID NO: 185403 - protein, 42 aa, Zea mays
  unsure (1)..(42): unsure at all Xaa locations
  Clone ID: MRT4577_100675C.1.pep
MPTEEAVVADVPVTEVPAXVPAAQXADAPKANKAPLDTNAPM

SEQ ID NO: 185404 - protein, 140 aa, Zea mays
  Clone ID: MRT4577_100676C.1.pep
GRFFGNQSRFYKTWGPGGYFSFKRFLGCPERASTFVSGKGFTLWKGCASSFKKKPCPKGSRWWGQIPGFWEVPALFLTQKIQSPFTWWEFFVPEAGACFFFFKQNVLKPPIAFFLGSSGLTPLNRRKGCGGHIFFKGFFV

SEQ ID NO: 185405 - protein, 63 aa, Zea mays
  unsure (1)..(63): unsure at all Xaa locations
  Clone ID: MRT4577_100677C.1.pep
FVGVCVKINRWIMLFTLFIWVSSGICGGVKINQGGRGFIRPMYPVVCNNAMENQQKRTLPFRX

SEQ ID NO: 185406 - protein, 107 aa, Zea mays
  Clone ID: MRT4577_100679C.1.pep
NQIRTPKSKTFRETRKIRRFCRGLIHRSAAAPSELTTAAHTPRSGQTKAKATQESPPPKTSKSHIQPMKSSSRVLCLGYPGRIAARKPTTREILSMTRGFKEGLAGA

SEQ ID NO: 185407 - protein, 56 aa, Zea mays
  Clone ID: MRT4577_10067C.1.pep
ILVIEIEIHLIFFYYFIVKNKIFLCMGYKSEQFMLSKEVKKNISAFRSRHRHSVKQ

SEQ ID NO: 185408 - protein, 115 aa, Zea mays
  Clone ID: MRT4577_100680C.1.pep
MVRFFCFSSSTAHHRSKEVFSPADETMHAASKKDYQLESMTGSVRSNQMTEENNRSAVSGHCGSSPSSHQECCRSEDLNRYVCSDEGKEVGHLKKSQSLVNMLQKDHGRNSSEGS

SEQ ID NO: 185409 - protein, 46 aa, Zea mays
  unsure (1)..(46): unsure at all Xaa locations
  Clone ID: MRT4577_100681C.1.pep
YVYYPVLXNSLYVRVFIASEPVXNKKQYXVXVSLLXKKKKKKKKIK

SEQ ID NO: 185410 - protein, 40 aa, Zea mays
  Clone ID: MRT4577_100682C.1.pep
ATRNLCCTCSECCELRSWRKCSARPNPSSSTGAGRPHSSR

SEQ ID NO: 185411 - protein, 55 aa, Zea mays
  Clone ID: MRT4577_100683C.1.pep
TLTNHAVNYHMNSFSCFEDLYNGLGEITFAARDSCITELAGELRLPLHKPGRTAS

SEQ ID NO: 185412 - protein, 51 aa, Zea mays
  Clone ID: MRT4577_100684C.1.pep
TSISRSRQLFSSRLLLKRYSRSCTMILRSSSSYFFKTYFYLLTRWCTGRTL

SEQ ID NO: 185413 - protein, 113 aa, Zea mays
  unsure (1)..(113): unsure at all Xaa locations
  Clone ID: MRT4577_100685C.1.pep
MGNINYLTPKTMNLVLVVLAFIAXISSVSCSQTCCCICVQQQNSXLYHHPHHLHPXKHHHLPPPLHHHHHHLQHHLVHMQPQXHHQQHEVYVHXQHQQPVSPNTNNNNFSYYN

SEQ ID NO: 185414 - protein, 104 aa, Zea mays
  Clone ID: MRT4577_100686C.1.pep
RLQPGSGGGERWRRRSGWVRATTVVQRRGQERYNLAATGQRCGVNSGCSVEARTKRVAGHTKPTVEGTLPHQNCWYSGSANPYISLPYVQTKSRDIFCLWLPVP

SEQ ID NO: 185415 - protein, 83 aa, Zea mays
  Clone ID: MRT4577_100687C.1.pep
STDKPCFFSRGKLSLSHSDIKDHWSHHHTSTNIYAQPFSPQKPNPDVCSSVHKNARFSWFCWRRAHPGRLGLTPQRWRWGCRR

SEQ ID NO: 185416 - protein, 84 aa, Zea mays
  unsure (1)..(84): unsure at all Xaa locations
  Clone ID: MRT4577_100688C.1.pep
IRPKGFRSLGGGPPPLRRRMSSSVPDDAYXTAKWEKIPSPGIVTCPLLGGDNLSKGPPPFNEPPGDPYLPIPNKEFPWGPNGLF

SEQ ID NO: 185417 - protein, 70 aa, Zea mays
  Clone ID: MRT4577_100689C.1.pep
HFMSPGKTPILLTQGRKKNINSYSEVWPVEPFQEQRSSCLCVNKRGGGCHHRWQSCSLGFVLATVRYFSA

SEQ ID NO: 185418 - protein, 108 aa, Zea mays
  unsure (1)..(108): unsure at all Xaa locations
  Clone ID: MRT4577_10068C.1.pep
DGPEPHARRAPAEDLALLAATRQELPSCSAGXXXXXXGAPHGGGSPSTTAATREGGGASEESGARWVQRDGPGVGGGDGAAEGSGRQHAWPRRIGCGGRRESWPDXGS

SEQ ID NO: 185419 - protein, 106 aa, Zea mays
  unsure (1)..(106): unsure at all Xaa locations
  Clone ID: MRT4577_100690C.1.pep
SSPRIRGFSAWVSAPGPGGFSDSLATKGLGAKFKDQLEGDPVPVLDTSXGNGPHVCINVFSKAFEGKFSVNRQRMVSKAIWGEFQSPVHFVAQMTPKTPDEAAAPK

SEQ ID NO: 185420 - protein, 74 aa, Zea mays
  Clone ID: MRT4577_100691C.1.pep
GGNRRVSAVTMLKNGQQIKVMWHHKRRIKSEEGGGKKGGSKRAAPLFFFFFFFFFSFFFFFFFFKFIFFFSDAW

SEQ ID NO: 185421 - protein, 100 aa, Zea mays
  Clone ID: MRT4577_100692C.1.pep
ELHANMLKVVYLGWLLTSGISYSGCQHLVRPYCYTPVKLPHMPTPASTQNSPDVGVVLRVGIPTMLPPFNVSLQGVGVRASASQFVLAVQPRDARWVVGS

SEQ ID NO: 185422 - protein, 113 aa, Zea mays
  Clone ID: MRT4577_100693C.1.pep
RRRRLRLRLGPLRPEGSPPRHRPASACRRPGPWAEKERVPCALRRRRRRRPRRRRRRRLVQAVAGPGQRRQVLRAVGEEAQPAVGGRPSLLALGAPRAVQVHILSRTRGSPRQ

SEQ ID NO: 185423 - protein, 57 aa, Zea mays
  Clone ID: MRT4577_100694C.1.pep
KKKKKGEGFWVRSPFFVFLKKKVQNASVQISTKLVVKVKANEFSQSAYNICIRKPLV

SEQ ID NO: 185424 - protein, 88 aa, Zea mays
  Clone ID: MRT4577_100695C.1.pep
LQPTSFPSNRTARITGQQTLAPPDDHSRRLPGDPDQRSDAARVQIHYRGKMTPEGKASSQRRSRARPAQRWQRDKGPEVTKKKSPVGA

SEQ ID NO: 185425 - protein, 104 aa, Zea mays
  Clone ID: MRT4577_100696C.1.pep
MDRVMQLASERAVVVFTLSSCCMCHTVTQLMADLSVNALVHELDSDPRGKDMERALLKMLGGRAPAVPAVFIGGKLVGGTNNVMSLHLGGELVPMLMNAGALWV

SEQ ID NO: 185426 - protein, 431 aa, Zea mays
  unsure (1)..(431): unsure at all Xaa locations
  Clone ID: MRT4577_100697C.1.pep
MKPRASLERLARPFSSSSRRSSSDQSRRDREEEADLEAIAAREQRAFRYETLAAATRSFSEKNRLGXGGFGPVYRGRLEDGRDVAVKRLGAGSRQGAREFRNEATLLSRVQHRNVVGLIGYCARGAEDKLLVYEYVPCESLDKILFSSSSSARSSSNSDRSRRAELTWPRRHEVVVGVARGLLYLHEDAHTPIIHRDIKASNILLDDRWVPKIADFGMARLFPEAGDGHSRVHTRVAGTNGYMAPEYLMHGDLSTKADVFSFGVVVLEIVSGRKNSAFIPPPDAEADSLLEYAWRLYKKGRSLELLDHAVKSSAVPEQVELCVRIGLLCVQADPRLRPDMKRVVIILSKKQSTLEEPTRPGVPGSRYRRRPHGLRGTHYSAGSSSGTSLPSTSATSDASASASASVSNAMTTSSTHTMRSQGLPSHREEHE

SEQ ID NO: 185427 - protein, 61 aa, Zea mays
  Clone ID: MRT4577_100698C.1.pep
TCQYQNHARHSTSTVLHMYIEPQLCLNLHRHGPSFCKVTTTYLQIDICTEKIGLTTVAEAK

SEQ ID NO: 185428 - protein, 154 aa, Zea mays
  unsure (1)..(154): unsure at all Xaa locations
  Clone ID: MRT4577_100699C.1.pep
GALAVADGEYRCSVGWLAWATSXKSLDNAFXASYGKYPXSNVITDRETARSRRFGFCTFSSKNFMLDAINNMNGNELYSRNITANQAQSRLSGGGGGGYRGSPGGGCGYGGGRHDRGYGGRGRYRRPSKGGXCSYRGCGRYRRPHQGGGGCYCG

SEQ ID NO: 185429 - protein, 110 aa, Zea mays
  unsure (1)..(110): unsure at all Xaa locations
  Clone ID: MRT4577_10069C.1.pep
CSAPVRSAPSSPYLARASRSCIAAEMGASTTPLAXXGXADLEVRVRGAPGRAVRRGVGRGAGRLAFSSPGGGGSXXDLPRRRMAREGGGITRGVRGGYEEMGRGNWREEG

SEQ ID NO: 185430 - protein, 117 aa, Zea mays
  unsure (1)..(117): unsure at all Xaa locations
  Clone ID: MRT4577_1006C.1.pep
LFXFFXFFXFFXFFFXXFFLNHNNENLQKLRVTEHTGFTFMCPKNFLFRHRRQFSNNRKGGGNPXWVSGRXPSVGLFQNLGEGKYRDRKFELKKDIILVDGGVPRKIVCKFIGRKGF

SEQ ID NO: 185431 - protein, 131 aa, Zea mays
  unsure (1)..(131): unsure at all Xaa locations
  Clone ID: MRT4577_100700C.1.pep
PXLVEWXARPLLTQALETGNAGELVDARLNRNYNEVEMFRMVEAAAACIRHSASRRPRMSQVVRVLDSLAEVDLTNGVQPGKSEMFNVANTAEIRMFQRMAFGSQDFRTDFSQSSWSSQSRGLDASGSRPL

SEQ ID NO: 185432 - protein, 125 aa, Zea mays
  Clone ID: MRT4577_100701C.1.pep
MERQKYGNRIRYAEGILIGIPKIKRMDRCGYLLRDKVRNLLLSVCKSLGIRIRWSRMEGNKLGEEGTEEYQSGYVACLVSKEMRILELASGVQGYLRLSLSSLDTEIRLRSGLLLYFDSDSFVER

SEQ ID NO: 185433 - protein, 162 aa, Zea mays
  Clone ID: MRT4577_100702C.1.pep
MCTMRLLAFAVLALGAVTQAEEGARLLASKSLLNRYAVEGRDLTLQYNIYNVGSSAALDVELSDDSFPPEDFGIVSGMLNVKWDRIAPASNVSHTVVLRPLKAGYFNFTSATITYLAQEDGPVVIGSTSAPGQGGILAQREFDRRFSPHFLDWAAFGVMTLP

SEQ ID NO: 185434 - protein, 35 aa, Zea mays
  Clone ID: MRT4577_100703C.1.pep
TTPNAKLTLGFHQQRAEGAVQDCYVTYTSNPLPTQ

SEQ ID NO: 185435 - protein, 113 aa, Zea mays
  unsure (1)..(113): unsure at all Xaa locations
  Clone ID: MRT4577_100704C.1.pep
MGFDGGLVPYNPEGGGPPEVAAAPPSLGGGSWGGPFTPFSRSDKVGRIADWARNPAGPGAFAAXRDAGFDFAGLEDSIGLACGGDXCFRLVDGKPGPXPXFGPRWGFQQRAQL

SEQ ID NO: 185436 - protein, 92 aa, Zea mays
  unsure (1)..(92): unsure at all Xaa locations
  Clone ID: MRT4577_100705C.1.pep
MTNRTKKAGIVGKYXTRYGASFRKQIKKIEVSHHSKYFCEFCGKSACTRKAAGILGCKDCGKVKASSAYTINTASTVTCTSTIRRXRELTET

SEQ ID NO: 185437 - protein, 94 aa, Zea mays
  unsure (1)..(94): unsure at all Xaa locations
  Clone ID: MRT4577_100706C.1.pep
VTKEPIREREREHRTITEGWQRRKWAVRRSAILLVLQIMGAPPTCMVARSPHVAAPGWLPLHERQGDDAVGHAVLHGGDMQIHWLPHSXLLLQL

SEQ ID NO: 185438 - protein, 152 aa, Zea mays
  Clone ID: MRT4577_100707C.1.pep
GTLEPGRPIPIPGAGNQITQLGHVKDLARAFNLVLGNPKASKQIFNISGAKYVTFDGLARACAKAGGFPEPELVHYNPKEFDFGKKKAFPFRDQHFFASVEKATSELGWTPEFDLVQGLTNSYNLDFGRGTFRKEADFTTDDMILDKKLATV

SEQ ID NO: 185439 - protein, 40 aa, Zea mays
  Clone ID: MRT4577_100708C.1.pep
ETSFLLFNKKPLSVQVGCHGCRINKREPGSVHRVEALTDA

SEQ ID NO: 185440 - protein, 374 aa, Zea mays
  Clone ID: MRT4577_100709C.1.pep
MAATSSLKSSLLLPSTISDFSGAAAAVSISTQKRRSRGARVQVSAAADSKNILVMGGTRFIGVFLSRLLVKEGHQVTLFTRGKAPITQQLPGESDAEYADFSSKVLHLKGDRQDFEFVKTSLAANGYDVVYDINGREAVQVEPIIEALPNLQQYIYCSSAGVYLKSDILPHCEVDAVDPKSRHKGKLETESLLTSRGVNWTSIRPVYIYGPLNYNPVEEWFFHRLKAGRPIPIPGAGNQITQLGHVKDLARAFNLVLGNPKASKQIFNISGAKYVTFDGLARACAKAGGFPEPELVHYNPKEFDFGKKKAFPFRDQHFFASVEKATSELGWTPEFDLVEGLTNSYNLDFGRGTFRKEADFTTDDMILDKKLATV

SEQ ID NO: 185441 - protein, 117 aa, Zea mays
  Clone ID: MRT4577_10070C.1.pep
MVKKRKNNGRNKKGRGHVKPIRCSNCSRCTPKDKAIKRFTIRNMVESAAIRDISDASVFAEYTVPKMYLKLQYCVSCAIHGKIVRVRSVVGRRNRAPPPRVRYNKDGKKIVPTAPKA

SEQ ID NO: 185442 - protein, 53 aa, Zea mays
  Clone ID: MRT4577_100710C.1.pep
TSGPHCTWWVRWLTISPSGRVDVIICGRGVRVRAAPAKSYKFHIMLSLFGHIL

SEQ ID NO: 185443 - protein, 60 aa, Zea mays
  Clone ID: MRT4577_100711C.1.pep
NGLPSTPKRQSTPPFPLSVSKHEKNSAIVLTTTTNKNFSTHGSYTTSFIIIQACKTPTNP

SEQ ID NO: 185444 - protein, 54 aa, Zea mays
  Clone ID: MRT4577_100712C.1.pep
LHSIRPVCCPYPVIMPRDAPCYRVMCVCYEASVWFSTHDVVRGVNSHCRWFRAY

SEQ ID NO: 185445 - protein, 89 aa, Zea mays
  Clone ID: MRT4577_100713C.1.pep
VHINVTCLCSSLCPLFLHFSYCKACTSVLRLCKSPRSPPRSCRFFVFSGPCCLLLVFKRCCSKTLAHSHFGVQSSCPQENEVLLLPPTF

SEQ ID NO: 185446 - protein, 137 aa, Zea mays
  Clone ID: MRT4577_100714C.1.pep
ATLQQDSDSGGVATYEGLFEILCLHGSYLVVEDGGTRSRSGGLCIALCGPDHRVIGGSVGGVLTAAGTVQVIVGSFMYGGSKKNKVKAEVDMEPEEVAPAEHSGMVPPAMSGGGWEAGMMRQMDSRTPAIDINSIRG

SEQ ID NO: 185447 - protein, 82 aa, Zea mays
  Clone ID: MRT4577_100715C.1.pep
NWGRLGSGNPPQQNAPRNVWGKTRAQNTEKIPTWPQYNRACKRDQHLPTQHEDTVLKAARRFHLSHKLTNYKRMRPRIILGQ

SEQ ID NO: 185448 - protein, 85 aa, Zea mays
  Clone ID: MRT4577_100716C.1.pep
MFQCFAASQDTRPFVFYCALEDVFLQRLEPVFPFLPFHGCTVALGVPYAHEVFFPEFFRRAARGFFVLFASQPRAQDFSCLTCPK

SEQ ID NO: 185449 - protein, 145 aa, Zea mays
  Clone ID: MRT4577_100717C.1.pep
MTTRFKKNRKKRGHVSAGHGRVGKHRKHPGGRGNAGGMHHHRILFDKYHPGYFGKVGMRYFHKLSNRFYTPTVNVERLWSMVPSDKAAEAGGDKAPVVDVSQFGYFKVLGKGMLPEKPIVVKAKLISKIAEKKIKAAGGAVVLVA

SEQ ID NO: 185450 - protein, 95 aa, Zea mays
  Clone ID: MRT4577_100718C.1.pep
SNIDRLWKEHLQALKFVQQAVGLRGYAQRDPLIEYKLEGYNLFLDMMAQIRRNVIYSVYQFKPVVKNQEGEASQKVSKKKLDKGANKLGAAQAAS

SEQ ID NO: 185451 - protein, 381 aa, Zea mays
  Clone ID: MRT4577_100719C.1.pep
KDTVEMAVKEWGDKSLTELEAEERLSYSCEKGPTRDEVIANLRNAFVKIADEYKVYTEEEKQKVITVGGLHVVGTERHESRRIDNQLRGRSGRQGDPGSSRFFLSLEDNIFRIFGGDRIQGLMQAIRLEDLPIESKMLTRALDEAQRKVENYFFDIRKQLFEYDEVLNSQRDRVYAERRRALASDSLQSLIVEYAELTMDDILGANIGPDTPKENWDLNKLIAKLQQYCHLLDDLTPELLEGKSSSYDDLREYLRKRGREAYFQKTEIVEKQAPGLMKEAERFLILSNIDRLWKEHLQALKFVQQAVGLRGYAQRDPLIEYKLEGYNLFLDMMAQIRRNVIYSVYQFKPVVKNQEGEASQKVSKKKLDKGANKLGAAQAAS

SEQ ID NO: 185452 - protein, 160 aa, Zea mays
  Clone ID: MRT4577_10071C.1.pep
AMCPEMTTVSPHCDISDSTPSRPRAFSVLLSWTLGPGRRGELPLDTDLLQLLPEADHAGDGLERRASGAGVRVGSPGGAVAGRGGVTVSPVRSKAWLGKAGHRCCHGGPSPRGGWDLRRIERWGEMKIGRAELVAAQSDLRNGGARTRLRRMGSGCRLVM

SEQ ID NO: 185453 - protein, 99 aa, Zea mays
  unsure (1)..(99): unsure at all Xaa locations
  Clone ID: MRT4577_100720C.1.pep
TALRRYAEPRSAVAVLPSARXARRGLSSHAIRCDYIGYATNLIMVTTTTLMLDVGRIRLAPLRNRKATAVLKLEGSDSGLQMGETAGVTVADMLDCADV

SEQ ID NO: 185454 - protein, 126 aa, Zea mays
  unsure (1)..(126): unsure at all Xaa locations
  Clone ID: MRT4577_100721C.1.pep
AQQHACDKNKRRVRKRHCQAPTHXDHASSTRRVCMGTFMCTTTEVNCGHLADGIHLFTDYVPQLPPSGELKGLNLATIAGLSRGLLLVFEAAHSVLSSRHTCDLSYATLHRESDVVSTSSLKRDIQ

SEQ ID NO: 185455 - protein, 174 aa, Zea mays
  Clone ID: MRT4577_100722C.1.pep
SRIILQNTLFPTSPFLVFLCLSIGRVALILQQHHRSLFRSTVAWAIRKTRNGTATSVWIAPPLRSTSSTRPRERRRPKSRDPAELAPKPSETTVKKNNPLLILPTRMAEDKAAPPATKCRRREGRKRGGASWGYSRRGASVIPSLRSRHFGVGFGCLGLGFGLLVRRGQSWPGR

SEQ ID NO: 185456 - protein, 174 aa, Zea mays
  Clone ID: MRT4577_100723C.1.pep
AGRACIPSHCYHLSLPVTARCAHYTPGVRAHWFTTSICPTGPRRRSRWPRTASHDTLAASSTTSSRIKSRRPTRSRAPAPITTATMVTTAASDSCRAIPASKSTSTPAPPRSTTVRRAPSHRLIAPPDDRASTSVRACLRAFWMSVPDWLCRLIVLGVCTSSHSAPVRIATILS

SEQ ID NO: 185457 - protein, 86 aa, Zea mays
  Clone ID: MRT4577_100724C.1.pep
DQWGFIFKFLKAFGFFGGSFFLMGNLGVLRPFWWVYRGCFLGPYGGCFVVPIIPALNMKGFFVPKRINFVPIGFVFGFCTHRVLPF

SEQ ID NO: 185458 - protein, 132 aa, Zea mays
  Clone ID: MRT4577_100725C.1.pep
KKKKKKKKQTKKKKKKKKKKKNFKKKKKKKKKKTLKKKKKKKKGFVPWAGPPLGAIFAIFLPLGGGLTFLLGGPFPPFGGRFPFHGPLFKTVGLGKPLVSPTLFPWGKIPFFPVGILRKSPPPSPFPTIGPP

SEQ ID NO: 185459 - protein, 352 aa, Zea mays
  Clone ID: MRT4577_100726C.1.pep
MDAQRALLDELMGTARNLTEEEKKGHKELKWDDPDVCGPYMVRFCPHDLFVNTKSNIGPCSRIHDPKLKESFEKSPRHDTYMQRFEAELAQQCEKLVMDLDRKIRRGRERLAHDSAVPMPIPGKLAELLSVRKEQVKKLLEQIEELGEAGKVDEAEALMRRVDILNAEKTALANEADNKVAMLEKKMELCETCGSFLVADDALERTQSHVTGKQHIGYGMVRDFLVEYKAAIEKSKEEDRLAREQKAEERRKQRGKEYDNGGRDRDTRREKSGERDYDRDRQYERSSGRDRSYDYRDRGSEHRSNRYRNGRDSERGGHRYRSGGMTNDRGRMRSRSRSPTRHGYGRSRSPDH

SEQ ID NO: 185460 - protein, 34 aa, Zea mays
  Clone ID: MRT4577_100727C.1.pep
ELYLEHRLSKSVLKDTRMSHLRNITLSFFSRITI

SEQ ID NO: 185461 - protein, 116 aa, Zea mays
  Clone ID: MRT4577_100728C.1.pep
PAGPGIHNTGRPALAFLDGSLPSPPWTHSEPSLTSSWAQVSTHQISPRPNGAAPYPNLPLIAPQVLSFAARNLTEEEKKGHKELKWDDPDVCGPYMVRFCPHDLFVNTKSNIGSFF

SEQ ID NO: 185462 - protein, 218 aa, Zea mays
  Clone ID: MRT4577_100729C.1.pep
MVLWVFGYGSLIWNPGFDFDDKILGFIKGYKRTFNLACIDHRGTPEHPARTCTLETDDEAICWGIAYCVKGGPEKELKAMQYLERRECEYDQKISIDFYKEGDPLKPAVTGVLVFVSTPDPIGNKYYLGPAPLQDMARQIATANGPTGYNRDYLFSMEKALASISHEDDSIIELANEVRKVLNRTKETKITGANASLKSHAPLVHLSALPEGTVVDSR

SEQ ID NO: 185463 - protein, 275 aa, Zea mays
  Clone ID: MRT4577_10072C.1.pep
DVTKIVPSSTSTPYQKLTRTSLPYIMSRSHANQGLVEVLKRPCSGATQPVEYHSTIRRVAIPEEVAQKVHCSARKAELRPLPRPVGTVTKQAQNPAEMKGLVTLISKLENRSVSFIAPAGVGKSTVFPWELHHNTATVVVVLSPTELAAQAHVEEVRNMGQLATYVSPARMSITSLNKSMGVIYTTAAGLIMRALSAMKDATDLDAEMTVVHDESHAMDADGQFLASMWPDYDKVVKFITVSAYGVPKPTSELYFPAVEVVSVPFCEEQLSRPPM

SEQ ID NO: 185464 - protein, 167 aa, Zea mays
  Clone ID: MRT4577_100730C.1.pep
MGIPNLLRFMKPFIEPVHIKKYAGQRVGIDAYSWLHKGAYSCSMELCMSPRSAGARRYISYFMHHVNLLRHHKVVPVVVFDGGSMPCKSATDEDRHKKRELSLVLGKEKLKQGNTAAAIDLFRKAVQITPSMAYQLIQILKTENVEFVVAPYEADAQLAYLATLDAD

SEQ ID NO: 185465 - protein, 134 aa, Zea mays
  unsure (1)..(134): unsure at all Xaa locations
  Clone ID: MRT4577_100731C.1.pep
KKPLTETTNDPRPAYMYIARSDKAMPVTDEPYFGLSTLEPDIGSYESTYVSDYEGDKEXKLNETNAGEGMDDDNTFACHNRDSHNTRTGCVHALTIITTVHQDDNMRIXHEAGDTRSACHVAHEQIEHIAASSE

SEQ ID NO: 185466 - protein, 637 aa, Zea mays
  unsure (1)..(637): unsure at all Xaa locations
  Clone ID: MRT4577_100732C.1.pep
MSSAMVERATSDMLIGPDWAMNLEICDILNREPGQAKDVVKSLKKRIAHKNPKVQLLALTLLETMIKNCGDVVHMVDAERDILHEMVKIVKXKRPDXMCKENILTVIDTWQEVFGAARARHXGYCAIIKLIIPYNKGEXAGNHLHHFMKFCFKTIYLQCNISKLYLQCKISNQSTYRARFQGLRQDIIADLVDQCRSYKQRVVQLVNSTSNEELLNQGLSLNDDMQRVLAKHDAIDAGLAVRVEKPKSLQSQIXSSSTRKPDTMEDTIQRPSASTTATSQSPFGILALSAPPSSSSKAPAIPASSIDLLSGDDYVKPEPANSLALVPVTEYSAADKNVLAFADMFEQNTANNSNHNLPYSFLSSTSNSTISTSHTYHAPVRPVLPQHSAAYPNGARSNAIVPYDQQAQSNSTGSRNGQTAYGGNHQKQALNYGTGDQNGDIPPAPWGTKRSTNPFDDDQLGGMAVQPKGMQPQPVQPSQHGNKFMSAPPMPRGQPGRMQLQQVPGAQLGALQPTQATLNMQYRGMHPSMQMNHGMGMYSQPTFGGYYGMNQTQLYGVHMSGYGYGQQSGGYYIPNAAYAYTSANELAQRMNDLSVQNGDPNGAAANKQSRPEDALFGDLLSIAKMKQNKPAAGKVGG

SEQ ID NO: 185467 - protein, 105 aa, Zea mays
  unsure (1)..(105): unsure at all Xaa locations
  Clone ID: MRT4577_100733C.1.pep
MSEEKHXRQLFRHREPEEEGASGEVDYEKKEKHHXHLENLXGELGAIAAGAHALHEKHKAXKDPKNEHXHRGKEEXVAAVADGGSAGFAFHEHHXKKDAKNSAHN

SEQ ID NO: 185468 - protein, 66 aa, Zea mays
  Clone ID: MRT4577_100734C.1.pep
INIYMVTKQRSSNPKLTGRRRPKPLTNTLENSSMRLILWYMFLTLNEHLLRRVHRLNPWILWGWLV

SEQ ID NO: 185469 - protein, 1184 aa, Zea mays
  unsure (1)..(1184): unsure at all Xaa locations
  Clone ID: MRT4577_100735C.1.pep
MPLTPRQTKHLLNYLSLAPYFAILNMLDSLLCRNQYDSQVRHSEGSCLPVENQVLSNECLGALFSRPIYGEHSRTILSPEGGADMSPSQEPQKHSLRSSTDESTRATKEVILEHPKKLFSESHTNCIHATALNENFGVQTPSQVASKKIFPGLAHGADTPLTGYGSEQTLLQHSSKKFSLVSANGKYTRAAVTPFEQNSTERXDVPVLRMKGXASLRSCGXXXXXXXXXXTNGTPLKNHSKNSSLLMDGKYNITSAALFPELDSSPLKPETPAMQAAIPRLKRVQEDQGVDANNQCPPLWAMNKKMKSAHCSIEKKDHDEMAGSARSKFEWLNSFAIRDANKRRPNDPLYDKSTLFIPPDALRKMSTSQKQYWNIKCKYMDVVLFFKVGKFYELYELDAEIGQKELDWKMTVSGVGKCRQVGISESGIDDAVDKLIARGYKVGRIEQMESANQAKARGVHSVIERKLVHVSTPSTAVDNIGTDAVHLLALKEVTLASSGFQVFGFAFLDYAALKIWVGSVQDDDSSAALGALLMQVSPRELIYETSGISKETQRTIRKYASAGSVKMQLTPLSGIDFSDAAQIRNLIHSKGFFNASTESWLSALDCTMNQDVVICALGGLIGHLTRLMLHDALKNGEVLPYHVYKTCLRMDGQTLVNLEIFINNFNGGSSGTLYKHLNHCVTASGKRMLRRWICHPLKDIDAINKRLDVVEGFIQNCGLGPTTLGYLQKIPDLERLLGQVRSTVGLSSLLQLPFIGEKIIKKRIKTFIMLINGLRNGIDLLNDLQRADHGILALYKIVDIPSLSYLPELIHKFEERMQNEFPCGQVSDVNANGANDLAALMDVFIGKASEWSLVINAVSTIDVLRSFAAMTLSSFGAMCRPQVLLKDDVPVLRMKGLWHPYAFAGNANSLVPNDLTLGQDLSGLNRFALLLTGPNMGGKSTIMRATCLAVVLAQLGCYVPCTSCELTLADSIFTRLGATDRIMTGESTFLVECTETASVLQKATVDSLVLLDELGRGTSTFDGYAIAYAVFRHLVERVRCRQLFATHYHSLTKEFASHPHVSLQHMACMFKPRSDGNGQKELTFLYRLTSGACPESYGLQVAAMAGIPKSIVEKASVAGQVMRAKIAGNFKSSEQRAEFSTLHEEWLRAALAVSAMDGQPDDDDVMDTLFCIQQELKSHFRKAR

SEQ ID NO: 185470 - protein, 64 aa, Zea mays
  Clone ID: MRT4577_100736C.1.pep
GSKKNPHLHPHPCIIRWAPNPIKNRGLGYGGGSIRPILIPICPIFMLIPATVYTFRFRTGNHIS

SEQ ID NO: 185471 - protein, 65 aa, Zea mays
  Clone ID: MRT4577_100737C.1.pep
CYVLLNQGCRNGRSCPYSHDSGSLVSAPVTSGICSQESKSTSLCDTRLLPADGDWHILVVNDKTL

SEQ ID NO: 185472 - protein, 69 aa, Zea mays
  Clone ID: MRT4577_100738C.1.pep
MEVVVAAKQKAKKHIHLFYCSECEELALKIAASSDAIELQSINWRSFDNGVEDLFINGAQDIRGQNVAC

SEQ ID NO: 185473 - protein, 48 aa, Zea mays
  Clone ID: MRT4577_100739C.1.pep
MSKQGGKAKPLKAPKADKKEYDEALKELKAKAQKGAIGGSGLKKSGKK

SEQ ID NO: 185474 - protein, 72 aa, Zea mays
  unsure (1)..(72): unsure at all Xaa locations
  Clone ID: MRT4577_10073C.1.pep
PXSLHRSTSLEFNSSNTIRQRAQITLDKTFTTTSAVSRSNITNIDKDPLFSTNKHNNTVAIFRHPHSPLKDP

SEQ ID NO: 185475 - protein, 66 aa, Zea mays
  Clone ID: MRT4577_100740C.1.pep
PSFLSRSRDIPHSPTPPGGLSQVQYRNIAHDLPRPNLQAVHSSRTSRSYMLPTRHPWLQQANSLAS

SEQ ID NO: 185476 - protein, 103 aa, Zea mays
  unsure (1)..(103): unsure at all Xaa locations
  Clone ID: MRT4577_100741C.1.pep
GFPGKKGPXKAKKDNVGYXIYMFKVLYQLRLHIVISFKXISIINFFMKEILDMLTPKSNKLACYNKXPXFTSRXIITWLSLVLPGKLSKHAVXRAPRSVTKFA

SEQ ID NO: 185477 - protein, 286 aa, Zea mays
  Clone ID: MRT4577_100742C.1.pep
MAALPPAAEDPDAVEIREVWASNLEEEFAVIRAVVDVYPYVAMDTEFPGFVVTPSAEYRFTCDRNYAALEGNVNVLKLIQLGLTLSNGAGALPPCGTGGRRCIWQFNFRGFDPHTDPSSSDSIDLLRRSGIDFDLFAAEGVDSTRFAELMMSSGVVLNDDVQWVTFHSGHDFGYLLKLLTGREMPNTLDEFLKLTKTFFPVMYDIKHLMKFCGGGLYGGLSKLGELLKIERVGISHQAGSDSLLTLQCFMKLKQLYLKESVKLYDGVLFGLIPGEVEIKPVAPPIE

SEQ ID NO: 185478 - protein, 101 aa, Zea mays
  Clone ID: MRT4577_100743C.1.pep
MSKQGAFLSLLDPVIVWCRLVGFFFAYRGGLTRRPGPRGGFCAGGKAKPLKAPKADKKEYDETDLAYLQKKKDEEKALKELKAKAQKGAIGGSGLKKSGKK

SEQ ID NO: 185479 - protein, 557 aa, Zea mays
  unsure (1)..(557): unsure at all Xaa locations
  Clone ID: MRT4577_100744C.1.pep
MDRLRAGSPVYGRQRSGSSTGSSSPGGVSPSHHRSSSTSSAASAAGAPGTSNIRRTQNVAARAAAARLAQVMASQNAAAAAGDDDDDDDYPPPAPGRFGSGRVAHGSNGVSLLGRSARSPSPXGRNIVEPPPTARSSSAGRPAVASRPTTTVVPPIKTNTTLRTPSPIPPVAVEPPADRTRPKRFDAALHSSRESGLKREASTLHDELDMLQEENESVLEKLRLAEERCEEAEARAKELEKQVAALGEIMSLEARLLSRKEAALKQREAALKAARESKDGRDGEVTTLRQELESAKEEVASAMDQLKEAESETKALRSMTQRTVLTQEEMEEVVLKRCWLARYWGLAVQYGVYPEIAVSKHEHWSSLAPLPLEVVLSAGQKAKEEPRKQGDNVQGRNKLAREMSDVMGEGNIESMLSVEMGLRELSSLKVEDAVVVAVGQHRRPSIVRQFTSDFKSPGEPKYLEAFDLSPEEAEDVSFKQAWLIYFWRRAKTHGVEEDIADDRLQLWIGRNAQAPNSHDAIDVERGLTELRKLGIEQQLWEGSRADIDQASLAMENQ

SEQ ID NO: 185480 - protein, 91 aa, Zea mays
  Clone ID: MRT4577_100745C.1.pep
SPGTLVFHSQAGRPLIQKHVRLYGSRPLGPVLRSSAVAPLSGPLFPQGSSQRCSQPARQAAAGLSLRPSLLVLHVSEARGGQPGSGPRSSR

SEQ ID NO: 185481 - protein, 72 aa, Zea mays
  unsure (1)..(72): unsure at all Xaa locations
  Clone ID: MRT4577_100746C.1.pep
MPAWAMYRRRSCEASXLLGRNRDEVGEYVGVEGGYHIFSEYGVDYLGNPSLIRAQSILDICACQDKFMGAVE

SEQ ID NO: 185482 - protein, 70 aa, Zea mays
  Clone ID: MRT4577_100747C.1.pep
CDSRSRQCLLSPAITAPPGTPRSRRRTPLENGAHRGRPYLGPVACAMSAWTELRRATRARSTMAGNSTAS

SEQ ID NO: 185483 - protein, 43 aa, Zea mays
  Clone ID: MRT4577_100748C.1.pep
TSPPGDEQMGICKNRWSFFFFFALSLINYAVFSNTFCFTGIKM

SEQ ID NO: 185484 - protein, 97 aa, Zea mays
  unsure (1)..(97): unsure at all Xaa locations
  Clone ID: MRT4577_100749C.1.pep
RADPRVRRSKGMQMVLNITLEDMXXKGKKLLSKMGREXNLLLDDKNSSEGATRHPCSDPQKATLPVNSIATPGSIHTQHEVSEASRILQEFLFGAGS

SEQ ID NO: 185485 - protein, 111 aa, Zea mays
  unsure (1)..(111): unsure at all Xaa locations
  Clone ID: MRT4577_10074C.1.pep
RFDFTKGLNQKFSLSHRXLFRTRDLVIQXTALTTAPGLSTXHYITYAIFXNPKLMLIARVMTDGRLNARVKCDLTDNLTLKVNAQLTQEAHYSQGMFNFDYKVDVSDKSVN

SEQ ID NO: 185486 - protein, 52 aa, Zea mays
  Clone ID: MRT4577_100750C.1.pep
VTIAHGGVLLNINPVLLPKKTAEKASSGGSKEAKSSKKAAKSPKKAYTDCPE

SEQ ID NO: 185487 - protein, 58 aa, Zea mays
  Clone ID: MRT4577_100751C.1.pep
DDAFFEEHSLVVEQFMAKVEVVIVLKLHVNSVDVLVDREVVDHVYSNVTVGNVAFPLG

SEQ ID NO: 185488 - protein, 94 aa, Zea mays
  Clone ID: MRT4577_100752C.1.pep
QNFFSPFLFFFSVVFYKNMSGEHPNCLNTTAEKTNKTPSRHHGQHAHRPKKPHTPRDQRPTQANPNTHTAPNAQAKISDKQRPTARPGQTRAQA

SEQ ID NO: 185489 - protein, 113 aa, Zea mays
  unsure (1)..(113): unsure at all Xaa locations
  Clone ID: MRT4577_100753C.1.pep
PRRCIVDVAGAEVPSTFDRIECPEYEVADSANGFXFGGYTYAMWITTVPIQDXIYFVSVTRIWLVHVFDYMQGKNAYCETLDMTGPVLTRVSTTDGSLCACVFIMRLYXPAKN

SEQ ID NO: 185490 - protein, 199 aa, Zea mays
  Clone ID: MRT4577_100754C.1.pep
QKFVLEECRKWNLAWVGLNKVAPLEPDEMEFLLGFPKDHTRGISRTERYRSLGNSFQVDTVAYHLSVLKDRYPQGMNVLSLFTGIGGAEVALHRLGIRMNTVISVEKSEVNRTILKSWWDQTQTGTLIEINDVQTLTADRIEAYIRRIGGFDLVIGGSPCNNLAGSNRHHRDGLEGEHSSLFYHYFRILDSVKSIMERL

SEQ ID NO: 185491 - protein, 82 aa, Zea mays
  Clone ID: MRT4577_100755C.1.pep
KKRELLPKPKLKPRSAKLKIFGNRWVNRSYNVLSPEAHRDLSVDWKKTVVELRSSKESSLLKICSMCPKDKNQLPQYWCIFQ

SEQ ID NO: 185492 - protein, 55 aa, Zea mays
  Clone ID: MRT4577_100756C.1.pep
VLLQGEGVEQPVKGLEGAGVEEGELVAQQERVEQRVPLGVGGPGRSLAHASADAW

SEQ ID NO: 185493 - protein, 86 aa, Zea mays
  Clone ID: MRT4577_100757C.1.pep
HKGYCFPATETLPNNQSSIKSRGYEVLKLLMACRSFLSPSLPLAPPTPTLHRADRHGRHGLTRKGAGHCRRRRQGHAGKMDDGIDC

SEQ ID NO: 185494 - protein, 121 aa, Zea mays
  Clone ID: MRT4577_100758C.1.pep
RIWFKCRSSLLERMPVLDEARYLVKRATATQSTISADKIAPTVTPGSLKLPNGVAKPTSAPLADLLDFSSDGAPASTVASTTTPNDFLQDLLGIGGVSSSTTGVTSTASTDILMDLLSMGS

SEQ ID NO: 185495 - protein, 50 aa, Zea mays
  Clone ID: MRT4577_100759C.1.pep
SSIIILSSGWSVFSSNQGRLGPTFICGGVLRHTYPSRLQPQCGSSYEKVM

SEQ ID NO: 185496 - protein, 181 aa, Zea mays
  unsure (1)..(181): unsure at all Xaa locations
  Clone ID: MRT4577_10075C.1.pep
LSPLFLPQPPDPFPXPPIFPGHRPPLPSAHPQPLHSCRRRPYPPPLAPQPRPTSSPPSAPPXPRPLFSQPSSXSPPPPPPAHPAATHPSPSPXSQPADPPPAPWSSRPPXSRXPPRTTQSPPLARSPARAPPPSWPCSATPPLPPRICSPPMTPPPLWLRPVSSPPWPLGASRASSSPLAP

SEQ ID NO: 185497 - protein, 256 aa, Zea mays
  unsure (1)..(256): unsure at all Xaa locations
  Clone ID: MRT4577_100760C.1.pep
MEWRDSFLDLALIPLSLLLPMAYHAWLWREVRLRPLRTAVGINAATRRLWAIGMMKDNAKNAVTVVQSVRNVIMGSTLMATTAILFCTGVAAVLSSTYTIKKPLSDTVFGAHGEYMMALKYVALMLLFLLAFLCHSLAICFLNQASFLINTXPASSPPPPTPTPPSSXPLPPTRDYIGDVLERGFTLNLVGNRLFYAGVPLLLWIFGPLLAFLSSMVMVPILYSLDVVNLMGHSGCVVVSGKSAEMNGGSECARAV

SEQ ID NO: 185498 - protein, 87 aa, Zea mays
  unsure (1)..(87): unsure at all Xaa locations
  Clone ID: MRT4577_100761C.1.pep
AGRAPFQSFQNEIASRETTEKGAQSNSVVHWALPLPHRTAAAVKRSERKGVPASPPGLLRXAAPVATLGATKESYTCSKNTRSQLFS

SEQ ID NO: 185499 - protein, 108 aa, Zea mays
  Clone ID: MRT4577_100762C.1.pep
KKTYMYTNGTSEVTPRMTLHYVWYSTQLQHRYYAVRLPRWSVCFIVLILSSLIHQWRQRWPHGVVRGRPLHGSNGFDHLQSQRARHPAGVLRVVELRRARHAPCVRRG

SEQ ID NO: 185500 - protein, 82 aa, Zea mays
  unsure (1)..(82): unsure at all Xaa locations
  Clone ID: MRT4577_100763C.1.pep
KGGRNMALQSNRSLSXRTMMVSLRALDTLADYPSNVGMLNFRVACLYCSSISIVKLILNDCATAGPLMLSCMSCLLGTSRLY

SEQ ID NO: 185501 - protein, 47 aa, Zea mays
  Clone ID: MRT4577_100764C.1.pep
MVRFCAPFNINPACEIIKRIYIAEALSRRVKQDVKNRCVIAIMSSFK

SEQ ID NO: 185502 - protein, 144 aa, Zea mays
  Clone ID: MRT4577_100765C.1.pep
ARLVLSLLVPNSARVCRSIRPGLSRVTSIRACRLCPNCMDTTCLSAIARTQAGRMNRKESMASRDRAATRNGKSAGHAYSMLVAAVDAGAESFVSGAVSSARACGGDRRPALNTVWCLWGEVVAVVSKPLRNYEELGRRRPHRG

SEQ ID NO: 185503 - protein, 75 aa, Zea mays
  Clone ID: MRT4577_100766C.1.pep
YVSASVLPSISDRIPPPLVGLMTPPPSKSPLKKHPPLAVCQKHLFSFPDPGTSAPSLFPPPPTGTRPPFSYFVRS

SEQ ID NO: 185504 - protein, 39 aa, Zea mays
  unsure (1)..(39): unsure at all Xaa locations
  Clone ID: MRT4577_100767C.1.pep
QTRTWSQTESDXFNQLRRDHSHAQSLTQTYLSINSHQSA

SEQ ID NO: 185505 - protein, 85 aa, Zea mays
  unsure (1)..(85): unsure at all Xaa locations
  Clone ID: MRT4577_100768C.1.pep
LQYRSYGGATINSSPVWQASMTHISLAGGWGGGQQSRVAQNXDYTTPPEYKFTGLGEESFGDTDFCPGCINIISPSGEGLGTSNY

SEQ ID NO: 185506 - protein, 207 aa, Zea mays
  unsure (1)..(207): unsure at all Xaa locations
  Clone ID: MRT4577_100769C.1.pep
MAPTTTLIVTVNLECCRCSSKIQKILCGIQQEGEFTIEKIVYEKDKVLVTGPFDADKLSCKLWCKAGRIIKDIQVAKPKDEKPKNPSCKLVYPYYPCYPFQLCPQQQPGAWPCSGGCPHPHCGCQSKPPPPPVPPPPPPPPPPPPPMPPACQCSTWPSCYCGGYPPPMPXRASAPXPSCYCGGYPPPMPYPMIVCDDSPPYGACTVM

SEQ ID NO: 185507 - protein, 155 aa, Zea mays
  unsure (1)..(155): unsure at all Xaa locations
  Clone ID: MRT4577_10076C.1.pep
PPSPCFGYTNFEKNTKLPGTKHNCALKSEYQSKATFQIGFQSCTEYGSIVYALALSFFLCVRYLVRNCQAATDISRNRSWPAVPIYVPATNAHARTKAKLPWRSCKLSKQGLVQKQYRPKRXXEDGGVAERKEAGAGTGRSAAGETSERRTRSLC

SEQ ID NO: 185508 - protein, 178 aa, Zea mays
  Clone ID: MRT4577_100770C.1.pep
MSSSSSALAKGKSAIGSAAGSAKFEAKGKFSSSSSPAAAATKRGTTTTSSRGRGRGKADKKVYSLPGQKFDPPEEREPLRIFYESLSKQIPSSEMAEFWLMEHGMLSPERARKAYERKQKRQQQVRMGTPIKSCAVRKDNKPESSKKPGIMDSKAKRRVDYSDDDDDDFIVKMKRSRG

SEQ ID NO: 185509 - protein, 68 aa, Zea mays
  Clone ID: MRT4577_100771C.1.pep
CFPFSLIRRTINRSNLPIRPFRTSKHTNINISNRLSLNRNTLTSNPTRLMTTRPLLPPHHMHRSYSST

SEQ ID NO: 185510 - protein, 147 aa, Zea mays
  Clone ID: MRT4577_100773C.1.pep
MATRVLPPALLSFILLLLLSLSARDTVAAGEDFPRDGRVIDLDDSNFEAALGAIDFLFVDFYAPWCGHCKRLAPELDEAAPVLSGLSEPIVVAKVNAGISFPIFLGFGVNDSLIAEHGRKYKKRAWLAVAKDLSEDIMVAYEPAQAP

SEQ ID NO: 185511 - protein, 113 aa, Zea mays
  Clone ID: MRT4577_100774C.1.pep
TAPIQVHGVVLPIVHTILPCEPHWTNSRIGLRQLFLRLEQNAPASSPISAVAAPLAHISYSMNIPLRSHLLYSLPSCSGSSPDPLRSRAAPMSSRKWLSKPRRSTVYRRVCGS

SEQ ID NO: 185512 - protein, 87 aa, Zea mays
  Clone ID: MRT4577_100775C.1.pep
WFFPFQRICLGLERNSVIYDQVMVIGSIPRNMPRRQRTFPLAIMATDIAQVAGRSLAFEGLVVGPSSRHMLQMRRTFNRVGVCFQQG

SEQ ID NO: 185513 - protein, 49 aa, Zea mays
  Clone ID: MRT4577_100778C.1.pep
GRLDGSTASSEGGYMQAEILCFCPLNERAVFFPVKKCGYLKPWCPYLGL

SEQ ID NO: 185514 - protein, 90 aa, Zea mays
  Clone ID: MRT4577_100779C.1.pep
FSGTATNPEPDPNARNRKLRFIPKSTAHHTTDDLNDDYIPTGERQGRPSGSSHVRSHYHWGHHAGGDSAAGNGWTPMARELACEEDSIQQ

SEQ ID NO: 185515 - protein, 136 aa, Zea mays
  Clone ID: MRT4577_10077C.1.pep
RPGPYLRDRSLKEYREHPTTRNSRSVGRRAAVGILRIHAHLRSGGESRVILWVCLSYPCPSRVEKSTGAPVIARRWPGVALLSPCVVAASSATSKHGQEQVQQDEARGGCYDEFVSGLGRRLPVNFGLLNRCLLIM

SEQ ID NO: 185516 - protein, 182 aa, Zea mays
  unsure (1)..(182): unsure at all Xaa locations
  Clone ID: MRT4577_100780C.1.pep
MGEPNSNDNAMVHDNEMIDGNGVIHGSEMIHGSVMIHGDEMPHGNEMIHGNEMIHGTEMVEGSEMIHGHEMVQVNDLIHGNEMVAVNVMVNGDEMPHVNEFINTEVTPRRRRKKKSLVWEHFTIEPMPGGNSRACCNLCKQTFAYSSGSKIXGTSHLKRHITLSSCPVMKESDRRLTLPLTG

SEQ ID NO: 185517 - protein, 189 aa, Zea mays
  unsure (1)..(189): unsure at all Xaa locations
  Clone ID: MRT4577_100781C.1.pep
MDFPLPVPPSRVHTEKELRRQMPPLQTTSINPSSSAQSRPQQAVFKSPIADMLPEQAAVRPPASPPTHQRFVLTDLVAARYLEEGPATTCHVLARRQRIEGYEIYLVEQWACSRTHPTYLITTYTGNPEDSVLATIISVPSNEDEWSPQMRLYFKSLXDCYARRKETXYGTLMITNLSGFPSFLTGIPI

SEQ ID NO: 185518 - protein, 66 aa, Zea mays
  Clone ID: MRT4577_100782C.1.pep
SQPRKSPNPGLKLLTDRRQPKQWRTGHRNPRANEAHRGDFLTKPENPPSRGIKPGTRVVLLRSLNH

SEQ ID NO: 185519 - protein, 49 aa, Zea mays
  Clone ID: MRT4577_100783C.1.pep
MEKGAGFRPKKKKKKKKKKKKKKKKKKKKKKKKKKKKKKKKKKKKPNPT

SEQ ID NO: 185520 - protein, 102 aa, Zea mays
  Clone ID: MRT4577_100784C.1.pep
KLLGLNTVFHRTPFIKFRLWPCLIRIIGHDLFDSLLIIILTGRVSLYIVTLAQSICLARDVLLVTSGNGVMTKTDGAAMKPRASCECTHMVVLLGTRWYHGE

SEQ ID NO: 185521 - protein, 49 aa, Zea mays
  Clone ID: MRT4577_100785C.1.pep
KVRQTRICHPLKCLASLCSRYLVDGKSPALNWAARSVLTISGSTAKAVP

SEQ ID NO: 185522 - protein, 164 aa, Zea mays
  Clone ID: MRT4577_100786C.1.pep
MEDLYSIHPGISRHGAAATSEASGVAGGPGSPPPPPPPAADLTELVKAQIAGHPRYPSLLSAYIDCRKVGAPSEVATLLEEIGRERCAAASAGGEVVGMDPELDEFMETYCRLLERYKEELSRPLDEAASFLSNVRTQLSSLCGGAASLSGDEAIRDQFSGLLQ

SEQ ID NO: 185523 - protein, 55 aa, Zea mays
  Clone ID: MRT4577_100787C.1.pep
ILNSRVPPTHPILQNHLHTLFFFQQQQKTCLNNKLSCLTNTKHLLLPYHHSYLLI

SEQ ID NO: 185524 - protein, 73 aa, Zea mays
  Clone ID: MRT4577_100788C.1.pep
KSPIFFPLFSLWGQQKKTFSPPPPKKERPVPKKKKKKKKKKKKKKKKKKKKKKKKKKKKKKKKKKKKKKKKKK

SEQ ID NO: 185525 - protein, 95 aa, Zea mays
  Clone ID: MRT4577_100789C.1.pep
MGKGTGSFGKRRNKSHTLCVRCGRRSFHIQKSRCSACAYPAARKRTYNWSVKAIRRKTTGTGRMRYLRNVPRRFKTGFREGTEAKPRSKASASSA

SEQ ID NO: 185526 - protein, 104 aa, Zea mays
  Clone ID: MRT4577_10078C.1.pep
GPGDSPQVKYYFPLGAAPNGPVFPSGRPSLSPTLKTGPGGPSNPTNVVWARQHQVSGRCPVVGHIVRVWVPSVLEFWGAFWSQVAKSAAPVFSTAKNQPGKKPK

SEQ ID NO: 185527 - protein, 147 aa, Zea mays
  Clone ID: MRT4577_100790C.1.pep
FLEIKKNAGSFPPVGPLPGGPTPPLGPPFSRVRVGGVPPGWPGKGLLWVCAQRRKTNGPLPFILGPIQKKSLNGFQTRKRVQYNGSNWGHQKALEPLWGFFFPGIDLLGLVSPQWKEMGWQGKNPFPDFGGGGFISLENFLFSLGPL

SEQ ID NO: 185528 - protein, 62 aa, Zea mays
  Clone ID: MRT4577_100791C.1.pep
DLSQTDLISYVICSFNFVTGLTPDSFSPYIIYMATAPSDVLAVELLQRYCCMRHSLPLLPLF

SEQ ID NO: 185529 - protein, 129 aa, Zea mays
  Clone ID: MRT4577_100792C.1.pep
GPTSLEKTVPHPGHVLPKNPKGGAYKTMIPDGDGRPVYRSKTQQATGLKPSKPRPPEGTKGTCFNRGMFPRPPPFFAGPPLAGKGNPWSPPPGNWAAGGFPTGRWQKRSLKRPLPQKKKIKSPARQWFP

SEQ ID NO: 185530 - protein, 66 aa, Zea mays
  Clone ID: MRT4577_100793C.1.pep
RGKGFFFTNKSFSLNGNKFVMFTHYIIVGKLPRFVLNEQRWARRFAQKFTSKNSVFVPGPVRTLSL

SEQ ID NO: 185531 - protein, 511 aa, Zea mays
  Clone ID: MRT4577_100794C.1.pep
MVQLFLQVPAECGSVNTVVVEGRRSLFHNVESIIKSLTKSAGRYEARLWLCATVSLVHSLSDCGQRDLFLDLLERKNSRRDVAARLLRMIFDKKPRMVGSILARKGHILEDFFRGNPNRIMQWFGHFAVTGESTHRKGAKALSQFAFVNRDRCWEELEWKGKHGQSPAVVATKPHYFRDLDVLETVENFLEYVPDFWSSDELANSIKDGEILQIDEEYFVDQFLYLMYEENSKDAWHVVEDFLMDEQFSSLCQHLLIHLDEERLLGFLNSLGKLINPTMQCKELTFPCCWLEVLLSGHYDHISLDDLVFLNCVIAKGRQLWRLMNDEEQHEEWGQMEELLKGGNHLTDADHFALMKELVETELPGVLKWVGIQSWIIFCELSKECKSGDSCESFFSHNKIEFHKADDYSLVRNYGFSISHMPDIDVEDLTRSSHKRRKRNRRKRHRYESDEDKFDELLELGSSDGKNGVESQRGSWRLSTDGFSASWDISDIPDHLSTCYFTIWVKWACFR

SEQ ID NO: 185532 - protein, 145 aa, Zea mays
  unsure (1)..(145): unsure at all Xaa locations
  Clone ID: MRT4577_100795C.1.pep
FIAMPLATNSSEAVSAIIFASRKKQRTLSLTFSEVYXKSASFACAMSFKDSRLTAXAIVLISAGXGAVTMNNTLCLAVFLGLVYVRGLTWDFSSEVLIIFSVCTIMGLFTSFRTDFPLWTCVVAYLLYPLSLVVVYVLDFKFGWS

SEQ ID NO: 185533 - protein, 60 aa, Zea mays
  Clone ID: MRT4577_100796C.1.pep
TMSNQRYIWRDRQCVGPVSLSGDVCWSFSLSKTHSCSMIASHHDTYMRVRAYRLSRSADL

SEQ ID NO: 185534 - protein, 77 aa, Zea mays
  Clone ID: MRT4577_100797C.1.pep
IQTVIMMIEREIQLTKLRYTHLGHCTVPLNVTRYRCHLDFGPKMRLNYNILHICCHLKVEHSDVILNLANPLPWNHQ

SEQ ID NO: 185535 - protein, 54 aa, Zea mays
  Clone ID: MRT4577_100798C.1.pep
HYHHHHLHPAAAAAAAAAGFVLGFPGQQHPSSPTSPSPSPVYADRWPVCPDRRF

SEQ ID NO: 185536 - protein, 41 aa, Zea mays
  Clone ID: MRT4577_100799C.1.pep
NILWVNPDFGLKSRKYLKVKPALSNMVLATKLIRTQLARLK

SEQ ID NO: 185537 - protein, 157 aa, Zea mays
  Clone ID: MRT4577_10079C.1.pep
MATAHGGRLFLFEAMLFSALLLLLLLLQAHTASAADGSTYPADCPYPCLPPPAAPAVVTANCPPPPPSSSYNTPPSSSWSYPPPPPPSGGYIPYLNPPAGGGAGYGYPAPPPPNPILPWYPWYYKTPPPPPSAAARGTGSSVLGLAAVLAAGQLIVA

SEQ ID NO: 185538 - protein, 459 aa, Zea mays
  Clone ID: MRT4577_1007C.1.pep
MMEAEKNGNILMQKYEVGKLLGQGTFAKVYHARNIETSQSVAIKVIDKDKIFKVGLMEQIKREISVMKLVRHPNIVQLYEVMATKSKIYFVLEYVKGGELFNKIAKGKLREDASRKYFQQLVSAVDFCHSRGVYHRDLKPENLLVDENGNLKISDFGLSALAESRRQDGLLHTTCGTPAYVAPEVISRKGYDGAKVDTWSCGVILFVLMAGYLPFQDSNLMEMYRKIGKADFKCPPWFPSDVRKLVSRILDPNPRTRMPITKIVECFWFKKGIDNKLIRKNIEMKGKVSALTDVNVVFSSTGIGSNNNKLVDVEQDVAKITNLNAFDIISLSEGFNLSGLFEESEKRKEARFTSSQSASTIISKLEDAATCSKMTIKKKEGGVLKMEGANEGRKGVLSIDAEIFEVTPAFHLVEIKKNNGDTLEYENLFKQDMKPALKDIVWAWQGESKDQQAKDHNQS

SEQ ID NO: 185539 - protein, 77 aa, Zea mays
  Clone ID: MRT4577_100800C.1.pep
ISENLRFYGRVGQQKNPREGFINFRKCAPLIWAPPRGGAFLGGGQDHKTLVGPRHQLLSNVEGLWVSPIPPAKKNKL

SEQ ID NO: 185540 - protein, 36 aa, Zea mays
  Clone ID: MRT4577_100801C.1.pep
QVFTNPCNIAWRLWNKMYSHAHDLRGVTLEAQLHDT

SEQ ID NO: 185541 - protein, 100 aa, Zea mays
  unsure (1)..(100): unsure at all Xaa locations
  Clone ID: MRT4577_100802C.1.pep
KVFARPDLGLMGHAGISSDFLKFYRSVCGLQVQAIEELPWLLFNSRISNLGREVLFRGPDEICSLLHAPWQEXGENSAASGLLILSQLCRLGNAQISKVQ

SEQ ID NO: 185542 - protein, 72 aa, Zea mays
  Clone ID: MRT4577_100803C.1.pep
SLSCCLSPKLDLTWRILDNSIHKNNVCFFQLSLHKDKFTSINMEVIKTHEIEKSDGRYSLRDKTVSRFKSMI

SEQ ID NO: 185543 - protein, 94 aa, Zea mays
  unsure (1)..(94): unsure at all Xaa locations
  Clone ID: MRT4577_100804C.1.pep
YNIFYIWMFDVFSKYKDDHLVGGATXIFLFHELVMSXXQLHXHYTHSXXXSLXXTTXLKTLXHXXXXIXIXXTKQXTLIXXXXPLXSLXXLXHH

SEQ ID NO: 185544 - protein, 67 aa, Zea mays
  Clone ID: MRT4577_100805C.1.pep
TVAGHWPTPTEKTRHRSITTLTPSVTQPPPSDGNTDIMTPCYGRRTQTGRARRTTRGLTSATCPTSG

SEQ ID NO: 185545 - protein, 77 aa, Zea mays
  Clone ID: MRT4577_100806C.1.pep
LPISLCSLVKKKKKKKKKKKKKKKKKKKKKKKKKKKKKKKKKKKKKKKKKKKKKKKKKKKKKGGGRFKKTKFLNPGF

SEQ ID NO: 185546 - protein, 143 aa, Zea mays
  Clone ID: MRT4577_100807C.1.pep
MVYDSWPKQIEVPRKRPEPTEDPEPKKEHAKGVQQKKRNNFVRDTEDPEPKKRPEPIEDPEPKKEHAVGVQRKKRSKKHANKEDTEDLEPKKRSDPTEDPEPKKRPEPTEGIQQKKRSKKHAKVQQKKRSKKHANKENELVVE

SEQ ID NO: 185547 - protein, 119 aa, Zea mays
  Clone ID: MRT4577_100808C.1.pep
AWPFHQPLYGPQPAAAPLVAPNADVGMDGAVITLATLLAGAVTNPYGGGFFQGPAEAPMEAVTACAGVFGAGAYQGYPGQLRVDAATGASYNAVGIAGRRFLLPAMWDPETAQCSTPLD

SEQ ID NO: 185548 - protein, 68 aa, Zea mays
  unsure (1)..(68): unsure at all Xaa locations
  Clone ID: MRT4577_100809C.1.pep
ANSSTGACKRLPQHWQTDCLMMVDVVINSIITEPCYVNITRSSAHKSYNXMSFSLIDNSRCIEEQSFE

SEQ ID NO: 185549 - protein, 73 aa, Zea mays
  unsure (1)..(73): unsure at all Xaa locations
  Clone ID: MRT4577_10080C.1.pep
MEKVCVSYSERWLLHVIQDREREAGILRSDYHALFCADVDTSSIVVIVLXGDPLRSTAYAGNMSVTVELAPTE

SEQ ID NO: 185550 - protein, 78 aa, Zea mays
  Clone ID: MRT4577_100810C.1.pep
KGANWVKLGGVFLEFKKKNHFVSGFKKFSATFGPGPGGAKFLKKFNGDLGNGRVLKIWMENHPKKKGIFGKGLLYLNL

SEQ ID NO: 185551 - protein, 98 aa, Zea mays
  unsure (1)..(98): unsure at all Xaa locations
  Clone ID: MRT4577_100811C.1.pep
FVGLHRRLVRAASWCLSHDRGLRVHGGFRGLWCRFFFDHPLPLLGGCXGFLGDHLQGRVVGEVFCAVLLLLLVGRPLLWGFPVCGVFPFWLALFLVCV

SEQ ID NO: 185552 - protein, 154 aa, Zea mays
  unsure (1)..(154): unsure at all Xaa locations
  Clone ID: MRT4577_100812C.1.pep
PSRAVFFKGEPPPTGGRKGGIQPRGRPCQRNRPRSQPGENDGPTXSTRKTEPQPQSPKPGEPKEKTNKPGGPKADPPPHXGKPPTPPFSKKKPTPPERXKNIQPPGKGGXLTGPPPLSGXEAVSPDLKAGRPVXPPNQGGTPGKPRNQGAPQGQ

SEQ ID NO: 185553 - protein, 66 aa, Zea mays
  unsure (1)..(66): unsure at all Xaa locations
  Clone ID: MRT4577_100813C.1.pep
TVTREVALLLPDRQVWRLPVHCLSLVQYFQHLNCNRFMITACCTRTHQTTMSPSQRXIGCACFAAG

SEQ ID NO: 185554 - protein, 76 aa, Zea mays
  Clone ID: MRT4577_100814C.1.pep
WPTRLGPLLSTLALSSNIIRFEPATISLVASPLMIGSCQLRVCCPCACLPIIGLIIRPSSLNKNHPKVFTRNEKTK

SEQ ID NO: 185555 - protein, 63 aa, Zea mays
  Clone ID: MRT4577_100815C.1.pep
MLGQSIRRFTTSVVRRSHYEEGPGKNLPRSVENKWRLLLMMTVYFGSGFAAPFFIVRHQLLSK

SEQ ID NO: 185556 - protein, 113 aa, Zea mays
  Clone ID: MRT4577_100816C.1.pep
IYTDHPRGRGQTISFISIKRELHRRPHAPVTGVFFFPRLSSTSISGSERDRPQTERATARRCLVHHGMAGVGEALALRVSERHPPLALDAEKPRSPPPRQGLPLERGGHRVRG

SEQ ID NO: 185557 - protein, 76 aa, Zea mays
  unsure (1)..(76): unsure at all Xaa locations
  Clone ID: MRT4577_100817C.1.pep
GPQKTPDKKTFVWGVPNHGASVRGGPHPQKEGKGFFXDRRPGSHKDPKGGTPLIPETTNLWEANPSNGDGKGAPAP

SEQ ID NO: 185558 - protein, 209 aa, Zea mays
  Clone ID: MRT4577_100818C.1.pep
MSYAYLFKYIIIGDTGVGKSCLLLQFTDKRFQPVHDLTIGVEFGARMITIDNKPIKLQIWDTAGQESFRSITRSYYRGAAGALLVYDITRRETFNHLASWLEDARQHANANMTIMLVGNKCDLSHRRAVSYEEGEQFAKEHGLIFMEASAKTAQNVEEAFVKTAGAIYKKIQDGVFDVSNESYGIKVGYVVPGQSGGAGSSSQGGGCCS

SEQ ID NO: 185559 - protein, 51 aa, Zea mays
  Clone ID: MRT4577_100819C.1.pep
MSYAYLFKYIIIGDTGPSRPVSPLPSSVLRLDPRASQPAAAAAATRPASRY

SEQ ID NO: 185560 - protein, 44 aa, Zea mays
  Clone ID: MRT4577_10081C.1.pep
QISFSNANFFIMNLTSSIMVVLSPWLLLYHFLINTILSILNLFT

SEQ ID NO: 185561 - protein, 209 aa, Zea mays; identical to SEQ ID NO: 185558
  Clone ID: MRT4577_100820C.1.pep

SEQ ID NO: 185562 - protein, 134 aa, Zea mays
  Clone ID: MRT4577_100821C.1.pep
SRMSVILGSLYVMFLSRWFLMGQGLVDEEVQVVPGFGVFSGMGLEDAGDLCAVGTTKGGARPERAERAPSVSRPSGQRTRARRPRNPGRWACRSSRQREHWKTAARSRNRSTGRTAHGGSSTARGGGRRRREMA

SEQ ID NO: 185563 - protein, 262 aa, Zea mays
  Clone ID: MRT4577_100822C.1.pep
MSYAYLFKYIIIGDTGPCRHVGPLPSSVLRLDPRASQPESAAARWRSNLVRLPVCDDGDGLGFAFAAGVGKSCLLLQFTDKRFQPVHDLTIGVEFGARMITIDNKPIKLQIWDTAGQESFRSITRSYYRGAAGALLVYDITRRETFNHLASWLEDARQHANANMTIMLVGNKCDLSHRRAVSYEEGEQFAKEHGLIFMEASAKTAQNVEEAFVKTAGAIYKKIQDGVFDVSNESYGIKVGYAIPGQSGGAGSSSSQGGGCCS

SEQ ID NO: 185564 - protein, 192 aa, Zea mays
  Clone ID: MRT4577_100823C.1.pep
MPRQSDPRSSPSTMDSGGGSSADMELAWHLLTVLIRLGRPAAASELTAAATVAAPSISTRVVKQMCCLPRSPLWISDDGVVTPSETAILAFLRFMGWDIPGPKVSLWPSEVRRWSGKVSIRYERKRQGSDARCFSAKRRRLLASAADLVEQTEHQSWQLVAQTCTTAATGEVHLEVMQKLQDRLPSLGTFSR

SEQ ID NO: 185565 - protein, 65 aa, Zea mays
  Clone ID: MRT4577_100824C.1.pep
GEKKPKGLEPNLFISNRFLVHRGQPLKPAPHLFYLAGPNLKKNLGATKIWKPGKAPPPLKRTPNL

SEQ ID NO: 185566 - protein, 81 aa, Zea mays
  unsure (1)..(81): unsure at all Xaa locations
  Clone ID: MRT4577_100825C.1.pep
RPEQEXPKPPHLLDLSPPXNHMRRVFSTDGGAQQITRPKLWSALAYFTGGSETHYHPLISNGASSAIVRFFWLFFLYSTYC

SEQ ID NO: 185567 - protein, 123 aa, Zea mays
  Clone ID: MRT4577_100826C.1.pep
ILFSASEDAVPERVDQREPVWRGLLLHPSLELLYYLNLSINTIYYFFTLFHLLFFYYLHLFFFFFFFTSTFLFFLFFFIFSLFYLFFLYYFFLFLIYFNFFIIFFFLFFIILLFLIFIFFIFF

SEQ ID NO: 185568 - protein, 77 aa, Zea mays
  Clone ID: MRT4577_100827C.1.pep
LTRPLQHSHAGTQLLLKGLLARVVYTAFYVLRSRCRTSRPVAIPHNEDFNDVCVIACLVTLIVFCSLCMTPYLWHFC

SEQ ID NO: 185569 - protein, 89 aa, Zea mays
  Clone ID: MRT4577_100828C.1.pep
SPPSFGGTSLTKGRTIDCQKQIYSMLLPQRVLTRNTFQPHKWNKSRTRTAQHPSLWTTTANYHSDYRRGTPTSEQLTKAWRTRTSKMTP

SEQ ID NO: 185570 - protein, 136 aa, Zea mays
  unsure (1)..(136): unsure at all Xaa locations
  Clone ID: MRT4577_100829C.1.pep
IRAEGTLLLIGTAKGLHPQLYLHFLTNFQXIESFSAFNSVYNNXDPFXIYAAPSSHFSSKAVDFSGWEHLEKATPGTVSQQQLDRAXEATKSAVLMNLQSRSIPSDDIGRQDLTYEERTPIEYFLKQYRXITMNDI

SEQ ID NO: 185571 - protein, 96 aa, Zea mays
  Clone ID: MRT4577_10082C.1.pep
GQTGKTQPLNEQRAFFMGVWLKASQGVGGEKINPCKSPLDLQFKLFTRKCCFTAPVHPPNENFWDNCHINSFLEKVLVHHQKTVFGTRLVNILCII

SEQ ID NO: 185572 - protein, 57 aa, Zea mays
  Clone ID: MRT4577_100830C.1.pep
HAIACDSLLTIKQVPSYDPVIPNPLLLCKGATGRHMMCQHDSFYSCDKLWQVSPQDP

SEQ ID NO: 185573 - protein, 60 aa, Zea mays
  Clone ID: MRT4577_100831C.1.pep
SRVVFSNPNDKREDYSPLLWAAAYSLSPLIDRPYFLRRRALRDPPVRICMFRTRVLISAS

SEQ ID NO: 185574 - protein, 460 aa, Zea mays
  Clone ID: MRT4577_100832C.1.pep
MAAPSPLPRFLILLLAVTSSAFAAAAATGAPVVGEDYVRPPPARCHRKALLSLFPWSKKEESAASSDPQQVHISLAGEKHMRITWVTNDNSVPSVVDYGTKESTYTMKSQGESTSYSYLLYSSGKIHHVVIGPLEDNTIYYYRCGGQGPEFQFKTPPSQFPLSLAVVGDLGQTSWTTSTLNHIKQCEHDMLLLPGDLSYADYMQHLWDSFGTLVEPLASNRPWMVTEGNHEKEHIPFFESGFQSYNARWKMPYEESGSRSNLYYSFEVAGAHIIMLGSYTDYDDSSDQYAWLKADLAKVDRKRTPWLIVLLHVPWYNSNWAHQGEGDSMMASMEPLLYAAHVDMVIAGHVHAYERAERVYNSRPDPCGAVHITIGDGGNREGLARRYRNPKPAWSVFREASFGHGELKIVNSTHAHWTWHRNDDEEPVRTDDVWINSLAGSGCIQEGSRDRESRKILMSP

SEQ ID NO: 185575 - protein, 225 aa, Zea mays
  unsure (1)..(225): unsure at all Xaa locations
  Clone ID: MRT4577_100833C.1.pep
GYPSEPAGGVSAATGVMTVAILLLAEITPKSVAVHNATEVARFVVRPVAWLSLILYPVGRIVTFLSMGMLKILGLKGRSEPYVTEDELKLMLRGAELSGAIAEDEQDMIENVLEIKDTHVREVMTPLVDVVAIDAIATLIDFKNLWETHQYSRVPVFEERIDNIVGIAYAMDMLEYVEEVEKLNAITVKEIAHMPTYFVPDSMSGWNLLKEFRIRQVXWAVVPNE

SEQ ID NO: 185576 - protein, 65 aa, Zea mays
  Clone ID: MRT4577_100834C.1.pep
MATSSRRVPLLLLCLGVLLSCSFAAGGWGQELHITWGDGPRSVLAFGRLLSLSLVRSSASGFPPP

SEQ ID NO: 185577 - protein, 55 aa, Zea mays
  unsure (1)..(55): unsure at all Xaa locations
  Clone ID: MRT4577_100835C.1.pep
MAQTGEIRGAMDHILXGERKGEINHDNVLYIVENINVAGIDNLCSRGEGDRVCYV

SEQ ID NO: 185578 - protein, 142 aa, Zea mays
  unsure (1)..(142): unsure at all Xaa locations
  Clone ID: MRT4577_100836C.1.pep
IHLRIVLQLFSRDKWCIKRSKCSFAQQQISYLAHIISARGVATDPXKVSAIANWPCPQIVKELRSFLXLAGYYRKFVRNFEVISKXLTLLLKKHSVFVWTSVHDHAFNVLKQSLCLAHVLKLPNFGHAFSGEIDAATTGMGA

SEQ ID NO: 185579 - protein, 326 aa, Zea mays
  Clone ID: MRT4577_100837C.1.pep
MVESDTEDEDEDELDLEDFEDDDEDGEAGGGDILYEDFFENGHNKQAKKRDGSTKKVQFKDEAHEVELHDSENDDGNDEQEHGLSTHEKERLKMRTKIEQMEKANLEPSTWTMQGEVTASRRPKNSALEVDLDFEHNVRPAPVITEEVTASLEEMIKKRIAESHFDDVEKPSLLPSKAPKEHKELDETKSKKGLAELYEDDYAQKAGIAPAPLSISDELKEEANTLFKRICLKLDALSHFHFAPKPVIEDMSVQANVPALAMEEIAPVAVSDAAMLAPEEIFEGKGDVKEEGELTQAERKRRRANKKRRYAASHKERTAPAKLQKD

SEQ ID NO: 185580 - protein, 23 aa, Zea mays
  unsure (1)..(23): unsure at all Xaa locations
  Clone ID: MRT4577_100838C.1.pep
QLESTXERLSEIRIRDCEPEAMN

SEQ ID NO: 185581 - protein, 88 aa, Zea mays
  unsure (1)..(88): unsure at all Xaa locations
  Clone ID: MRT4577_100839C.1.pep
LNQLIEHLNKLLNDHSVENLSKEPHVERELILIKLNXNLISTLRIMVLVDIFTAKEVDISEKTLTIEVAADPCKIAALHMKLTKIVIK

SEQ ID NO: 185582 - protein, 63 aa, Zea mays
  Clone ID: MRT4577_10083C.1.pep
KKKKPSPWIVKGKGFFRFFLGISPLFLLYTVRGVHAFPRYSGFIQGSGAGFVIHTATLASKTG

SEQ ID NO: 185583 - protein, 42 aa, Zea mays
  Clone ID: MRT4577_100840C.1.pep
YFSNPKSSKSSLPSKCRLLEYYIVSVILTINLFDYPNHLILK

SEQ ID NO: 185584 - protein, 84 aa, Zea mays
  Clone ID: MRT4577_100841C.1.pep
LKRQLPAFGRSEVQTPAVRICENYLIFAFLYERLPSSQPFGDLVSPKTTIAALCCPFAFGCVRHFKSFSVFESSYCAHLCILTY

SEQ ID NO: 185585 - protein, 471 aa, Zea mays
  unsure (1)..(471): unsure at all Xaa locations
  Clone ID: MRT4577_100842C.1.pep
MATAPASLSLSASTLPTRLRAAAVLAGMRWRQPQRGRMVVRAKIREIFMPALSSTMTEGKIVSWSAGEGDRVSKGDAVVVVESDKADMDVETFHDGIVAVVLVQAGESAPVGAPIALLAESEEEVPLALAKAQELSNGQPQQAPPAPTEDAAATPPPPPAPATAPTPXPRXKGIASPHAKKLAKQHRVDLAKVTGTGPYGRITSADIEAAAGIKPKSKPAPAAAAAPPPVAAPSVGAVPQSAVLPPVPGATVVPFTTMQAAVSKNMVESLAVPAFRVGYPIITDKLDELYEKVKPKGVTMTVLLAKAAAMALAQHPVVNASCRDGKSFTYNSNINIAVAVAIDGGLITPVLQDADKLDIYLLSQNWKDLVKKARAKQLQPNDYNSGTFTLSNLGMFGVDRFDAILPPGQGAIMAVGASKPTVVADKDGFFSVKSKMLVNVTADHRIVYGADLAAFLQTFAKIIEDPESLTL

SEQ ID NO: 185586 - protein, 125 aa, Zea mays
  Clone ID: MRT4577_100843C.1.pep
FRHPKQGIHHDHACTKIKQAHKSTNGQVVNQLQQRDRQATTLRLGYRVQPGANCTDPGISSGGTRRDAILECGCPGSVPRAGGSDQVCELQSPFHTSCECVVEAPVQIGMLAMARIVGSAPNAWA

SEQ ID NO: 185587 - protein, 408 aa, Zea mays
  Clone ID: MRT4577_100844C.1.pep
MASAPGEVPSHFLCPISLQLMREPVTLPTGISYDRAAISRWLATPAPAGGRTCPVTRVPLPPQPQLTPNHTLRRLIHAWLASLSPEAEVNEDVAALRGPVPGAEAVVALLSDAAGAQVEALKRLRELVAECEDSRTVLESQDGVFDALSRVVSSADACSTAREEAVGLLASLRIPEPELAGVVARHSNLGDALTAVLRSSNLKSRANAALLVRSLSEAAWPAWVIGLSQELLAEVVRVVRDRVSTQATKAALHALAALCPYGRTRVKIVGVGAVPAIVDLLLDDPERRVNELALVALDRLCTCAEGRAELVAHAAGLAVVGKKALRVSETASERAVRVLRSVARHAATPAVLQEMVESGVVAKLCAALWSQQCGLRTKQKAHEVLKLHSRTWRSSPCLSPKFLGLYPS

SEQ ID NO: 185588 - protein, 73 aa, Zea mays
  Clone ID: MRT4577_100845C.1.pep
DQMDIRWVPFIFGDRGANRVNQAACRPMSLRRRGGGQTCTGGLGTGELWYGFSEIHPIQFLFLGGSSGLLFIG

SEQ ID NO: 185589 - protein, 126 aa, Zea mays
  Clone ID: MRT4577_100846C.1.pep
PKLTLGHNNASRIYTLRCFGELGTLDTKGPLVQQKRSNSQIYVPSSYVRDQYQHQKDISLVRREYISLENVEDQSGINFKGAALSGQTILFWILSVKQVFLCENLSEVAVRSGVLDNPSSFFYAAY

SEQ ID NO: 185590 - protein, 51 aa, Zea mays
  Clone ID: MRT4577_100847C.1.pep
SGRKRYTCGFSTGAIREPCVLVLQLRSSYRYYGAASSSVGHERLARGEHQH

SEQ ID NO: 185591 - protein, 78 aa, Zea mays
  unsure (1)..(78): unsure at all Xaa locations
  Clone ID: MRT4577_100848C.1.pep
YYCKCGEMIIAQAFLIGWTQRSVTWDXWFVGFVSGVPACFCFPVGGVVAGVLLSSLVLGASFGLALARFRVRFFFVSA

SEQ ID NO: 185592 - protein, 93 aa, Zea mays
  Clone ID: MRT4577_100849C.1.pep
MSPIIFLHEVLLMKQHVLIGLKKKKKKKKKKKKKKKKKKKKKKKKNRRPPTKNQFPLKTKRKKKREKISPMRKNLIRAKIRKKTLILPSFAQK

SEQ ID NO: 185593 - protein, 77 aa, Zea mays
  Clone ID: MRT4577_10084C.1.pep
ALFFCGQSPPFYYVGIALPPKEMCPGSVKPIKCSMSEICIAKKTHKSENETAQSRGRAESHVQKQSLSYAAYSSSSL

SEQ ID NO: 185594 - protein, 206 aa, Zea mays
  unsure (1)..(206): unsure at all Xaa locations
  Clone ID: MRT4577_100850C.1.pep
MVKVIQGRPAEMGFRMPAEWEPHEQCWMGWPERPDNWRENAGPAQEYPKVHELMEHQTNIRVVEMSMNDSWFRDMGPTFVTHKGDSGIAEQTIAGIDWQFNAWGGIYDDWSLDSDVAKKIVEIERIPRFPXKIILEGGSIHVDGEGTCITTEECLLNPNRNPNMTKLEIENELKDFLGVSKVIWIPRGLYGDEDTNGHIDXMCCFI

SEQ ID NO: 185595 - protein, 372 aa, Zea mays
  Clone ID: MRT4577_100851C.1.pep
MVKVIHGRPAEMGFRMPAEWEPHEQCWMGWPERPDNWRENAGPAQEVFARTAIAISKFEPVTLCASAKQYPKVHELMEHQTNIRVVEMSMNDSWFRDMGPTFVTCKGDSGIAEQTIAGIDWQFNAWGGIYDDWSLDSDVAKKIVEIERIPRFPQKIILEGGSIHVDGEGTCITTEECLLNPNRNPNMTKLEIENELKDFLGVSKVIWIPRGLYGDEDTNGHVDNMCCFIKPGVILLSWTDDEKDHQYERSVEALSVLSQSVDAKGRQLQVVKIHVPGPLYMTEEEAQGVVSSGHSVPRPAGTRLAASYVNFYIANGGIIAPSFGDRWDEEAYAVLQKAFPDHEVVMVEGGREIALGGGNIHCITQQQPVRPS

SEQ ID NO: 185596 - protein, 97 aa, Zea mays
  Clone ID: MRT4577_100852C.1.pep
TELSSITYIAAVRRQSPVSLSVSTSYTHRMLARRSTDEGIPRLARPGVRAKRTSSGPMVVSRFFRELSFHAFYVLEMRSEDNVVILLQAMHAQRSSR

SEQ ID NO: 185597 - protein, 158 aa, Zea mays
  Clone ID: MRT4577_100853C.1.pep
GRVGGRVGGRVGGRVGDELRKAKKKMGEQNIQKAVKSAMDAAEAALSGNKPFCVTHVDVGLDTTAVREAVIKVMDQKGLPIMLFSTDEASNKAVIYAGVPPNAPSGFKVLDWLTNSARGLKGRSGEGNDSTPKRLQSDASQLKEAMALANSIASMKLC

SEQ ID NO: 185598 - protein, 372 aa, Zea mays
  Clone ID: MRT4577_100854C.1.pep
MVKVIQGRPAEMGFRMPAEWEPHEQCWMGWPERPDNWRENAGPAQEVFARTAIAISKFEPATLCASAKQYPKVHELMEHQTNIRVVEMSMNDSWFRDMGPTFVTHKGDSGIAEQTIAGIDWQFNAWGGIYDDWSLDSDVAKKIVEIERIPRFPQKIILEGGSIHVDGEGTCITTEECLLNPNRNPNMTKLEIENELKDFLGVSKVIWIPRGLYGDEDTNGHIDNMCCFIKPGVILLSWTDDEKDHQYERSVEALSVLSQSVDAKGRQLQVVKIHVPGPLYMTEEEAQGVVSSGHSVPRPAGTRLAASYVNFYIANGGIIAPSFGDRWDEEAYAVLQKAFPDHEVVMVEGGREIALGGGNIHCITQQQPVRPS

SEQ ID NO: 185599 - protein, 106 aa, Zea mays
  unsure (1)..(106): unsure at all Xaa locations
  Clone ID: MRT4577_100855C.1.pep
PLPGLVAFPPPGAGGGPRPPVLAPPGVWGPXCVLXXPVCSGPXWVSLFRWGPCXAGWFPCXLWPGAXCCFCGPFVWAXFCGARVLVSAPPPIILXCVXXXXXKKVG

SEQ ID NO: 185600 - protein, 49 aa, Zea mays
  Clone ID: MRT4577_100856C.1.pep
APLACDPAASVPGCRVCHGYGRPEPEPSRGAATVLFRVQYFAPPERQLR

SEQ ID NO: 185601 - protein, 1149 aa, Zea mays
  Clone ID: MRT4577_100857C.1.pep
MCDRSSARQDTRWRTFQELFMLVGPTTSLGPEKKCNQPIICSNGAYEEALFSAAVCQLQADRPLKKPTLLAIEASSEGLIFIFSVGMDYWHEENKGSSLNKLDIKNTIFFNKHIRNEGHYKVGSLLPAVESIPACCFYYPGRSLDGWMLTVPTLPRACRLLRLFTRLEARVLPAATILVSFSSSFSSSPAAAPPQMDPSPAWPSRRIRQEFLTFFESKAHTRWPSSPVVPVDDPTLLFANAGMNQFKPVFLGTAAPDSPLGRLHRACNTQKCIRAGGKHNDLDDVGNDTYHHTFFEMLGNWSFGDYFKEEAIRWAWELLTQVYKLPTDRIYATYFGGDVKSGLGADDESKDIWLKYLPKEKVLPFGCKDNFWEMGDTGPCGPCTEIHFDRIGNRDAASLVNNDDPTCIEIWNLVFIQFNREADGTLRPLPAKHVDTGLGFERLTSILQNKMSNYDTDIFMPIFDAIHQLAGDGIQPYSGKLGSDDIGKVDMAYRVVADHIRTLSFAIADGSQPGNEGREYVLRRILRRAVHFGHQKLKAKQSFFSSLVNVFVQLMGDVFPELKDNEKKIKCIIRDEEESFENTLAKGYEKFKKAADAVKDNGGTILSGQDAFILWDTYGYPIDLTEVMAIDYGLTVDKKGFNASMEEARQKARNARNKSGGNSIAMDANATAQLRKLGLASTDDSPKFLWPKEHESVVKAIYTGSEYITTATGDGDFGLVLESTSFYAEQGGQIFDTGSIEGSFGTFNVNNVQVFAGYVLHIGSFTKGSKVLSLGDSVICKVDYNRRTLIAPNHTCTHMLNFALREVLGDHVDQKGSIVLPEKLRFDFSHGKPVQPEDLRKIEFIVNQQIKDELGVYALEIKLEDAKRINGLRAVFGEIYPDPVRVVSVGRKVEDLLADPDSKEWLSISTELCGGTHITNTRDAKAFALLSEEGIAKGVRRITAVTAGCATQAMELASSIDSDINKASQLEGALLEKKIASIKSGLDAAAIPAARKADLRGKVSKLEDELRKAKKKMGEQNIQKAVKSAMDAAEAALSGNKPFCVTHVDVGLDTTAVREAVIKVMDQKGLPIMLFSTDEASNKAVIYAGVPPNAPSGFKVLDWLTPSIAPLKGRGGGGKNGVAQGQGSDASQLKEAMALANSIASMKLC

SEQ ID NO: 185602 - protein, 372 aa, Zea mays
  Clone ID: MRT4577_100858C.1.pep
MVKVIQGRPAEMGFRMPAEWEPHEQCWMGWPERPDNWRENAGPAQEVFARTAIAISKFEPVTLCASAKQYPKVHELMEHQTNIRVVEMSMNDSWFRDMGPTFVTHKGDSGIAEQTIAGIDWQFNAWGGIYDDWSLDSDVAKKIVEIERIPRFPQKIILEGGSIHVDGEGTCITTEECLLNPNRNPNMTKLEIENELKDFLGVSKVIWIPRGLYGDEDTNGHIDNMCCFIKPGVILLSWTDDEKDHQYERSVEALSVLSQSVDAKGRQLQVVKIHVPGPLYMTEEEAQGVVSSGHSVPRPAGTRLAASYVNFYIANGGIIAPSFGDRWDEEAYAVLQKAFPDHEVVMVEGGREIALGGGNIHCITQQQPVRLS

SEQ ID NO: 185603 - protein, 39 aa, Zea mays
  Clone ID: MRT4577_100859C.1.pep
AHYRGTRLNPDTVLTPPTVTTLSCTDVETGPKVEEYGRV

SEQ ID NO: 185604 - protein, 107 aa, Zea mays
  Clone ID: MRT4577_10085C.1.pep
SNMPTISSKQSCITTSERDWDAARKEHPEKLAAKYYLDAPPVHGSRVHEDVPFMTGDKSQHGSAIPVAKSEWTKDPDHAVRELFHQETGKATSFFRNIGQPRTPLVS

SEQ ID NO: 185605 - protein, 96 aa, Zea mays
  unsure (1)..(96): unsure at all Xaa locations
  Clone ID: MRT4577_100860C.1.pep
FMRGPKTSPRDLQNGYAMVGGFXPTDAVGKIYVXLYDKWRRAXEGLSLRSLITCFGNMTYANGCTIDADGLELLLHALIDAWRSCCGDKRGIKCLT

SEQ ID NO: 185606 - protein, 140 aa, Zea mays
  unsure (1)..(140): unsure at all Xaa locations
  Clone ID: MRT4577_100861C.1.pep
PLPSLSPPLPTPPTAAPXPPPTPPXLSLSLSLSLSLSPPPPPAPTIPARRPLPXPPPPXPRPAAHAPPSMPPLPGXPPDLNHPGGAVPAAGGRAPGACGRTREAGGPLLPESRRRRAAGGGGGRRRRTLGGHHPERSPRE

SEQ ID NO: 185607 - protein, 74 aa, Zea mays
  Clone ID: MRT4577_100862C.1.pep
KETFWPKIVRENALIAPELSGIPNWWFAHAMFSVETQLLGRMNQSKGHGFLGFRNPVSSFNPWVEKLKVFKIVP

SEQ ID NO: 185608 - protein, 37 aa, Zea mays
  Clone ID: MRT4577_100863C.1.pep
FHRWLGACASSHARYPIVAWNNSSSACSLSASAAALL

SEQ ID NO: 185609 - protein, 165 aa, Zea mays
  Clone ID: MRT4577_100864C.1.pep
MSDNAVSELAPKFAPFVGMAGIAAAMIFGCIGAAYGTAKSGIGIAGVGTFRPDLIMKCLIPVVMSGIIGVYSLVIPVLIAEDLNPPSNTSYTLFAGFLHLGCGIAVGMTGLAAGYCIGIVGDSGVRAYMEQSRIFVGMVLILIFGEVLGLYGLIVALLLNTKTKG

SEQ ID NO: 185610 - protein, 66 aa, Zea mays
  Clone ID: MRT4577_100865C.1.pep
EKIEKERKGRIEDNKKRRGRKKEKKRTRLRPTKPQREHERKPPPLKPAKARRLPPPKTQRAPPPKP

SEQ ID NO: 185611 - protein, 116 aa, Zea mays
  Clone ID: MRT4577_100866C.1.pep
PWDFAGTATLTTRDPSFLGCFYPPPSASPAGTVTPPPGGPMGGTGGPGPFTPPGTGAGPTGPTGMGTAGPPGPGFGGLGPPGMDPTAAAAGGFLPLPKVGLCAALVALPLSPIGLA

SEQ ID NO: 185612 - protein, 93 aa, Zea mays
  Clone ID: MRT4577_100867C.1.pep
NNPLIAEIRKKIPSEFLRSILPNGSHDHPLKMPLPNVIKSDVLKKAPEFKFGWRTDEEFARETLAGVFERTVFPAKYALGMSADVYKTWNFNE

SEQ ID NO: 185613 - protein, 67 aa, Zea mays
  Clone ID: MRT4577_100868C.1.pep
PPPPPLFFIILGGGPGPSDFWSFLGGTPPGHHLFVGLALCMLFCLTPPDQASIAEDIVLSYARNWNS

SEQ ID NO: 185614 - protein, 121 aa, Zea mays
  Clone ID: MRT4577_100869C.1.pep
SGQKSGAVFIRTITSQFQTILGISLIEILSKHSSVEVYLGQRDEPERWTSDARALDAFRRFGSRLVEIEKRIRTMNDSPTLKNRKGPVEMPYMLLYPNTSDVTGEKGEGLTAMGIPNSISI

SEQ ID NO: 185615 - protein, 230 aa, Zea mays
  unsure (1)..(230): unsure at all Xaa locations
  Clone ID: MRT4577_10086C.1.pep
MSGETLDGDDIHPLVLNHGTEMFTAVFAGNYVPXAAFSSMVGRTHHTAVIELMRQKDAHVGDQQQSNIPNLTFKYPIDSGNAINXNYMNKIXDHTFYDENSWCPXELPVLIIDAPLNPQDNTDNMAPIMFHTCNVSVMDVLNVVQLTLYVSVRTTXGIDNDSXDGASHTATIYEGYALRHAILRLYLAGRDLTDSLMNILTXRGYYFPTSAERKNVRDIKXKLAYIPLDY

SEQ ID NO: 185616 - protein, 891 aa, Zea mays
  unsure (1)..(891): unsure at all Xaa locations
  Clone ID: MRT4577_100870C.1.pep
MDWGRTEQALTGKNKEAWSEGKIRGTVRLVKKEVLDVGDFNASLLDGVHRILGWDDGVAFQLVSATAADPSNGGRGKVGKAAHLEEAVVSLKSTADGETVYRVSFEWDESQGIPGAVLVRNLQHAEFFLKTLTXLEGVPGKGTVVFVANSWVYPHKLYSQERIFFANDTYLPSKMPXAALVPYRQDELKILRGDDNPGPYQEHDRVYRYDYYNDLGDPDKGEEHARPILGGSQEHPYPRRCRTGRHPTKKDPNSESRLFLLNLNIYVPRDERFGHLKMSDFLGYSLKTIIEAVLPTLGTFVDDTPKEFDSFEDILGLYELGPEAPNNPLIAEIRKKIPSEFLRSILPNGSHDHPLKMPLPNVIKSDVLKKAPEFKFGWRTDEEFARETLAGVNPVIIKXRLTEFPRXSTLDPRQYGDHTSKITEAHIRHNMGGLSVQNALRNKRLFILDHHDHFMPYLDEINELEGNFIYASRTLLFLKDDGTLKPLAIELSLPHPDGQQRGAVSKVYTPAHTGVEGHVWQLAKAYACVNDSAWHQLISHWLNTHAVIEPFVIATNRQLSVVHPVHKLLSPHYRDTLNINALXARQTLINAGGVFERTVFPXKYALGMSADVYKTWNFNDQSLPADLVKRGVAVPDQSSPYGVRLLIKDYPYAVDGLVIWWAIERWVKEYLDIYYPNDGELQRDVELQAWWKEVREEAHGDLKDRDWWPRMDTVQQLARACTTIIWVASALHAAVNFGQYPYAGYLPNRPTVSRRPMPEPGSHDYKKLGAGQKEADMVFIRTITSQFQTILGISLIEILSKHSSDEVYLGQRDEPERWTSDAKALDAFKRFGSRLVQIENRIKTMNDSPDLKNRKGPVEMPYMLLYPNTSDVTGEKAEGLTAMGIPNSISI

SEQ ID NO: 185617 - protein, 102 aa, Zea mays
  Clone ID: MRT4577_100871C.1.pep
CALFLFSVISSVSAVARIPSCRRPESLSTSVKEEQLTAILFLSSAAALLRRGMGSTAFTGDLIDSGANHEVLDSLTGKYPPDVRRTNCALGRRAVAKTDSPS

SEQ ID NO: 185618 - protein, 119 aa, Zea mays
  Clone ID: MRT4577_100872C.1.pep
MTTTTTKVAAGAGRDAEEGMRRRNAELERAVAEAAAREERLRRELETALARLAVAEEAEERLCVQLGELEAEAMEQAVEYQERVRALSDRLAFVDGVLRSSGVRGFAAAGGVTSMDSSS

SEQ ID NO: 185619 - protein, 231 aa, Zea mays
  Clone ID: MRT4577_100873C.1.pep
FFSYPKDEATYGVDRQFLLGRGVLVSPVLEPGATTVEAYFPAGRWFSLFDHEVVVASATGKHVTLPGPADTVNVHVAGGNILPLQLPELTTSRARQTAFHLLVALAEDGSASGELFLDGGELPEMAGPRGEWSLVRFSCTQGRDGVKLMSHVVHDAYGPSRKLVIGKVMFLGLPSLAPPGEFAVYVNGVKMANSTGATLGYQRRGALGAAQVEGLSLVVVEEFELKVVTSS

SEQ ID NO: 185620 - protein, 48 aa, Zea mays
  Clone ID: MRT4577_100874C.1.pep
IFYICSYIKLTDCPSTNNGLTEKCLYPPNLTCLKYIFLQLASLLIRTY

SEQ ID NO: 185621 - protein, 54 aa, Zea mays
  Clone ID: MRT4577_100875C.1.pep
KQVQQVRKLFVLPLRHTCLYVQKCIAASGAEYEFPASCTGSSEGIIMLGVGSRN

SEQ ID NO: 185622 - protein, 89 aa, Zea mays
  Clone ID: MRT4577_100876C.1.pep
WSCLSSSSPLARLISRRGLAGAAYGHGSAKVPLWKDPVSPSKLKEEHFVLSSLSMWGVIFFCVLYFIVVIILSNFYYSIFYYFFFFLFF

SEQ ID NO: 185623 - protein, 78 aa, Zea mays
  Clone ID: MRT4577_100877C.1.pep
WCSTCTLCSFLAGSRTIPGKAAPGPGGEPGYNMANGKNPWQKKGKKNFPKEKKKSDKLRHKKRAQTKKKKGGAPHRMK

SEQ ID NO: 185624 - protein, 171 aa, Zea mays
  unsure (1)..(171): unsure at all Xaa locations
  Clone ID: MRT4577_100878C.1.pep
RALLSRQDRSDRSHFVAPLTDLTRKQRCLPCSDCCATRQSEADXQLSPASGAIGSSASPDPRARAQPRRRTMDSASPDPRARTQPRPRTTDSASPDPRARTQPRRRTTDSASPDPRAQTQPRPRTTDSASPDPRARTQPRPRTTDSASPDPRARTQPRPRRSHRLARPRAQ

SEQ ID NO: 185625 - protein, 136 aa, Zea mays
  Clone ID: MRT4577_100879C.1.pep
PPKRRRVDYRAWAPDPAEFALMTSADPTTSASASAPAGLRGLNNLGNTCFMNSVLQALLHAPPLRNYFLGDRHNRFLCPRRTPVRHRASDADRVACLACDLDEIYSAAFNGDRTPYSPAKFLYRSGLWISRANRNG

SEQ ID NO: 185626 - protein, 80 aa, Zea mays
  Clone ID: MRT4577_10087C.1.pep
FLWAKLQNLGFFWVCWKKGPLLCLFFLGGGFLVGPFDLSFLGGFWAPLVWFILPDYDLILCFAFLALFPLLDILFLGSQR

SEQ ID NO: 185627 - protein, 64 aa, Zea mays
  unsure (1)..(64): unsure at all Xaa locations
  Clone ID: MRT4577_100880C.1.pep
WTICGGSLYALRQETSKLALGRRCHYRLGSAWCIXGSYTNWMRLLSRLVYSADQLSAVVSWKQF

SEQ ID NO: 185628 - protein, 116 aa, Zea mays
  Clone ID: MRT4577_100881C.1.pep
MAIASRATKRALSTFAAAKLPEEAIAATAAVPVPLAPAPASSERALLQFEDTGRLFAGEPTPALLRTLAALQALSVGPLVDAATAALRSPAVAGSALGRAAARATAYRHFCAGETA

SEQ ID NO: 185629 - protein, 82 aa, Zea mays
  Clone ID: MRT4577_100882C.1.pep
LDLATKSKCYSKKKPTTVCILSRTKTLYSQLLQTCSPTCSRSPGWPLENTGLQVVKQRCQVNPDTFYVCQKFQTIRLQLKST

SEQ ID NO: 185630 - protein, 156 aa, Zea mays
  unsure (1)..(156): unsure at all Xaa locations
  Clone ID: MRT4577_100883C.1.pep
MKKSFAPALSTRFASTDATKDGKIHQVIGAIVDVKFDTEQLPAILNAVTTQNGDQKLILEVAQHLGENVVRCIAMDGTEGLVRGSKATDTGAPIKIPVGHGTLGRIMNVTGDPIDERGPIKATKYAPIHADPPEFTEQSTSAEVLXTRIKVXDLLA

SEQ ID NO: 185631 - protein, 69 aa, Zea mays
  Clone ID: MRT4577_100884C.1.pep
SRLYIETETHQRYWYELSISANAMNCQHLQREKPIARLHQRIMYLDRRGMARFDPKRKGPVSEVFTMYL

SEQ ID NO: 185632 - protein, 130 aa, Zea mays
  Clone ID: MRT4577_100885C.1.pep
MAAQGSGSARGSGAAAALALVLLCVLLHGELAESAVYTVGDRGGWSFNTANWPKGKRFRAGDVLAFRYNAKAHNVVPVSAAGYKSCSAPKGVRALTTGNDRVTLKRGTNYFICSFPGHCQAGMKIAVTAA

SEQ ID NO: 185633 - protein, 69 aa, Zea mays
  Clone ID: MRT4577_100886C.1.pep
MGKVHGGLARAGKVRNNTPKVAKAENKPKPKVGRSQKRLLYSRRFLSKVETTGRGGPNSQKRKSEEAKA

SEQ ID NO: 185634 - protein, 110 aa, Zea mays
  Clone ID: MRT4577_100887C.1.pep
MGSAAAADVVIPACAAVGIAFALWQWFLVSRVKMSAYAAPGNGGHHGGPVFRMEDDEEDVGMGGAGDRDEEEEETAGDGTVAVARCAEIQSAISVGEFNLFSTTPFALCW

SEQ ID NO: 185635 - protein, 129 aa, Zea mays
  Clone ID: MRT4577_100888C.1.pep
MAQGSGSARGSGAAAALALVLLCVLLHGELAESAVYTVGDRGGWSFNSANWPKGKRFRAGDVLAFRYNAKAHNVVPVSAAGYRSCSAPKGVRALTTGNDRVTLKRGANYFICSFPGHCQAGMKIAVTAA

SEQ ID NO: 185636 - protein, 56 aa, Zea mays
  unsure (1)..(56): unsure at all Xaa locations
  Clone ID: MRT4577_100889C.1.pep
RRPPFFFFFFKKKKGPPLXXXYFFFIFLFFLINFLFSKILHLSHFLSFFFFFFLNI

SEQ ID NO: 185637 - protein, 212 aa, Zea mays
  unsure (1)..(212): unsure at all Xaa locations
  Clone ID: MRT4577_10088C.1.pep
LEILHIXGGECVNQMAAKFWEEACDEHGIEPTGRYTGNADLQVQRAHVYYNEASCGRFVPRHXSVDXLDPVTMDSVRTAPYGQIFRPDNFLFGQSGAGNNCANDHYTDDAELIDSVLDDVRKEADNCDXLQGFQVCHSLDDGTXSDMSTXLLISKIGEEYPDRMMLTFSAFPSPKVSAYVXEPYNATLSVHQLVKNEDECMLLDNEDIYDIC

SEQ ID NO: 185638 - protein, 88 aa, Zea mays
  unsure (1)..(88): unsure at all Xaa locations
  Clone ID: MRT4577_100890C.1.pep
PLVLPFIHWSALMPCVYSXQQMLCPCSQRCAAIRASFLTQRQLLPFKHQFAAKASALVXAIQLWPFVHRGCTKANAFYHHVVIGGALF

SEQ ID NO: 185639 - protein, 72 aa, Zea mays
  unsure (1)..(72): unsure at all Xaa locations
  Clone ID: MRT4577_100891C.1.pep
MPSQXEHAMETMMLTFHRFAGEKNYLTKEDLRVLMEREFPGFLENQKDPLAVDKIMKDLDQCREWKVGFRAF

SEQ ID NO: 185640 - protein, 68 aa, Zea mays
  Clone ID: MRT4577_100892C.1.pep
KDSAAAAAPTARYVRTVHEQRQFKTAGNTFTDEFIDTIDAVYQQQLDMLKKLQQRQHRLDKNVKTIQA

SEQ ID NO: 185641 - protein, 64 aa, Zea mays
  Clone ID: MRT4577_100893C.1.pep
DEINAPTTARKAFHDDNTENRPRKADFPSLKVSMGRRTKKKPVGPSDIQTYSCGVYGLKFSLRG

SEQ ID NO: 185642 - protein, 56 aa, Zea mays
  Clone ID: MRT4577_100894C.1.pep
KKKGPPFFRGVILVPVKIPPMGPPKGLFWFPMGPIKPLGLKGLGPPFFYIKKLGRG

SEQ ID NO: 185643 - protein, 44 aa, Zea mays
  Clone ID: MRT4577_100895C.1.pep
TYTKISIRDRSRFIGYNTVPCFKIPPPIDIYSVHLKNLISPRAE

SEQ ID NO: 185644 - protein, 58 aa, Zea mays
  Clone ID: MRT4577_100896C.1.pep
KKKYIKKNFTPKEKKKKKPGPIKKRGPHSKNLHFTYPYIQPFPSSIMSPKLKSLTPNF

SEQ ID NO: 185645 - protein, 145 aa, Zea mays
  unsure (1)..(145): unsure at all Xaa locations
  Clone ID: MRT4577_100897C.1.pep
GIEWIGLQTRGSNSLSTRAALMLDAQREPVKTWSTIGEIHYVGGXLMRGRCQEGVPVGKGRVTFRDGSLYEGLWRYAKRSGLGTLFDSSGDVYHATWMDDLIHGKGCDYSYIGDRWCAYFWKGQANGEGRCYASDGSIFFGHLRN

SEQ ID NO: 185646 - protein, 67 aa, Zea mays
  Clone ID: MRT4577_100898C.1.pep
NGPNQTIDLLRESIVDKKKKTLIYRLGFHLFMKATIRSCSATPCSESSMSKWNAWPTPLDSNSSTSP

SEQ ID NO: 185647 - protein, 272 aa, Zea mays
  Clone ID: MRT4577_100899C.1.pep
HASAHASAHASAHASDAIKARLDAACPGVVSCADTLALAARDSVRLTKGPFIPLPTGRRDGNRSVAADVALNSPPPDANITDIIALFAKKFNLTAKDVAVLSGAHTIGKARCSTVSPRLYNFGGQNGASDPTLDANYTATLRGQCKPGDNATLVYLDPPTPTTFDADYYTLVAGNKGLLSTDAALLLDTTTSAYVARQANATAPATEFFADFATSFVAMSKLGALTHHNGEIRQVCSKVNPPTSSQLSNAAAVPGGLAVSLALAVVALVLKL

SEQ ID NO: 185648 - protein, 66 aa, Zea mays
  unsure (1)..(66): unsure at all Xaa locations
  Clone ID: MRT4577_10089C.1.pep
RPCRGTTCGCDEDQVPSGVDATKISQEXYLNAPGETYSVTLTATGTXGYYXDSHNXAAMVGKITVN

SEQ ID NO: 185649 - protein, 53 aa, Zea mays
  Clone ID: MRT4577_1008C.1.pep
PSLIPLRHLDSHSLRTLPVSHTGISPATRLSARDEWSEASSVESVVPERHDRR

SEQ ID NO: 185650 - protein, 47 aa, Zea mays
  Clone ID: MRT4577_100900C.1.pep
TTVPHRLEGTQPPLKNERYTHKIRGEKARCGQNLSLKHRSSLGAQTW

SEQ ID NO: 185651 - protein, 89 aa, Zea mays
  Clone ID: MRT4577_100901C.1.pep
GRVGFLLIDNYDVQRKEAIARCVRSAFGVLVKKGVVPSLEPLTGCDKLSPLLRQKLLAFLSDTCEAAEEACGKTINGVSKGTELNKRIC

SEQ ID NO: 185652 - protein, 98 aa, Zea mays
  unsure (1)..(98): unsure at all Xaa locations
  Clone ID: MRT4577_100902C.1.pep
MRGGNSNEYCSCQVCLGKYTLLGDEENPRLAMFERRLPFFGCGIGWCCFLLXFLWPLIWYIAALLYCCKYYNRDPRERPGLAASALLAIMFTAATIIT

SEQ ID NO: 185653 - protein, 140 aa, Zea mays
  unsure (1)..(140): unsure at all Xaa locations
  Clone ID: MRT4577_100903C.1.pep
SVPRVAISVFNFLFRFRVCGSRFYFYPNARFKSRFHWMVVESSRFEVPGVGVELAPTIYPENQFPDLLRRIRYRFRFTVXLKFVTKWFGVVVLVHFPGPLYLVIRTRGREMGTVFGPLAYADGKRLMISISSVTVWLFGA

SEQ ID NO: 185654 - protein, 103 aa, Zea mays
  unsure (1)..(103): unsure at all Xaa locations
  Clone ID: MRT4577_100904C.1.pep
TSVDGDLNKKVDAKNSLENCGYNMRYTIKDXKIAYKLTVDDXKKIEDAIYAVISWLDANQLDEADEFYDMMKDLESLCYPMIVKMYLCAGQDMGGAGGMDDDA

SEQ ID NO: 185655 - protein, 80 aa, Zea mays
  Clone ID: MRT4577_100905C.1.pep
IRLVLLKVMDGRPRSSQPYGCRILQTRTCLPMGDKMLIPRKEGSITSINKREPWMTQVLAVPYLMNIYGGHRSRNTYCRP

SEQ ID NO: 185656 - protein, 84 aa, Zea mays
  Clone ID: MRT4577_100906C.1.pep
PLSEACQPSERALEGHSCYGGHIRSVHGLRNEISPTHFFGRFVESNKLIYPHFVSRRLIVSKNIRKAFFPRKKKKKKKKKRRAA

SEQ ID NO: 185657 - protein, 49 aa, Zea mays
  Clone ID: MRT4577_100907C.1.pep
CAKSHPKADFMKYSSNASVRLLVRVHWYSAIVRSEALTNVPHDAIQATT

SEQ ID NO: 185658 - protein, 161 aa, Zea mays
  unsure (1)..(161): unsure at all Xaa locations
  Clone ID: MRT4577_100908C.1.pep
PGPXKPFPDLRSPFPAVAGASXXSREAGAPLNPPQASLRSLRPGRSSHPKPSPASLVAAAXREGWRGVGAPAASLLVLLALAAAGGVAAGGSGHRGKIREPGPLYANGGGPFASPGGGXSVFAAWPFCSPGPGGGDERGPWGGSRWGSGCWCALLAWLAWR

SEQ ID NO: 185659 - protein, 66 aa, Zea mays
  Clone ID: MRT4577_100909C.1.pep
CELEAQHRHKLRGCTWGHRAPLPPPVHTTHTLFTPCDSQLAWGGGRDSHWYSFYTFVTHTAMDEKP

SEQ ID NO: 185660 - protein, 148 aa, Zea mays
  Clone ID: MRT4577_10090C.1.pep
NENILFFQTLGRSDRNQIHSTLHQTGHGHRGHFEHPKRLKNQRGGGGAKQINTATTGADLFLAKAKPGTGPGSFKMGTQKKRRRGKANQSLKNQGHRLTHSRAGHPGRGAPLLHWLGPNGLHPCLKTPGPLGSGPHRRLKLRPSFGRG

SEQ ID NO: 185661 - protein, 70 aa, Zea mays
  Clone ID: MRT4577_100910C.1.pep
TYYLLVFFYLPARERKLFENGAMLRGHHTSSRIDIGSAETNCKKTETNVVQHHAITDSLLHYYNLHITQH

SEQ ID NO: 185662 - protein, 43 aa, Zea mays
  unsure (1)..(43): unsure at all Xaa locations
  Clone ID: MRT4577_100911C.1.pep
MVKFTAEELRAIMDKKNNIRNMSATPPLXHGKSTLTDSLVAAA

SEQ ID NO: 185663 - protein, 107 aa, Zea mays
  Clone ID: MRT4577_100912C.1.pep
KQMVSHVFEDLRKSKAPNSDQGHNLPSTSSCSEFSTAETTRTKLVMSPRSLTRDTSPDDGRTIAGDLDTLVGHERLHRALGLPSSTFRLKHAAGEVTAAVAGYLSLF

SEQ ID NO: 185664 - protein, 84 aa, Zea mays
  Clone ID: MRT4577_100913C.1.pep
MRRPLDVPPTGRFLLLKLQNSGSSQKRMGQLMLLSPRFPVFSAGICPAISLFKPSLDCDQFPMCFPPQNEVPTCGKGFSFSCGN

SEQ ID NO: 185665 - protein, 141 aa, Zea mays
  Clone ID: MRT4577_100914C.1.pep
AHACALPLSGAGVRLRVPPYPATPTHHTQTATPQLPRPAVHVLLLPMAPPLDLDCIRLSPAAAADDAHHDLKGTELRLGLTGSGSPDRRGEAATATTLDLLPAKGAQRGHFDQAPAPSDGADVGKGKNAAGEVDDKNVAAT

SEQ ID NO: 185666 - protein, 67 aa, Zea mays
  unsure (1)..(67): unsure at all Xaa locations
  Clone ID: MRT4577_100915C.1.pep
MPGNGSRAASPRSSLKKVXKSNGQILAIDEIXECNPTKIKNCGIWLCYQCKTGYHDLHKEYRNTILN

SEQ ID NO: 185667 - protein, 150 aa, Zea mays
  unsure (1)..(150): unsure at all Xaa locations
  Clone ID: MRT4577_100916C.1.pep
MFHQYQAAGRALPVPADEHPKIYRMELXATNEIFECNPTTIKNCGIWLCYQCRTGYHDLHKEYRNTTLNGAMEQMYNETASCHRVXSPYIQIIKTATINFKLCKRDSTKQFHNSKFKFPLVYXQVRPPNRKLKTTFKALRPNLFVLSNLP

SEQ ID NO: 185668 - protein, 77 aa, Zea mays
  Clone ID: MRT4577_100917C.1.pep
CHLCASHPILAPPQHRNTTIHAQHSPCRDTLLLPGNRLARAATAHFPPYHQTHTTSGRHPQCLKNSSTPPLPWCSLI

SEQ ID NO: 185669 - protein, 105 aa, Zea mays
  Clone ID: MRT4577_100918C.1.pep
LFSFFLGGGGLALLAAAPAAPPKDTERQLSKKELKKKELAELDAVLAELGLSANSSSTAQDAEKKGTNQSGDSEKKEDAPAPPESMASKKKKKKDKSSKEGKETH

SEQ ID NO: 185670 - protein, 160 aa, Zea mays
  unsure (1)..(160): unsure at all Xaa locations
  Clone ID: MRT4577_100919C.1.pep
FVWIPQLHQCQAVGRALPVPADEHPKIYRMELXATNEICSKSKLWYYLRKLKSQEXKSNGQILAIDEGYHDLHKQYRNTTLNGAMEQMYNETASCRSPYIQIIKTATINFKLCKRDNTKQFHNSKFKFPLVYXQVRPPNRKLKTTFKALRPNLFVLSNLP

SEQ ID NO: 185671 - protein, 75 aa, Zea mays
  unsure (1)..(75): unsure at all Xaa locations
  Clone ID: MRT4577_10091C.1.pep
MILRNPLSNRNKLIKRVSNGNSTTVQRNQINPNRQKRRRTQXRKLSHDHLHYYKRPRQNQNINTNKRLNHRKINR

SEQ ID NO: 185672 - protein, 50 aa, Zea mays
  Clone ID: MRT4577_100920C.1.pep
FHLRGDLIFIVVYLAPDNVLMENLLMQLTAQVRLDLTTCNHHIREGPKIT

SEQ ID NO: 185673 - protein, 325 aa, Zea mays
  unsure (1)..(325): unsure at all Xaa locations
  Clone ID: MRT4577_100921C.1.pep
MVGGGRRGGAAEEVKLNTGNVFAALESLKKKKKGDKGKGGXGSSSRKKHGEGAAQRQEPPQKELFWAPAPLTTKSWADVEDDDDDDYFATTAPPRPVWGTAGEPAKEEEDVDDAVRAALQEDIESDDGDLDDEVDDGPEDEPEHDAEDAPAEPAIRTAAAPAAPPKDTERQLSKKELKKKELAELDAVLAELGLSANSSSTAQDAEKKGTNQIGDAEKKEDAPAPPESKASKKKKKKDKSSKEGKETQEALDGSEETASAGPDEDTSAVDVKERLKKMASMKKKKSSRETDTAAKIAAAEAAARSARLAAAKKKEKSHYNQQPVR

SEQ ID NO: 185674 - protein, 157 aa, Zea mays
  unsure (1)..(157): unsure at all Xaa locations
  Clone ID: MRT4577_100922C.1.pep
MFHQYQAAGRALPVPADEHPKIYRMELXATNEVCSKSNXIFECNPTTIKNCGIWLCYQCRTGYHDLHKEYRNTTLNGAMEQMYNETASCHRVXSPYIQIIKTATINFKLCKRDSTKQFHNSKFKFPLVYXQVRPPNRKLKTTFKALRPNLFVLSNLP

SEQ ID NO: 185675 - protein, 124 aa, Zea mays
  Clone ID: MRT4577_100923C.1.pep
ACQIAYRDNTRSLPAPSFGLFIFFFFFFFFFFFFFFFFFFLSFFFCFLIDIPLSTLSRRKLTICFSKGPQKTGAAFNELYLLPPPQTPGEGGTFFFFLLQGVAFRTKNLNHHTPLLPHFGKRPC

SEQ ID NO: 185676 - protein, 57 aa, Zea mays
  Clone ID: MRT4577_100924C.1.pep
FIRIYNAAIRRTSSSDYSLLLLASILAEVNPHLTPFEGGKISNCNIFTDLATRMILF

SEQ ID NO: 185677 - protein, 180 aa, Zea mays
  unsure (1)..(180): unsure at all Xaa locations
  Clone ID: MRT4577_100925C.1.pep
MLHQCQAAGRALPVPADEHPKIYRMELXATNEICSKSKLWYYLRKLKSQEXKSNGQILAIDEIXECNPTTIKNCGIWLCYQCRTGYHDLHKEYRNTTLNGAMEQMYNETASCHRVXSPYIQIIKTATINFKLCKRDNTKQFHNSKFKFPLVYXQVRPPNRKLKTTFKALRPNLFVLSNLP

SEQ ID NO: 185678 - protein, 178 aa, Zea mays
  unsure (1)..(178): unsure at all Xaa locations
  Clone ID: MRT4577_100926C.1.pep
FVWIPQFHGGGGAGRALPVPADEHPKIYRMELXATNEXYYLRKLKSQEXKSNGQILAIDEIFECNPTTIKSCGIWLCYQCRTGYHDLHKEYRNTTLNGAMEQMYNETASCHRVXSPYIQIIKTATINFKLCKRDNTKQFHNSKFKFPLVYXQVRPPNRKLKTTFKALRPNLFVLSNLP

SEQ ID NO: 185679 - protein, 193 aa, Zea mays
  Clone ID: MRT4577_100927C.1.pep
MAPLPERNQGEGKKETGVRLKFHNAGRCNGNGNGSVACGGGHAQARHGALQTVTKSGERKGEADGRVLLVRTVVYLGNAHGTSAMAGAGDSTRAKKARGGRGWQGGLGSTARNQYRRSPVTNRRNREDGVERREGPARKFTSGGAGTRAGLGVTVAEHDRGQWSSSTSDRIGRRGPGDGEAPANLKNRRAQLG

SEQ ID NO: 185680 - protein, 182 aa, Zea mays
  unsure (1)..(182): unsure at all Xaa locations
  Clone ID: MRT4577_100928C.1.pep
FVWIPQLHQCQAVGRALPVPADEHPKIYRMELXATNEICSKSKLWYYLRKLKSQEXKSNGQILAIDEIXECNPTKIKNCGIWLCYQCRTGYHDLHKEYRNTTLNGAMEQMYNETASCRSPYVQIIKTATINFKLCKRDNTKQFHNSKFKFPLVYXQVRPQNRKLKTTFKALRPNLFVLSNLP

SEQ ID NO: 185681 - protein, 31 aa, Zea mays
  Clone ID: MRT4577_100929C.1.pep
HYVRVRKDMHTENVMLEGKLYGAFRGSVGGR

SEQ ID NO: 185682 - protein, 160 aa, Zea mays
  unsure (1)..(160): unsure at all Xaa locations
  Clone ID: MRT4577_10092C.1.pep
LQGKLNNIIREQCLRDVGQLEQDLVFGDAGTKELGGFENTIALNPDKFESDKGAKLMQLAGLSADDMIAVNNMRCLCGPDTKKSSVGGFTLKFDVHKKKHTNRKERTGEXESTWALSRFYPILEQLIENLSKGELPKDEYNCMNDPSPTVHGLPTSSSAR

SEQ ID NO: 185683 - protein, 82 aa, Zea mays
  unsure (1)..(82): unsure at all Xaa locations
  Clone ID: MRT4577_100930C.1.pep
VRCAXLRAVCLVVPVALLSLASGGLPAGGPLGWWPPASLCSSLIPVARSALSSPGGGRGRRPGWWRSGXGXSLSSAPGMPAG

SEQ ID NO: 185684 - protein, 91 aa, Zea mays
  Clone ID: MRT4577_100931C.1.pep
FLKDDSAQQVCSHLCYGFCPSIYNRSHHKSLTIVVTRVNKTTNDTYTILLKIHRILNPHRGYIIINMPDILLPCLLFSYSLRYDYYAKNLL

SEQ ID NO: 185685 - protein, 51 aa, Zea mays
  Clone ID: MRT4577_100932C.1.pep
LYINYIFLVIITALYMGFCLTADGCICQQRVKKKNLAIINLLLTPENLHHQ

SEQ ID NO: 185686 - protein, 406 aa, Zea mays
  Clone ID: MRT4577_100933C.1.pep
MAMARAELRTVTVRSSPLPRCVLSRLLPLLLSVSAIGAASAAPLKFGINYGQIANNLPQPTQVSGLLQSLNVNRVKLYDADPIVLTAFAGTGVEFIIGNDDLYNLTDARKARAWVAQHVQPFLPSTRITCITVGNEVLSGKDTTAMQSLLPAMQTVYQAVVALGLGGQVNVSTAHSVNILASSYPPSSGAFREELGQYIQPILNFHAEVGSPFLINAYPFFAYKASPGSVSLPYVLFEPNPGVVDPNTNLTYDNMLYAQIDAVYAAMEAMGHSDLTVRISETGWPSRGDEDEVGATVANAAAYNGNLMKRIAMGQGTPLKPHVPVDVFVFALFNEDMKPGATSERNYGLFYPNGTPVYSLGFFNGASFSPSPTYSSSSKLAITFQMAVVVLLASFSILHSAVPCRA

SEQ ID NO: 185687 - protein, 76 aa, Zea mays
  Clone ID: MRT4577_100934C.1.pep
MATDALAMLAPVAAIIAALPEARGPVRSLWQGLARHIRLLAPLLPGRQDRDLDYALNLAYSLRAERNLFLAGDDCS

SEQ ID NO: 185688 - protein, 85 aa, Zea mays
  Clone ID: MRT4577_100935C.1.pep
MSANPGNVIGGHKANINNPNTSEEAKQHSKEVLQDLENGGEITSKSTSDQDKNPNNVAGGLKATLKNPNVSDEAKQSAEERLGQL

SEQ ID NO: 185689 - protein, 119 aa, Zea mays
  Clone ID: MRT4577_100936C.1.pep
REGWEACRVRSGFPGWTRGFWEAWSYAWVQIPGDVFPHLGFMLRRRLLSLFVLWLFMFFFHVMYGSVVPLFSLRGFGGLSVLFCISAVGLVSIFSVSRRVALVFHLANVPLNTTVTVTP

SEQ ID NO: 185690 - protein, 94 aa, Zea mays
  unsure (1)..(94): unsure at all Xaa locations
  Clone ID: MRT4577_100937C.1.pep
CPSPVFLVCRVPVRWCCFLSGLFGLVVSGGPPGCVGGPSAFLVALGAGCCFPWSWSSPLXPVVCFRPLPVVRSPPRSFSGPLLGLVLLVFGGRA

SEQ ID NO: 185691 - protein, 62 aa, Zea mays
  unsure (1)..(62): unsure at all Xaa locations
  Clone ID: MRT4577_100938C.1.pep
YEFFDGWGEDISGCRSYFYLPKNAHVGRADSIRAGPSHPXXPYLFFSNFPTCSTFFSNYNFF

SEQ ID NO: 185692 - protein, 143 aa, Zea mays
  unsure (1)..(143): unsure at all Xaa locations
  Clone ID: MRT4577_100939C.1.pep
SGLGALFSAHLAFPLCGLPSSASTPRSHRAVTDPLARSHSPIRSLQGGAHSPAPSTRACQASRPLASGPRMSAEAPLFFSLQRIVPKRMALRGNRVSLRCYTEPTSRRPYSGLSXGFSSTFRPHKSSLDERIEIEGSRWCPPH

SEQ ID NO: 185693 - protein, 667 aa, Zea mays
  Clone ID: MRT4577_10093C.1.pep
MSLDSEASSQGGDYRSFRQITRDRLLFEMLRSTRKNSKSTWKVLIMDKFTVKIMSYACKMADITEEGVSLVEDLYKRRQPLPSLDAIYFIQPTKENIVMFLSDMSGRSPLYKKAYVFFSSPVHKELVAQIKKDSSVLPRIAALSEMNLEYFAIDSQGFITDHERALEELFSENAEGSHKYNACLNTMATRISTVFASMREFPRVHYRIAKTIDASTMTTLRDLVPTKLAASVWNCLAKYKTTIPEFPQTETCELLIVDRSIDQIAPIIHEWTYDAMCHDLLCMDGNKYVHEVPTKNGSATEKKEVLLEDHDPVWLELRHAHIADASERLHDKMTNFISKNKAAQLHQARTDGELSTRDLQKMVQALPQYSDQIDKLSLHVESLYFIQIAGKLNNIIREQCLRDVGQLEQDLVFGDAGTKELINFLRTQLVVSRENKLRLLMIYAALNPEKFESDKGAKLMQLAGLSADDMIAVNNMRCLCGPDTKKSSVGGFTLKFDVHKKKHTNRKERTGEESTWALSRFYPILEQLIENLSKGELPKDEYNCMNDPSPTVHGLPTSSSARTSPAHSMRSRRTGGTWARPRGSDDGYSSDSVLKHASSDFRKLGQRIFVFVIGGATRSELRAAHKLSSKLKRDIILGSSSLDDPPQFITKLKLMSVEELTLDDLQL

SEQ ID NO: 185694 - protein, 29 aa, Zea mays
  Clone ID: MRT4577_100940C.1.pep
VGRLPQTDISRHSLTVCAGHTKSNTTPLY

SEQ ID NO: 185695 - protein, 89 aa, Zea mays
  Clone ID: MRT4577_100941C.1.pep
GCTTDEPSRHRLRFRCTGPAAARRHLISSGQGWDWESREPGFRRSGCGMPAWVSGDGMSKGSPQSARPGGHSTTVHAPNSMLRYGCDCA

SEQ ID NO: 185696 - protein, 45 aa, Zea mays
  Clone ID: MRT4577_100942C.1.pep
SLQFNLFQHINCYIHKLYLILVSTFNNFLTIFYYTFMTNYYSLKT

SEQ ID NO: 185697 - protein, 64 aa, Zea mays
  Clone ID: MRT4577_100943C.1.pep
ARGFRLCDLLGDGASIFCGRRKNACTPPPSFRSLDFSWLVKVLNRRFPSCFAVSYARLVLWRIP

SEQ ID NO: 185698 - protein, 272 aa, Zea mays
  Clone ID: MRT4577_100944C.1.pep
MAVRTIKVTNVPLSATAENMKEFFSFSGEIEYVEMRRDSETSQVAYVTFKEFHGADTALLLSGSSMCGDVSVNIAPVEDYELPPEAYSHAGARSPGPGTPTGEAVKKAEEVVSTMLARGFVLSKDALRRAQSFDGRHQQLLSTATARVASLDRRLGLSDKFSLGTAAARGAARGVDERFQVTERAWGAFSAAGEVVAGSPYASRGAAWVSAAVGAVARAASDVGAMTMEKVGRAEEEGEASAAEHGHYASSRVDVHDGQGGAAQHGDHNKAM

SEQ ID NO: 185699 - protein, 82 aa, Zea mays
  Clone ID: MRT4577_100945C.1.pep
VRDGRPHYYSASRLRPIGATGEGDGRWTGRLPLRVQRGGHRSCCYGAVPIQSVATSVKGPELRGGLLLRENWIYACEKVCMS

SEQ ID NO: 185700 - protein, 100 aa, Zea mays
  Clone ID: MRT4577_100946C.1.pep
MAASLLFLAVELLFSLPRSPIRAIPPRKTAPGHSSRHARTHSPLHDRGWLTVKGGIDGNPGVLPYSPEAGRIQESESAMEHVLWSSDRERPPWISVSGPC

SEQ ID NO: 185701 - protein, 100 aa, Zea mays
  Clone ID: MRT4577_100947C.1.pep
CIFFFMFLSKVSLVLGFFFFFFFFIKNQRGLKGPTLITKANSRAVHQGVGGGNPQTFPGAQKKGFKHQNLGGRAKRFMPADKFFFSPGAEILPPFGGTLL

SEQ ID NO: 185702 - protein, 75 aa, Zea mays
  Clone ID: MRT4577_100948C.1.pep
NPDLDIFYKRPIRCRTEPKPLVPIPKNHGSVVKPHLMPNYSRPTQHPVEEAKGQRYIDLEQRGTHTRGPRPGTRS

SEQ ID NO: 185703 - protein, 93 aa, Zea mays
  Clone ID: MRT4577_100949C.1.pep
PLIPGFQPLKASNLPLIELPLPRNKFLKLSLMLMLLLPIIMFCCSRPSEMPFLKFFHYRRPRRSCRFPLKTVNLSIKLPLKTANPWGLLPFHK

SEQ ID NO: 185704 - protein, 145 aa, Zea mays
  unsure (1)..(145): unsure at all Xaa locations
  Clone ID: MRT4577_10094C.1.pep
PRGRPGAPDPPAHHRGGPREKEERAERRRQXTRKEDANPRPXESGPEQQEGGHPTDQEPQHRQNRPQRGGGGDTGQTQGHAAQEKAEEDREQTKRDQARQGEREHQESQRQEQEEAEAKTNRAGTEQPEKKERTQKESQERPEQG

SEQ ID NO: 185705 - protein, 74 aa, Zea mays
  unsure (1)..(74): unsure at all Xaa locations
  Clone ID: MRT4577_100950C.1.pep
PPPTXFLLCXSILXLFCEELEXRKAGAXPSXQLAQERRQEGLFEWREGLLXACSPPWXDLXGNPPIQTGPMXAG

SEQ ID NO: 185706 - protein, 113 aa, Zea mays
  Clone ID: MRT4577_100951C.1.pep
LSVTFTVWVSSYHTIDNVNTGGEDKEGGPPYQHRLIFFGKQLEDGRTLADYNIQKERTLHLALLLMGGIHIFVKTLTGKTISFEAESSDTIDNVNAKIHDKDDISSNHQRYDF

SEQ ID NO: 185707 - protein, 120 aa, Zea mays
  unsure (1)..(120): unsure at all Xaa locations
  Clone ID: MRT4577_100952C.1.pep
MSRVALDHHVFIVVDERRTGTYLSLFYAEEMIGAKDDXAXYLDGDHYTMAKDSAELCVDLFTNFADHXTGLHMFXIVYNAEKRRNXSGLXSLLLERLCGDYCKIAELVVTADPCAQVSTS

SEQ ID NO: 185708 - protein, 342 aa, Zea mays
  Clone ID: MRT4577_100953C.1.pep
PYVPRVRGRWSTWLYEAEGENDPFDVIHSESVAVFHRWALGVDKLVVSWHGISLEALHSGIFQDLARGDEEPRSPALNQSLGQSVYRVLSEVRFFRSYAHQVAISDSTGEMLRDVYQIPSRRVHVILNGVDEAQFEPDPPLGRAFREEVGVPKGADLVLGVSGRLVKDKGHPLLYEAFSKLALRHPNVYLLIAGKGPWENRYMDLGRNAKVLGAVPPGKLKAFYNALDVFVDPTLRPQGLDLTLMEAMQCGKPVVATRFPSIKGSIVVDEGFGYMFAPNVESLLESLEAVVAEGARRAAQRGRACREYAKSMFAATKMALAYERLFLCVKNDTFCGYPAEFD

SEQ ID NO: 185709 - protein, 65 aa, Zea mays
  Clone ID: MRT4577_100954C.1.pep
TDTSQVLIMARHVKTAFPTAYELRCTYSNFWTPTYRHCLDCNTWLPSVACNVYSTIRTSATTIKS

SEQ ID NO: 185710 - protein, 90 aa, Zea mays
  unsure (1)..(90): unsure at all Xaa locations
  Clone ID: MRT4577_100955C.1.pep
SRIKQPFSLESVTTFGFVIILNRSFFSHSFGFLLYHHVTYISVLSCRRCFYLEDLRRGRRPXTNINPKLSKAVAKLPKSSVVNKVWDKQV

SEQ ID NO: 185711 - protein, 165 aa, Zea mays
  Clone ID: MRT4577_100956C.1.pep
MMDGGQDGPESSDHNMDLEEGNVTIRVKRAKATNWPRVMSKFLLDWYLEKKKGMPPKTKFKKIHHVWCTSAVNTKFRTTYSVDQVHRHFRRFKEIWIIVTRYVNETSRFNNKHKMLILPPATMASLPVAERAILVKPIPFFDHLLHLFNDGQLDAECMRDPIMTD

SEQ ID NO: 185712 - protein, 76 aa, Zea mays
  Clone ID: MRT4577_100957C.1.pep
VGIMIQSWIMPEYMIRVNGMKILHVQQMPKMPRNLKSSHSTEKMMDSVICTSACIYSSSTPSMLLMTASERLLVHI

SEQ ID NO: 185713 - protein, 255 aa, Zea mays
  Clone ID: MRT4577_100958C.1.pep
MDLEEGNVTIRVKRAKATNWPRVMSKFLLDWYLEKKKGMAPKTKFKKIHHVWCTSAVNTKFRTTYSVDQVHRHFRRFKEIWIIVTRYVNETGSRFNNKHKMLILPPATMASLPVAERAILVKPIPFFDHLLHLFNDGQLDAVCMRDPIMTDESNEELEAQIALNIIASGADTRDQDGEDLDNIGLEGEDNHHEVAASSGEVPCEVMSDTSPPSAQPSGSFAESTMAALKPSAKKMKIISKTKLSPKAQAALPRDG

SEQ ID NO: 185714 - protein, 355 aa, Zea mays
  Clone ID: MRT4577_100959C.1.pep
MASSLKFTVRRRPAALVAPASPTPRELKRLSDIDDQDGLRFHIPVIQFYRRSALMGGRDPAPVVRDAVARALVHYYPFAGRLRELEGRKLAVECTGEGVLFIEADTDVRLDHFGDALQPPFPCLEELIFDVPGSSEVLGSPLLLFQVTRLACGGFILGVRLHHTMADAQGLVQFLDAVAELARGAAAPTVRPVWGRELLEARDPPRPAFAHREYDEVPDTKGTIIPLDDMVHRSFFFGRREVAAVRANLPPGLRSRASRFDLLTGLLWKCRTAALAPDADEVMRMICIVNARGGKSGAAIPEGYYGNAFAFPVAVATAGDLAARPLGYAVELVKRAKGEVDVEYMRSVADLMVLR

SEQ ID NO: 185715 - protein, 446 aa, Zea mays
  unsure (1)..(446): unsure at all Xaa locations
  Clone ID: MRT4577_10095C.1.pep
SAKAICGGCLAESFTDKREMKSLVRLLRAXGPEEQSPRLREHTSALLNFTDVXLRQNRATVKGLGPTPNTQDRIAREVPLKQMIELRTVAPHGIXAAHAAIYRPPSVQADGGGSSERAPVLYSLLKGLALQLPDEVPDKNEIIRLRKVASSVGVGDKHDAEWVHSILADAGAANDNSWILLPYLCAAFMVSNIWNGAVYDVNIGGLSNNLHCLARCVSAVIGGSEYTRVEREQRINSLSNVHTDELQEAELPSRVSAEANIKSCMQIYVKLSAGIVLDSWNDTSRQHIVPKLTFLDQLCELSPYVPRSTLEAHIPYTILRSIYHQLYGGSLLASEPAEQSPRQSPLISLAHASPSSARQNRPETTPRSHTFDPGYYSSSGSQHDDGYDADRRAGRLLRSLRRSGPLDFGASRKAKKFVEGSSSGSSHGAGSLQRFAVSRSGPLSYR

SEQ ID NO: 185716 - protein, 102 aa, Zea mays
  Clone ID: MRT4577_100960C.1.pep
GIPFRCLPNFVFYLVGKALWVQSKIGREFQHGFLPTILSLFMRFVPSIMNILKRLADVGQEPATAPKRQRKIKLQPKSTWNSFSYSKESFCWKSFKSASGKV

SEQ ID NO: 185717 - protein, 47 aa, Zea mays
  Clone ID: MRT4577_100961C.1.pep
VLVPSTSQLLHAAPRVGLRRAPHECSTSMPSGRSVTRSSAYRFSQNT

SEQ ID NO: 185718 - protein, 59 aa, Zea mays
  Clone ID: MRT4577_100962C.1.pep
LHGKASNLTFSPNQDPINQFKPKPIQYTGGGQSHIGNKKRQTAGNQEFKTTTSTKGGNR

SEQ ID NO: 185719 - protein, 71 aa, Zea mays
  unsure (1)..(71): unsure at all Xaa locations
  Clone ID: MRT4577_100963C.1.pep
LLYGAPRDRGSXAIDLSXLXNYPRSTTGYRESMLTVQCISNIRSSAKALHREXTSKVQSIVIRENIDLGSL

SEQ ID NO: 185720 - protein, 105 aa, Zea mays
  unsure (1)..(105): unsure at all Xaa locations
  Clone ID: MRT4577_100964C.1.pep
ASXXXAALKRXKLEAXXGCERGXXSRXXCXPPWGPSLNWCTXRXMPXHQXLCHXVVHXPEEAHRXXQRASPCSTRSSRRVXERSTIGMEXXEGDXDGXRGXGEIM

SEQ ID NO: 185721 - protein, 500 aa, Zea mays
  Clone ID: MRT4577_100965C.1.pep
YSARGYNSVLNACVLSQQWKGVFWVFQQMRIGGLPPTGATYGLAMEVMLKAKKYDFVQKFYEKMQKNGVPPRAITYKVLVRSFWEQDKINEAVEAVNDMEQRGVVGAASVYYELACCLCNNGRWRDAMLQVEKLKQLPLTKPLEYAFTGMILASFNGGYIYDCISIFELMKDHCMPNIGTVNVMLKVYGHCDMFGKAKDLFETTKACFLNSQTYIHEHSSFKADTYTYNSMLEASASAQQWEYFEYVYREMALSHHCLDQSKYSWLLIKACRAGKPYLLEHALDSILERGEIPDVQLITESICQSSAHRDYGRTLQLLNIMTQASIKIKEVEWDYLLQQNMHQFSIDALEGLIKYLSTNGTTNADPAVDLVRALQSQCRDDTSTQQFELSFHGSGNKYSCSSLAELDQLTCKNLCTDIILDVPGSDREMPQLGVSALMCRDISLNGQRVENKHELSDLGQRGPQVSAIDKVLDSMNSYGDNSYGEMPSASKILELWEHER

SEQ ID NO: 185722 - protein, 86 aa, Zea mays
  Clone ID: MRT4577_100966C.1.pep
NKTRARLTGGGATPCPPSWPGTWTGEASLAKDQLLDPGHWFRQGGGLICGLFWEAVPLVGAVWIELLPRRILEAMGRFLRRVFWFN

SEQ ID NO: 185723 - protein, 39 aa, Zea mays
  Clone ID: MRT4577_100967C.1.pep
DYTVFLQNRFTLTAGAARAENLKVAQINRARPKLSAAAA

SEQ ID NO: 185724 - protein, 79 aa, Zea mays
  Clone ID: MRT4577_100968C.1.pep
PDDQDSTYADAILDNSQLQLHITTKHTIVIHYTSRIVNTQTYITINTKINPIIKDNTSSDYLSKTVQNFQLQLPNIEQT

SEQ ID NO: 185725 - protein, 71 aa, Zea mays
  Clone ID: MRT4577_100969C.1.pep
EPRDLGLPEACFKFWTPIAAFPPSHHRHFHHLRCSCLNQIYSVEEDERDTNFFGLPAQEVLSNLFLRTTQV

SEQ ID NO: 185726 - protein, 359 aa, Zea mays
  unsure (1)..(359): unsure at all Xaa locations
  Clone ID: MRT4577_10096C.1.pep
GRLLQEAGTGAFAVVDVSLDDGARCRKMPSGMLIQPIRYNSCKVSAIDHVRVDDTSSHDLFHPCLSGVLFGARRWVTSMARQCARIRDVFHXPTVPXQVTSRGRKTSMKLADNLLADYTSSVAAFPDDAWTVQCGVGTEQDIKIMYKRQSEGSSSSSNTAVVCACASFLLPLRMRKAFDLLKNNLLRAKWDVLVNGGSVKEEVRVANGVGSDDAVSILHVKHGHGANRDTMMILQNSSYDASGSFMVYSSLDKQLVETITNPGDSQAMSSINLFPAGFSLVPLTNPDPAPQEGSGSIAQPGATVMTAGFQILMKMARGTGLCPRSVSSAVKIMSDNITNIKDALLKSHPVFYKSIQSVD

SEQ ID NO: 185727 - protein, 206 aa, Zea mays
  unsure (1)..(206): unsure at all Xaa locations
  Clone ID: MRT4577_100970C.1.pep
MSRGTGAGYDRHITIFSPEGRLYQVEYAFKAVKSAGVTSIGVRGADSVCVVTQKKVPDKLLDQTSVTHLFPITKYVGLLATGLTADARSLVSQARNEAAEFRFKWGYEMPVDVLAKWIADKAQVYTQHAYMRPLGVEKNAQLFKCDPAGHFFGHKATSAGLKEQEAINFLEKKMKDDPKFTYDETVQIAISALQSXLQEDFKATEI

SEQ ID NO: 185728 - protein, 89 aa, Zea mays
  Clone ID: MRT4577_100971C.1.pep
TLFLFPLLPNPSLAINNFASPKNNQTPPYHHHTLHNSSTGHGYCHTFIPMPIHIHLSKPSQHTLISLNKFTVLNQTTTNKKFSYPITLI

SEQ ID NO: 185729 - protein, 246 aa, Zea mays
  Clone ID: MRT4577_100972C.1.pep
MSRGTGAGYDRHITIFSPEGRLYQVEYAFKAVKSAGVTSIGVRGADSVCVVTQKKVPDKLLDQTSVTHLFPITKYVGLLATGLTADARSLVSQARNEAAEFRFKWGYEMPVDVLAKWIADKAQVYTQHAYMRPLGVVAMVLGYDEEKNAQLFKCDPAGHFFGHKATSAGLKEQEAINFLEKKMKDDPKFTYDETVQIAISALQSVLQEDFKATEIEVGVVRKEDRVFRALTTEEIDQHLTAISERD

SEQ ID NO: 185730 - protein, 252 aa, Zea mays
  Clone ID: MRT4577_100973C.1.pep
MSGDHAKKDMVTGEKPATSHGKAPSGESHNKKKEELPPHKSHRSGDKKKKMKKVVYYETDSSSPSTSGSDAPSVTSKRHACKKFSSKKIIEQDTSSTREAQPVAFKALEEKKEESTSSRLPIDASKLDNEEMTLIIKIFRQILKQRKGKDYKPRSKKVCYKCGKPGHFIAKCPISSDSDRGDDKRGKKKEKKRYYKKKGGDAHVCREWDSDESSTNSSSDEDTANIAINKGLLFSNVGHKCLMAKDGKKKKK

SEQ ID NO: 185731 - protein, 74 aa, Zea mays
  Clone ID: MRT4577_100974C.1.pep
PRAFGFCSSSSRSFRASFSSRGFPLSWGRLLPHPAINGVDVGPPLYSHGCVSSSGAAMLLSFVRYVPQLGFGGL

SEQ ID NO: 185732 - protein, 154 aa, Zea mays
  unsure (1)..(154): unsure at all Xaa locations
  Clone ID: MRT4577_100975C.1.pep
PVAPPGFAGPALPPLGGFPPLGVVRGASLLLRGCCVGPPXGVLPLPRSLLGRPSRLALGGFRLRFFAPWSXFGPGRFPPPVGXPGFFGRLRGLGAPGRGGPLFPAPSVLFFGPLQKKILFVRSRGLWIVKNLPPCPVFVLGFGCGPPSLPFASP

SEQ ID NO: 185733 - protein, 123 aa, Zea mays
  unsure (1)..(123): unsure at all Xaa locations
  Clone ID: MRT4577_100976C.1.pep
EETFAVTGVMSVGDXGRALRWVDASXQSQRXLLRLQARRDAFVAGLVHDGRRSRNRKAVGGGGGGPTDTEKRSTIDELLSLQETDPGYYTDTVIKGIVSILLNAGTDTTALTMEWAMAQLLTH

SEQ ID NO: 185734 - protein, 87 aa, Zea mays
  unsure (1)..(87): unsure at all Xaa locations
  Clone ID: MRT4577_100977C.1.pep
SKQYFTRLGKFLGGSGEPSXPGGPLFKPLGFGKTEKEMNELKLKENKNGKLAMLAILGYFIQGLVNGVGPFQNLLEQLGDPVNNNVL

SEQ ID NO: 185735 - protein, 93 aa, Zea mays
  Clone ID: MRT4577_100978C.1.pep
AFGKTLLQSVIAYWFWLLMHAVVDQFIIYVTRLTKYIFSFGDTIRSSNDIKLMRTTLCKEYKEKQYKYCSSTHITHIHTDAWSRPGRLERRTV

SEQ ID NO: 185736 - protein, 84 aa, Zea mays
  Clone ID: MRT4577_100979C.1.pep
VALALTCIVFAALPSVLGFLPLWLTVLLHEGGTLLVCLNSIRALNAPTWSLVDDIRQLVDSLRNYFSSKFNSSSSNYVANTVTL

SEQ ID NO: 185737 - protein, 65 aa, Zea mays
  Clone ID: MRT4577_10097C.1.pep
LPPYLAKVICNARRYSLIYHMVYPFTHPLYHLPVYHYILLYTTINTHIVLLFVTLLISIYFLFNK

SEQ ID NO: 185738 - protein, 985 aa, Zea mays
  unsure (1)..(985): unsure at all Xaa locations
  Clone ID: MRT4577_100980C.1.pep
MGVMSRRVLPACSSLCYFCPSLRARSRQPVKRYKKIIADIYQLQPDGEPNDRRIGKLCDYVSRNPTRIPKITEYLEQRFYKDLRHENFTLAKVVPCIXENSLFMQGAQXLLATSSLSTIHTLLDMKAHDDLQVLGCLMLVDFLNGQVDSTHMFNLEGLIPKLCKIGHELREDDEGLRLRSAALQALASMVQYMGDHSHISMELDEVVSVIISCYEANQTLSIKEVVRFQDDDDLVINGNLAVLPVSGQNSAKVASDTMSASENPAYWARVCLRNMANIAKEATTVRRILDPLFRLFDSHDYWSPESGIALSVLQEMQKLMDKSGQHGHLLLSFTIKHIDHKSIAKNSVKQINIVKVASHLARHAKLKASVTIASAISDLIKHLRKCMHFAIEASNANADCDKWYSALYVALEECLVQLTEKVGDVGPILDMVGVMLENLSHTATIARTTISSVYRTSQIAASVYKSSYHQKAFPEALFHQLLLAMLHSDNKTRIGSHRVLSTIVAPSMACPWSDISFPIPMKGDDSHNLHLLVLSAFSSEAIINETRTKNKIQESLQENNKSEAIVDPENGYTQTEPDKRKYSGGPCLNEHYRTAFNDENLKFMKLNDHQIVLLLSSIWSQASLDDNLPANFEAMGLVYSIALLCSKPKSSSHVTRIRCFQLAFSLRRNSLSPESDLKPSRRRCLYTMASAMLIFSAKIADLHQIIPLVKAAAPEKMVDPHLRLMDDCQLVNTSAESSNSEMVYGSEEDESDALAFLSAINKPDTELIETVMCHFREKFENLPEKVNGIEEQLLQEFSLDDSFPLGAPLFMEMPHSCSMYAEKDEECFDEDTVPSELDDDDIIFEHSGSQSDRKTSGSMASSDVLTVNQLIESVHETARQVANVPVPANPVPYDQMKSQCEALVMEKQQKMSVLLSLKHSRTDSHGSAGVDGLETNESSLLSEPELQSTRKGRMRRCDSASSESDCSFRLPPASPYDKFLKAAGR

SEQ ID NO: 185739 - protein, 163 aa, Zea mays
  Clone ID: MRT4577_100981C.1.pep
LPQPPVHHLRDSSELDDDDIIFEHSGSQSDRKTSGSMASSDVLTVNQLIESVHETARQVANVPVPANPVPYDQMKSQCEALVMEKQQKMSVLLSLKHSMTDSHGSAGVDGLETNESSLLSEPELQSTRKGRMRRCDSASSESDCSFRLPPASPYDKFLKAAGR

SEQ ID NO: 185740 - protein, 106 aa, Zea mays
  Clone ID: MRT4577_100982C.1.pep
LSHPLDVQHPPNYSILFRPASGGIWGLHWQTEKRGKFPPLEKEAFSPRPKKGRWGPPAPLKGGFFGGARAWAKQWAPPQQQIFFVGGKKKAPPPPRGNKNPLPGGV

SEQ ID NO: 185741 - protein, 101 aa, Zea mays
  Clone ID: MRT4577_100983C.1.pep
ALWATLWQPLLQTLVPYFVVGLVIFLSLRRLLTIMAAGVPLYWTLPIFWATSRVAAIGACAASKWALVGRRADGDTVHIWAPACSWTRSGTPCALLPRSTS

SEQ ID NO: 185742 - protein, 104 aa, Zea mays
  unsure (1)..(104): unsure at all Xaa locations
  Clone ID: MRT4577_100984C.1.pep
REKXRHRQHTQALLXIMRQQQQPGRQEAGRDPKAPQAYSXRNKNREPPGSPHGTEENTNETXXPETRPTYXGPAHKRXATXDDPXXEEKTXXQXQEAQDKRDTK

SEQ ID NO: 185743 - protein, 106 aa, Zea mays
  Clone ID: MRT4577_100985C.1.pep
ASAHPSMILKALKNAPQATGVQKIFFPPTNYLTVCLELKGPCKSSIIIRLYRNLLSTGNLSAYQTNCIEIDNSCTRHPILLPPELPPLRHLKPPAPPPVAVPHQDP

SEQ ID NO: 185744 - protein, 107 aa, Zea mays
  Clone ID: MRT4577_100986C.1.pep
KSKSKQNSCGLQGACKGFMFGLQVTELLETWPEQVTHGRRWVPVEEAYGLCRYDWMREALDRLKDQLLLLESSEFRPLLSPEPVGSPSVYMVVPPAAAGGATTLCRC

SEQ ID NO: 185745 - protein, 63 aa, Zea mays
  Clone ID: MRT4577_100987C.1.pep
LRAERTEKEKIQGKKRMGLQYQPGYSSDTFPTNYVAHNFWQLGESNQAARTRATKNFHVMCAP

SEQ ID NO: 185746 - protein, 247 aa, Zea mays
  unsure (1)..(247): unsure at all Xaa locations
  Clone ID: MRT4577_100988C.1.pep
KKKKKKKKKKKKKKKXKKKKKKKKKKKKKKKKKXKERXKKKKKKXKIMKGKEKKEKRXIFLXYRWVFTDPATNRRPDKTHTTTQQQHTTNRTNEKTPQTTPRKRRKQRPRNPTETKTNNRRHADRKTAKNQKTNPKGETEHRNHRQKRKRQTQEKTTTKKTKKKTKKQKXKQKKTIKKKNKKTKQRTKKTKQNKKKEKKRRKKHREPNKKKTHTKKKKKKSKRKKNKTKNKQKKKKKKKKKKKKNNR

SEQ ID NO: 185747 - protein, 118 aa, Zea mays
  Clone ID: MRT4577_100989C.1.pep
LLRNPGRKLIFPPGPGGGPPETKKNVSGSDPGEKKKPALLRGFFCRGGFAKKFRGFPLTPGRGRGVGLPRGGQAPPPVLSVRKGLPPVLEGAGKNPGGPPDTGGPPRAETWGKKRTPP

SEQ ID NO: 185748 - protein, 49 aa, Zea mays
  Clone ID: MRT4577_10098C.1.pep
ENGDDESIVSEIALECFEQLLVVIGPGRNSGWEIESPKVCKRVCQSVRA

SEQ ID NO: 185749 - protein, 76 aa, Zea mays
  Clone ID: MRT4577_100990C.1.pep
LELSPVLAHFVHWLVYLASRSILDAAPIIPSAIASLTPVVCIRSLHECSLTPARVDRRLVKVLAIQSSPLRKLDKE

SEQ ID NO: 185750 - protein, 99 aa, Zea mays
  Clone ID: MRT4577_100991C.1.pep
HTMHLRERVVVTARRRSGMRSVPRMRSTLSCIALPGCARCNRGSLVRLPLQYWRQIVALPFAAEHRWLPACSASSNDIRREWRRHPRSSHNGTVPAGSY

SEQ ID NO: 185751 - protein, 798 aa, Zea mays
  Clone ID: MRT4577_100992C.1.pep
EEVTIKSIRSSYASAYNSTLQNELSKLKDHISSISEEKRQMQLNTSAVQEELEKTNEELAINFRNLESANTTINSLQDALSQARSNIFILAAEKNEAEAKYETEINALNAELTKCLEELDKTHGHLQSHSTEYHGYLEKLGMFMMDDSLLSLIAEEYGKTFNSLRDMCLIVKSMHEQLSVKSFQNDSIVEDSELSSLLSLPDYESFVRERLVKNINRKGNIDDTSSFSTIVEQLSNQTEYLSSFLKDLSTYMNSNIIVVLRSLQLVSNTFAHTLEEHDMLKVELGNKDAHNRAQESEVLSLQKDLRAMSSKCIYCVQQIEIVFDDMVDLGYAIDLATGSSSIGSELEVTVSDLKNEDTSDYSKVADTLLATIDTLKSKSEKLSTIKGLVITSLDDFKMKLKQAEAAAETASHEHQLSVERVCMLEKELKILQDECNRMELNIQEYKEREGALKARELELLSVEHTQISADRGLTDNAISKDQMEALVEKISKLNMLSGESNVQREEATSPLDKLFVVIDEFSALQHEVETLRYENEDLQLNIESYTREIEQLREVSRNSDLTNRELESKGSELLEVAVSMERMIQRLGYLGGKDVLEDNKPASTQALLSKLEKLIIASSTESGNSKSIIQELGAKLQSREKAVDELSTKVKMLEDLCHAQLSQPEPSKDRSFEASSSTIGSDMSDIEDAGPVGKTTSVSSVSTAAHARTMRKGSADHLVVNIGSESERLIAAQDSDDKGRIKSLHTSGFIPAQGKHIADRVDAFWVSGSQILMNRPRARLGLMLYWLAVHLWLMGSIL

SEQ ID NO: 185752 - protein, 54 aa, Zea mays
  Clone ID: MRT4577_100993C.1.pep
TKMKVESGFIIFAMCIILRDFCLSQKNIFQEKFVSVILGSVYHKQFNFARLALS

SEQ ID NO: 185753 - protein, 79 aa, Zea mays
  Clone ID: MRT4577_100994C.1.pep
HLFCCNSPSIRLRTPSDSWPISFPFSLCVIVVPSVGHCFHMAQRFLLLRKVNVLSQKRSLQRLLLCLLTLVVCSCSDSH

SEQ ID NO: 185754 - protein, 93 aa, Zea mays
  Clone ID: MRT4577_100995C.1.pep
GGKISLQPRTFKNCKVRTSQRMKKRPFWGPQGPPPTSFKTPPPTNRQGGPFQTPGLGGFKKKPVSKPKPWLFFKSTNQGWVFSPTPRKPSLRV

SEQ ID NO: 185755 - protein, 67 aa, Zea mays
  Clone ID: MRT4577_100996C.1.pep
RCIRIPSQNTYCDPRSLRRASIMYSLLMQCTCMSSSRMLSTSAPMARILLAADESTGTHRQARYQHK

SEQ ID NO: 185756 - protein, 53 aa, Zea mays
  Clone ID: MRT4577_100997C.1.pep
RISIIEVLAWSMKVVHALIQGGKCCRLVELAINSDKCWVCGNLVCAIYPTSCP

SEQ ID NO: 185757 - protein, 85 aa, Zea mays
  Clone ID: MRT4577_100998C.1.pep
ARNSARDSSASTLISLQAQQQPTPSPTRDRAGSGEWLADTEKLPGAAASPEDVDVVSTHHAAAVARYVPPRATSHTAEPNPGRDG

SEQ ID NO: 185758 - protein, 64 aa, Zea mays
  Clone ID: MRT4577_100999C.1.pep
PRARPHTLPASGRGEKFAGSQGPPEVWGFWEVGLVGGAPPLEWGPTNDKQTLKLAFIYGDVCRL

SEQ ID NO: 185759 - protein, 82 aa, Zea mays
  Clone ID: MRT4577_10099C.1.pep
LLRKKTLLLVFDLFRGVFVPFGRSCYYRTIEVHQGLPEVSTAILFEFLEKPIAASISLCVRTEIFCCTANFSRTFAIRTICY

SEQ ID NO: 185760 - protein, 49 aa, Zea mays
  Clone ID: MRT4577_1009C.1.pep
ARGEAMLLIAGNNYSLGLRGVFEYTLYGPLIACCAGVHLYLDNCRAPMA

SEQ ID NO: 185761 - protein, 123 aa, Zea mays
  Clone ID: MRT4577_100C.1.pep
MGVKASQTGFVVLVLLQCCSAYKLVCYYTSWSQYREGDGSCFPDALDRFLCTHIIYSFANISNDHIDTWEWNDVTLYGMLNTLKNRNPNLKTLLSVGGWNFGSQRFSKIASNTQSRRTFIKSV

SEQ ID NO: 185762 - protein, 76 aa, Zea mays
  Clone ID: MRT4577_101000C.1.pep
GLEQPALLWGPNTTTDYKPTLGLFNVYTRLPNQTHTEWVCLSLHPFLLGPYRSLRASLCTTRLTNSAPLSHGLCGC

SEQ ID NO: 185763 - protein, 93 aa, Zea mays
  unsure (1)..(93): unsure at all Xaa locations
  Clone ID: MRT4577_101001C.1.pep
EYXXLTCRFCLTLLQTXXQFTHWRAPLFIXVFXXXIVFIVALICSXXVSAPRILLLAFKPPFSFXYRXGFCYFVPXSSIPSPAICXYFQAHLF

SEQ ID NO: 185764 - protein, 116 aa, Zea mays
  unsure (1)..(116): unsure at all Xaa locations
  Clone ID: MRT4577_101002C.1.pep
PPGFFSSLPPPIFSVSPPAWALFSPRFFFFPLHVLGGFPPPPFSFGRLCSFCSGALGFFPFFSPLVFFFFPPLGRGFLLLPSTFFXGWPCFAFMLLCLPSFGLVLFGSFSPIPLIP

SEQ ID NO: 185765 - protein, 80 aa, Zea mays
  Clone ID: MRT4577_101003C.1.pep
TGLSRAGRRAHSAKALAREICYKNTWVTSERSRRDEFTTLQSAPIMGPPALNLLAPVQMGYSWPCGAKVYKFFSASQKIK

SEQ ID NO: 185766 - protein, 73 aa, Zea mays
  Clone ID: MRT4577_101004C.1.pep
LIGVPEVYTPVESLRSKEERKRRVATIGRSGSTGSISTASTVQADVGAKACSDQQSEDTGGIIETAKATEITS

SEQ ID NO: 185767 - protein, 79 aa, Zea mays
  Clone ID: MRT4577_101005C.1.pep
LVYMSLEKKKRAPRKSYNQPKLHSDLTITSKPYMKSIYPCRPIIQPASTRLSMYRAPARMLLLTERLYPNRLLNRLPGP

SEQ ID NO: 185768 - protein, 40 aa, Zea mays
  Clone ID: MRT4577_101006C.1.pep
TPWWQVYTPVESLRSKEERKRRVATIGRSGSTVSSYSSSS

SEQ ID NO: 185769 - protein, 52 aa, Zea mays
  Clone ID: MRT4577_101007C.1.pep
QLQFRIIRLCLHHQFFRSVHVIINLRWYTCFLISSLGIFYLFLIKHKTPNKH

SEQ ID NO: 185770 - protein, 94 aa, Zea mays
  Clone ID: MRT4577_101008C.1.pep
SQNIPVPKAGVSLECLLVCPPLVFLSIPIGGLFRGGAPGCPVLLPKTRTLCIPEPTWAFFFFSPVENLSYYPFAARFPPPFYPLGCCQKRANVI

SEQ ID NO: 185771 - protein, 99 aa, Zea mays
  Clone ID: MRT4577_10100C.1.pep
PLFHQQYYLLHHLLNRMCEDILQFSEELARRHRSAQRLPHGVETPTLGYVTPSTSFIGKYPKQMAFLRGTSHTIPKDDDRPIDEWPTTRCSGGQPDRWT

SEQ ID NO: 185772 - protein, 64 aa, Zea mays
  Clone ID: MRT4577_101010C.1.pep
IVHGAPPYSFFSPSRYATEGTADMSACLFSFSVYSSFYYSSIITCEFASSSNASGHDAHCLHAW

SEQ ID NO: 185773 - protein, 88 aa, Zea mays
  Clone ID: MRT4577_101011C.1.pep
VLDRERLPFFFYGAQAYGSLSYTISGENIPVPGSSKFLTQHCSLEKSHPLKSLTTYSRWPRENKSRKSSRHPHVSQTNVPVATAHCTP

SEQ ID NO: 185774 - protein, 135 aa, Zea mays
  unsure (1)..(135): unsure at all Xaa locations
  Clone ID: MRT4577_101012C.1.pep
HASASDLKKMALPPCHMGVRFHVXTGXLSCEARDENGSVAVAVLWSPQPWNLXGEISRTNWYYIKNEPXRFVHVIGDAHVYRNHVRAEEQIQKMPKPFPILKINPSKKDIDSFMASDFKLVGYDPHQKLEMKMAV

SEQ ID NO: 185775 - protein, 93 aa, Zea mays
  unsure (1)..(93): unsure at all Xaa locations
  Clone ID: MRT4577_101013C.1.pep
SDGSDSSGLWSLVSNPSSPDFTPLNSFSAFGNSFNLTGEVFSKLGLSRXCNQASQRIWNEFNSGPSYLWESPATDPSPSWPASSGSPTHTATS

SEQ ID NO: 185776 - protein, 118 aa, Zea mays
  Clone ID: MRT4577_101014C.1.pep
GGKPNAMFTNTGKKPPRKIKKSFWITGHYWGSKGFSHVTRGKKKSKDPPRSIPKRPLTLNPTFWVGTGFQKKKGKARGPHLMLGGGALKIPSNQSFCPQIKKGLARLGKAGVVQTLGT

SEQ ID NO: 185777 - protein, 61 aa, Zea mays
  Clone ID: MRT4577_101015C.1.pep
TRQESLKIGQKIMIPFATSIILFSGLRKDSHDVEALFIVVVSLLDALMLKLSCVTSAFSSN

SEQ ID NO: 185778 - protein, 134 aa, Zea mays
  unsure (1)..(134): unsure at all Xaa locations
  Clone ID: MRT4577_101016C.1.pep
GXGKGKRGGPXXGGXXGGEGGXKGGGXGRERXGKGRGXKGDGEEGGGXXGGNRRGGGXXRRXXRGRPIXHXXXXXEXKGXRGGPGAGAPGXXKGGGXQGDXKVGXGRXXPGPXGEXGGQEVRGRERRGEDAKRG

SEQ ID NO: 185779 - protein, 115 aa, Zea mays
  Clone ID: MRT4577_101017C.1.pep
HEYCSAPVLSLSAGRTEPWRSSAVIAVGLQHLIPIPFATFPCNFAYVMLVFGQNFQVLCILTLAGFASYKKNLVLEDAFNQNMLGSFLLANILTGLVNLSVNTLSASSLTAFMIL

SEQ ID NO: 185780 - protein, 145 aa, Zea mays
  Clone ID: MRT4577_101018C.1.pep
MSIVAPLFSRFLPATPSPGAPTESSRSSSCIAFRLPHLIAIPFATSPCNFAYVMLVFGQNFQVLCILTLAGFVSYKKNLVLEDAFNQNMLGPFVRANILTGLVNLSVNTLSASSLTAFMILSVYTFALCMVTGLIHFCGVRMKFW

SEQ ID NO: 185781 - protein, 54 aa, Zea mays
  Clone ID: MRT4577_101019C.1.pep
HDQLTGLFKYISRIGTRVIKKTLASNILWEPRYNLDDSRRDPNIIRKVIQGLLI

SEQ ID NO: 185782 - protein, 132 aa, Zea mays
  Clone ID: MRT4577_10101C.1.pep
MAVKDCGGHKGGGCECHRRRLYRKCCGALLALVILALFIILIVYLVLRPHKPRFYLQDLAVLCLNVTPPTSAYLFTTMQATVAARNPNDRVGVYYDEADMYAEYKGVPITVPTRLPVAYQGHRDQPVWSPYL

SEQ ID NO: 185783 - protein, 360 aa, Zea mays
  Clone ID: MRT4577_101020C.1.pep
MESSSGEELEEEFPGHEWITPQSSINAAYQSQTEKGIRKICSDLLELKDAIENLSANRQSKFLAFLRISEEVVEAEQELIELQKHVSSQGILVQDLMSGVCRELDIWHKSSKEEDATKKDSETELDEILSDDTQDPRTIFLDKLDVLLAEHKMEEAVLALEAEEKKYLVADESGKESNADNTAFKTALVKRKTILEDQLVRYCGQPSLSMNERGKCLSGLIKIGKSSLAHQVLLKAYGSRLQKSVEAFLPNCSIYTETYSATLSQLVFSAIANSAKETNTLLGDSPMNTNRVIQWAEYEIETFARLVKENSPLPESVSALRSACICIETSLFHCSCLESQGLKFSKLLMVLLGPYIEEVF

SEQ ID NO: 185784 - protein, 143 aa, Zea mays
  Clone ID: MRT4577_101021C.1.pep
LEAGRDEQDEPCGFDENPYAATTSAAVLLQGASCPALQAAAGAQRMPRIPSLTELFSDPSLAHLFEEGGMQDMARLGNHHQQHQQQHGALLGRPVTTHEPTAGQQRQQLVRGEDPADGPACLDVGRWPWRSWQAQEVIGGEHY

SEQ ID NO: 185785 - protein, 90 aa, Zea mays
  unsure (1)..(90): unsure at all Xaa locations
  Clone ID: MRT4577_101022C.1.pep
RAYTCDDFLAPALGLGDPFAADGSTSAASAASSASXNWSAAAENGAGEASLFLLDFCAGPDLAAADQLHLPGGYYYPLDPSLSSSPRRYS

SEQ ID NO: 185786 - protein, 125 aa, Zea mays
  Clone ID: MRT4577_101023C.1.pep
VQSTSWFFMRSATYATQFSSQRSEIYGLVSLNEPASRVCFSQSLFSHRHPKSGGSHGMSTHDSPQYMAPCGWPNSLAMMSSPNAGEVSACRSRAVSVVGATISWRSSSAYTAAATFWMALSMLAS

SEQ ID NO: 185787 - protein, 56 aa, Zea mays
  Clone ID: MRT4577_101024C.1.pep
LLAKICGCAAQSGAWAGVALPIGGAIGPGERLRAPRMAVGMGGASSLCQCGGSVWP

SEQ ID NO: 185788 - protein, 34 aa, Zea mays
  Clone ID: MRT4577_101025C.1.pep
SQTMTCVAPRTKIRRPSCALLARSRPSFLYALFS

SEQ ID NO: 185789 - protein, 79 aa, Zea mays
  Clone ID: MRT4577_101026C.1.pep
GRIECVYQATVISDKGSTWLFYKSISNNASNGGLKLKYRALRRKNYSNSALFYKIWSKNYRTPSQVPQIYYTVVDRPII

SEQ ID NO: 185790 - protein, 104 aa, Zea mays
  Clone ID: MRT4577_101027C.1.pep
SAREQAHLFMTERVFAVRDRVCLTLQSYCQSCLTERVNQQLTLRVLSTYTIILNINPVAYELLIPAGRSNHTILHVSQVQAVASTHTAVSPSPTDSDHNLQIPK

SEQ ID NO: 185791 - protein, 36 aa, Zea mays
  Clone ID: MRT4577_101028C.1.pep
RFIYGFNLITGGSFLLLLQIINLKTPTDPQLNFYIT

SEQ ID NO: 185792 - protein, 60 aa, Zea mays
  Clone ID: MRT4577_101029C.1.pep
RIWLTLCWSGHFSLSPSFLEILNRLYKLKGHNSLHIHWHLFQYQCADNHAGYFSFYRPLS

SEQ ID NO: 185793 - protein, 43 aa, Zea mays
  Clone ID: MRT4577_10102C.1.pep
SDLGQFESALGVCLYRDSCHCNDFTPNCDIYIKCVNKYIKIGT

SEQ ID NO: 185794 - protein, 89 aa, Zea mays
  Clone ID: MRT4577_101030C.1.pep
EATSLVFFLKANSLICLNGRKGVTPDRKRPFKALTPLFCKNPYHPSPESGGLGRGKSIFKPHPRVKTLSLQEQWVGGFPFRTKLFFGGG

SEQ ID NO: 185795 - protein, 161 aa, Zea mays
  Clone ID: MRT4577_101031C.1.pep
RHYAHVDCPGHADYVKNMITGAAQMDGAILVVSGADGPMPQTKEHILLAKQVGVPKIVVFLNKKDMVDDEELLELVELEVRELLSNYEYDGDDVPIIAGSALKALEALMANPALKRGDNEWVDYIFNLVDEVDNYIPVPQRQTDLPFLLAVEDVFSITVSR

SEQ ID NO: 185796 - protein, 466 aa, Zea mays
  unsure (1)..(466): unsure at all Xaa locations
  Clone ID: MRT4577_101032C.1.pep
MASLTSASTSLLFPQASSSRSRVRLSTSLGFSAQPARLRSRAAAGGQRRGSLLVVRAARGKFERTKPHVNIGTIGHVDHGKTTLTAALTMVLASVGGSAPKKYDEIDAAPEERARGITINTATVEYETETRHYAHVDCPGHADYVKNMITGAAXQMDGAILVVSGADGPMPQTKEHILLAKQVGVPKIVVFLNKKDMVDDEELLELVELEVRELLSNYEYDGDEVPIVAGSALKALEALMGNPTLKRGDDEWVDCIFKLVDSVDSYIPVPQRQTDLPFLLAVEDVFSITGRGTVATGRIERGTVKIGDTVDIVGIRDTRNCTVTGVEMFQKTMDDAMAGDNVGLLLRGMQKDDIERGMVLAKPGSITPHTKFEAVVYVLKKEEGGRHSPFFPGYRPQFYMRTTDVTGNVTVIMNDKDEEAKMCMPGDRIKMVVQLIQPVACEQGMRFAIREGGKTVGAGVINKIIE

SEQ ID NO: 185797 - protein, 186 aa, Zea mays
  unsure (1)..(186): unsure at all Xaa locations
  Clone ID: MRT4577_101033C.1.pep
RTKCFFVLISYSAETFTPCSNYFRRPAVHPCDYTIRNCIAIHIGXAGIQAXNSSWELYCLEHGVHADGYMPDDKIIXGGGNDSFNTFFRXTVAGKHVPRAVLVDLKPTVIDEVRTGTYRQLFHPEHLINXKEDATNNFARCHYSISNDIGELCLDPMKKLFYNCTGIHGFLGFNAVSRGTGSDLGY

SEQ ID NO: 185798 - protein, 521 aa, Zea mays
  unsure (1)..(521): unsure at all Xaa locations
  Clone ID: MRT4577_101034C.1.pep
MEEDNEESPADRCVDRVLEGKEATDVRLAAMAVVAGSRKGLEKLAVRGSHPTRGVTDQGLSAVARGSPNLSSLALWDVPLITDAGLAEIAAGCPSLERLDICRCPLITDKGLVAVAQGCPNLVSLTRTXACPGVANEGLRAIGRSCVKLQAVNIKNCPLVGDQGISSLVCSATAALTKIRLQGLNITDASLAVIGYYGKAITDLTLTRLAAVGERGFWVMANAAGLQNLRCMSVTSCPGVTDLALASIAKFCPNLKQLYLRKCGYVSDAGLKAFTESAKVFENLHLEECNRVSLVGILAFLNCREKFRALSLVKCMGIKDICSVPQLPFCRSLRFLTIKDCPGFTDASLAVVGMICPQLEQVDLSGLGEVTDNGLLPLIQSSESGLIKVDLSGCKNITDVAVSSLVKRHGKSLKKVSLEGCSKITDASLFTMSESCTELAELDLSNCMVSDYGVAMLASARHLKLRVLSLSGCSKVTQKSVPFLGNLGQSLEGLNLQFCNMIGNHNIASLEKKLWWCDILA

SEQ ID NO: 185799 - protein, 101 aa, Zea mays
  unsure (1)..(101): unsure at all Xaa locations
  Clone ID: MRT4577_101035C.1.pep
MQQGFDRAEAVFTLISRCMCHTVTQLIADLSVNAMVHELGSDPRGKDMVHALLNMLRWKAPAVSAVISCGNLICGTSKVMSLHLAGXLVPMLTNASALWVY

SEQ ID NO: 185800 - protein, 210 aa, Zea mays
  Clone ID: MRT4577_101036C.1.pep
MARGGAWAAVAAAAVWWMAAGAGAVWLEIAPSGTKCVSEEIQSNVVVIGDYSVLYDHHHAQPTISVKVTSPFGDIVHKKEKVSMGQFAFTTAEAGNYLACFSIDGEDRGLVVKLNLDWKIGLASRDWDSVAKKEKIEGVELELLKLEVAVQSIHDNLLLLKSKEANMRDVSEQTNSRVTWLSMLSLVVCIAVSVLQLWHLQQYFRKMKLI

SEQ ID NO: 185801 - protein, 59 aa, Zea mays
  Clone ID: MRT4577_101037C.1.pep
YWYIHARKELSLSQISRPLAGNSRPHSFYTPRTSLEVAVNFSSSIVWHWISTPASWLAV

SEQ ID NO: 185802 - protein, 62 aa, Zea mays
  Clone ID: MRT4577_101038C.1.pep
TKTSLLEVQVCCACSERMTLSLLKSTRCQAQLPFTQDAPIIPMIVTVSSTILHFQHVFCLFA

SEQ ID NO: 185803 - protein, 137 aa, Zea mays
  unsure (1)..(137): unsure at all Xaa locations
  Clone ID: MRT4577_101039C.1.pep
RKTIPGPGNPKFPEFGAQPEKVFLGPLPNQFQGPVGIFFLGILFNPSPQKGVLGPGGPKEWGXAPKGRGGFXRFGGGVSQIKKRVVPLKGGPPPQKPKGPGGFPLTVVFPHPLPPKGGPPGVPPQGVSKRISLLVFF

SEQ ID NO: 185804 - protein, 60 aa, Zea mays
  unsure (1)..(60): unsure at all Xaa locations
  Clone ID: MRT4577_10103C.1.pep
SYIKYIGRXEHASGESLCNNLAPSNRHHIYSXKGEHAPLTYHYFSISDSIKSIMERLSIL

SEQ ID NO: 185805 - protein, 175 aa, Zea mays
  unsure (1)..(175): unsure at all Xaa locations
  Clone ID: MRT4577_101040C.1.pep
APAWVLGLRGRLXFIARTLTGKTLTLIVESLXTLVNVXAIIQGKAGITTLQGTLIFAGKNFEDCHSLAXYSLMHLDSSLHLLLCLMXSLQISAKTLSAETITLDVXESSNAIHSVKAKIQDTDVLPPNHHIVIFNGNQLDDGRHLADYNIHRESTLNLVLRLTGGMQSFVKTLTG

SEQ ID NO: 185806 - protein, 46 aa, Zea mays
  Clone ID: MRT4577_101041C.1.pep
STASHETRLCPVRKCWCCGRHQSHHIYHEICSRYIFIDSISLILYR

SEQ ID NO: 185807 - protein, 109 aa, Zea mays
  Clone ID: MRT4577_101042C.1.pep
EGLSNKPSAVPAKKDTPKQVEFTHCSPAIVGRLMGLDTVPCPKKSFDRCQSDTRGNRRHLSGVARGVDSASSGDQACNTSSDELPAFNECFEVTEMENMAMHGPLQPGK

SEQ ID NO: 185808 - protein, 89 aa, Zea mays
  Clone ID: MRT4577_101043C.1.pep
SQTEFFLLQLSALLTILSRLLPTIIDIMMQIINTKHKHKNSPHPSRHHPQPIHAQSFMNQTWGRAQVRYQSPDSPSSSSSVGSNSGDDS

SEQ ID NO: 185809 - protein, 77 aa, Zea mays
  Clone ID: MRT4577_101044C.1.pep
VPTLYRRICAESLFLSLTDKLVGTSNTKKRDVIYQCLPEMKTHGSIIKPIIRFHNVLSSNQQACYSEKKTPSLQCTL

SEQ ID NO: 185810 - protein, 88 aa, Zea mays
  Clone ID: MRT4577_101045C.1.pep
CEHLYLGLQLGEHHLPFSQHCPFQLQCLTLWPKHPLSQPCMSNDLQLVTGSRRHCRRLASYQAGERPGIPRVIGEWRGSYSVATPSAF

SEQ ID NO: 185811 - protein, 71 aa, Zea mays
  Clone ID: MRT4577_101046C.1.pep
SPTPLRLVILWRFLLGYGQISFVKEYKKGVASHFCCYYRCCGGFSPRHSPIASAVLVCLCKLKCHGAVPLW

SEQ ID NO: 185812 - protein, 60 aa, Zea mays
  Clone ID: MRT4577_101047C.1.pep
PLLHWHTGQSGATLDSSVNYNRAASRIPEGEQFGVGFPGAPDTVRWCTGQSGAPDQGTLQ

SEQ ID NO: 185813 - protein, 79 aa, Zea mays
  unsure (1)..(79): unsure at all Xaa locations
  Clone ID: MRT4577_101048C.1.pep
VLAMNVMXKYREQKSFRXSEEXYXLRLEDVXNALKCCEALXDVAKTLEKLKXNPRIGKAFSMFSDMTRPXGRSNEXICK

SEQ ID NO: 185814 - protein, 71 aa, Zea mays
  Clone ID: MRT4577_101049C.1.pep
ASGSAYHLTDIGVNGKEHQPYVHVNFYRIYGDTFKKPRRAYETERLDAALKLATEYCLRCKHELIRRHYAL

SEQ ID NO: 185815 - protein, 97 aa, Zea mays
  unsure (1)..(97): unsure at all Xaa locations
  Clone ID: MRT4577_10104C.1.pep
ISGHFIDLQEEHEKVIRSEPLAIWLSNIANMVLFAAKVYALVRSGSLAIIASTLDSLLDFLSRYILWFTAFSMQTPNPYRNPIGKXRMQPLVSSFLP

SEQ ID NO: 185816 - protein, 77 aa, Zea mays
  unsure (1)..(77): unsure at all Xaa locations
  Clone ID: MRT4577_101050C.1.pep
LYAVKATVDPSSEVVFRTTPYTELVRSVGLSNALVAVGEHPYSXAPGXSMNLPIPDPGPSSVQTXCAPPLRCVTVLN

SEQ ID NO: 185817 - protein, 204 aa, Zea mays
  Clone ID: MRT4577_101051C.1.pep
MSGFSNADTGSKTADPYTQKNLEEPSLKEKVEDLFSFVDKTKFCLLTTQVADSDLLASRAMALAAKEGHGFDLLFHTNTESGKTDDLKEHASVNIGFINNSGEWASISGHATIETDREVVRKHYSPALKAWIGDLGDGKHDGGPEDPRIGIIRVKASTAQYAISKKTQVGGLIELAKGIASGESPNVNKLRQISEAEIQQYRSQ

SEQ ID NO: 185818 - protein, 79 aa, Zea mays
  unsure (1)..(79): unsure at all Xaa locations
  Clone ID: MRT4577_101052C.1.pep
LIVGSTHPCAHASDLPYSCRAFPFSPATGRPRGGSLXQLDQSLLDDDQVAEGFVLTCIAYHTLDLFIHTHNEDALLEAY

SEQ ID NO: 185819 - protein, 86 aa, Zea mays [sequence omitted]

SEQ ID NO: 185820 - protein, 211 aa, Zea mays
  Clone ID: MRT4577_101054C.1.pep
KMAPSSSSSSDGHGHAAPRPGTGRVQVALPNADAAAEADAEVSGGYAESNEPNSTGAPSCGSGVVPNDSESIVAKTLEKLPPELAALAKDPKRHAKSKDPGWKYGFWPYEGKKDMVQCIFCKKVVPAGIKRFKQHIAGGYAVVERCPAAPAMIRKEMFDFLVKNARKELNLQQGREWDSESGGGVQEVPVVPSSGTELRKIKGRFKHPLVL

SEQ ID NO: 185821 - protein, 64 aa, Zea mays
  Clone ID: MRT4577_101055C.1.pep
IKFIETQIKKVTIWTYKREPYSPTKEPTYFFISVSKEGFSYVNKVVSVITIIPKTLIVLNDDSV

SEQ ID NO: 185822 - protein, 97 aa, Zea mays
  Clone ID: MRT4577_101056C.1.pep
EHGGHGRCWRIRHRRRGSREKRVVRFHAHPRRAPSELGAAAPRLGSHARAELRGAAPVHSRTNGRGRPGRSLPGAAAAQVGGGCSWRLLGGREPPAA

SEQ ID NO: 185823 - protein, 164 aa, Zea mays
  unsure (1)..(164): unsure at all Xaa locations
  Clone ID: MRT4577_101057C.1.pep
MLCSGRMLACNGVLPGRLRLPRGVAYHLRPPALAWRWRVLPSAAASVGSPDLTSSSSSTANPTNVAGEDHTAATPGFCIIEGTETGPDFAKLDLREIQDNIRTRRNKIFLHMDDILRLRVQQRIQNVELGISDEDCDHELSXFPSFIPLLPPLRAANLQVYYAA

SEQ ID NO: 185824 - protein, 92 aa, Zea mays
  Clone ID: MRT4577_101058C.1.pep
TRLLPEVLDPCMGGEGGGRLPEDHHLLGEPQLRHGEARLGRQRTTRHPAHHAALTSLMEIKIWDFYRARHRPCTTHLTLSLHLPSHRDGPLP

SEQ ID NO: 185825 - protein, 60 aa, Zea mays
  Clone ID: MRT4577_101059C.1.pep
MPIKKTTYIKICPSLGSQLSLITLMVGAKILCNLGAPFSFLFFLFDKTVLPPEKHGSLGK

SEQ ID NO: 185826 - protein, 245 aa, Zea mays
  unsure (1)..(245): unsure at all Xaa locations
  Clone ID: MRT4577_10105C.1.pep
MALRWALLRSAEISPGRKAALEYLHSLSKAQPTRSISCAGLHPAGRSFSTQAATTSSTPQPPPPPPPPEKTHFGDLKDEDRIFTNLYGLHDPFLKGAMKRGDWYRTKDLVIKGADWIVNEMKKSGLRGRGGAGFPSGLKWSFMPKVSDGRPSYLVVNADESEPGTCKDREIMRHDPHKLLEGCLIAGVGMRASAAYIYIRGEYVNERLNLEKARQEAYASGLLGKXACGSGYDFDVHIHFCAGAY

SEQ ID NO: 185827 - protein, 52 aa, Zea mays
  Clone ID: MRT4577_101060C.1.pep
PTRRTTRTGLFYVSMLFLRMMDWKMGLLPTSTRSANSHTRLPTNMLTWHVNR

SEQ ID NO: 185828 - protein, 127 aa, Zea mays
  unsure (1)..(127): unsure at all Xaa locations
  Clone ID: MRT4577_101061C.1.pep
SQVHLVCRNGLATEVESHNQIKERKNRANKICGVNKTTGSNCSKVNRAVYKFYSKEFSTRLWIPHXGRVGGRFFIKYGIPTMLSXVLGGNSSKAEGRLLSCPLSDKTHDXLNRWFDDDDALEEAIGG

SEQ ID NO: 185829 - protein, 135 aa, Zea mays
  Clone ID: MRT4577_101062C.1.pep
YSHLLPNDDEAFEHFDSFISRRIDEANKIGKINLAATGKDLMDDEKQEITIDMYTALEMENDIVGERAPEMEKNQKLGLLLGFLSVHDWYHAQLLFERLGHLNPVEHIEICDGLFRMIEKTMSSAYHIVCHLYYY

SEQ ID NO: 185830 - protein, 108 aa, Zea mays
  Clone ID: MRT4577_101063C.1.pep
HTHCPLCSSFVWLYYCLQAGGCCCSPHVRVSSLTGCCAPFKYIQVQRHAKNRFLQSGNCTNAALFHSTDQAYCIGIIVVWHQPRLMRWPFIFTTNSDSSGILFFFPLL

SEQ ID NO: 185831 - protein, 341 aa, Zea mays
  Clone ID: MRT4577_101064C.1.pep
MATAAAAVTATFRTLIQHAAACGAPVPLPSVRFQSLQRHRVGLRRFAPPRGRPVLPPPFAAEDFSSYVDDFSGDDGEEHFDEEEGSEPEEEAEAPRAYSSPRSRPPRGDDPGRLFVGNLPYTYTSEELAQVFSEAGRVDDAQIIYDKVTNRSRGFAFVTMATAEEAAKAIQMFDGALLGGRTARVNYPEVPRGGERRTVTMSGRRRDDGTYKIYAGNLGWGVRADTLRNVFEGRDGLLDARVIFERETGRSRGFGFVSFSTAEDAQAALESLDGVELEGRPLRLSLAEQNPPPGSPPSTAQAQQEETDSGAPAGGGTEAASSSEPSEAEVGESNLQTAANY

SEQ ID NO: 185832 - protein, 41 aa, Zea mays
  Clone ID: MRT4577_101065C.1.pep
PFKPLGIHSLSLSLMQVMGQARKQYYLVIIYAKLSRYLHMC

SEQ ID NO: 185833 - protein, 59 aa, Zea mays
  Clone ID: MRT4577_101066C.1.pep
FLVVSSRHHLQMDHASDGVDLYKQYLGCAGVYVNSWGNLDPYHSKITLLDPNHSYLPHM

SEQ ID NO: 185834 - protein, 37 aa, Zea mays
  Clone ID: MRT4577_101067C.1.pep
VAKLKVLSYHRHLEVVVACEEDDDNNVDIPLVSIYFG

SEQ ID NO: 185835 - protein, 95 aa, Zea mays
  Clone ID: MRT4577_101068C.1.pep
ATSPLPAGLVSPSPIIGISLLLSYENSSQSLREGSQLQIASLHEQRRSYGTSGTILKSIWRVVNPICQASISIFQKKETSYLEETNYLYLEEAEK

SEQ ID NO: 185836 - protein, 63 aa, Zea mays
  Clone ID: MRT4577_101069C.1.pep
LKKIYSEKPATFLYQPQSAPIHHDYSHKQCIPFKLLHMVSFNQLPLTNFSQFYQLHLIGDALF

SEQ ID NO: 185837 - protein, 238 aa, Zea mays
  Clone ID: MRT4577_10106C.1.pep
MERWAPAPPSAARERPRRRPGQPSFSSTLLDAICDSLDEQAGGHGATAERATAPTPRSAKEQHQAALHYYYYKPFLAASHRAARAAPSPADDCSSGRGYFSSSEVEYSLRRLRPIRTSAGGVGPASVAPVEKQKPAPPGTAKRARKPSAAPASGGCRRPASPGARLASLLNAIFSGKRNSARQHPAPADEEPACSTAPSTARPCLAKTPPSARARARATRNRSRTVRFLDIEGEVAVA

SEQ ID NO: 185838 - protein, 99 aa, Zea mays
  unsure (1)..(99): unsure at all Xaa locations
  Clone ID: MRT4577_101070C.1.pep
SSGSCVWNPILHISRSTXAPSRGKERSDGARLGARAGRRRRGSEDGVGSLDDRLTQASGALEHGTRLDREDPGRNHPGFTSCMLVKLEGSVSISRNNTY

SEQ ID NO: 185839 - protein, 330 aa, Zea mays
  Clone ID: MRT4577_101071C.1.pep
MASPHSCFRGWQSTSHVALALVSVLILSSARLSAGGRSLLELYKPPASAILTYHNGAVLQGRIPVSIIWYGRFTPAQKAVVTDFLGSLTTAAASPLAPSPSVSQWWSTIDQLYLSKARGRGSGGGGGGARVALVGQATDEGCSLGKRLTLAQLPQLAARAGPRKGGIALVLTAQDVGVDGFCTSRCGLHGSDARAPGTAYVWVGNSATQCPGQCAWPFHRPLYGPQTPALVPPSGDVGADGMVINIASMVAGAVTNPFRDGFYQGDKDAPLEAATACTGVYGSGAYPGFAGNLAVDPATGASYNANGANGRKYLLPALFDPATSTCSTLV

SEQ ID NO: 185840 - protein, 87 aa, Zea mays
  Clone ID: MRT4577_101072C.1.pep
GCPWVTYTWCVRSARDRRGYHGVLACRRSDRRVHRGVRTLDGDGDSCISAKELEAEVRSLGQNSTEADLHDLINEGYADVYCTIDLL

SEQ ID NO: 185841 - protein, 66 aa, Zea mays
  Clone ID: MRT4577_101073C.1.pep
GLLPDTPRSPSEPLAALVLNGGNACQPRPVDCIHDATDSCRVLDHPCRSRMMPTNGRSGQSCDAPV

SEQ ID NO: 185842 - protein, 52 aa, Zea mays
  unsure (1)..(52): unsure at all Xaa locations
  Clone ID: MRT4577_101074C.1.pep
KXIYXXXHIHELEMLYFFLSVCVPAALIFLRTPIISSLIFLELTRGQRRTRR

SEQ ID NO: 185843 - protein, 123 aa, Zea mays
  Clone ID: MRT4577_101075C.1.pep
LYHKYFFCLSSSAVQVLESQRFPFWVEREESKGWGKIPPFARNSFFFYQQPMNSSVFKGRHHSAVSAYGVASLDIGGRQQVMKNGGGRCCKKNMGTCPIPLSVRFVAETNVNSYDNLSTEMQY

SEQ ID NO: 185844 - protein, 70 aa, Zea mays
  Clone ID: MRT4577_101076C.1.pep
GTEPQFPAHTHASCLLTWTHMLHTLGLIPKSVMDGSQSPTLAYSISNIMQNVHQQDLQAMLGSSQRTSCL

SEQ ID NO: 185845 - protein, 145 aa, Zea mays
  unsure (1)..(145): unsure at all Xaa locations
  Clone ID: MRT4577_101077C.1.pep
SIRIDKPSATFCKITRSHLVLPLPSDSSKMLSMVIKSXNSTCTACIXPSPHSEAESDDWYDACPNIPCFFGVELHNWDDSLSSLXRSPLVDLISTLTTLHIIALLDLTCTTAADMIQVKTPHYMRDTFNILNDFAPADPAEHPHE

SEQ ID NO: 185846 - protein, 129 aa, Zea mays
  unsure (1)..(129): unsure at all Xaa locations
  Clone ID: MRT4577_101078C.1.pep
MKGMISVFSQAILIFCFIFSVILRIHEELVNVYPVLLLILVPRHPEDCKNISLALKKQKVNFVLRSTREVVSSITXGELRMLYRVTPIAVVGGSFLPGLAGHNFSEAAAAGCAVMTGPHVGHFYHMLVE

SEQ ID NO: 185847 - protein, 149 aa, Zea mays
  Clone ID: MRT4577_101079C.1.pep
MIHVIHIAVGDVNTGENQVNEIKDLQRQFSNRPLWMAASIHRGEEEVILRIHEELVNVYPVLLLILVPRHPEDCKNISLALKKQKVNFVLRSTREVVSSITRVYMVDTLGELRMLYRVTPIAVVGGSFLPGLAGHNFSEAAAAGCAVMT

SEQ ID NO: 185848 - protein, 77 aa, Zea mays
  Clone ID: MRT4577_10107C.1.pep
SRHNQAPPQNVDNDRFGFGINTNSVFIVNPIVTKKTSSFIISMYRHPTNLWMRLVHMPHKALLCSPNRTIINNKKKN

SEQ ID NO: 185849 - protein, 91 aa, Zea mays
  Clone ID: MRT4577_101080C.1.pep
ERRHWLAYADASLSPDSLLLSHAHRGYMGGDVVQVWPPHVKYAYAIIVCRTLVPSVFSYIFVERTGGTHQSECSQRITEVAYVRRYRSWPP

SEQ ID NO: 185850 - protein, 75 aa, Zea mays
  unsure (1)..(75): unsure at all Xaa locations
  Clone ID: MRT4577_101081C.1.pep
AKCTXGGCHGXKLYISTRSCSLSLSLASYYVVLCIYALVYWHFVIALHCLRYASVAALSSIPMLLSSSTTSTLAF

SEQ ID NO: 185851 - protein, 369 aa, Zea mays
  Clone ID: MRT4577_101082C.1.pep
MASPRGHRRASVLQKAAALLLLALSCCGCTGAGAGPAAPTPKVPAVIVFGDSTVDTGNNNAIGTILKSNFPPYGRDMAGGAQPTGRFCNGRLPPDFISEALGLPPLVPAYLDPAYGIQDFARGVCFASAGTGLDNKTAGVLSVIPLWKEVEYFKEYKRRLRRHVGVAGARRIVSDALYVVSVGTNDFLENYFLLVTGRFAELTVGEFEDFLVAQAEWFLGEIHRLGARRVTFAGLSPMGCLPLERTLNALRGGCVDEYNQVARDYNAKLLDMLRRLTAARPGLRVAYIDVYQNMLDLITNPSTLGLENVEEGCCATGKVEMSYLCNEKSPDTCDDADRYFFWDSFHPTQKVNQFFAKKTLDLCYDQLLL

SEQ ID NO: 185852 - protein, 52 aa, Zea mays
  Clone ID: MRT4577_101083C.1.pep
WPERRRLRTQLCETGLDGKIYCILSDYMVIDFTGALGNGILMRWASHGCYHL

SEQ ID NO: 185853 - protein, 71 aa, Zea mays
  unsure (1)..(71): unsure at all Xaa locations
  Clone ID: MRT4577_101084C.1.pep
MXASALHQTTSXLGXXLISRATGVDDRXRITMRRTVXIVPQSIWYDPDRPKYLEPFSEQTSSYLSGEIPDN

SEQ ID NO: 185854 - protein, 40 aa, Zea mays
  Clone ID: MRT4577_101085C.1.pep
VPTHSMLFQEPGLRRTEDIGADPRAAPSISQPFASACGCA

SEQ ID NO: 185855 - protein, 130 aa, Zea mays
  unsure (1)..(130): unsure at all Xaa locations
  Clone ID: MRT4577_101086C.1.pep
AKYPSPHGVPPEFLCRVFIFSPPPPPEDEIRKILDFPFPQENVEMSPGPKVFFPKIGGGAPFRGALNLFPFSPLTFQRGKGKVVXKEALNRGVPLFLGVKRFPPVLMGVPNPFLFYKKPGPTNGKGPPPL

SEQ ID NO: 185856 - protein, 120 aa, Zea mays
  unsure (1)..(120): unsure at all Xaa locations
  Clone ID: MRT4577_101087C.1.pep
MPSCHRPPPPPRRPRTPRRRTTTSPRPPLLLPPPPSPARTARRHAPPPPPPRGRRYPAIIQPHGPGRPSSSXPPPHSGCPXRTPPPRRRAPRPPQRTSRPAAAANGAALINGSKLTPWPR

SEQ ID NO: 185857 - protein, 91 aa, Zea mays
  Clone ID: MRT4577_101088C.1.pep
PQSRVFRCFQEGPLLLKFQGWKLVFSLKQNRALRFSLNLSFKPAPDIAKKPKKPPFDHGPFVLKKRAFFSVCKLTPLFFPKTPINQKNRAM

SEQ ID NO: 185858 - protein, 134 aa, Zea mays
  Clone ID: MRT4577_101089C.1.pep
SVSGTEEDRPLPRSLGRGREAEHPPRSLSGRGSPACLPRRISSRGSRPSASSLPLGCSRGSRQVAYHLGVLQWPATSMQRSTARSGHRRDGAGQPVAFPSWTPVSRCRCRRQISCRRSSCRRLLCALAAAASVL

SEQ ID NO: 185859 - protein, 79 aa, Zea mays
  Clone ID: MRT4577_10108C.1.pep
WLLLYLTPHWMSLKEHRRAHYDDFLKAYELARTATLTAGEAAEAHTATTLFKNTCFPKGCLLNNIKPSSLPTRVHIEGY

SEQ ID NO: 185860 - protein, 141 aa, Zea mays
  unsure (1)..(141): unsure at all Xaa locations
  Clone ID: MRT4577_101090C.1.pep
TPESRADHTLPRHPWPPKDGLSSPSNKVMGWEAIVLLNGNLVKRVFRXFGPXKFSVAGTIFGGRGLAGPWGKEFVAKFYNXNTMVNQNLPEGGFFWSKSFCVVENLVVTLPKLVFNCFNGKTLKSALPFMKKDIKLVIFFC

SEQ ID NO: 185861 - protein, 50 aa, Zea mays
  Clone ID: MRT4577_101091C.1.pep
RNLGSSVMICTAPHHTARENNSCRHVLLSFTSIGTRDFISLRPLSTMHLK

SEQ ID NO: 185862 - protein, 78 aa, Zea mays
  Clone ID: MRT4577_101092C.1.pep
RPSSSLAIQSAVVSFFILLSAAAMLRRRLHDGRRAGTSQLAFTVLRRRPLERASERSTRRIVDFVARICRALSVTRSQ

SEQ ID NO: 185863 - protein, 107 aa, Zea mays
  Clone ID: MRT4577_101093C.1.pep
RPRRRRFPKVPWDPAGWGANLGGKNACFLGAVANNKLNGFRKRFFFLFLNGLGNVKGSGGCSLVSAGFNNLCPFFNSFLFGFNGVFPQKPPSSCSFFSNPFFYIRFR

SEQ ID NO: 185864 - protein, 42 aa, Zea mays
  Clone ID: MRT4577_101094C.1.pep
HLWKSVSISMPDRGVLVLLPEQVQIEAIKGSVHCSLSEGQPQ

SEQ ID NO: 185865 - protein, 148 aa, Zea mays
  Clone ID: MRT4577_101095C.1.pep
HGVARGYGNPEGSNRPSQKDPSFFFSFSPILDPKVGRAALVSFSSGEAVTQTPAAARMHETSPRSAESEPKSLPPGETGSRLRRRGGGGDQHLPWIVRFPEWSALRSAAGFVVAWGRGGLKTGQSRRRSRRLLGARRLWSVRLVGVRA

SEQ ID NO: 185866 - protein, 67 aa, Zea mays
  Clone ID: MRT4577_101096C.1.pep
AGNNNGLAGNNQGATPASLRVSLASQPLHILTQMVHFHRQKRTTNTRWGTTFPNTGGDQPNPGPNQP

SEQ ID NO: 185867 - protein, 99 aa, Zea mays
  unsure (1)..(99): unsure at all Xaa locations
  Clone ID: MRT4577_101097C.1.pep
AAVGGTLAPPHPHEWVIDLDARGRNKKTKRTXPKSDQVYLKRLGKFYRFLLRRTKSXFGARILKRLGLRNTNRPPMCVRPLAKLLDXKXAMNIAVIVGS

SEQ ID NO: 185868 - protein, 56 aa, Zea mays
  Clone ID: MRT4577_101098C.1.pep
WRLRLRLLLQDPRVSYSCPILSFHYVGLSIFATSVLVSYCFALCSTANGIYLIIHK

SEQ ID NO: 185869 - protein, 80 aa, Zea mays
  Clone ID: MRT4577_101099C.1.pep
MAAEAKTPSLAEEYSLPPQEVPVEKAAEEKPSSGTETESAPSTNDETPSSVEDKNETSEVQDAAEKSDAEETKTLFFFFF

SEQ ID NO: 185870 - protein, 58 aa, Zea mays
  Clone ID: MRT4577_10109C.1.pep
HGNVRILYVYFNIDLNKAIGQLWHGPWMAVDKLLEPIKTTDIQEITYYTWRRKKKTLH

SEQ ID NO: 185871 - protein, 62 aa, Zea mays
  Clone ID: MRT4577_1010C.1.pep
FPIALVFGKQFPPHRLFESRLVIQCRAPGFFLIPFARYSFFFRPILEAPIRNCLCLCKKALN

SEQ ID NO: 185872 - protein, 137 aa, Zea mays
  Clone ID: MRT4577_101100C.1.pep
GDFDAGLGIFKDSLKRRKVPDFRTMKGLVEGLAKGGRVADAKEVVAEVKKMFPRDLLSGWKKVEKELGLDSDSGETPLLEVTSGETVAEVRPDAAEVEALELEGSAAEEVTVSEESSDDEAYVPEASSSEEVPQGRA

SEQ ID NO: 185873 - protein, 43 aa, Zea mays
  Clone ID: MRT4577_101101C.1.pep
RACLLFPLLFFGRQGLIVCIRTHVSYTMCQQVNRKRRNLDKSN

SEQ ID NO: 185874 - protein, 270 aa, Zea mays
  unsure (1)..(270): unsure at all Xaa locations
  Clone ID: MRT4577_101102C.1.pep
MPEAPVVTMRDTAAAAAPATHRDLLEYIERVTAGAAQVQRRVLSEILAQNAPAEYLRRLGVSGAAPGAVEAFRRAAPLVTYEDILPDVLRIANGDTSPILSGKPIREFLTSSGTSGGERKLMPAIADEMDRRSLLYSLLMPVMSQAVPGLDRGRCMYLYFVKAESRTPGGHPARPVLTSFYRSRHFLERPHDPYTVHTSPDEAVLCVDAYQSMYAQLLCGLVHRADVLRVGAVFASGFLRAIRFLEKHWQRLCRDLRRGALGXEVTRRSV

SEQ ID NO: 185875 - protein, 357 aa, Zea mays
  unsure (1)..(357): unsure at all Xaa locations
  Clone ID: MRT4577_101103C.1.pep
MQSKHRVFAEDLLLAAAAEGEDHFDRVPDSLVLLIFNKLADARSLGRCSAVSRRFSALVPLVDDACLRIDRVIPADAADAGAPRPRAALSHLLKSVLLAVLKPFAHCDAKSASPQKHAQQQQQHHSPAQVLRNFSSIRSLRMELPVSDVGTDDGVVLRWKAVFGSTLQSCVILGGTRVDRXTAARPLXGSAPPAGDDDGGSIPESLYTNGGLKLRVVWTISSLIAAATRHYLLREIVKEHPTLERVALTDAGGQGTLSMGRDQLREFRDRPLAAAPAAAANRTQVPACNMKLRYAPLLELSDGTRIHGATLVVIKPVGDAGGKDLDELGAGAFDGPLREAVAALGKRRAYLLEMNGF

SEQ ID NO: 185876 - protein, 66 aa, Zea mays
  Clone ID: MRT4577_101104C.1.pep
EYINCIQGPAVNKGASDTIHLLHKYVRYQHMRCFTVGVIGKRSGHMALSNSCSIRMENVTRPCSLY

SEQ ID NO: 185877 - protein, 248 aa, Zea mays
  unsure (1)..(248): unsure at all Xaa locations
  Clone ID: MRT4577_101105C.1.pep
MDFNKRSVSVSSVVAFISASAAPSLATTILFLPHLLSSLPHLRAVSCGNDPIHRQDRMQSKHRVFAEDLLLAAEGEDHFDRVPDSLVLLIFNKVADARSLGRCSAVSRRFNALVPLVDDACLRIDRVIPAGDGDGDALLGLAGAPRPRAVLSHLLKAVLLAVLKPFXLRRQVRGGGAQARAGAXQQQHHSPAQVLKNFSSIRNLRMELPVSDVGTDDGVVLRWKAVFGSTLQSCVILGGTKVDPGAAG

SEQ ID NO: 185878 - protein, 88 aa, Zea mays
  Clone ID: MRT4577_101106C.1.pep
PPVKKIVLLGPKNPPKPGPVVPVPPLVGSRALPWAKGNFNYPAQALIIFPPCIAGFFITADKPFLGNARQNPIGKLSKSPLSKNVPEP

SEQ ID NO: 185879 - protein, 82 aa, Zea mays
  Clone ID: MRT4577_101108C.1.pep
GPQKKKVFFWNPRGKKRKIGPKGKPKNFFITQPKSPKFSALNLKYTFWSQIKKRPKKSIRDKPLAPKRGARGGKPPPSYAQG

SEQ ID NO: 185880 - protein, 307 aa, Zea mays
  Clone ID: MRT4577_101109C.1.pep
MKHDDTQFGSALLDDEPQNDIYRNFTDIIKNPGPKTTFEVGMLAGDSWKKVKSDKGKDHSNANDITNKSKIPVPSIVDPQPKQQDHNSDSDSEEEMVEGNLTIPDRKESYELPSQADLIRQAFAGDDVEAEFEKDKMDVLNEENPEPEKPALVPGWGQWTDIQQKKGLPSWMIKEHEVAKRNREEALKRRKDSKLKHVIISEHVDKKTEKYLVRKLPFPYTSKDVYEQSIRMPIGPDFNPAISVSALNRPAIVKKPGVIIKPIQYEEVNPHEKLDEPKRVIQRATPNRNAKKAFAKQGKSVTSQKRK

SEQ ID NO: 185881 - protein, 125 aa, Zea mays
  unsure (1)..(125): unsure at all Xaa locations
  Clone ID: MRT4577_10110C.1.pep
MLALIIHDNGDHEGRRYLTCANLNKEEEARTXVNTYGNSYTTNSAYTACVAPNMQXLVTXLTLHHEACYNILHKKRITKKNLRAAEYHKIFAHRLKEQTDRQSESSVNRRSKLSAGEKVSAGTCA

SEQ ID NO: 185882 - protein, 56 aa, Zea mays
  Clone ID: MRT4577_101110C.1.pep
PGPVCTVYSSLSLGRAAFIWLEAADQRSLAPVRVNHPCTSQVPRLDIQRADFCSSR

SEQ ID NO: 185883 - protein, 88 aa, Zea mays
  unsure (1)..(88): unsure at all Xaa locations
  Clone ID: MRT4577_101111C.1.pep
GRITPIYTAPCSSGLCLLRPIARLKPKCPIPPLPVLLPAPFPGRSASLFLMRSGTAASPISSSSHPSVSXLVSXSLSSWFSEEHGPHL

SEQ ID NO: 185884 - protein, 225 aa, Zea mays
  unsure (1)..(225): unsure at all Xaa locations
  Clone ID: MRT4577_101112C.1.pep
MEFDERCLKVQEPKFDCLLFDLDDTLYPLSSGISSHVKTNIEAYMIEKLGIDESKIENLGNLLYKNYGTTMAGLRAIGYNFDYDEYHSFVHGRLPYDNIKPDPVLKQILKNMRIRKLIFTNGDMIHAVRALKRLGLEDCFEGIICFETLNPPCLLTPCDQAPEIFDIAGHFAGLGSADDLPRTPVLCKPNGGAMEAALRIANVNPYRGXFFDDTLRNIQAGQRIG

SEQ ID NO: 185885 - protein, 113 aa, Zea mays
  Clone ID: MRT4577_101113C.1.pep
AARPVGLSVVLVLFYVSQVSSTLLVSGGRARCPEGSFARLLVVAWYLVVWRWFSNQWILVPLYLTNFSLELLCVSWAMCILLLVNKVASLHQMLTMLYSLCGNVCSSRGGFIF

SEQ ID NO: 185886 - protein, 330 aa, Zea mays
  Clone ID: MRT4577_101114C.1.pep
MLLAIHVSSVVRLGTTSRGTIKLSTPDGDRFEVTVAPPPFTQHAIYLVNSKFVGDHIRVVREFPDVFPKELPGMPLDREVEFVIDLLHGTAPISKRPYRMSVDELKELKKQLKELQESGYIRPSSSPWGAPVLFVHNKDGSQRMCVDYKLLVEDLFDQMRGARVFSKIDLRSGYHQMKIGPSDIPKTAFSTRYGLYEFTVMLFGLTNAPAYFMNLMNKVFMEYLDKFVVVFIDDILIYSKNDGEHEEHLRMVLHKLRDNQLYAKFSKCEFWLGEVSFLGHIISNGGISVDPAKRFIEGFSKIAKLMTLLLEKGKEYLETLYNGDQVSNLY

SEQ ID NO: 185887 - protein, 49 aa, Zea mays
  Clone ID: MRT4577_101115C.1.pep
VIVTSMIYAVGHISVAHMNPAITLGFAACPHSPWIQLPFYCAALRNVTM

SEQ ID NO: 185888 - protein, 118 aa, Zea mays
  Clone ID: MRT4577_101116C.1.pep
GGVLAFFPPRCRHRRPRKKKSHLPTRFPLKMGPPIFPVKPLKFFFSPPKKKGFWGFWAPNFVFGSTAPFFPNFFKFETPKCPNPFYIFARDQNLSIPVKIFFPLTRTGFPCFPPVLKQ

SEQ ID NO: 185889 - protein, 209 aa, Zea mays
  Clone ID: MRT4577_101117C.1.pep
LGKHRKLVPTALERTFWGFGDGSTLPVFDTPLGKIGALLCWENKMPLARTAMYAKGIQIYCAPTADASPTWVASMTHIALEGGCFVVSANQFCRRKDYPPPPEYTFGGLDEEPSPETVVCPGGSVIVSPSGTVLAGPNFEGEGLVTADLDLGEIVRAKFDFDVVGHYSRREVLSLVVKTDPKSAVSFTASADGERPASAGKKRDDSVYK

SEQ ID NO: 185890 - protein, 97 aa, Zea mays
  Clone ID: MRT4577_101118C.1.pep
KGLNSKLLDIRSYLEKVATGKLPINHQIIYQLQDVVNLLPDVSLQEFVKAFYLKTNDQMVVVYLASLIRSVVALHNLINNKIANRDAEKKERQEKEE

SEQ ID NO: 185891 - protein, 134 aa, Zea mays
  Clone ID: MRT4577_101119C.1.pep
PGKKKGARFPSLAAKRCSTTSPKLTLLGATASSAWGPGKFKGTPLTPGPPPGPPLSRNPLKSRPNYLVRTPAWESGPGLFGRPTKTPGALDTPCPPPFNGNRICKTQFTTKGSKFPKGGRAKIKWGENPLTALF

SEQ ID NO: 185892 - protein, 81 aa, Zea mays
  Clone ID: MRT4577_10111C.1.pep
GRPRPRPRRRRRTSPPLGPARWDGGGRALLLSFYPAVWRTLRPCAFAGFSSIIRHHHISSWITSSTAFTVIQLTLLFFPVL

SEQ ID NO: 185893 - protein, 71 aa, Zea mays
  unsure (1)..(71): unsure at all Xaa locations
  Clone ID: MRT4577_101120C.1.pep
MEEVEEANREAVESCRRVLALLSHPHDPAQVRSIALGTDEACTKFRKVVSLLSNGXGNRRSRTVRRKRKPS

SEQ ID NO: 185894 - protein, 50 aa, Zea mays
  Clone ID: MRT4577_101121C.1.pep
MQCLSRALRDENPKFLMAASTLLLPFQPLMVSAVHTGIMEVSFAKRASID

SEQ ID NO: 185895 - protein, 139 aa, Zea mays
  Clone ID: MRT4577_101122C.1.pep
MMDDYVSESDSDYTSYWRDWFISSRGNEYFCEIDEDYLTDRFNLTGLNTEVQYYQYALDLVTDVFDLECDDEMREAIEKSARHLYGLVHARYIVTTRGLSKMLDKYKKAEFGKCPRVMCHSHPLLPMGLSDVPHLKPVK

SEQ ID NO: 185896 - protein, 48 aa, Zea mays
  Clone ID: MRT4577_101124C.1.pep
PALVTMRNLASNAEGSQECIHSWESLENSICDPREGMRPEPADVRASF

SEQ ID NO: 185897 - protein, 50 aa, Zea mays
  Clone ID: MRT4577_101125C.1.pep
NMITTKLRQNIENMALAHSTGICIGQHNFVKEETFGYTLGSYNNTILVFG

SEQ ID NO: 185898 - protein, 64 aa, Zea mays
  Clone ID: MRT4577_101126C.1.pep
EIWVKGNQNYLLFFQVLYKSECSFHSDARMVKFMIGLEQGHSIRLTSILYDREINFYYIVSTLI

SEQ ID NO: 185899 - protein, 42 aa, Zea mays
  Clone ID: MRT4577_101128C.1.pep
PQHCTRALNLPLMACLQACSRKTNSVFRQCGYLLLKCLQQTT

SEQ ID NO: 185900 - protein, 102 aa, Zea mays
  Clone ID: MRT4577_101129C.1.pep
FVWFYLFWGWIKRFFCRVEAPTAREMRVLRRPHNTPLRATANYYYTTPPILFRRPTPTNQKEPEGTSPWRTYRPWRRPPGWRGVQPGGSWRGPGRDPTRACE

SEQ ID NO: 185901 - protein, 230 aa, Zea mays
  unsure (1)..(230): unsure at all Xaa locations
  Clone ID: MRT4577_10112C.1.pep
MKTTTTAMRSLSVAVLLLVAAAASASAAKDRCHSGDKAALLAIKAALGNPYHFASWTPDNPCCDWYDVDCDATTGRVVGLAVFQDANLTGTIPDAVSGLVHLQNLMLHHLPGISGPIPPAIGRLSNLSFLTISWTGVSGPVPSFLGALTRLNQLDLSFNALTGAVPASLAALPSLYSIDISRNRLTGSLPXCSSAGSIRXQEAYLRLSHNNLTGSVPPEFSAGAFAQVDL

SEQ ID NO: 185902 - protein, 37 aa, Zea mays
  Clone ID: MRT4577_101130C.1.pep
HSYAEAGRHRLRTYTAAVPTPFLLDTRYLSATGLKRG

SEQ ID NO: 185903 - protein, 96 aa, Zea mays
  Clone ID: MRT4577_101131C.1.pep
SQTQCQYERVQASSYYAAYAAVSRQDYALLATGSVGVELVSHGDKYGLLGMQVVRPSRQRAGPFRETGCPHPLNKVLPVHSVGQEGGVFPPPCKRA

SEQ ID NO: 185904 - protein, 212 aa, Zea mays
  Clone ID: MRT4577_101132C.1.pep
LLFFSSEKETITMSTPDVLKDPKEPCSSIDSVIEDYQSSGIPDKQSNRWFSYVSSIYLTLLSLPLIAFPKFLVMLLGPWLANKDQSPTESGIIGAYKPLNELETYLARLVGLSFLTLASLIVLQTGAIPVSSSMAHGADARAVAAPYRQPTIFFSTLFFSLFGFSSWNIGLKLIGAPGLVISAGGLWILLFAGDPIAHGKKSHAIFGDSKSA

SEQ ID NO: 185905 - protein, 64 aa, Zea mays
  Clone ID: MRT4577_101133C.1.pep
STIRALKYHKIKFLDDTQFSPQHNSARSMSVLITYLARPRQQKCRFIRARLCFLILDASARALL

SEQ ID NO: 185906 - protein, 370 aa, Zea mays
  Clone ID: MRT4577_101134C.1.pep
ECSSETPRPHFKEPVVDSSGLTSAAPESLTAKQHVHSPDAFIPPKPGAPTGELGDVKSDFKGEEIIQKEQYCESEPIVATRENLLIDLSCGAESIDVSDVLESLMEERSGTSYVPVSIEDFLGASAVEEPQYSSPIALSPWGEPSYYQGDAGDSALWGIQDSINDMWSLLSPRPMLQPSSGIGTEGKETFDINEVAVTHVNSDFFQRGSMLGEENMNQANLSVAADRMLLPEQVPSIPNGMSTSSVDEGTRVIGSQASINQSLDWGTTWRTSQNLSVYSNEIAGPSSKSYWEESRKQEATNSGVSISGEAIRNKRLNPPDNAIRGSHHHRGRYSQISESWLLSSNHSRSSSARFGSGGSSRSTSKGQTRG

SEQ ID NO: 185907 - protein, 92 aa, Zea mays
  Clone ID: MRT4577_101135C.1.pep
LNIIESKVIISSMSTNNLIGSVGSYVQEQHVPLLHEMLRQIGGLLRNANGEQELEVQILHSRESAAAGQGCTPPDPGAVIMPSSGFATGHKK

SEQ ID NO: 185908 - protein, 170 aa, Zea mays
  unsure (1)..(170): unsure at all Xaa locations
  Clone ID: MRT4577_101136C.1.pep
PPRQLFNPPQARPRRPAPTPRNRPPPKPSAPAPPTEDEDAGRGDGGEAXPPHXAAAXGDRARDRAAXPTSXRPATQTXNGXHRRGSQGHPPAKGRGXGKHXASDTXTAGGHQXATXAHPDGKNPEDNXGDGPXXXAPAPDGTDXXAXXEXTXXDQRGXGKHKGHPHADRP

SEQ ID NO: 185909 - protein, 54 aa, Zea mays
  Clone ID: MRT4577_101137C.1.pep
CASAILIKVLDKLRKSRNSRRLRSSCDYRARFSYSELFRYSGQLAELMYQVEFW

SEQ ID NO: 185910 - protein, 211 aa, Zea mays
  Clone ID: MRT4577_101138C.1.pep
HASVTHSEKRLKEEKLNLEDERKVLLEEKNKLDLNMQAIISREEAIIQKESILDKRESELLILQETIASKERAEIERLRQEEEIALVRRRQEFAPAMEIKLTSFEEEIDARKALLDQRETTINEKEDAVAQREQNLNLRFAELANKEESLVKKSDELREEEKRLSSERETLHIDLQKEKEEIQNMKLDLEKEKSFFEEEKREAIQAQENLA

SEQ ID NO: 185911 - protein, 63 aa, Zea mays
  Clone ID: MRT4577_101139C.1.pep
MLPLSLLKTAQGHPMLVELKNGETYNGHLVNCDTWMNIHLREVICTSKVKNLVPLIHIVKGSS

SEQ ID NO: 185912 - protein, 72 aa, Zea mays
  Clone ID: MRT4577_10113C.1.pep
WIHLVLVFCLIIIQTLLAVLCTQTAMELDEEEKAITIHSVHKCWSRLEESNIFNFDYIYIKLFIFILHNKYH

SEQ ID NO: 185913 - protein, 105 aa, Zea mays
  unsure (1)..(105): unsure at all Xaa locations
  Clone ID: MRT4577_101140C.1.pep
ARXRPVKLFLHARPGTPARCWADHQQLPGLRRARQQVIHVGAASATLSLESCSLDRASRRRSAQFLFGNRFSLRRTSIRHDAKLLQHCPNLLSLFCRLVSTSVPT

SEQ ID NO: 185914 - protein, 153 aa, Zea mays
  Clone ID: MRT4577_101141C.1.pep
MNASTWGWIQRVSLTRAEKQHDIVEHGPSASQQGNFGRAGRKHQRDRAPWELRAAPNRRSREKTELEDGGDMDEMGRAELGNHGELGEFRRAGRSTGGAGRGSAQGRKRSKRRAGSRAMGLRLGQEMAVRAPRPEVEDDPATGAHKKKQRPSG

SEQ ID NO: 185915 - protein, 164 aa, Zea mays
  Clone ID: MRT4577_101142C.1.pep
NSARGFLDGVRYPLHAAYIIYIPTPRRPGDYSIHQAGGRMTNSEGASHHYHRDPAAGKPMLRRRCTFGDGSCSFVDWVSIEMLVTSLGSVGGRNGLDSSLAWNSTTDLHSTAQRCVIAGKACPIKCCLVWSFCPGQYQLTTRIYCVALCLVGPLRDESLQNEFP

SEQ ID NO: 185916 - protein, 134 aa, Zea mays
  Clone ID: MRT4577_101143C.1.pep
LGGKDDEGGVAVAPHGSPPTRPATRPASRSAGWRRWRLSDLLLFRSSSDGGRVNSSTCPSRGRAQQPPAVTIKASATKREDMGKGWKHGDGDAAAAADSVAGCARLSPLQRLAKGLGAYSWHNHRGMAAPATKG

SEQ ID NO: 185917 - protein, 99 aa, Zea mays
  Clone ID: MRT4577_101144C.1.pep
RCGSCCWLLGQARSCGSSDPLSWRRLMPPRSAPHHHRPAPTRSCPARSSPPRPRISVEVAPACYCSIRCNGCTCNVLMTLFDHFGDIYYSINHGALFEE

SEQ ID NO: 185918 - protein, 107 aa, Zea mays
  Clone ID: MRT4577_101145C.1.pep
LAGDAEQPRNSKKSNWSRKSATKEDGGDDGVKTPHDAPHHSVASRACVLLKGSRRTSWWWRGSAGGVVAAPPPCRNTRSCPAAVKRSKSTLRSKMASLGGALETEDA

SEQ ID NO: 185919 - protein, 49 aa, Zea mays
  Clone ID: MRT4577_101146C.1.pep
SPNTAPIQICNKEGCVSRHLVQGKGLDRQTSCKGLSTDQGCPHSDFARI

SEQ ID NO: 185920 - protein, 259 aa, Zea mays
  Clone ID: MRT4577_101147C.1.pep
RLVMVVVGPCVLPRSSHLPSGPLFFFSFGVHRVLLLPFVCSGDRPPRRPALPLSLRVLSPQHQSDAPSIHMLWWSSTPASSAALASSGFVSPTSVAASTHVRGCRIYDSDTPYTNLLFCVHRRIKMRGRGSSSAFSSLLLADSLSPKLPAMAAISHGSCAQPSSLSDGRPRLKFPRRCPCSPAHLSPAGARALRSPVLPYHVPSPLPCQAPNHGATAPSRELAELCPLPWRPTRCFATPVLSHGGAPILCSLFPDLARP

SEQ ID NO: 185921 - protein, 126 aa, Zea mays
  Clone ID: MRT4577_101148C.1.pep
AASGRWKPSGKEKPVVLPRPCGGGSLLVGVKRAMTFVPRRRKKTAALPSSAALKTGWVMHEYRLAAPLHKNGCSLAQAQGEWVVCRVFQKGGNRPRRRQREASPPPSASSSCVTDASSSDLDEVSS

SEQ ID NO: 185922 - protein, 110 aa, Zea mays
  Clone ID: MRT4577_101149C.1.pep
PTCPWAWLRGAPAQSRDGLVYSWCRSIKLPPSFSFFPFPSPVGFCCFVLVGAGGGRVPPGAGGFVCWPPVKPPDFASPPSGPGFRLGFSWSRSAETPFWVVLFFVFRLVW

SEQ ID NO: 185923 - protein, 308 aa, Zea mays
  Clone ID: MRT4577_10114C.1.pep
MASTASPPVFERVAGIRAIAESGRFKAWLLDQFGVLHDGKKPYPGAILALEKLAENGAKMVIISNSSRRSSVTMKKLKSLGFDTSCFLATITSGELTHQHLQKRDDPWFAALGRKCIHITWDDRGAISLEGLGLQVVNNVDDAEFILAHGTEALGSPSGVPLPKSLEELEQVLMLGIEKRLPMVVANPDYVTVEARDLRVMPGTLAAKYESLGGEVKWMGKPDKVIYTSAMSLAGVDARECIMVGDSLHHDIKGANASGMASAFVTGGVHADELGLGEFGETAGEDAVSSLCSKHGSYPSYVLPSFAW

SEQ ID NO: 185924 - protein, 78 aa, Zea mays
  Clone ID: MRT4577_101150C.1.pep
RTRNLFLFKLGTPNVKQKMYEPSRGSKWKNVILLLQTSKNQNSSDFPAEIPFSKKKKKKKKKKKNQHKKKKKKKKKKK

SEQ ID NO: 185925 - protein, 34 aa, Zea mays
  Clone ID: MRT4577_101151C.1.pep
KKKKKKKKKKKKKKKKKKKKKKKKKKKKKKKKNK

SEQ ID NO: 185926 - protein, 104 aa, Zea mays
  unsure (1)..(104): unsure at all Xaa locations
  Clone ID: MRT4577_101152C.1.pep
MVDKNDGSEGIKFNTSNLIQTTEEVARAFIAAASAATAQSARTSVVYSSKDESGSPMXKLQQHFSKIMKGFSAAPXTFQELTXPEVLTTQKREGSRYXMKSLGD

SEQ ID NO: 185927 - protein, 85 aa, Zea mays
  Clone ID: MRT4577_101153C.1.pep
MDGLPDADTAPVAAAPAQKRDEWSESGILRLLDAYEAKWLLRNRAKLKWSDWVDIAREVSVHFADERRGRRGSPRPRRRQQRQDP

SEQ ID NO: 185928 - protein, 71 aa, Zea mays
  unsure (1)..(71): unsure at all Xaa locations
  Clone ID: MRT4577_101154C.1.pep
GVLSMANAGPNNQXGSNFFICTVPTRGFDGKHVFFGQVVKAMDVVKAIKKVATRNGSTSKVVKVADCGQLS

SEQ ID NO: 185929 - protein, 90 aa, Zea mays
  Clone ID: MRT4577_101155C.1.pep
AFFPIESYCRAGAWPTRVYLTSHFCYLWLAPRFYFRLGGPGHIMWFWSICWFCGASKNFFFGSLRTQKKPLGPTGPEIYRGTVVNNYVQR

SEQ ID NO: 185930 - protein, 98 aa, Zea mays
  Clone ID: MRT4577_101156C.1.pep
ALVEKENPFFGEGNGKGWMVETNNEAPPKWGPWKKGYYPAKVPKVLTQVGGLKFLFMGPRPGVPNTGSPPGFGKGPGVPGSGVTPFGIGGKGRLEVGP

SEQ ID NO: 185931 - protein, 56 aa, Zea mays
  Clone ID: MRT4577_101157C.1.pep
NPKKLDFCLKEQDDKFFPVCFLNPKRNTGGVFTPEVLIPIGYEFFYYMPSFFFKKL

SEQ ID NO: 185932 - protein, 146 aa, Zea mays
  Clone ID: MRT4577_101158C.1.pep
MAVPLKLKKRGMPALGWWLMAVGTLRSAFTWSCFFGSASLCSATYSEIQVTGVHGRTVAVWTLLSCTLCFLCAFNLSSKPLYAATFLSIVYAIGHLSVECVVYHTISAASLAPFTFITVTTMVWMLLQWNSDGHNTRSGRSTSKQP

SEQ ID NO: 185933 - protein, 126 aa, Zea mays
  Clone ID: MRT4577_101159C.1.pep
PLLPWRPPLLGLGYSCSTPTTPSPSRSSSRHPFFFFPGLHGSKLGALSFSHGAAAISPWHTSSPSSSQRLPPYSLLASSSSMAAQLLPPWRPDFFSAESFFPMELLPCRSPAASPWLALPVLLSAR

SEQ ID NO: 185934 - protein, 55 aa, Zea mays
  Clone ID: MRT4577_10115C.1.pep
VAVRRGGLFPGLSRSLGRPRGKSPGWHVIHPAVAPVTVGIKNPSQLPQALREDGC

SEQ ID NO: 185935 - protein, 146 aa, Zea mays
  Clone ID: MRT4577_101160C.1.pep
MSGPSKKRGMPALGCWLMAVGTFRLAFTWSCFFGSGSLCSATFSEIQVIGVHGRTAAVWTLLSCTLCFLCAFNLTSKPLYAATFLSFVYAFGYLSTECMVYHTMSAASLVPFTFIAVTSMVWMLLQWNSNGHGPRLLHGSTASKQP

SEQ ID NO: 185936 - protein, 219 aa, Zea mays
  Clone ID: MRT4577_101161C.1.pep
MSDKKDVEAGTSPPAAPRVAAAAPKPSTYVPMFALRGEECANLLALVSAVSRPLEDAVVDFLARVPPERRFRFGSAISFVLEDKMMLQPAERLVAFAILHQGYSSQSANPFLPLLINVACDETSEAADQAFLQLLLSSSNGDNSEVLKQSAVDYLNGSDYASQVLLPREHLEKQCSYDAARPLPFSSNFRDATVRSVIPDPYVFQSFGSSSGGVLNNTK

SEQ ID NO: 185937 - protein, 114 aa, Zea mays
  unsure (1)..(114): unsure at all Xaa locations
  Clone ID: MRT4577_101163C.1.pep
RFRVRGRVELACPPPPSRARIQEALRSHGSVDERIEMATADVEYRXLVGGLAWATTDHFLNNAXRTYGVILECMTMLPRETHRSRGSCFLTFSTKEAMLNAXIMSLNGKEMDGR

SEQ ID NO: 185938 - protein, 86 aa, Zea mays
  Clone ID: MRT4577_101164C.1.pep
WARAAGQKPTRDLLLNRNSGDRSPTQGMSTSWSPPGSSTTGGLRSLVQVTRIWEIDRQDRLKSRKQVHPSGLLSNTRCTSRDISSK

SEQ ID NO: 185939 - protein, 110 aa, Zea mays
  Clone ID: MRT4577_101165C.1.pep
MTEEEAKKVEVEVEVTKAAPAKENAAEEKAVIPATEPPAAQEKPPAPADDSKALAIVESEYNLLCLILPLCSGRLAMERWCWRTGFCSKNSEKLSSSLLYALVRRLCTSW

SEQ ID NO: 185940 - protein, 77 aa, Zea mays
  Clone ID: MRT4577_101167C.1.pep
ATVVVTKVGVWGGEGGSTHDIATTEPSRRLQRLTVRAGFNADCMEYNYSAYTCCQTRKDQLIKQTYRQQAEASSRQR

SEQ ID NO: 185941 - protein, 83 aa, Zea mays
  Clone ID: MRT4577_101169C.1.pep
QEHPALLSPDHGTSTHLDNYPDNIHASTGLILLKVHVHEGRWRTDNHLTEWYLHGKPPKAGPGQDLLLHRTCDLVSRKSSRTN

SEQ ID NO: 185942 - protein, 234 aa, Zea mays
  unsure (1)..(234): unsure at all Xaa locations
  Clone ID: MRT4577_10116C.1.pep
MASTASPPVFERVAGTRAIAESGRFKAWLLDQFGVLHDGKKPYPGAILALEKLAENGAKMVIISNSSRRSSVTMKKLKSLGFDTSCFLATITSGELTHQHLQKRDDPWFAALGRKCIHITWDDRGAISLEVYFLLFLLSIRMDFFLISFSFSHTXGLGLQVVNNVDDAEFILAHGTEALGSPSGVPLPKSLEELEQVLMLGREKRLXMVVANPDYVTVEARDLRVMPGTLAANM

SEQ ID NO: 185943 - protein, 45 aa, Zea mays
  Clone ID: MRT4577_101171C.1.pep
KFFFFFKLFFPKKKKIKKKKKKKKNKKKKKKKKNPKKKKKKKKKK

SEQ ID NO: 185944 - protein, 121 aa, Zea mays
  Clone ID: MRT4577_101172C.1.pep
QQFFPFNQLGALNFAAYLPHQLPFSQVVVASPPQFFPFNQLGALNFAVFFQQQQLPPFSQLVFLSPVPFFTQHQLFPFYLPAGPNAGPLFQLQQFLPFNPLFFSNPPGFFPQPPLGGALSF

SEQ ID NO: 185945 - protein, 109 aa, Zea mays
  Clone ID: MRT4577_101173C.1.pep
GYLQQQQLLSFIQLATAYSERQQSLPFNQLAALNPSAYFQQHILLPFGQLATTSPTSFLKQQQLLPFYQQLAANPASLLQLLHLLPFVQLALTNPLTFYQQHIIGHAIS

SEQ ID NO: 185946 - protein, 172 aa, Zea mays
  unsure (1)..(172): unsure at all Xaa locations
  Clone ID: MRT4577_101174C.1.pep
MAELLRASSSLRSRLLSFSXGLSVYAASPPLLTMASSDAPHQTETLAVDKTQLNADRPATATALLYCTGLLGSGRNWRSLSDALVYELQRLMALVXLXNHAKPGETNVLGPPHNIATVHKDIHDLVQARGXAHDRMMVGXSMGQQAALDCVESCSRGVHGDTANLPKQITAT

SEQ ID NO: 185947 - protein, 95 aa, Zea mays
  Clone ID: MRT4577_101175C.1.pep
KTKNFFSGHELIGVIPTGTEGVPLPKPRTKTLPNPSTPNIHKAPRQAPTGVDSRPRAVQLALGRKLSLPSGTFPGQGVMSSLTLGSRPTKPWPPG

SEQ ID NO: 185948 - protein, 164 aa, Zea mays
  unsure (1)..(164): unsure at all Xaa locations
  Clone ID: MRT4577_101176C.1.pep
PRKTCTYEGGVASNSIYSAKGKIRDDEGISPEPERVICAWKPLEEESTDLRIQRCKESTLHLAIRVRGGTENTCTKTYTAALMVIPNHHKERFAVLEPNKEDCADIKATLLRXECHLIESXAGMCMDNHMNRHYWGKSCLTDVNEHRWYCLPRFAISDYPIEHP

SEQ ID NO: 185949 - protein, 80 aa, Zea mays
  Clone ID: MRT4577_101177C.1.pep
GFMFLLLRSLLCSLWRTDALRSSPLMLLHAVISLPSSPYVLTNIAPLAICMLYSDCSSATIMNMGSVFVPKKKKKKGRAP

SEQ ID NO: 185950 - protein, 136 aa, Zea mays
  Clone ID: MRT4577_101178C.1.pep
PKKKKKKKKKKKKKKKKKKKKKKKKFKKKKKKKKKKVFPLGRAPPRGDFWGFPSPWGPFGLAFGGPISPFGGGFYISLAVVLHRRAWETPGVPHFIPFGAHPLFPSWGITKGARPVRLSQHLPPLIGNWPPPLGAL

SEQ ID NO: 185951 - protein, 312 aa, Zea mays
  unsure (1)..(312): unsure at all Xaa locations
  Clone ID: MRT4577_101179C.1.pep
MKMAGSVVLLISLLSAIAPLPSEALNVRGHLLKSKTFRSPPILLGPGSVSNKYHHDVDFPRGHLAVKSFDAEVVDENGVPVPLHETYLHHWVAEPYYALKNSQSPDTQNLPKGMLKRNDGVCKTTLGQYFGLGSETRHTATWVPDPYGIEIGNEDKAPEGYEEKWLLNIHAIDTRGVVDKPSCTECKCDFYNVTIDEYGRTISKNYTGGLFCCYDQTQCRVKAGFNGEVRKLFLQYTVTWLDWTDAVVPVKIYIFDVTDTAMLDGTPEHSCKVEYQVEERSAENRANNECIHTKTARAXLPRGGDIVVSVAH

SEQ ID NO: 185952 - protein, 143 aa, Zea mays
  Clone ID: MRT4577_10117C.1.pep
LSLRLRCCGASGCFLLLHVFQCSIWSAALLVSVRVLLSHRLTALPWFPLVYGHLHGWPVPCWCPGSSRFPWGPRLCSPAAYGHGAVSGCSPFVNCRLLVLLSFRGVPRVSLGVCFSPACRWGNWGSSPYKAPPLEGVFVRFVR

SEQ ID NO: 185953 - protein, 87 aa, Zea mays
  unsure (1)..(87): unsure at all Xaa locations
  Clone ID: MRT4577_101180C.1.pep
KGQPRYKIGALLGAEHAAPFVKRMGGSKIVRNIKAHGLAPXIGENLVFLINKSRARXARHLNRIVKDTSSNTVTVIPVQSRIHRIAR

SEQ ID NO: 185954 - protein, 30 aa, Zea mays
  Clone ID: MRT4577_101181C.1.pep
PDLLLPWGSREKPVRKPNMLRANHVLSLCL

SEQ ID NO: 185955 - protein, 96 aa, Zea mays
  Clone ID: MRT4577_101182C.1.pep
DAWRDFDRLKASFDALRADHDALLQDNNRPRSQAVSSTEKLQEKEDATDGGATADTAAPAVDVEASSGDHAEEPAEHAATPHALQEAKLDDRPEHG

SEQ ID NO: 185956 - protein, 65 aa, Zea mays
  Clone ID: MRT4577_101183C.1.pep
KKKKKKKKKKKIYYIKKTDRQVYTDWMKKVDRYRGPTFTIHVLLRTNSMYKGPYIETKFQCFTRS

SEQ ID NO: 185957 - protein, 75 aa, Zea mays
  unsure (1)..(75): unsure at all Xaa locations
  Clone ID: MRT4577_101184C.1.pep
AVAILRAPHQTRKEFYSLYSSYAVAGGIILYILSCSHILVWGGFPDYLVLXNYNNLRILLHSMPLCQNQNXIYLR

SEQ ID NO: 185958 - protein, 63 aa, Zea mays
  Clone ID: MRT4577_101185C.1.pep
MLLLPCLLVLSSLQAPAIVAASAAAGGRPPAMFVFGDSTLDVGNNNYLAGPGVPQANKPYYGI

SEQ ID NO: 185959 - protein, 104 aa, Zea mays
  unsure (1)..(104): unsure at all Xaa locations
  Clone ID: MRT4577_101186C.1.pep
ARSSAGELCPTETGHAILYRVVETLLCIPYLAVFDGDDNSIDAERRLKVQTGVEVVVGIEFGEXCGCTNGMPXIEVVEKDSKQGAGALTTPVNTYNLSDYLLLT

SEQ ID NO: 185960 - protein, 197 aa, Zea mays
  unsure (1)..(197): unsure at all Xaa locations
  Clone ID: MRT4577_101187C.1.pep
MADVVPWLLKAFVLSRESPSLVQEVCKLLACIFLLSTTDSSIQLPLGSHKESLSLNHWATYFHQVSVGTNLNCHYFASLQASSEEKVPKDTYKDFRNETDDNVSKFLRLSSRDIKYIEKHMTEFFQKLPDVPVLCISMLGGDYVNALLKFHCHPPFFPAWMLLSRVXSTNEPTTLLLPVDSISAEMQFEDSCTKDLG

SEQ ID NO: 185961 - protein, 71 aa, Zea mays
  Clone ID: MRT4577_101188C.1.pep
EASPFLTVLSPMRSHHNGTSVSAQGYPFASILQFCCVTADAVQVALPVLLNTDLYLIGYMLSEGFFIRQAL

SEQ ID NO: 185962 - protein, 93 aa, Zea mays
  unsure (1)..(93): unsure at all Xaa locations
  Clone ID: MRT4577_101189C.1.pep
GMTRDSRHKRSASGAKRAQXRTKTKFDLGRHAANTKLGAHRIHDVRTSGGTRKFGTVRLDAENFSSGSDAISRETRNIAVVYDAANIHFVLTG

SEQ ID NO: 185963 - protein, 88 aa, Zea mays
  Clone ID: MRT4577_10118C.1.pep
IKRESSLGGTENTFWGVGQNPITPPRGKKESLGPRPRGFFFGIRRPPGVSLKKPPGAGGGFKKKRRWGATNTQALGITPPGPGEHPGI

SEQ ID NO: 185964 - protein, 118 aa, Zea mays
  unsure (1)..(118): unsure at all Xaa locations
  Clone ID: MRT4577_101190C.1.pep
QSQKCHQTMPKXNEXXVVSXXIXXTIGXKXRSNAGRKXXXXKGTKEPCFXXSXPSPPNRSLTNVKQHNKHAPILDVTPEHYVYPLLYXAXKXPVRLFRXPLASFXLSKGLPSPRTRII

SEQ ID NO: 185965 - protein, 36 aa, Zea mays
  Clone ID: MRT4577_101191C.1.pep
GLILLEVASYLLKHDVNKIGIFWLVCISGFLFKTNQ

SEQ ID NO: 185966 - protein, 119 aa, Zea mays
  Clone ID: MRT4577_101192C.1.pep
IGRPHTSHNKIRSLRYMLPFRSSGRKKKRIGIISIRQSKCQAVGVSEVTVALLQIPRCSSAATNGNMYKDRDMPSTAKCTGAPITQFSKSGSAPWSKLMLNVTIVILVSSGHCSQLQFI

SEQ ID NO: 185967 - protein, 211 aa, Zea mays
  unsure (1)..(211): unsure at all Xaa locations
  Clone ID: MRT4577_101193C.1.pep
SDPYIHIYYRATRKKGRKKPSPPGLGKRGAKEGRKEDDEQGGSGERVPGLLHARGAGAGARRLPPRGLCVPPPPPPPRPPLRQGRGPPRQGHPRHRRVLRHRRVNHLVANAGIWSSCFFEEITNITAFHNVIDLNFWXGAVYPTYFALPYLKASRXNIVVTASXAGRVRPARMSFYTQAMAPVIRFYETLKXLNLGSHVHVTISRPGYVVS

SEQ ID NO: 185968 - protein, 113 aa, Zea mays
  unsure (1)..(113): unsure at all Xaa locations
  Clone ID: MRT4577_101194C.1.pep
GPPQAQMDVATGNGKGGVVGPFPPAPDPXGGNYXVSVQKIREAPPLPLKRGSFPFKVRFFFPPLGIFPMLFLPPRSGLRISHLGIFLGPQNFPSEAPIGCGLNLQTPPLVGFP

SEQ ID NO: 185969 - protein, 91 aa, Zea mays
  Clone ID: MRT4577_101195C.1.pep
MMSKEAVVNAFLGCFMHVGLALVLAVYLPVAFVCRLLHRLLVRPFARGEDLRGKVILVTGASSGIGEHLVYEYARHGACVALVPRTEAALT

SEQ ID NO: 185970 - protein, 110 aa, Zea mays
  Clone ID: MRT4577_101196C.1.pep
CPAGELWVPRRTQEPNSTIMQSIMNTFHSAMKIRKYLRLSKNSRMLSPVLGSFDSSPKPCVSFFFSLKLSTAPAFISSVPNSSMSPIILTPKASRTRGSTREFRTGTAGV

SEQ ID NO: 185971 - protein, 171 aa, Zea mays
  unsure (1)..(171): unsure at all Xaa locations
  Clone ID: MRT4577_101197C.1.pep
TRSWGASCTWGWALVLAVYLPVALVCRLLHRLLVRPFARGEDLRGKVVLVTGASSGIGEHLVYEYARHGACVALVARTEXALRAVAKAARDLGAPDVLVVPADVTKVDDAKRAVEETVAHFGKLNHLVANAGIWSSCFFEEITNITAFHNVIVRHHIKPCYIYYVLFFPSQ

SEQ ID NO: 185972 - protein, 167 aa, Zea mays
  unsure (1)..(167): unsure at all Xaa locations
  Clone ID: MRT4577_101198C.1.pep
PLLLSSXGRMIFSLVGLAAGLTVIGHYQDEKIPWAIGVAIASTMAYVAFFSIGLGPITWVYSSEVFPLHVRAMGCALGVASNRLTSGVISMTFISLSKAITIGGAFFLYAGVAVLAWVFFFTFLPETRGRTLEAMSKLFGATDDELKPQDGATKDKQKLELAATGTN

SEQ ID NO: 185973 - protein, 144 aa, Zea mays
  unsure (1)..(144): unsure at all Xaa locations
  Clone ID: MRT4577_101199C.1.pep
MEHKEAGCQQPEGPILCINNCGXASSIDSIVNGGDGGKGPVIAASVNAAVPQVEQKTIVVQPMLVAETSEAAAVIPKAKEGPDRCAACRKRVGLTGFSCRCGNMYCSVHRYSDKHDCQFDYRTAARDAIAKANPVVRAEKLDKI

SEQ ID NO: 185974 - protein, 130 aa, Zea mays
  unsure (1)..(130): unsure at all Xaa locations
  Clone ID: MRT4577_10119C.1.pep
SDFTITLCFSELAQANYRGYLRYSSVLKTPKTLYPSAATXAVIYVYFLTRQYSCLVTVSADRRRAGVAKVSSAWVIGTAMPWLDFETSVFKKEKASLAGHDEYIERGGRDLTTVFAVALPGIQQERCILL

SEQ ID NO: 185975 - protein, 397 aa, Zea mays
  unsure (1)..(397): unsure at all Xaa locations
  Clone ID: MRT4577_1011C.1.pep
ICQPLHALLRKGALFLWAEDHSTAFQTLKQALMLAPVLALPDFSTQFTIETDASSIGVGVVLMQKGHPLAFLSKALGPKSCGLSAYEKEFMAILVAVQQWCKYLQNGEFMILTDHQSLSQLNEQRLHTPWQHKVFTKLLGLQYKIVYQQGHTNRVAAALSRRLEPKFNVVSEVXSWLIDVHNNYLHDPDAQSLLTKLAIDPSAVVQEFVHNCQTCLQAKPDRSAYPGKLEPLSVPSMAWEIIIMDFVEGLPVSGPANCILVVVDKFTKYAHFIPLYHPYTPSSVAQTFMTHVYRLHGLPASIVSDRDPVFTSTFWQQLFKLIGTELKLSSSYLSQTDGQTERXNQCLETFLXCFVSACPKKRKDWLPAAEFWYNTSMHSALGCSTFEALHGRKPRTL

SEQ ID NO: 185976 - protein, 101 aa, Zea mays
  Clone ID: MRT4577_101200C.1.pep
MMSKEAVVNAFLGCFMHVGLALVLAVYLPVAFVCRLLHRLLVRPFARGEDLRGKVILVTGASSGIGEVSQPATLFFLLASLSPAPSLCRCWPYPPRRSATT

SEQ ID NO: 185977 - protein, 95 aa, Zea mays
  Clone ID: MRT4577_101201C.1.pep
HVRKRMRWHREDLSLGPINRPPFYIGSAIGRVPSPVRALHHRSVSGVLFFRTRGRTRGRTRGRTCGSERVDVRVGERVVGRVAVRVGGRVVARVA

SEQ ID NO: 185978 - protein, 67 aa, Zea mays
  Clone ID: MRT4577_101202C.1.pep
MEHKEAGCQQPEGPILCINNCGFFGSAATMNMCSKCHKEMITKHEQAQLAASSIDSIGNGGDGGKGP

SEQ ID NO: 185979 - protein, 219 aa, Zea mays
  Clone ID: MRT4577_101203C.1.pep
MMSKEAVVNAFLGCFMHVGLALVLAVYLPVAFVCRLLHRLLVRPFARGEDLRGKVVLVTGASSGIGEHLVYEYARHGACVALVARTEVALRAVAKAARDLGAPDVLVVPADVTKVDDAKRAVEETVAHFGKLNHLVANAGIWSSCFFEEITNITVFHNVIDLNFWGAVYPTYFALPYLKASRGNIVVTASVAGRVPTARMSFYNASKSAVIRFYETLRA

SEQ ID NO: 185980 - protein, 116 aa, Zea mays
  unsure (1)..(116): unsure at all Xaa locations
  Clone ID: MRT4577_101204C.1.pep
MGQEKTHTNIVVIGHVDSDXSTTIVHLIYKLGGVDKRVIDRLDTDAAEMNKRPFKYAWVLDKLKAERERGITIDIALCKLKTTKYYXTGIDAPVHRDFINNMITVTRXADCAVYYY

SEQ ID NO: 185981 - protein, 171 aa, Zea mays
  Clone ID: MRT4577_101205C.1.pep
MEHKEAGCQQPEGPILCINNCGFFGSAATMNMCSKCHKEMITKQEQAQLAASSIDSIVNGGDGGKGPVIAASVNVAVPQVEQKTIVVQPMLVAETSEAAAVIPKAKEGPDRCAACRKRVGLTGFSCRCGNMYCSVHRYSDKHDCQFDYRTAARDAIAKANPVVRAEKLDKI

SEQ ID NO: 185982 - protein, 213 aa, Zea mays
  unsure (1)..(213): unsure at all Xaa locations
  Clone ID: MRT4577_101206C.1.pep
IRHEGRLTRVNSSYSLCSTYPSELIVPRSISDEDLFQASPFRSGKRLPVISWCDPGSGAVLARSSQPMVGLMMNFRNNADEKLVCALSSRTIDEKGSPRKLYIIDARPRANAIANGAKGGGSESSSNYHKSEVLFLGIQNIHTMRESLSRLRDYVDAHGSISSNGSPSAVSVVGDRRNRGSTXGGGXLXSMTSXLQHXXEWLNHIQNILGWCF

SEQ ID NO: 185983 - protein, 171 aa, Zea mays
  Clone ID: MRT4577_101207C.1.pep
MEHKEAGCQQPEGPILCINNCGFFGSAATMNMCSKCHKEMITKQEQAQLAASSIDSIVNGGDGGKGPVIAASVNAAVPQVEQKTIVVQPMLVAETSEAAAVIPKAKEGPDRCAACRKRVGLTGFSCRCGNTYCSMHRYSDKHDCQFDYRTAARDAIAKANPVVKAEKLDKI

SEQ ID NO: 185984 - protein, 45 aa, Zea mays
  Clone ID: MRT4577_101208C.1.pep
QCKSYYFLQAITLAPLLDYLARAYTDPAVHLYPLLHVFLPPLYHL

SEQ ID NO: 185985 - protein, 98 aa, Zea mays
  Clone ID: MRT4577_101209C.1.pep
SRHQNSNKRGGNRSNKQVQTTTLRSGTNKPGHYINKGHRWETGTTPNSGTRGKLGPNLKKTVKGVGAVPSPLWDPRPSRGGASPGGKTRKAWREPARG

SEQ ID NO: 185986 - protein, 43 aa, Zea mays
  Clone ID: MRT4577_10120C.1.pep
RFFLGEHFPAPVYFYLLPIIGGCALRAGHELNFKMVGYIGGND

SEQ ID NO: 185987 - protein, 87 aa, Zea mays
  Clone ID: MRT4577_101210C.1.pep
TLRYDHAPCLLNILLFGLMDGSALLKQYSEFVQLNLTSMSWRSTALGGPFPQLVHSVQPHVLTYAVPLYGHKQDLSPVVHCSLGIIA

SEQ ID NO: 185988 - protein, 94 aa, Zea mays
  unsure (1)..(94): unsure at all Xaa locations
  Clone ID: MRT4577_101211C.1.pep
RRLSTGEEDKKPTEGVCPHHTXKVKGQDGNEAVFRIYRSTHLXXLMNAYCDRQCVDMNALALLFDGLRLRQKQTPDELXSEDXDXEIDAMLDQT

SEQ ID NO: 185989 - protein, 118 aa, Zea mays
  unsure (1)..(118): unsure at all Xaa locations
  Clone ID: MRT4577_101212C.1.pep
VSPELVRRGTHIVSGPSLPAFVLLIGGIEVGLSHFPFFACLSSEFGLVSSVLGFSYSLVXFVGNYETVMFYWPSLLCLAFLLGRFLHIFVKSLRVHLGWELQMEEKPFLEVHQAEHVK

SEQ ID NO: 185990 - protein, 80 aa, Zea mays
  Clone ID: MRT4577_101213C.1.pep
CPSTSNDNNSDCARTTSFTLSAVEHLCRIKHCCCYLPASTCRRPSPPTCGAQGLILVAMRHFSPPTSHNLQRGGVSCSVC

SEQ ID NO: 185991 - protein, 143 aa, Zea mays
  Clone ID: MRT4577_101214C.1.pep
MGLCLSVALWKEKLYGADGGSSRSVRGRVVVHKVAGVEGGGDCEYGILGGDDANLVGVEQKAAPAMGVGSGGVDGAAAALSGGTPLRPIWQRRVLMGVKCQLPRFSGMILYDESGRPVCSGIRDRSRDQEKHAAAISVLRDLL

SEQ ID NO: 185992 - protein, 67 aa, Zea mays
  Clone ID: MRT4577_101215C.1.pep
EYLHLTLRSCLLEWLLAGRASTGSVHQLADRRLTASCVGTTALLRSSSLSPTPYCSRGGVDAIGTSA

SEQ ID NO: 185993 - protein, 276 aa, Zea mays
  unsure (1)..(276): unsure at all Xaa locations
  Clone ID: MRT4577_101216C.1.pep
WYACRYRSGIPGSTHASEAPGQLECETAIAALNSCLRDLDQASLAAVSQQLAPREGISQEALHTQMLTAVQEISHLIEPLASAARAEASQLGHKVSQMAQYFEPLTLAAVGAASKTLSHPQQMALLDQTKTLAESALQLLYTAKEVGGNPKQAAHTQEALEEAVQMMTEAVEDLTTTLNEAASAAGXVVGGMXVDSITQAINQLDEGPXMGDPEGSFVDYQTXTMVRTAKAIAVTVXEMVTKSNTSPEELGPLAXQLTSDYGRLASQAKXAAVAAE

SEQ ID NO: 185994 - protein, 46 aa, Zea mays
  Clone ID: MRT4577_101217C.1.pep
SLLMVIGDPDPSAGSPFVPMSRTCGCCWSFRVSHIFHHWRLPQNEI

SEQ ID NO: 185995 - protein, 132 aa, Zea mays
  unsure (1)..(132): unsure at all Xaa locations
  Clone ID: MRT4577_101218C.1.pep
MNAAAEAEFNIXLLATDSYKVTHYKQYPPNTSKVYSYFECREKKTENSKLRKVKYEETVFYGLQYILNKYLKGKVVTKEKIQEAKDVYKEHFQDDVFNEKGWNYILEKYDGHLPIEIKAVPEGFVIPRGNVL

SEQ ID NO: 185996 - protein, 65 aa, Zea mays
  Clone ID: MRT4577_101219C.1.pep
DRSMDTYLADDLIITLLWRASRPLPWRPQPLAQWSPRRPSTCVPLSARPLPPPPWPLPAASCLPA

SEQ ID NO: 185997 - protein, 160 aa, Zea mays
  Clone ID: MRT4577_10121C.1.pep
EGSLPVLALESGTVEDSTVGADSLHGGIASWCPPYTSGCVSSKHSRTKRRSARPSVSVSWRPGRCERSSNPALGLRTRGDGEGERSPLRASGLWRLYAQDAGARDAIKRRTYNGFVSAHLVRALLTLHSAKRNRQQQASDRTEDEAQTEHSIPAGLEVPN

SEQ ID NO: 185998 - protein, 510 aa, Zea mays
  Clone ID: MRT4577_101220C.1.pep
MARYFRSSNLASRVFDRQLISPLPGATVNTIRQFYENLVPSYTIYDIDCPDYSFRKFTDDGKYFVAFSRNHQDLIVYRPIWFTYSCNEECETHELPPKAKKFDSFFKQLYSIPLASSNEYICKDFFLYMECHRFGLFATSTAQSNESTATEGAIHGVPLIEKITFHLVRLEDGVILDEKAFCNDFINLAHSIGAYMYEDLLCIVSLRYQTIHILQIRDSGNLVEVRNIGAFCREDDELFLHSHIQTGYGGSFLPGIKQRLLSYIFCKTWNEVPDQTLRVQHLKKKFYFHFQDYVDLIIWKVQFLDRHHLFVKFGSVDGGVSRSTDQNLAFFAVYNMETTDIVSLHQNSSEDIYALFEQFYDHFHANPQASSHGKFISSHSNDIHALDQLRVIKNKASSSSQFVKKMMTSLPYTCQSQSPSPYFDLSLFRYDEKLISAIDRHRHCTEHPIKFMSVRQNVVKFKIKPGSDSGASDSRAKRISSFLFHPFFPLALSIQQTYMQPTVVNIHFRR

SEQ ID NO: 185999 - protein, 74 aa, Zea mays
  Clone ID: MRT4577_101221C.1.pep
FVLLLLVHAHELFFFGFMTFGKVKQKSRCFLLLSRADFCLMLLDVEELYSSTDFIYPNKSTCCAIQVFVLELLT

SEQ ID NO: 186000 - protein, 109 aa, Zea mays
  unsure (1)..(109): unsure at all Xaa locations
  Clone ID: MRT4577_101222C.1.pep
KSAASRGPTTHPNVKVAITGFRRNVHNXLPCWHRGRDASPLDVIDINDTGGVTQIMPTAXYNSTISIIKADIKPRRDNTISGYCIVIWAASDHNTMNLTCRQLCIDLPT

SEQ ID NO: 186001 - protein, 138 aa, Zea mays
  Clone ID: MRT4577_101223C.1.pep
FSTSISGDRKGITVALGVSMSLVNLQHCSRQNFGHMYSLVDKLTDVTVGDKIHCLAVRMASLISLPKQSTKCKWAQYSSIDVASWAHQSSLRLHSVDLCFHMPSSECQMCLLLDLRHKDTYIGWHGVGILDASCLRRG

SEQ ID NO: 186002 - protein, 76 aa, Zea mays
  unsure (1)..(76): unsure at all Xaa locations
  Clone ID: MRT4577_101224C.1.pep
GPLAGPLAVLLAGPLARARKESLARKLAARISALSRATDNAMKFGRNLSMAXNRKGQAKTTGRILRIVAGANALVG

SEQ ID NO: 186003 - protein, 70 aa, Zea mays
  unsure (1)..(70): unsure at all Xaa locations
  Clone ID: MRT4577_101225C.1.pep
KGTELGQVPIDLPNPGAERQXLMGQVQGLTPNLARSGKKLAKGSALKSEIHEIKHESQHLRSCIELAKKG

SEQ ID NO: 186004 - protein, 77 aa, Zea mays
  Clone ID: MRT4577_101226C.1.pep
MGGEMKPGRGLRTWAQRHLNVTFAVGFLLVLLTYLVVSRQLAVAAPGGAASRVVAGKQVVVRDAGDNAEGASKRRQE

SEQ ID NO: 186005 - protein, 78 aa, Zea mays
  Clone ID: MRT4577_101227C.1.pep
DAVLYSCAQTEPCQGEFHTTARFCRWIYQTLLSHRVPKIERTSLDTATVAPQETPHHDGPLYVDITFSSANPSAPPLM

SEQ ID NO: 186006 - protein, 96 aa, Zea mays
  unsure (1)..(96): unsure at all Xaa locations
  Clone ID: MRT4577_101228C.1.pep
FLNKLVLYINKKTLIFSMALPDPVKNTSRPGVKYGKDPRPTELVNLLVLNGDHRQEYKDRXDQAVFNNMDSLIGQFQVKGHIPWILAQIYRVRNRE

SEQ ID NO: 186007 - protein, 76 aa, Zea mays
  Clone ID: MRT4577_101229C.1.pep
MAAPEAPACYVGIARQFVGFRLMKQMGWDEGECLGDYKQGIKGHVREKNKHDTLGVGVDSLHNKWVYDTTQFDNIL

SEQ ID NO: 186008 - protein, 38 aa, Zea mays
  unsure (1)..(38): unsure at all Xaa locations
  Clone ID: MRT4577_10122C.1.pep
XXMVLLCXXQXXSILRNXTSXALEXLALXCSIXTIQNX

SEQ ID NO: 186009 - protein, 82 aa, Zea mays
  Clone ID: MRT4577_101230C.1.pep
GPPVSIFGPSPIPSAFSSPRGARGSLGSSGAPGPSWGRFSCRKTFWTPRFWLFLPPAPGASLWGSLARCLKPRPWWGFFRAP

SEQ ID NO: 186010 - protein, 76 aa, Zea mays
  Clone ID: MRT4577_101231C.1.pep
QCTILRQSLHVHALMPKQISSSPCKLSGTSVPLHGSAYLKSISPFFGYATLFPSHCIIHECFIVPWTCLDTKDRRW

SEQ ID NO: 186011 - protein, 165 aa, Zea mays
  unsure (1)..(165): unsure at all Xaa locations
  Clone ID: MRT4577_101232C.1.pep
TKPRPTGPGPILLRAWVLPAPPSLKPYRDDGDGFLPGQVTRRDKVLFELXSHXNHSDRFLYPSVLCERAHCIGGNALALTDHDTMAGIXSCVTXAYKFVVRIIPGVEIKALYNTREGAGAVETDYMLAYYGLSGPLTCDEKHGMLLDSTDGLYLRAEYMLLKVTT

SEQ ID NO: 186012 - protein, 41 aa, Zea mays
  Clone ID: MRT4577_101233C.1.pep
HQKCFKNFAGFFFMTHGTGLSNTDHRASQTSFYLNLGRPNT

SEQ ID NO: 186013 - protein, 43 aa, Zea mays
  Clone ID: MRT4577_101234C.1.pep
KKKKKKKIKKFKINYLKKKKKNKNFLTIYHAEWELYYPFTCPF

SEQ ID NO: 186014 - protein, 157 aa, Zea mays
  unsure (1)..(157): unsure at all Xaa locations
  Clone ID: MRT4577_101235C.1.pep
VSTYYNYTQFAQELKPLYTSAPFTNASTDERAKLKVKVRXNIHGTGTXDPGTMLEGGRVRSRLXSGNEAPNXTMKMDTDDVPREPAAGSDETMQEQPPAVGEGAQDNEDQPDSMGTEAWDEPXKRKVXKTTEAGHEVSYGALAAPDLQKAVEKVYDM

SEQ ID NO: 186015 - protein, 120 aa, Zea mays
  unsure (1)..(120): unsure at all Xaa locations
  Clone ID: MRT4577_101236C.1.pep
GARPWGSSAQRAEQEDEKRLRAGLNPSXSTXXSAGARQTXPSRFQQGGSSHGRRLGWELGGQNPSRAPAMGIEQGGRGHGRTGNHTTSRDVSWNHGWRACGGRQGGAGTTGHGVTGELDN

SEQ ID NO: 186016 - protein, 183 aa, Zea mays
  Clone ID: MRT4577_101237C.1.pep
HHGRSSLLPLASLRTHASRGSSSHPWTLCGSQFVHVLFLPAQFPWPVLCSDSARQAPSRVSSHGLSLPVARVMAWPQLRPVAAPMALGHLCARPWAVPCAPEFCSVRFRLPRPCARRGAPARIQSCTQPLFIFLLSSLRRTAQGRAPSSAVSSSPCSLLLARSSFLIAAPVIFLRLHVSLRTP

SEQ ID NO: 186017 - protein, 110 aa, Zea mays
  Clone ID: MRT4577_101238C.1.pep
LRMQSRRRTKSSSGWWGTLPRDFQCPRPQYSNSTCPSPTGFLCTGTTLWLYSKVYLVNVWLRCTLLPRTVQRTWLLICCFVSKVCFVKNFGLIGKKKKKKKKKKKKKKKK

SEQ ID NO: 186018 - protein, 110 aa, Zea mays
  unsure (1)..(110): unsure at all Xaa locations
  Clone ID: MRT4577_101239C.1.pep
GFNSICMSLHQTSLCFVCSHLTSXDKEGDELHRNSDVLEILMNTRFLMVYVQYERSLETIIGHDQIIWLGGLNYRIMLSHQLVKALVEMRNSRERLGESLVTLRFLLVTQ

SEQ ID NO: 186019 - protein, 121 aa, Zea mays
  Clone ID: MRT4577_10123C.1.pep
MFKNTFQSGFLSILYSLGTKPLQIWDKEVVDGHIKRPQDEDIKSNVLEIVGTNVQSTYITCPADPAATLGIKLPFLALVVKNLKKYFTFEVQVLDDKNVRRRFRASNFQSVTRVKPYICTM

SEQ ID NO: 186020 - protein, 173 aa, Zea mays
  Clone ID: MRT4577_101240C.1.pep
WMSTIKSLVIFLLVELAGDTMAGRPCSPLPPSARTPAVVPAHIPGRCVVPSSSLQLGHVLFLSAQFPWPVLCSDSARQAPSRVSSHGLSLPVARVVAWPQLRPVAAPMALGHLCARPWWFPARLNSARFRLPRPWRSSRCSSSDSVLRAAAFHLPAQLAAPNCPGPRAWLDRL

SEQ ID NO: 186021 - protein, 83 aa, Zea mays
  Clone ID: MRT4577_101241C.1.pep
QAIIYVWAANTSQLTMILLKQYNEPLSHEAVIIVSLLITAHVVSRRSSMGVLQLIHAFVSDKVTDYETESTDDTTTIKEETQC

SEQ ID NO: 186022 - protein, 139 aa, Zea mays
  unsure (1)..(139): unsure at all Xaa locations
  Clone ID: MRT4577_101242C.1.pep
GFNSICMSLHQTSLCFVCSHLTSXDKEGDELHRNSDVLEILMNTRFLMVYVQYERSLETIIGHXKQRTLQRIHEVYSICIWCDXFLCFAFHYSQIIWLGGLNYRIMLSHQLVKALVEMRNSRERLGESLVTLRFLLVTQ

SEQ ID NO: 186023 - protein, 110 aa, Zea mays
  unsure (1)..(110): unsure at all Xaa locations
  Clone ID: MRT4577_101243C.1.pep
MSAYCGKYKDELIKNAAYIGTLGKGILAADESTGTIGKRLSSINVHNLEENRRALRELLFCCPGALHYISGVILFYETLSQTTKDGXKSFDDXLXEGGVLPGSKVXQGTI

SEQ ID NO: 186024 - protein, 71 aa, Zea mays
  Clone ID: MRT4577_101244C.1.pep
TQSDTTDDFSLRVKAFKEEASPVKDCGFRVKDLGVWRDFIITGDRSKTRGARPAWWWRQWIGGKASGRGSS

SEQ ID NO: 186025 - protein, 93 aa, Zea mays
  Clone ID: MRT4577_101245C.1.pep
MATHRHCLPLLLVDAALALDAVHAHAELGGGRGPQLGGRNPIPDVSDTHMQERSGRAPMQTKNQKKNDDRLSIPHVALGDYQGRTWMKYSTNK

SEQ ID NO: 186026 - protein, 42 aa, Zea mays
  Clone ID: MRT4577_101246C.1.pep
VHKKKKKKKKKKKKKKKKKKKKKKKKKKKKKKKKKKKGGGRF

SEQ ID NO: 186027 - protein, 61 aa, Zea mays
  unsure (1)..(61): unsure at all Xaa locations
  Clone ID: MRT4577_101247C.1.pep
LVRSMGLRQSIHQISSLVIPLVNGRRYQVGIKSSQPGCXPLCNYRIRAKPLWYYGRNPRSL

SEQ ID NO: 186028 - protein, 43 aa, Zea mays
  Clone ID: MRT4577_101248C.1.pep
MSAIDFYCSVDKVEGADGKDRVVVTFDGKYLPYTEQKSEHMMS

SEQ ID NO: 186029 - protein, 41 aa, Zea mays
  Clone ID: MRT4577_10124C.1.pep
FQVAGAPVDIPEIPDPLLRPWQSPFAPQLAAAGGMPDAFQF

SEQ ID NO: 186030 - protein, 58 aa, Zea mays
  Clone ID: MRT4577_101250C.1.pep
RRKPAIILPGNSLQLTHTGGSLLQIHAYLLLRCTPIHRRGLISIRILHGNFNLINFGP

SEQ ID NO: 186031 - protein, 76 aa, Zea mays
  Clone ID: MRT4577_101251C.1.pep
PTRPQIIYFPAKAILRCKKKKKKKKKKKKKKKKNKKKKKKKKKKKKKKKKKGCKPKKSKLTFTCMPLLIYQILPPK

SEQ ID NO: 186032 - protein, 79 aa, Zea mays
  Clone ID: MRT4577_101252C.1.pep
FRHWRLTMSNPVHTTVNDRCVVCIVSWSVLDCCLRVAAAIVVCVAARGVNGTDIICLYYNSVCLKGLRSDPKKKKKKTP

SEQ ID NO: 186033 - protein, 54 aa, Zea mays
  Clone ID: MRT4577_101253C.1.pep
GGAHSSKNLKWNTPRKSDLMAYASTTPLNRKHRLPIHLLTHPTPYIPKTWTRNP

SEQ ID NO: 186034 - protein, 137 aa, Zea mays
  unsure (1)..(137): unsure at all Xaa locations
  Clone ID: MRT4577_101254C.1.pep
PVWRALTALPGLERVNALREGYSSKRDYASTLSCMQTLSRLQPQIPSRRATMYAENQDPKLQLLLKHELETPTMGENWDDRSQSKEHIEASLTGGREAAIXRERALAYAFXHTGESTLGSANPMHVDPNDLHRSWSW

SEQ ID NO: 186035 - protein, 62 aa, Zea mays
  Clone ID: MRT4577_101255C.1.pep
GDDGWRLVVLLAVVEAPAPVVSDDVGPNIHRRGRERVRGDGVEQRVGVGGGDERFDGVVRGS

SEQ ID NO: 186036 - protein, 63 aa, Zea mays
  Clone ID: MRT4577_101256C.1.pep
VIERIVCGNMKRPVLLLVDNYVCELRCSSQVQWLSAPLVYLRKRLAVYEHSQWTPQSRSSYNG

SEQ ID NO: 186037 - protein, 84 aa, Zea mays
  Clone ID: MRT4577_101257C.1.pep
PRGWGPPPLREGGKIRKQSPLKETTGTPGYMTAAHTPFTKRTSLPCPCKPPYLGIRGWGPAFSTFSAQIGRTLTPSGPPIKAGN

SEQ ID NO: 186038 - protein, 127 aa, Zea mays
  Clone ID: MRT4577_101258C.1.pep
MLRRPAPALAPAAWLLLAGLLSGGVVWAARVNKHKPWLEPTYHGIITENDNAVLLDPPLIALDKDAPLRFAREICGFKIHGQNVPFDALVEDNDTGEGIIRSKEKLDCELQKDYTFTIQAYDCRKGP

SEQ ID NO: 186039 - protein, 58 aa, Zea mays
  Clone ID: MRT4577_101259C.1.pep
WQVFVFVSLQLLQCINRSASFPFSSVSTLLIPSIASSLEIRHLNRGDPNGNRAGLVSA

SEQ ID NO: 186040 - protein, 65 aa, Zea mays
  Clone ID: MRT4577_10125C.1.pep
QRGRSRSKPTLLRTRATRVPLSRGRRSPPLTRVDQTYDGADDHICNSVPMRSALRPRVPHALKVR

SEQ ID NO: 186041 - protein, 238 aa, Zea mays
  Clone ID: MRT4577_101260C.1.pep
MARHPRAPLLRRLLLLAALAASCSYYLLFLQAQASVPPRYDGFAYGGGAATAWKDAVLVEAFLDPLCPDSRDAWQPLKLAVERYAPRVSLIVHPFPLPYHTYAFYACRALYIANKLNSSSTYPLLELFFKNQEKFYNSATSSLSGPSVALGMSKMAAQTVGNSVSEFLSGFSDGKTDSAARVSFKYGCTRGVFGAPFFFVNGFLQPGGGSPIDYSTWIGILDPLVSQNGERIEMFTSM

SEQ ID NO: 186042 - protein, 109 aa, Zea mays
  Clone ID: MRT4577_101261C.1.pep
TTRTRLWWDSPCARGSTRCRAPARRGGSTASWRWTCRTFGPAPRLPKNAGSSSDAFPCTARITWEHGGGSAIASLTVPCAVEHLAGGSGDYRFIWRFDSSRASIIYCIA

SEQ ID NO: 186043 - protein, 107 aa, Zea mays
  Clone ID: MRT4577_101262C.1.pep
GYLEAGRVYSLLKYLGEKNRLLVFLSYSSIKEPHVLCFTLFTRQLHEVWGFQEKLYICKLSGNLQLLVLAFTMFCSVVSSAKMVGVLSNVYLEWLVESDPLPINSMF

SEQ ID NO: 186044 - protein, 72 aa, Zea mays
  Clone ID: MRT4577_101263C.1.pep
REVDAAAGKEATSPEGKTTRRRRRHRGRRDEDEGEGEGERHEKDGGSSHGDRPVVRPRRAAPYVPAIICLGS

SEQ ID NO: 186045 - protein, 72 aa, Zea mays
  unsure (1)..(72): unsure at all Xaa locations
  Clone ID: MRT4577_101264C.1.pep
SAHMIRITXCCKSLTNLXKFCSNLVKGPKXRVLNVKGXPCRIPLPMCLHITTRKSSCGQGTNTWDRFEMRIH

SEQ ID NO: 186046 - protein, 155 aa, Zea mays
  unsure (1)..(155): unsure at all Xaa locations
  Clone ID: MRT4577_101265C.1.pep
MEARYPGDPRVRPARAFCAVSATGSIRRRRDELIDTAVVCSFDGNSHEVDILSAGDMLREKFSLQHGQYQLVKHFPEQFFIIFSDPRSKQWALDRRSVSYRGRIFHFGDWSEDSYARKTNLEXRVKVRVEGISVHCXGKDVASKALGKKXAIHYV

SEQ ID NO: 186047 - protein, 37 aa, Zea mays
  Clone ID: MRT4577_101266C.1.pep
ASAPLHVSVVLKAKVSVLGLGLLLTQACGDKTQDGGA

SEQ ID NO: 186048 - protein, 63 aa, Zea mays
  Clone ID: MRT4577_101267C.1.pep
KKPKKTHSYTQTFFISKLIPPLHQIESKKIVQTPKKHSNLNHFQHPFYLPNNLKPKHFFFLKQ

SEQ ID NO: 186049 - protein, 228 aa, Zea mays
  Clone ID: MRT4577_101268C.1.pep
MASESAIQIEYRGKTATITLNAPKKLNALGAKEYYQLASAMNEVAARDDICITILTGKGRFFSAGADVAFGAQKDASALDEQQMYLRSFVANNLFITHAFYTHPKILITALNGPAVGLSAALISFSDFIYSAPHSFILTPFSSLGLVTEGNASIGFVRRLGLAKANEALIMSKRITNEELLATGFVNKTFDAGNVKDEGYSDRFLGQVLEEVEERLGDHLNRGESGAD

SEQ ID NO: 186050 - protein, 113 aa, Zea mays
  Clone ID: MRT4577_101269C.1.pep
HGGFVTHADPPVFEISSPPGPESSPNGYFGRGVPPSFPNAVFWFFHKKNDRGPDRASSGWWFSPVLRVRGLLCGGGSFLGNPLGGDLFVPGNFLGLQRGWAPLAFLAPPCKKG

SEQ ID NO: 186051 - protein, 120 aa, Zea mays
  Clone ID: MRT4577_10126C.1.pep
ENMLGLIRRVPICQRGTIRILSSCQGSARRKTRSIPWLIFQRTGAPYGAGSGAVGSAGAVAVETGRRPIGNGSRTRSARDGQRASHGGCQGSAGARGVGLGAASFRPGGFPVLGRPPPGV

SEQ ID NO: 186052 - protein, 83 aa, Zea mays
  Clone ID: MRT4577_101270C.1.pep
SSGQLLHPLPDPPEPPQGGVPPLAHLEPAHDRRLRHELPAYPPRVLPPSRASPLCCTTDCPPHLGGALHTVEAGTSSGSNSPC

SEQ ID NO: 186053 - protein, 292 aa, Zea mays
  Clone ID: MRT4577_101271C.1.pep
MSEHPASRSSVGSRSSALPPHQQRLTPAPDPLASVWIRRLHLSPNPPPPPPPRPPPLHIRAPPPAHQDAISTDESHTTPPPPPLTLRGTGFGPFRWSPRPLLGAPAGAWDAAAAASVGVAPGGSAVGGDQTMLSPFFRLPAPLPSVVDFEEAMPLRPLIGLGSHSGSGGFPGLSRQMVGGGDPCDGWLSSRVAGAAYPGHALDMVPTRTLNDLRDRQHGAIPAQPNLARHDPSSSSQRDEPFSYWNMGRFRRNTATSSVTPLGAAPANFGTKRNADSNDFLPLKLRKLSGAI

SEQ ID NO: 186054 - protein, 42 aa, Zea mays
  Clone ID: MRT4577_101272C.1.pep
VPISMVNIFLDSTCNSQVHNYENNLAQQYCINITKEPKHAIV

SEQ ID NO: 186055 - protein, 54 aa, Zea mays
  Clone ID: MRT4577_101273C.1.pep
SGHNSWISQKFNDTFHAGDMEVLDSGNLKNTFSTSSSLCRMECKEISRLSIHVT

SEQ ID NO: 186056 - protein, 435 aa, Zea mays
  Clone ID: MRT4577_101274C.1.pep
MDPCPFVRVLVGNLALRMPVAPPAAGAGAGVHPSTSPCYCKIRLGKMPVQSVPAPLVVSDGGEQTPASGALAAAFHLSKADLEWFNGKPSLFSSRGEASLKVSVYAGRKGSACGVSSGRLLGKATIALDLKGAEAKPAVLHSGWISIGKRSGKGSTAATELSLTVRAEPDPRFVFEFDGEPECSPQVLQVRGSMKQPMFTCKFGCRSNSDLRRPGMRPERDAASAKERKGWSVTVHDLKGSAVAMASMVTPFVPSPGTDRVSRSNPGAWLILRPAGDGAWEPWARLECWRERGGAGASDSLGYHFALLVPGADHAVALADSSIPSSNGGKFAIDLTAAQPLSRGGTPGCSPRGSGDLSNWPLGNYRGFVMSAAVQGEGRCSKPTVEVGVAHIGCAEDAAAFVALAAAVDLSMDACRLFSHRLRKELSHLQADLLR

SEQ ID NO: 186057 - protein, 35 aa, Zea mays
  Clone ID: MRT4577_101275C.1.pep
WFTIVIFMPLHPNRVLPIMLYCMGCKCGTFCSFSF

SEQ ID NO: 186058 - protein, 35 aa, Zea mays
  Clone ID: MRT4577_101276C.1.pep
DIGTIYTIVQGHVDVDEHRFDGSRTIDEIVSCSIG

SEQ ID NO: 186059 - protein, 173 aa, Zea mays
  Clone ID: MRT4577_101277C.1.pep
NKGCTYHPGKSTWVNLTSQDTKRHDLANACVVVTGGRGLRSAENFKLLEQLAEKFGAAAGATRAAVEAGYVPNDLQSCRRRLQQLESQLMEANRIKEEGNTGSIRWKENILDQENELQNIKQENDDLQTKESAASEKIKELSSQLTNAKYGMINSNTKEIMRRGALKRTMNLL

SEQ ID NO: 186060 - protein, 48 aa, Zea mays
  Clone ID: MRT4577_101278C.1.pep
RIVQFTAYVEGKSLIIIQRMGGKWKLDVSRCHGYCKCLLVIKGMRREI

SEQ ID NO: 186061 - protein, 207 aa, Zea mays
  unsure (1)..(207): unsure at all Xaa locations
  Clone ID: MRT4577_101279C.1.pep
HLSWTLLPLAAGAAQDLLHFLQRSGRHWRRVRVGCRLLALLPRQTLFPYELFVKLYSKVELHPFGLHNLGNRPIYAGNALCTVKYTDEDPCMMSIRSTSFSPTADAMSETKVAPITQYLFSNXLGKSTWVNLTSQDTKRHDLANACVVVTGGRGLRSAENFKLLEQLAEKFGAAAGATRAAVEAGYVPNDLQDPRRYIFTPCPLLRK

SEQ ID NO: 186062 - protein, 360 aa, Zea mays
  unsure (1)..(360): unsure at all Xaa locations
  Clone ID: MRT4577_10127C.1.pep
MVKENKRKQPPADAAPPPGDEGEGRSGRKGKKARKEKAEAILPSQIKNKDKRREVHAKLKREKKAQKRALARERXQAARRAEELGEQPPERQVPRTIENTREPDETVCRPDDQELFAGNDADEFSAVLKQHITPKILITTCRFNSGRGPAFIDELMQVIPNSQYVKRGTYELKKIVEYANNRDFTSLVVVHTNRREPDALLIIGLPDGPTAHFKLSKLVLRKDIKNHGNPTSHKPELVLNNFTTRLGHRVGRMIQSLFPQDPNFRGRRVVTFHNQRDYIFFRHHRYIFETKEKKVASKEKTSGSKSGSEKQQVICRLQECGPRFTLKLLTLQHGTFDTRSGEYEWVHKPDMDTSRRRFFL

SEQ ID NO: 186063 - protein, 81 aa, Zea mays
  Clone ID: MRT4577_101280C.1.pep
MLIKVKTLTGKEIEIDIEPTDKVERIKERVEEKEGIPPQQQRLIYSGKQMNDEKTAADYKILGGSVLHLVLALRGGGGLRQ

SEQ ID NO: 186064 - protein, 241 aa, Zea mays
  unsure (1)..(241): unsure at all Xaa locations
  Clone ID: MRT4577_101281C.1.pep
MVGSYANGGGAAPAAVAAEKLDELRLLLGKSDGDTLRVVGVGAGAWGSVFCALLQDAYGRHRDRVQVRVWRRAGRAVDRADAERLFEVINSREDVLRRLIRRCAYLKYVEARLGDRTLHADEILRDGFCLNMLDTPLCPLKVVTNLQEAVWDADIVINGLPSTETREVFGEIGRYWKERISQPLIISLAKGIEASLDPVPRIITPTQMISNATGVPLENILYLXSPNIASEIITKXYANAR

SEQ ID NO: 186065 - protein, 52 aa, Zea mays
  unsure (1)..(52): unsure at all Xaa locations
  Clone ID: MRT4577_101282C.1.pep
KGLSLVPVQLPGPRARRIFSCRASXYSEPISGLVRVAYCSRHPPLGCLASLG

SEQ ID NO: 186066 - protein, 111 aa, Zea mays
  Clone ID: MRT4577_101283C.1.pep
VGVGEWGVLGCFFPPPSPGGGGRAHNLSPPWGWGEPFFWFQPGRVFQILELVHGPRGLLVLLFWLLDPLLNLGGLMLFWWPYFFGPVQIFSLCEIPIVFWGLFFPSPPFWG

SEQ ID NO: 186067 - protein, 58 aa, Zea mays
  Clone ID: MRT4577_101284C.1.pep
YCFFRLAKCNSKLKHEICHWAAHYEHKMRLGSKAIFHLEAFVAKFMSVYKEFLVATFG

SEQ ID NO: 186068 - protein, 96 aa, Zea mays
  Clone ID: MRT4577_101285C.1.pep
KIATDILTEQSPKRLFAVRQKFYELLVNCIPPESILKKLLAELLRKLDADLKHEICHWAAHYEHKMRLGSKAIFHLEAFVAKFMSVYKEFLVATFG

SEQ ID NO: 186069 - protein, 354 aa, Zea mays
  Clone ID: MRT4577_101286C.1.pep
MLWVDKYRPKTLDKVTVHDQVAQNLRKFVSEQDCPHLLFYGPSGSGKKTLILALIKQMFGAGAEKVKLENKTWKIDTGTRTFEIELAMLSSAHHVEMTPSDAGFQDRYVVQEVIKEMAKNRPIDAKGKRAFKVLVLNEVDKLSREAQHSLRRTMEKYSSSCRLILCCNSSSKVTEAVRSRCLNVRVNAPSEDQIVQVLEFIGKKENLHLPAGFAARIAAQSNRNLRRAILFFETCKVQQYPFTSNQVAPPLDWEQYVSEIATDILTEQSPKRLFAVRQKFYELLVNCIPPESILKKLLAELLRKLDADLKHEICHWAAHYEHKMRLGSKAIFHLEAFVAKFMSVYKEFLVATFG

SEQ ID NO: 186070 - protein, 62 aa, Zea mays
  Clone ID: MRT4577_101287C.1.pep
RPRISRQRPTRSLRRILIRRPSVLGQLMSSVIPGNRSDYEVYVGNSTLRYLRHSVQPLHRTF

SEQ ID NO: 186071 - protein, 54 aa, Zea mays
  Clone ID: MRT4577_101288C.1.pep
LYHLCWLRTEQARPRAQRVTAESDDRRTSAPALVSSCRVKITQVTDGVERNWVE

SEQ ID NO: 186072 - protein, 67 aa, Zea mays
  Clone ID: MRT4577_101289C.1.pep
NVAKGPVGSISVTLILRLQCLPPNICCRPCGVFEEGFGRRKLSSCFKPVCASHAYGRHLLPVEFCGA

SEQ ID NO: 186073 - protein, 71 aa, Zea mays
  Clone ID: MRT4577_10128C.1.pep
STSIPPSPPTLAHVLPSTLPSTPTSSSPTVLSQPVAVDQDRRDVSTRNSRQGNDNTEFEMEFVFCSFLPAG

SEQ ID NO: 186074 - protein, 73 aa, Zea mays
  Clone ID: MRT4577_101290C.1.pep
TLHIIFPGLLIQALRGSRWPMSAYTALTTTTLYLYTLAVPQRAVHTGSHAEPQHGPRNFMPNRLRHRGGRSGL

SEQ ID NO: 186075 - protein, 120 aa, Zea mays
  Clone ID: MRT4577_101291C.1.pep
KKEGLPRCSLMVFENQVGCFFAKGGSIIVKMRKVSEAFKVFLSKDKIPRGVPENNVPNNDAQRSLRPRFPNYVAKAVPIYVNPKGHEDSPHVFKETLCWCCILKKKICPAFQNELKSLGV

SEQ ID NO: 186076 - protein, 65 aa, Zea mays
  Clone ID: MRT4577_101292C.1.pep
KRKIQGSRGILIGQIVSPCAWCFILCLYVFSSIRLLISYNLFDRYLCLQILANLIPTNYCETKSM

SEQ ID NO: 186077 - protein, 30 aa, Zea mays
  unsure (1)..(30): unsure at all Xaa locations
  Clone ID: MRT4577_101293C.1.pep
VGXSCADATVARATSTTREMQEGEAAWLAS

SEQ ID NO: 186078 - protein, 38 aa, Zea mays
  Clone ID: MRT4577_101294C.1.pep
KLHRALDQRQTRSLLLMTLKKLQVAGQADKRYIARAAP

SEQ ID NO: 186079 - protein, 107 aa, Zea mays
  Clone ID: MRT4577_101295C.1.pep
FLKGNAVVAFFSPQGVLKTVDSCETVMIAPPAVFWWQLKPKGGTFPLPPPPKIKFGFPFFSTKGGPVVFKAMIRSYGGKSFLGKIIPNPRFVLLEATETNEKNSPIF

SEQ ID NO: 186080 - protein, 259 aa, Zea mays
  unsure (1)..(259): unsure at all Xaa locations
  Clone ID: MRT4577_101296C.1.pep
MNPPAAAASTGAGGHAAAPAAAPEYVHYPRLSPEEVAPPPPPPYHAATAAPSXPTEATPTSTPPPAXATSPKNTMDSVKDVLGKMGKRFGEAARKTETITGNFWQHLKTGPSITDAAMSRISQVTKVIAEGGYDKIFHQTFEVAPGEKLKKPYACYLSTSAGPVMGVLYLSNVKLAFCSDNPLAYQVGDKTEWSYYKVVIPLAQLRSINSSTSRTNAAEKYIQVVSVDNHEFWFMGFVYYDSAVKNLQEALQEAQNLRA

SEQ ID NO: 186081 - protein, 63 aa, Zea mays
  Clone ID: MRT4577_101297C.1.pep
RWIRLPRRVHSRSSRPLAVRDYWAARAGDCLRQGPRTSLIPSPGTSSRRPVKPSTASRNTGYE

SEQ ID NO: 186082 - protein, 95 aa, Zea mays
  Clone ID: MRT4577_101298C.1.pep
NCWQVWYSRGRRESRVALSWRRAPSEERRCANADSSSPYVRLRTRAEDVGPRPRRHPPSLSHLALRSEPMQCREDHICVYGCRGVVALIRWCEEV

SEQ ID NO: 186083 - protein, 138 aa, Zea mays
  Clone ID: MRT4577_101299C.1.pep
YTQSVVIMVCERSSRDNLPQMRWSLLVHIVIRDIVVILELISGFDVSPRRLGEDSRLVPCILRSGQRSSQGSASWSGDRCCRSTVDPTHLRASLHGERQAAGHHPSECLRRPRGGPRQRESQLTRAGGARRRCRPRGR

SEQ ID NO: 186084 - protein, 166 aa, Zea mays
  Clone ID: MRT4577_10129C.1.pep
IGHRYRESQTTKPVIQSKTPLQPVIPPVQRLFFYNRADLLDVSDFTLGELPRFRDSLAAALHHFYPLAGKLTCELVDEEGAAPPEGPRDQERREEEGSREQGAPGGWSSRAGSQPARDHRDEGAAEQGAPGGGSSRVPRPRPSRRRRETESRGRRTKTQVGGRRVR

SEQ ID NO: 186085 - protein, 54 aa, Zea mays
  Clone ID: MRT4577_1012C.1.pep
CATVIRGSANRLYEPHSFMSATLSCYHRIIDGAISAEFVKAFIGYIENPTSMLL

SEQ ID NO: 186086 - protein, 39 aa, Zea mays
  Clone ID: MRT4577_101300C.1.pep
TEEVRCSTVPTPSRSIAFSTLNLQSSSMKQKNYCENACA

SEQ ID NO: 186087 - protein, 122 aa, Zea mays
  unsure (1)..(122): unsure at all Xaa locations
  Clone ID: MRT4577_101301C.1.pep
QQHQFFPFTQRVALSFAAYLQQQLPFSQVVVASPQQFFPFNQLAALNFAVFLQQRXLPPFSQLVFVSPVAFLTQHRLLPFSLPGGPTAGPVFHLPPLLPFPPLALATPPGFSPPPLIGGALF

SEQ ID NO: 186088 - protein, 46 aa, Zea mays
  Clone ID: MRT4577_101302C.1.pep
GPTMRPAKRDKSCISHLEFITNPLELPKDPYHLINRVQRWGKQKGR

SEQ ID NO: 186089 - protein, 74 aa, Zea mays
  Clone ID: MRT4577_101303C.1.pep
CKTVAMMIRFPVGHRMVYMTALDSLWTFTANTLNRKLYFSITPDGRYTCILRVKKPLFRKQAKATYPRKTASLG

SEQ ID NO: 186090 - protein, 48 aa, Zea mays
  Clone ID: MRT4577_101304C.1.pep
MLCQIIGQANKYQSLIPLFVYNGTGATGATLYILRLALFSPDVCRDRD

SEQ ID NO: 186091 - protein, 93 aa, Zea mays
  unsure (1)..(93): unsure at all Xaa locations
  Clone ID: MRT4577_101305C.1.pep
CVFCGGPGCSSSGFWCGRSWFWSRGSLVFVRPFVSGSLFLFLSCWVPVFCVLLCRFGCFVSCGXSPPFFCCPLAWLRVPFRAGAWVVSSGSLL

SEQ ID NO: 186092 - protein, 350 aa, Zea mays
  unsure (1)..(350): unsure at all Xaa locations
  Clone ID: MRT4577_101306C.1.pep
MEVEYHEEYVRSSRGVQLFTCGWLPAAASPKALVFLCHGYGMECSGFMRECGVRLAAAGYGVFGMDYEGHGKSMGARCYIRSFRRLVDDCGHFFKSVCELEEYRGKSRFLYGESMGGAVALLLHTEDPAFWDGAVLVAPMCKISEKVKPHPLVITLLTQVEDVIPRWKIVPTKQDVIDAAFKDPVKREKIRRNQLIYQDKPRLKTALEMLRTSMYIEDSLSQVTLPFFVLHGEADTVTDPEVSRALYERSASADKTIKLYPGMWHGLTAGEPDENVEAIFSDIVSWLNHRSRSWAVEERHMTRKLAPAPAKSIEGHGTVDGKVXHNKGRPRRRQGFLCGLAGRTHHHAEM

SEQ ID NO: 186093 - protein, 77 aa, Zea mays
  Clone ID: MRT4577_101307C.1.pep
LKGAPLIIERMNCFNSKRGPLGWALFFSFDPFLIQGGGEWNQICPRRTALFLLPHFTKFTQLSHFRQLLFFLSTFLH

SEQ ID NO: 186094 - protein, 235 aa, Zea mays
  unsure (1)..(235): unsure at all Xaa locations
  Clone ID: MRT4577_101308C.1.pep
GTLRAGRAHFFFLSFFSYRTTTISPSQKLFSDLSNMHDNLSVINEILTYCNLDDTDRILNDLKEALLASYFSPTISXFRIYXTIREEIRDGKLKSAANIKAALKTCIPKLLTSKGTHSKITLRFXRNPAVIMFWGFXNGRGNTTXSYGSLLTRRKNEGVPALXLADADTLQSSXAREQLEVWAERTGXSESGLDHXQKVQTPAFLSHAVKRVNRERFDEVLCDTSRRLHTNYGLM

SEQ ID NO: 186095 - protein, 77 aa, Zea mays
  Clone ID: MRT4577_101309C.1.pep
SFPGISLPSFFAFQFFLFFFFFSISSHPYIIKVTEQAQVGQNFAGSSFFCHDSSSTISRDPGHPGIDAITLLTQRSR

SEQ ID NO: 186096 - protein, 48 aa, Zea mays
  Clone ID: MRT4577_10130C.1.pep
KAFTGGDNVATFKLGVKCLESQTFFFSGRIPLAFYTFLLPLIHKQHKW

SEQ ID NO: 186097 - protein, 95 aa, Zea mays
  Clone ID: MRT4577_101310C.1.pep
RFSDYRLVPLARRTPTVLLRLREVLRGWVSGVVRSICPLSMFTTRFYFHWTLLSHVPPLAEQRLLHLPRCPIVHDPPRSADAHVTLIRINHLIHI

SEQ ID NO: 186098 - protein, 47 aa, Zea mays
  Clone ID: MRT4577_101311C.1.pep
MWLFNLLFSLGVPCLAKKKKKKKKKKKKKKKKKKKKKKKKKKKKLEK

SEQ ID NO: 186099 - protein, 61 aa, Zea mays
  Clone ID: MRT4577_101313C.1.pep
KNKKKKKKKKKKKKKKKKKKKREKKKKKFKKKKKFKKKKKTQLEKKKKKKKKRFFPSRGGL

SEQ ID NO: 186100 - protein, 506 aa, Zea mays
  Clone ID: MRT4577_101315C.1.pep
MKNKAMVFKCFVLISDMDAVDALVLCGILLTNQTYNRLKTLVNKIRSYGSTRWTDHDIVRLMLRSFTVLDPHLVNNIRENPRYTKMTPEEILGKFVSERMIIKEATYVDGALNGPINEPQPLTLKATRSKETLPSKVAQIEAAGLNDEEMALIIKRFKTRDGNGYPRPDTRWVFTPLGWLNDARNFTMTALKGRKGQPSKTKTKGKRSCFKCGKLGHFIANCPDNDSDQDQGNKREKKKNYKKAKGEAHLGKEWDSDCSSSDSDNEGLAATAFNKSSLFPNERHTCLMAREKKVCTRNSTYASSSEDESSDEDEIDYSCLFKGLDRTKVDKINELIDALNDKNRLLEKQEDLLYEEHDKFVEAQKSHALEVKRNEMLSCELSSCHETISNLRSINDDLNAKLEIASKSTSCVEIVATCNRCKDFDIDACSEYLVSISKLNDELASLNAQLKTSKSEFDKLKFARDAYTIGRHPSIKDGLGFKREAKNLTSHKVPIPANEKGKAPRQ

SEQ ID NO: 186101 - protein, 54 aa, Zea mays
  Clone ID: MRT4577_101316C.1.pep
CFSPPWLGVCCVDGVFGVCAGVCDAVGLNMLPNAERGRERIGRARASDLKDAWV

SEQ ID NO: 186102 - protein, 115 aa, Zea mays
  Clone ID: MRT4577_101318C.1.pep
STLPYARSEFGSSTGATFFLTIEALFITNKISWEFDITIKLAGGDTVMGTYQVLHQIAPTREDACTLSPGASSMWRLHYAFAGPNHKAKVTSNGDTFIIYLKNITVTFIYNTITA

SEQ ID NO: 186103 - protein, 47 aa, Zea mays
  Clone ID: MRT4577_101319C.1.pep
PYISDSVVTRVFIGPHRISLGGYEALERWRPSGKLAGWLALVSKRPA

SEQ ID NO: 186104 - protein, 53 aa, Zea mays
  Clone ID: MRT4577_10131C.1.pep
NGLTRFPLSLSTIQRNQARSRLRRRGPGRPEARAAAAAARMNQTRFLACTSCY

SEQ ID NO: 186105 - protein, 96 aa, Zea mays
  Clone ID: MRT4577_101320C.1.pep
VFALFLRPKKEHKYRVYWNAYHHSVGYTVIVLGVVNVFKGMAILDVERRWRTGYVAAVSVLAAVAVALEAVTWGVVLRRRKQEEKTSNAGRLPLSM

SEQ ID NO: 186106 - protein, 107 aa, Zea mays
  Clone ID: MRT4577_101321C.1.pep
MFRPGKKRPLTAPTSALKSAMKPAFGQELTLRDTIKPVLISCYDLKTSAPLVFSRADALENGSYDFRLCEVGRAAWSEAGRFEPAEVASVDGATSCAAVDGGPTMGS

SEQ ID NO: 186107 - protein, 53 aa, Zea mays
  Clone ID: MRT4577_101322C.1.pep
TEHLPIPLFDIPQMNCQRLSCLWPMPLYKLQIARRKRGSSSRLLASRISTLPY

SEQ ID NO: 186108 - protein, 76 aa, Zea mays
  Clone ID: MRT4577_101323C.1.pep
SLVVLSLTNCVSAAFQNCVNSLVVLYLNACRTDDILLGNMWKDPLWKLGLSQSIISEPAMEACILLWQRISDVKLL

SEQ ID NO: 186109 - protein, 110 aa, Zea mays
  unsure (1)..(110): unsure at all Xaa locations
  Clone ID: MRT4577_101324C.1.pep
TGLFVFCSDPTTFRWTRQNAASLFGSYCTRGSQVRIYGENCLLWIVVMQACNGYSLICILLYDTVXGDVNYIIDHAEIDXVFIXRQKNKETLSPNSKAANRLKALVAFTF

SEQ ID NO: 186110 - protein, 70 aa, Zea mays
  Clone ID: MRT4577_101325C.1.pep
SSLVGGRPLFFFWVFFSLNTAKTNLPRAHKELVNQNMNGVFHLDMQATQATGYSVLLPIYRICLFTEEAI

SEQ ID NO: 186111 - protein, 137 aa, Zea mays
  unsure (1)..(137): unsure at all Xaa locations
  Clone ID: MRT4577_101326C.1.pep
SFSLRVALGPCGDQSVTSGIGNANTAGRPYSYTLDYHTYXAVSDITNVRVIRLPTMDYLDNLHAQDYMTAHGEAIVLXNKXDKAYLAKPFKMDIIDHETKRALVATXEGLSEADAGHPHDKKGIAMPDSVDSKYKSM

SEQ ID NO: 186112 - protein, 89 aa, Zea mays
  Clone ID: MRT4577_101327C.1.pep
GGKTTRCCVRGPQKNSLGGDPYSLGKWNKSLFVPALFVFVFLQKWKTRMEKKSLFCTMETVCFSPFPFNIVGKFVPSPVFTCKINYVCD

SEQ ID NO: 186113 - protein, 141 aa, Zea mays
  unsure (1)..(141): unsure at all Xaa locations
  Clone ID: MRT4577_101328C.1.pep
MQCRPPETPREVEYVRMISSKELRSHVYDDDLWNSISDDEHDGTPCVPHHAGGDLPILTLRRQDATDAFAGYHPPSARPLLRRFFVGRLSDYDVSPGSDDXRRLLGKLLSGHLFESEGPSHNVHVVVTAVLIYVALYLLLL

SEQ ID NO: 186114 - protein, 92 aa, Zea mays
  unsure (1)..(92): unsure at all Xaa locations
  Clone ID: MRT4577_101329C.1.pep
PXPTSVSRHVIEQDLAVGGGRPRRVTPKTLPPGSFGYNLLHDTCLLCVKIGTNNMTLTVICTILKHSCDLLLSKMRTLLTYNELHSYTNLLH

SEQ ID NO: 186115 - protein, 220 aa, Zea mays
  Clone ID: MRT4577_10132C.1.pep
LSRLSSRRSHYGVNVLLQVLKSDVEAALQVLNFAIYHKELTEMEEREQREMEMKQQAALPPAMEKFDVTPSPAPAAGQPRALPLRFYDLVFLAIPPVQRLFFYDRADLLDVSDFTLGELPRFRDSLAAALHHFYPLAGKLTCELVDEEGAAPPEGPRDQGAPGGWSSRAGSTGRREQPSAAPETESPTPRDKEPRPSHGEAGGREESALGLGLPVPANLE

SEQ ID NO: 186116 - protein, 90 aa, Zea mays
  unsure (1)..(90): unsure at all Xaa locations
  Clone ID: MRT4577_101330C.1.pep
MLGPLGLWAPGEGLSRTILGGPTLPNLSRKRGEFFHPNMSFSLFPPPASLPPFVXPPILPPFGGNPPPEPASLGXKPXPPGPPPXEPPPP

SEQ ID NO: 186117 - protein, 106 aa, Zea mays
  Clone ID: MRT4577_101331C.1.pep
QQPRQKQMSGTPRGQSIIGNTAGQAQLLQQSSALPLHGQKGTPSAILHAKKLRPLHAKKLRSSITLSYGPDLGQHGPIQARRALGPCWAYILEREHDLVRLEYNSC

SEQ ID NO: 186118 - protein, 63 aa, Zea mays
  unsure (1)..(63): unsure at all Xaa locations
  Clone ID: MRT4577_101332C.1.pep
SSCHFDRSLSMRPSATAIESYAQSGCSQGPISEPDTGWHVTAQMAGRFVIRSITKRTRSSXVI

SEQ ID NO: 186119 - protein, 48 aa, Zea mays
  Clone ID: MRT4577_101333C.1.pep
ILPSRVVTISYDRRHRLGPYAHSCWRIGRSQAENHAHMEARRDCPVNR

SEQ ID NO: 186120 - protein, 80 aa, Zea mays
  Clone ID: MRT4577_101334C.1.pep
MSGESKTFSNDHEFASEQGKKGGATQPDEVYKPSEHDGLKKDGSPDKRMSSEHGFGGDRERASEEGKKGGKSSGSTEDDE

SEQ ID NO: 186121 - protein, 46 aa, Zea mays
  Clone ID: MRT4577_101335C.1.pep
SWALSKLIACAVRGSVRRSAGWSSSSSSFQVGLAINPKAIGYLYVN

SEQ ID NO: 186122 - protein, 51 aa, Zea mays
  unsure (1)..(51): unsure at all Xaa locations
  Clone ID: MRT4577_101336C.1.pep
TEPNRCERACVXGLGNTIGQANXVYDKPLDLQFWDYTDEKTXLKGQSLSHR

SEQ ID NO: 186123 - protein, 99 aa, Zea mays
  unsure (1)..(99): unsure at all Xaa locations
  Clone ID: MRT4577_101337C.1.pep
XKKKKKKKKKKKKKKKKKKKKKKKKKKKKKKYKRKKNKKKRXKKNKKLIGGGLFLGSLALVRRRGAWFFFFVSPFFIFGGGVFPPVGGVTPWPPPFCFS

SEQ ID NO: 186124 - protein, 450 aa, Zea mays
  unsure (1)..(450): unsure at all Xaa locations
  Clone ID: MRT4577_101338C.1.pep
MAAENEEKETACAGYKHGPPWVFKGSALYQLHLVKASTARAFVPRDLRLVEAFGYTLGGMFLARYHDSPAGEFDELVVIAGIVWNPPTSCAXSPSLRFMPALHSHLLWPSLIPCRLLRRFLLPDWPRSGTPQQKRTGATCSMRRGKKKKRKPSCLRQPAINKRLIPHMIVLGSTDCALLLSIIRRLGRGVRVRCTCSAWPTCCPLDGTLNSGDLLDXFFSVLAASDLLLYELVFRWAARVLVNSVEACRHGRKEVGLPSHVATFSSKNEAASLGDRPLARPNSFLNMLGIGSTAFEQGNGREIEVSESKGGSSTRHLCNISLPFTGSHKDHQWAGPAIRMSLPSFSGRTVDHPDLLKYSCQVECRVRPVKPARIWSARTTEPQQEKSDGEVSSSGSSVAADLDARSHSISVLLSRPIFALEFSSLRMHVDAPRTVVPHRDDKKVGYSSST

SEQ ID NO: 186125 - protein, 301 aa, Zea mays
  unsure (1)..(301): unsure at all Xaa locations
  Clone ID: MRT4577_101339C.1.pep
MAAENEEKETACAGYKHGPPWVFKGSALYQLHLVKASTARAFVPRDLRLVEAFGYTLGGMFLARYHDSPAGEFDELVVIAGIVWNPPTSCAWAARVLVNSVEACRHGRKEVGLPSHVATFSSKNEAASLGDRPLARPNSFLNMLGIGSTAFEQGNGREIEVSESKGGSSTRHLCNISLPFTGSHKDHQWAGPAIRMSLPSFXRRTKPYSPMISFKERIYVAMRRFLLRNRKKGKKKGKKESSSKYVLFLKQARLACFANFSGRTVDHPDLLKYSCQVECRVRPVKPARIWSARTTEPQQEK

SEQ ID NO: 186126 - protein, 166 aa, Zea mays
  unsure (1)..(166): unsure at all Xaa locations
  Clone ID: MRT4577_10133C.1.pep
RLQCVXXHGWCFDGAGACKFIPQAPALGPPVHTSSRACVASYPCVVQNNILWFYPRADPEHSDVLQRKRPPLIPEIDDPDFVTVYGIRDLPYGYDILVENLMDPAHVPYAHKGIMRGIRKKEDPGRVDYYKEGGGPVKMKIEQANXKGFVSPQERGXFQFVRPCTF

SEQ ID NO: 186127 - protein, 86 aa, Zea mays
  Clone ID: MRT4577_101340C.1.pep
MPVSQYSQTEPAALCRQVLIHWSCSLWLVFSAVRPFLSQPRWPSPPLVPPVVFPLAEPAPLHLVSSLVSGLTACQPQRNRSTKAVA

SEQ ID NO: 186128 - protein, 110 aa, Zea mays
  unsure (1)..(110): unsure at all Xaa locations
  Clone ID: MRT4577_101341C.1.pep
NTQGPCYVSVVEWRCSGLVLALKIVNKFGGGVPPPLKMVFNFMWGXGSKENLWPPPLSSMSGGKIKFKGLYSMSTRLLNGVRVFFLIFVARKPGMFILGGIIVFPPPPPP

SEQ ID NO: 186129 - protein, 63 aa, Zea mays
  Clone ID: MRT4577_101342C.1.pep
GPPKGGGFNTKIFPLNHANNHFVWNLLFEGIFVTMLCFKVFTFYPGNLFKDPPLAPGKNKNTP

SEQ ID NO: 186130 - protein, 67 aa, Zea mays
  Clone ID: MRT4577_101343C.1.pep
LTDLVYPVEIVGKGLRTKEGGSKTLKVILDKKERGGVDYRLDSYSEVYRRLPGRPVVFEFPQSPFEF

SEQ ID NO: 186131 - protein, 44 aa, Zea mays
  Clone ID: MRT4577_101344C.1.pep
ILPKCCSAVHFPPLLRHSKVYTPTSLIPSVRSVGARSEDRVLML

SEQ ID NO: 186132 - protein, 62 aa, Zea mays
  Clone ID: MRT4577_101345C.1.pep
LAPKKKTRGIKKAFVRAPQKTVTPGGNKTQQPLLPPKSPTFWGSLARGGPPLWERGNLGTVL

SEQ ID NO: 186133 - protein, 108 aa, Zea mays
  Clone ID: MRT4577_101346C.1.pep
EGAEGFADDTYRVAGFLDLRKGTSFRECLAEVRQLTNLLLSSQPESFANPATREQSYGALDHKKVAIICDKFKDAPDSLFGSLSGRGTVQSARKKSLDVLKRRLKDFS

SEQ ID NO: 186134 - protein, 40 aa, Zea mays
  Clone ID: MRT4577_101347C.1.pep
IYIYTRLYIDTSTEYSQIYWPQHQQIVILNEKYHIPTGKR

SEQ ID NO: 186135 - protein, 231 aa, Zea mays
  Clone ID: MRT4577_101348C.1.pep
MAAAEEGPEPLRYQTLALRVSIHCEGCKKKVKKVLHSIEGVYKTDIDTQQQKVVVIGNVSADALVKKLLKSGKHAEPWPEPAPAPPAADSPPGPDGSPGSAGKKKKKKKGNKSPEAANNKPADPAPAPAPAPAEGNGGPNPPEQHDKADGGASCDEASDGEQDKPEAGGGGGNGSPDAGEANEGGKGAPSAMTPHGPQPIAAATNSNGGGGGGGGGGKKKGKKGGHGNANR

SEQ ID NO: 186136 - protein, 133 aa, Zea mays
  Clone ID: MRT4577_101349C.1.pep
LAAGRWRACVAYPRMCMRVRACEDLRSSVSSRSQVAASHRLDRSPPPLAFIGLPAVRSPWRGAGMMVLVLRSCRPRCAPAVPCACASPPHVGLVDSCARALAHRVDEYDRRRRRDTVRLVCSTGTCHPTSTYV

SEQ ID NO: 186137 - protein, 83 aa, Zea mays
  Clone ID: MRT4577_10134C.1.pep
RKKRRQGWARGCSVAAEHEVADEVEGEAVGVSIEVHVHDRLSIEPYARTTVRSGGRGWHKRTKTLSGGGCPVSICFCVCVQKL

SEQ ID NO: 186138 - protein, 78 aa, Zea mays
  Clone ID: MRT4577_101350C.1.pep
VRSVPGAPGVDIQGCCTRSRPASCGCRWLLDQSRLLFNEFIHNLRSMVPAVLSRGVGLFRELNNLVRRVVNPPPASPR

SEQ ID NO: 186139 - protein, 61 aa, Zea mays
  unsure (1)..(61): unsure at all Xaa locations
  Clone ID: MRT4577_101351C.1.pep
SSFLTGVIKSITIFTLLLAVDILFSVAPCYQAGGCVWKPNXSSPPAKRSYLLSYCQDHHNC

SEQ ID NO: 186140 - protein, 505 aa, Zea mays
  Clone ID: MRT4577_101352C.1.pep
MKPPAGASGKGGAVDPSLPRFRCQECRRALVVVGVESYADRLPAHAAPGNHASSVQGSVMGASKMDNSYVVLSRQNKSQGPRIPPRPPSAAAAHADPSQSTRAIEGSYIVLPPPAASIYRTSASEGGAQLTPSGVISSSPSLGNNSGFHSSVTVLKRAFEIASSQTQVEQPLCLECMRVLSDKMDKEIEDVNADIKAYEACLQRLEQEPYNILSETDFQKEKQKVTIPIDIEEEEKKLKAAIEEAEKQYSEVRSEMENLEIKSKQFEELEERYWHEFNSFQFQLTSHQEERDAVFAKIEVSQVHLELLKRTNVLNDAFYISHDGVIGTINNFRLGRLSNVEVEWDEINAAWGQAALLLHTMAQYFTPKFQYRIKIHPMGSYPRVTDIQNNTYELFGPVNLFWSTRFDKAMTWFLTCLQEFAEFAISLDKQNNVPPEKSLKLPYKIDGDKVGSHTIVLSFNKNENWTKALKYMLCNLKWVLYWFIGNTSFAPPSVSLHTQSLKNKS

SEQ ID NO: 186141 - protein, 72 aa, Zea mays
  Clone ID: MRT4577_101353C.1.pep
CEGPAFGSLFAVAFTGPSFLACLLYSGFCFLPLGPFAVCMCQQGVFVFEFVVFGGFFASLHGYRTFKKKSLF

SEQ ID NO: 186142 - protein, 248 aa, Zea mays
  Clone ID: MRT4577_101354C.1.pep
MGWGDCKPTATMVCVVVVFAVLNTLTKMAFNQGMHTTVLITLRQLTAFLFLAPIAYYRERKTRPKMTLEIFVYLFFSAVLGASLTQWLFFVGLRYTTATFACTFINMTPMFTFLVALPFGMEKLDLKTGAGIAKVIGTAVGFTGAIVLALYQGPSLTKPSPAQAAAAHHVLAHHQWAIGSVALLAGAACWSFWFILQSRLGKKYPALYSGNALMFLLSFLQMAAVGLATERKDLSVWILRTKLQIITV

SEQ ID NO: 186143 - protein, 87 aa, Zea mays
  Clone ID: MRT4577_101355C.1.pep
LQDCVGLVVIPGRLCLPASHASASVLSNLANAPGGSRTVPHRSCPVLYPCSCVAVLVYMVRGGVPSIYLLTVQYNACSACWFVFSPN

SEQ ID NO: 186144 - protein, 87 aa, Zea mays
  unsure (1)..(87): unsure at all Xaa locations
  Clone ID: MRT4577_101356C.1.pep
LDMCRRGPYRFLVRRTRFFFFFVFFNFLLFPLFFLFLLSSAVVIHLQSFCLGCLGGGGXSRCXXLFLLFWLSFPCLXLLCVFSVFLS

SEQ ID NO: 186145 - protein, 92 aa, Zea mays
  unsure (1)..(92): unsure at all Xaa locations
  Clone ID: MRT4577_101357C.1.pep
GLPKADGELPETLRLNEGVRRRGARGGRGERRLRLHPVRGRGHPQHVSPLSRLXAKKKNYSHAFPXALRLKKKYGTSDLARGGGQVERYRRD

SEQ ID NO: 186146 - protein, 58 aa, Zea mays
  Clone ID: MRT4577_101358C.1.pep
NRKFVIMGRAGASKIYALVNTNNPTNPVEGHHVGTCILKSGIATVSPGGNMIAPAPFG

SEQ ID NO: 186147 - protein, 105 aa, Zea mays
  Clone ID: MRT4577_101359C.1.pep
QKIGEYQKRRLQHMTIDTIRTADSIGAEIEQTRSYCEHTAYRPDFPQGLDLTPENWAKSTLRSQQSSDQELNRQHERRDPHTSIRGRARTRVEVDEEGICVPVCA

SEQ ID NO: 186148 - protein, 55 aa, Zea mays
  Clone ID: MRT4577_10135C.1.pep
ASDARTIRSRQDAGWTRAVLAGARPQRAPRQQEGLHPGQHLPTAPTRRGDHEVGE

SEQ ID NO: 186149 - protein, 175 aa, Zea mays
  unsure (1)..(175): unsure at all Xaa locations
  Clone ID: MRT4577_101360C.1.pep
AGPPGAGPVAPNGRAPQGVGFPNRGHRALPPPLDGGGAAAVFPPRRGRGGDNAPPPPPLALGPAGRRSIPSSPPGXRTPGGPARFFRPPRTDARXGGLLPPALPAGLGGTPPPSVRQIWTSSTPPPRTRPVHCFWGGGLVFKNKLVNVPGFNEKKKKKKKKKKKKKKKKKKKTTT

SEQ ID NO: 186150 - protein, 70 aa, Zea mays
  Clone ID: MRT4577_101361C.1.pep
KMIFYRCSRVYGKDLWGNTVQSRHLRRKRTLTWHVSRTYGEKSKRNPSIPSKGSSVCILPCHVLTCRPIY

SEQ ID NO: 186151 - protein, 142 aa, Zea mays
  Clone ID: MRT4577_101362C.1.pep
MAAAAVATVATPSPVYRRLFPSAGPSLLRIPRPTKRFRRALLFSAAGDEADVLPGPGAEGEAVVPAMLDEQPDDQLGGSQLDIRGLVFQGDVGGGFTRCGAGSRVSGCGGGNKMLDRGINTVIVLGVSTYALTKLVTVDQNY

SEQ ID NO: 186152 - protein, 131 aa, Zea mays
  Clone ID: MRT4577_101363C.1.pep
KASAADRGRLPPLRGSPYGACRCCYVVVVDGGGLTATNGRRRRRALSATGGGGFDYGVEHLSRWWSTGTDVRQRRGEPAAAAAVRPEQEGARVEAARARAWLLRGNEFAWPMRPVRARALLTGGEGMVNGV

SEQ ID NO: 186153 - protein, 106 aa, Zea mays
  unsure (1)..(106): unsure at all Xaa locations
  Clone ID: MRT4577_101364C.1.pep
ISPKKPNWGNLRILKANFPTLTINPHISQTXITYLLXTYLSPSFTIMIQNPIHQPYIIQHSISTFILPLLPYFLQQPSTLLLHLPLLHYYSHIIISQQLQQLFLSN

SEQ ID NO: 186154 - protein, 89 aa, Zea mays
  unsure (1)..(89): unsure at all Xaa locations
  Clone ID: MRT4577_101365C.1.pep
AVYDFTLRSTYPGFSSSSLFLSHCRGISVSKYFKLTMSCVDYLFRYTITTALVLSTRRRTITLTTPITASDLHLSARXRTRLTGVPDNV

SEQ ID NO: 186155 - protein, 70 aa, Zea mays
  Clone ID: MRT4577_101366C.1.pep
LEKIKNKFDLFGIQTHPISLSPHGLSVSRTSPNLRSQETDKGVPHARARRRPGSGRARRGMAGGRGCVNF

SEQ ID NO: 186156 - protein, 47 aa, Zea mays
  Clone ID: MRT4577_101367C.1.pep
MKLTNKLFQCIKHRRIHNIFYIGVLHTVYNTASRHQLHLLIGATNDE

SEQ ID NO: 186157 - protein, 78 aa, Zea mays
  unsure (1)..(78): unsure at all Xaa locations
  Clone ID: MRT4577_101368C.1.pep
RXQVLQEIFGVSLPRELRVQAGPCFLLLESPHERNCGGGGSGSQNSVADDNSAQSLHASGSLAHSTMDGDSSLHLVPN

SEQ ID NO: 186158 - protein, 89 aa, Zea mays
  unsure (1)..(89): unsure at all Xaa locations
  Clone ID: MRT4577_101369C.1.pep
KRLSGELADRVCAPPVMNYIFVRSNALSVVICNKLGYCGCLDLLKVCMINSYGAAPYXLLGWVNMTYFNVSYNDSEGDMPSIATCGTKF

SEQ ID NO: 186159 - protein, 36 aa, Zea mays
  Clone ID: MRT4577_10136C.1.pep
KLRHQIPVNLNFVCLLGLSSHVLILITFQCLLCKPN

SEQ ID NO: 186160 - protein, 172 aa, Zea mays
  Clone ID: MRT4577_101370C.1.pep
MKTFPLSRGSTISLALFSDVSNSRELLDLMQSGKLEPAVALLNASLVPDVFPILAAALKALLSKTRESLTTRTLHSELVYNYSGSKHITESLKRCGISDNTTYILAACFDASDEEMKAVEKLISGTEIDLTELERRANQPQILKHYKIPPQELSISTLPDAIVCRIAARDAL

SEQ ID NO: 186161 - protein, 134 aa, Zea mays
  Clone ID: MRT4577_101371C.1.pep
MGNSYSGGGSAPAPAALEVPLHLCFFLLVLLLFLACSWYTSYESAAESFAYQARIVLMASPFALLLAVRLLSSVSGEGAGRSVGHLLAVPMPERDSIHRAGGSPWGVGVLLLLLLVMVSYQSNFREKWFPLASR

SEQ ID NO: 186162 - protein, 87 aa, Zea mays
  unsure (1)..(87): unsure at all Xaa locations
  Clone ID: MRT4577_101372C.1.pep
FGSRPHTKPFLGGARLDDFDLRLSTVSDKRLGAKAVKNLLLLSEKVVIHCDTRSLGRIVLPIKVAEVHLPVLKTRDGISIPXLEDIG

SEQ ID NO: 186163 - protein, 74 aa, Zea mays
  unsure (1)..(74): unsure at all Xaa locations
  Clone ID: MRT4577_101373C.1.pep
GWVRGRGGGNLNPWECLPKWGWGCSKRKXRKACLTLCKKGWAKGLWGPRGFXGKKGACPCXXNWKKKEGGXKGP

SEQ ID NO: 186164 - protein, 107 aa, Zea mays
  Clone ID: MRT4577_101374C.1.pep
RTRGFFLSYFSLYFPHHLFLGLSLLLSLHFFFFLLLFFFLSLKSIPSNLFTKHSFHFHYTPHHKNKLSLTSSQILSTVTNLKAITMLYCLQLLHSHIGSHIPTTSLL

SEQ ID NO: 186165 - protein, 46 aa, Zea mays
  Clone ID: MRT4577_101375C.1.pep
ATSRCDIHKGEMQMIKTRMEKNKGRHTQECTKQATVSTRRHHTRRH

SEQ ID NO: 186166 - protein, 98 aa, Zea mays
  Clone ID: MRT4577_101376C.1.pep
GPLKGERGPLARAKKGSLGAKPTPTIPLPPFWGLDTRIKKFFFGKPFRGRNTTFFGGFNKTLGASIRWGIYLGLFMGGVRATPGGLYPHFCRTRKKFL

SEQ ID NO: 186167 - protein, 70 aa, Zea mays
  Clone ID: MRT4577_101377C.1.pep
SHRHFLPAESERPFLRMRPAGQPRHHGRQGREGALLPRNRRRWRREGPRLVSERIKDKEVTVGPHQRRHE

SEQ ID NO: 186168 - protein, 72 aa, Zea mays
  Clone ID: MRT4577_101378C.1.pep
KSGRRKRTTNPHPSDVSLRLAFDIGGMWICCSIATVPWPLMFVEMGRGGQLKVRETQKPLVCDQMGKTSYYI

SEQ ID NO: 186169 - protein, 87 aa, Zea mays
  Clone ID: MRT4577_101379C.1.pep
EIASHMGMKMGMFINLKATGSWSFLCSFYTTEDWFSFLFFFFFKNAPVRTGLILGAYSSSSDNTRNIGLGRGRSDARHGGRGPITFS

SEQ ID NO: 186170 - protein, 55 aa, Zea mays
  Clone ID: MRT4577_101380C.1.pep
SCASTAEKLSISLIKERAERHRQYFILSRTAPTALYFNEPVQGSYHSTVNSMSES

SEQ ID NO: 186171 - protein, 123 aa, Zea mays
  unsure (1)..(123): unsure at all Xaa locations
  Clone ID: MRT4577_101381C.1.pep
GLTINPDGFKADPKTDHKMKERLVGVSXEETTTGDKRLYQMHETRALXLYPAINGNDMXTKSKPDSLHGXRHSLPDALMRATDVRIATKDAEACGYWDDGKGXSHCTHTAGARTAXTEIDPTA

SEQ ID NO: 186172 - protein, 96 aa, Zea mays
  unsure (1)..(96): unsure at all Xaa locations
  Clone ID: MRT4577_101382C.1.pep
LPLRRVVLGLVRAFPLLFXALPFRGCXCRFLGGFFVLPCWFPXCLFGCGSLPFRRSXCLCGLRVWPAXFAACSGCAGRLSCCFSPLFGFXGXRKXG

SEQ ID NO: 186173 - protein, 200 aa, Zea mays
  unsure (1)..(200): unsure at all Xaa locations
  Clone ID: MRT4577_101383C.1.pep
MEVSTWVMLVAAAAAYMAWFWRLSRGLSGPRVWPVLGSLPGLVQHAEDMHEWIVGNLRRTGGTYQTCIFAVPGVARRGGLVTVTCDPRNLEHVLKARFDNYPKGPFWHAVFRDLLGDGIFNSDGDTWVAQRKTAALEFTTRTLRTAMSRXVSRSIHLRLLPILDEAATEKTHVDLQDLPLXLTFDNICXLAFGRDPETLA

SEQ ID NO: 186174 - protein, 136 aa, Zea mays
  Clone ID: MRT4577_101384C.1.pep
TGELYTWGDGTYNVGLLGQGNDVGHWIPNRISGALEGLQVAYVSCGTWHTALITSMGQLFTFGDGSFGVLGHGHLKSVSYPREVESLSGLKTIAVACGVWHTAAIVEVIVTRSSSSVKLSAGKLFTWGDGDKHRLG

SEQ ID NO: 186175 - protein, 118 aa, Zea mays
  unsure (1)..(118): unsure at all Xaa locations
  Clone ID: MRT4577_101385C.1.pep
VVAWFXXVWGFRPRVVALAPLVAAXWPGAPAAGXGVPLXXFCXAPPXXXXCXVXXAGGSFSRPGAVLSFFFPPPRLLAVPLVPASAFPFLLVVCPGVCPCFVLPALLVSPAWRPFSLW

SEQ ID NO: 186176 - protein, 69 aa, Zea mays
  Clone ID: MRT4577_101386C.1.pep
YYNHHPMNMIKSQNLLHTAFNPFTMHPLFDLQLYPNRYHIYIYSLHFNPTYSILHLYIASLLIHENYPT

SEQ ID NO: 186177 - protein, 79 aa, Zea mays
  Clone ID: MRT4577_101387C.1.pep
KKGEPIRFENFKNLANYVIPNFFSKAKKASQKKFFLKILNPRGKCFNVFFNLKPPVVTQFFFKSIPKWVFRPLWFFPPP

SEQ ID NO: 186178 - protein, 91 aa, Zea mays
  Clone ID: MRT4577_101388C.1.pep
SDRIQVDIVSINLCITQKKSKGASNPHLSLILIISREPSNCHCAGTEQLKGGRLMSRVSSLGGAVAMVTKMGTMPVECAKLLLLKTRTMMR

SEQ ID NO: 186179 - protein, 70 aa, Zea mays
  Clone ID: MRT4577_101389C.1.pep
SCCPSAVVFLQVFLALSGAPSFPLGSAVVGSACPPLLWKFISRGPLSEYLWRGSETEGLGRNLPVRSGTC

SEQ ID NO: 186180 - protein, 254 aa, Zea mays
  Clone ID: MRT4577_10138C.1.pep
MASSITSSGSKTLRVLLLPHFATGHIHPFTELAVSLAASSSPNATVEAIIAVTPANVPIVQSLLERHSAATVKIVTYPFPTVEGLPKGVENLGKAATQADSMRINIAASTESLMRPVHETLVRAQSPDAIITDLLFTWSADIADELGVPCVTFHVTGAFSMLAMRHLMMEDAAIDGDDTVTAPPFPTPQIRVPRTELPDLSIFRYVFGKVHSMQAACFGLAVNTFSGLEQQYCDMYTPRVRPALLLCRAATAIL

SEQ ID NO: 186181 - protein, 96 aa, Zea mays
  Clone ID: MRT4577_101390C.1.pep
GQSSIHYLKGGQFCPGTNKNPQAPFFFIKTNFFFLNHTALKAVSHGRSSPFLCLGWGTGSHLLTTQTCFTYITEGNPNMQLPAQGKKGRTSFGKFF

SEQ ID NO: 186182 - protein, 64 aa, Zea mays
  Clone ID: MRT4577_101391C.1.pep
KQGAPARRRTGNAGVQARAGSRQAKKKSLSRGSATAKDRTAPPEAALARAPTETQGAHMSQRVK

SEQ ID NO: 186183 - protein, 65 aa, Zea mays
  unsure (1)..(65): unsure at all Xaa locations
  Clone ID: MRT4577_101392C.1.pep
YIIAXQKLARFPCLEIPCLLITLESCRQLKHCINMLVEEHKFGMSLDLVMCVGLISAGRNDHLCR

SEQ ID NO: 186184 - protein, 53 aa, Zea mays
  Clone ID: MRT4577_101393C.1.pep
RFYEHAGSNWEGLLYVDLVVQTLYRVLDKDMRRIKSEIRACIYLMDFPTTVRR

SEQ ID NO: 186185 - protein, 477 aa, Zea mays
  Clone ID: MRT4577_101394C.1.pep
MAVYRRVVDNILAVVAVPVAAAALVAAARFGPPEELAGRLGEVRPAHLFLAAFVPAAAATVYLMLRPRAVYLVDYACFRTASNCRVPFSTFLEHAKQVPVLNERSIRFMTKLLERSGLGEETCLPPAHHYIPPYKYCTIDAARGEVDLVVFSTLDDLFAKTGVSPGAIDIVVANCSLFCPTPSLVDMIINRYGLRSDVRSVHLSGMGCSAGLISVGLARNLLQVAPEGAHALVVSTETITPNYYVGSERAMLLPNCLFRIGGAAVLLSNSRAKARFRLARVVRTLTGAQDSAYRCVFQQEDDEGHRGINLSKDLMTIAGDALKANITAIGPLVLPASEQLLFALSFIARRVLNRRVKPYLPDFRTAFEHFCIHAGGRAVIDELQRSLGLSDEDVEASRMALHRFGNTSSSSVWYELAYIEAKGRMRRGDRVWMIGFGSGFKCNSAAWECIAPARTAEGPWAESVSRYPVDIPEVLKH

SEQ ID NO: 186186 - protein, 84 aa, Zea mays
  Clone ID: MRT4577_101395C.1.pep
MDHVDKPEDAVPQTFLALILILLSFFFGSVQGRPWTGAGGAVAPGLQELRDPSFFPQVYDFPSALSQTEATVCPGFRLYSYSYF

SEQ ID NO: 186187 - protein, 92 aa, Zea mays
  unsure (1)..(92): unsure at all Xaa locations
  Clone ID: MRT4577_101396C.1.pep
NMTGKEPDGRNIPGTQAQPRAGGGGGDDGGNGAGHGGGGKGGGPRDGGXGGGGGNGGRREGGGGGYGAGGGYGGRREGGGGGYGGGGGGWRD

SEQ ID NO: 186188 - protein, 86 aa, Zea mays
  Clone ID: MRT4577_101397C.1.pep
IYVLSNACRRRHALEVFSNPSSNKLAMRGDARGRRRWFPEIQLAHRSPAREAQTLPLMRARSPHPRDPREGSGERVEGIPHLPGRG

SEQ ID NO: 186189 - protein, 156 aa, Zea mays
  unsure (1)..(156): unsure at all Xaa locations
  Clone ID: MRT4577_101398C.1.pep
SPASLPTPSAVLIIGLRPXRTGSGSDETARASPPPAACTPMDPTXERLKSAFQKLKTKVYDEKPELIEPLKYEQSPKDMGIACSDSRECPTVTLTLQTGKAFTDRKIASVMPPYDXIKYVGTVTAIEYAVRAHKVQVIASIGHSCCGGIRWLLSLK

SEQ ID NO: 186190 - protein, 109 aa, Zea mays
  Clone ID: MRT4577_101399C.1.pep
SPRMSKTFWGDLQKQLYPYLRNANTIRLQTPTHRQRDTHFMLLLRSHYYLYGTQILSAPHLIYCHSLSDTAQISIPTFLHSKSYAAHSTTSSTPKDLPTNPNCEIHFDS

SEQ ID NO: 186191 - protein, 198 aa, Zea mays
  Clone ID: MRT4577_10139C.1.pep
SVSFLLFTKANRSRTLPRSSRTTAMLAHRLLLLLLAVAAASGTAFAKPTAYEALADYDFPPGILPKGVVAYTLDNATGAFTATLDASASGSGSSVCEFSIQGSYSLRYQTKITGKIAPDHLTDLEGVSVKVLFFWLNIVEVTRRGDNLEFSVGIVSADFGIENFLECPTCGCGFDCNDLLMLQKPGAATAKLRLRGAF

SEQ ID NO: 186192 - protein, 65 aa, Zea mays
  Clone ID: MRT4577_1013C.1.pep
SPTQKTLAAVTVSASQVSKIVESVAVMNRNPRVTCYRRKCRMAHFIASFSVRRVLMYVELSTDLL

SEQ ID NO: 186193 - protein, 147 aa, Zea mays
  unsure (1)..(147): unsure at all Xaa locations
  Clone ID: MRT4577_101400C.1.pep
MGVKFLVLLGVVLASLVFQDVAFARELTEANNEDEGKNMKQGGMTELKDEKWGGGYNGGYGYGGGYGGGYGKPGYGGGYGGGYRPKYGRGYRSGYGYGGGYGGGYGGGYGGGYGGGGGYGEGGGFGGGHGGGRYPGEGTXGGHGGWN

SEQ ID NO: 186194 - protein, 94 aa, Zea mays
  Clone ID: MRT4577_101401C.1.pep
PGQAEAAGQDASVGGGEGTGARAAAMVARSGGRGGRRAGWPRPVPPLRRQWRPPPRHGRVAPLSWTGAAPRRPSCRAATASPSSSTPGRTSVTG

SEQ ID NO: 186195 - protein, 137 aa, Zea mays
  Clone ID: MRT4577_101402C.1.pep
MGVKFLVLLGVVLASLVFQDVAFARELTEANNEDEGKNMKQGGMTELKDEKWGGGYGKPGYGGGYGGGYRPKYGRGYRSGYGYGGGYGGGYGGGYGGGYGGGGGYGEGGGFGGGHGGGRYPGGGGHHGGGGHHGGWN

SEQ ID NO: 186196 - protein, 117 aa, Zea mays
  Clone ID: MRT4577_101403C.1.pep
RNRRGARQWRTAYAVDGWMTGGRLWMANPWIGGLKGTSSPSFTALGLRRPGRWTGGRDEDGLKEQMTWRGQAAARTRAASVRKQLPGRWTSLLGMWAKFYVVKTPWCKKNFGLRPGP

SEQ ID NO: 186197 - protein, 49 aa, Zea mays
  Clone ID: MRT4577_101404C.1.pep
LYLLISPMEKVGIMIRVSKRLQTRSLVQYVSVCVGGQDDQCICQRPQGA

SEQ ID NO: 186198 - protein, 41 aa, Zea mays
  Clone ID: MRT4577_101405C.1.pep
LETKALLLNVSGGDGHRKRFFIQIQQAGSCRPTRDCGSKIK

SEQ ID NO: 186199 - protein, 102 aa, Zea mays
  Clone ID: MRT4577_101406C.1.pep
ESSLFMNYSDRYSCQDTTNSAMYGNEIDVSHETTSMCNDRPADNRGGGAYLLLRLHDEHFTDDGTIVISCYVMNLRACWHPNINLAAEYQPISALQLRLRNK

SEQ ID NO: 186200 - protein, 128 aa, Zea mays
  Clone ID: MRT4577_101407C.1.pep
SRGNNAGDGGPTLFAHKLPMGAQKAQKLKNFPWLTQRGPPGGTSRRAGPIGAFWVCPMLGRGVFKTKPQSPFRLGRTKKAACHVPFELAPSLALFFFPPKKKKKKKKKKKKKKKKKKKKKVLCVVTTA

SEQ ID NO: 186201 - protein, 112 aa, Zea mays
  unsure (1)..(112): unsure at all Xaa locations
  Clone ID: MRT4577_101408C.1.pep
MHSSVLLIMQQLLPFRQLTVAYPQQLLPFNQLAALNSTAYXQHHQLXPFSLARSCEPXSFFTQQQLLSFCSLEAPSFGTLXQLLLLGPFKQLDLSNPAAFXYQHAIIGSALF

SEQ ID NO: 186202 - protein, 80 aa, Zea mays
  unsure (1)..(80): unsure at all Xaa locations
  Clone ID: MRT4577_101409C.1.pep
MATGATEATKTTAPAHEQQANGNGNGEQKTRYSEGGHKSLLKSDDLYQDILDTSVYPXEPESMEELRQITCKHPWNLMTT

SEQ ID NO: 186203 - protein, 161 aa, Zea mays
  Clone ID: MRT4577_10140C.1.pep
RPVGLHRFKEPGLYIQYSARAPEKAAGVGLQFFLRVVLARPSMLRVVGALDPLVALPDEVPMGPFVGTFPGGTTKFAPAQPGVAGSLKTHAEAGGRQGNRRVMSPPRPRSVLCGCRYVSPVYWSDSPPTLCWCISDIAYLLVSNARKQNDQKYKKIKNTRT

SEQ ID NO: 186204 - protein, 135 aa, Zea mays
  Clone ID: MRT4577_101410C.1.pep
MRNGYEAAVVTVTVTEHTGRDGRKCNNRLHGLQLHPPLRQLLLISCKLLLYLTAHDFPYVAEGMKVELSVSLRSITTRGPDATGHGGALSGEGDEGAEVFEAKAHGVVVDHLAGGDCTDEAEKVLQKSGALHRCS

SEQ ID NO: 186205 - protein, 39 aa, Zea mays
  Clone ID: MRT4577_101411C.1.pep
VVGSDAWSASWRSLNAVGRSESRSGIVAGIGGHKRHRRI

SEQ ID NO: 186206 - protein, 162 aa, Zea mays
  Clone ID: MRT4577_101412C.1.pep
MAMMKKKGGAATTAVAAVALVLLAAAAVRADVNCADVDASLRPCVGYVTGKEAAPAAECCAGVKRIRAMPSGPAERRQACECVKQAAANYQPLNADAIRDLPAQCGAPLPFPLTLNFDCTTCVYIYILGLGPPWRKASPFAAPRAIFILLDQGTQGPSAPQQ

SEQ ID NO: 186207 - protein, 54 aa, Zea mays
  Clone ID: MRT4577_101413C.1.pep
GQAADTDMTTQLIYSNLELHSLYTGRTSRVVTANRMLKQMPFRYQGYIGAGLVL

SEQ ID NO: 186208 - protein, 144 aa, Zea mays
  unsure (1)..(144): unsure at all Xaa locations
  Clone ID: MRT4577_101414C.1.pep
MAMMMKKGGAATPAVAALALVLLAAAAXGLAAAAVRADVNCADVDASLRPCVGYVTGKEAAPAAECCAGVKRIRAMPSGPAERRQACECVKQAAANYQPLNADAIRDLPAQCGAPLPFPLTLNFDCTTCVYIYILGKCPYVATE

SEQ ID NO: 186209 - protein, 103 aa, Zea mays
  unsure (1)..(103): unsure at all Xaa locations
  Clone ID: MRT4577_101415C.1.pep
LVGPPEAPRLPAQHGAPPAPPXHPRRRRPRSERPPPSRPPPSGTPRRPPPWGPPPGRGDRTGAGVNRRRPPPPFPSSPXPPPXPSARFFRPRRGPPPFPVVPN

SEQ ID NO: 186210 - protein, 69 aa, Zea mays
  unsure (1)..(69): unsure at all Xaa locations
  Clone ID: MRT4577_101416C.1.pep
SFLGSLHCRVNSIGGMASPTFSPSFTVPLLLQNITTFFNHLMKPFTIIPFFLLFFFLFSKISHYYXQVG

SEQ ID NO: 186211 - protein, 102 aa, Zea mays
  unsure (1)..(102): unsure at all Xaa locations
  Clone ID: MRT4577_101417C.1.pep
MRRITSLTTLGRPRCIAHDMTHAFFGFLGXACALVFSCLVAEYGTAKSGVGVSSMGVMRPELVMKSIVPVVMAGVLGIYGLIIAVIISTXVYPKVHSYYLYD

SEQ ID NO: 186212 - protein, 341 aa, Zea mays
  unsure (1)..(341): unsure at all Xaa locations
  Clone ID: MRT4577_101418C.1.pep
RPGTTSLLPIGCIKIGLSRHRALLFKILADSVGIPCKLVKGSNYTGGDDDDAINIIKMDNEREFLVDLMAAPGALIPADILSWKGNSLNSNRKLGLNRTAGSSSTVDANVDPTVLPLEPKGGQLPLFSSGDWMSDIDSGYEAAEIAASTQTSSGXTISVSAGSVFGSSWMLVNHDQSDGPSTSAGTSSQQKVVPQSEHQRNLNRLPDLQEIPESKYLFADLVPSGDNKSKKTSVPFNGPVSNAVGRSNYSGSISSAVPGTGGSSRTKSNSGPLNKHGEPTKRLSGPQSSGVNPMAPSELWPSTSCTSYNWANYIRSYHIWSVEFVWCSKESIRPLLILVYQ

SEQ ID NO: 186213 - protein, 100 aa, Zea mays
  Clone ID: MRT4577_101419C.1.pep
LTTCPVNRQQAAPTNSRQSEPTKNNATQGNKAKSDTSHSILKWNPYMRKKWPQNEQKGVPEKDQAPIMGRHKHCSMQSHKHCARPDNVILKTPKMCFSIT

SEQ ID NO: 186214 - protein, 70 aa, Zea mays
  unsure (1)..(70): unsure at all Xaa locations
  Clone ID: MRT4577_10141C.1.pep
FVPCSSLLVLSGPLALWVLRSVSSVCCCQGCGCWCPPRCLFLPLCPCPCRPIIWCLXSRPCLSGRCSPPG

SEQ ID NO: 186215 - protein, 124 aa, Zea mays
  Clone ID: MRT4577_101420C.1.pep
PLYRLGPLIPKRALSAQRRSPSDHSITASTDRSPLTPSDLLRCLLPTTADWPYLLRHSSLALSTARTRLYLPAARLPLVPRRHPTRAPPSPRAGSSTPLSAPIPLWPSCVLLLHRPADKPSMQT

SEQ ID NO: 186216 - protein, 92 aa, Zea mays
  unsure (1)..(92): unsure at all Xaa locations
  Clone ID: MRT4577_101421C.1.pep
ARAYHSSHKKXPRXVXIITLRFXXPXXLILLGLVNSSPARLLISRAEHLACSIASNPDVSVYYQLTSQLCEQPQLPPGQPHHPLLQIQGGGG

SEQ ID NO: 186217 - protein, 149 aa, Zea mays
  Clone ID: MRT4577_101422C.1.pep
ISKKKKKKKKKKKKKKKKKKKKKKKKKKKKTKKKKKKKKKKKVFSFPGRPLKGAIFEIFLHLGGRLTFLLGGPFPLLGSVFTFNWPCFSKFGFGKTLAFPNLIPLKKIPFSQVGVLPKRPTPFPFPNFCPPYLAIGPPFYRPFNPGGLG

SEQ ID NO: 186218 - protein, 73 aa, Zea mays
  Clone ID: MRT4577_101423C.1.pep
PRNTEQRDFFSIPPIRGERDQTVLAPFDSPNIKPFLRRGENSDCEFITTAGGDRLGLERRFFLGHYFAPLNRK

SEQ ID NO: 186219 - protein, 26 aa, Zea mays
  Clone ID: MRT4577_101424C.1.pep
LILSANDLHSDKYCPCLVCDFGTTSQ

SEQ ID NO: 186220 - protein, 32 aa, Zea mays
  Clone ID: MRT4577_101425C.1.pep
PFNYNAITEKTLTLPMLIAFHHMPLSKSAVIL

SEQ ID NO: 186221 - protein, 41 aa, Zea mays
  Clone ID: MRT4577_101426C.1.pep
WVTRRAFNLRSAESKHGLQRFKYYQTEQPRGAQPKRICYCQ

SEQ ID NO: 186222 - protein, 79 aa, Zea mays
  Clone ID: MRT4577_101427C.1.pep
SSGNNAEYFFPFLFLNMSWKGVFKMMNTRCTILPLGLGSMPRDYSVFFTLLSCKSISPTGTFHVPSAWHCLDVISSLAT

SEQ ID NO: 186223 - protein, 52 aa, Zea mays
  Clone ID: MRT4577_101428C.1.pep
GEKKNWPLAMVTTQSTRGKCTNGRRLEKNIFLTISNLHHLAEYQTLVALAMS

SEQ ID NO: 186224 - protein, 123 aa, Zea mays
  unsure (1)..(123): unsure at all Xaa locations
  Clone ID: MRT4577_101429C.1.pep
PTRPRVRMIDQIKREISVMRLVRXTNVVDLHDVMVSIIKIYFAMEYVRGGELFARVASCRLNEDAARTYFHQLVGAFDXCHSRCVXQRDRNPENLLVDHQGMLKVSDLRRSALMXCQHQDRLL

SEQ ID NO: 186225 - protein, 28 aa, Zea mays
  Clone ID: MRT4577_10142C.1.pep
DRSLHVRVGAFNWLGRVSYSASGAARGQ

SEQ ID NO: 186226 - protein, 61 aa, Zea mays
  Clone ID: MRT4577_101430C.1.pep
AHYSVFRLAFFFSKEKKCVADVINFVTTRKGTRKLFYDQGLLDYTHETVLSTYLQAVGNCY

SEQ ID NO: 186227 - protein, 56 aa, Zea mays
  Clone ID: MRT4577_101431C.1.pep
RSGRTTTGREQRALRYFVFDRVTGTDGHTQRGGYVLGHEGALIIIITIKGSFLPGG

SEQ ID NO: 186228 - protein, 79 aa, Zea mays
  Clone ID: MRT4577_101432C.1.pep
MGQMNLDTFVYFQMVPSCQNLVRELLISASAVDLACIAGRHKSGPSIAIDMTDLENALGTPHGLLFQQQWPTLLRAEEG

SEQ ID NO: 186229 - protein, 70 aa, Zea mays
  Clone ID: MRT4577_101433C.1.pep
IPGLLIPRHGDPARQLLVSVFGDSDSEGFLQCRAGRDSTVGCGGFGQLLGCARRNMNAEAAFRGLYVAIK

SEQ ID NO: 186230 - protein, 61 aa, Zea mays
  Clone ID: MRT4577_101434C.1.pep
TFQIHSSLAPIYTILPNKLIIRNEAQILSNNTMHYDSYSVNVNSYSYLVLAITSYHLKSYS

SEQ ID NO: 186231 - protein, 148 aa, Zea mays
  unsure (1)..(148): unsure at all Xaa locations
  Clone ID: MRT4577_101435C.1.pep
FAAKGCSGWGVGRQPVLRALLYSPRLHARRVQHVPARPQGLRAXNPLKPDATVLVAGSNTNSAYNFSGVDFQTEVRVERFTPPYLAPERAANRPAIDVATVPGDGMAYGAKFTFQFSTPVQAVAEPDLKVTMYAPPFTTHGYFMNQRL

SEQ ID NO: 186232 - protein, 72 aa, Zea mays
  unsure (1)..(72): unsure at all Xaa locations
  Clone ID: MRT4577_101436C.1.pep
MSGFGHHHHNEPASPAXXPNQVFKIYCRANDNYCLAVRDRALMLAPVKLKDDQPHLYKDMRLSSRDKDEEGM

SEQ ID NO: 186233 - protein, 618 aa, Zea mays
  unsure (1)..(618): unsure at all Xaa locations
  Clone ID: MRT4577_101437C.1.pep
MGPLLRAAALSVALLALAAVGEAHSATEFLNIFKPRNEHDYFHNANQEEDVMPRASDQQNLITAPVTKSGLMKVPPRSAPTAVAQDTVVLPVDSAAGFPGAWSIISENAGVSAMHLVIMRSDKAIMFDTVTTGPSLLRLPKGNCRLDLRSKQVGAKDCAAHAVEFDYATGGVRALKVLTDVWCSSGALNENEGGSETNGSRVWHDNTQVSTGVAGPLTTARSEDVPEGRWYGTQQLLPDGRSIVLRXSAALIFGATHICGXANAQAIPLQILRDTTDDVENNLYPFVHLLPDGTLFIFANDRSILFDPRNGQVVREFPVLPGGGRNYPASGMSALLPLDLRRGDVLSPEVIVCGGSPKNAFTLGESNTFPPALKDCARINPLKPDARWALDQMPVARTMGDLLILPTGDLLILNGAAKGCSGWGFGRQPVLSPLLYSPRQARGSRFRALAPTTIPRMYHATSAVLPDATVLVAGSNTNSAYNFSGVDFQTEVRVERFTPPYLAPERAANRPAIDVATVPGDGMAYGAKFTFQFSTPVQAVAEPDLKVTMYAPPFTTHGYSMNQRLLVLSVTAFAANGQRYTITVDAPGKPELAPPGYYLLYVIAKGVPSKAAWVKVHK

SEQ ID NO: 186234 - protein, 73 aa, Zea mays
  Clone ID: MRT4577_101438C.1.pep
KKKEIFSWNGQKNFGGLPKVIQKREKEKGQFLGKGLTPGIFAIFTRSVRFARGRFYIGMAKKRGETDLILFIN

SEQ ID NO: 186235 - protein, 228 aa, Zea mays
  Clone ID: MRT4577_101439C.1.pep
MYGLQVVMRRMVMIMLMVMKKRKREKTTWADSGALGPALYSLGPTPTPRGPVPLARTLLTCMRARGVGSFFFLRCHRVTPASRKWDRAAGAPWRFHSIRKPHRDPGLRPPPLCAGVYPPCALQQACAIRDSRGRLNGLHRNRARVESGLAAHHLYPDPPVAHIYPRCARLSHNPSPVLVFDIESTGFTIAAGVRGDLPPPPWNIVPACAPVVMVAQDAPPLPNDGAGV

SEQ ID NO: 186236 - protein, 57 aa, Zea mays
  unsure (1)..(57): unsure at all Xaa locations
  Clone ID: MRT4577_10143C.1.pep
ATLFAXRVXYQKAKWCRIRTYSXKXSKGVLKGSVITSTKGAGXXVGKRSFIXSNXST

SEQ ID NO: 186237 - protein, 62 aa, Zea mays
  Clone ID: MRT4577_101440C.1.pep
MADKCGNCDCADKTQCVKKGDGYGIVMVDTEKSHFEVQEAAENDGKCKCGASCTCTNCTCGH

SEQ ID NO: 186238 - protein, 129 aa, Zea mays
  Clone ID: MRT4577_101441C.1.pep
DISRVRSRPIGRARQPGDRRVRVWVMGIHMYTSSSPAFMSMGMQHEAVPLPCAMARGPCASVPGRHVGSCPSSPPPSGGTSPPAVPPSMVAAHSRECLSQVRSGVERRVSSGRRPVSLCLCLCPRCSPT

SEQ ID NO: 186239 - protein, 173 aa, Zea mays
  unsure (1)..(173): unsure at all Xaa locations
  Clone ID: MRT4577_101442C.1.pep
SPIRPPLVFACGVLTGTCDQTDYGATXRLITQDYYTXHTPKYGIGGRSTNKDITAHIISASITGDMALAAADSHDWPRYGLETGTTNYAAAYXTALLMARRVLKTRGLHKEYVCHADATGEDFSVEPADERRPFRALLDVGLIRTTTANRVXGDINGALDGGPNIPHREKRLA

SEQ ID NO: 186240 - protein, 99 aa, Zea mays
  Clone ID: MRT4577_101443C.1.pep
YPLEPAREKKKKKKKKKKKKKKKKKKKKNQKKKKKKKKKKKKKKKVFFFPLSWALPFPNLGGPLGGGKLGNKSSLKGKGGAQRLILGPPKKKKNGGVLR

SEQ ID NO: 186241 - protein, 138 aa, Zea mays
  Clone ID: MRT4577_101444C.1.pep
GVVSRPGIGEEGARSFYFHSMAPRWHQAGAEARRPRRRPRCTAWMPGTSGSCCRGSRAPARPAPPPRRTGPATLAAAPEGAGELRPWPRRSSRARFGIAVLTTRPGFSAPLLSPESYGAPGFCGPAGYPHHGSTGPLL

SEQ ID NO: 186242 - protein, 118 aa, Zea mays
  Clone ID: MRT4577_101445C.1.pep
MPMCLVLEYSMSRLMFFLVRVYPQWSQIQVACASKALVVSYRSLCSAIVLPSFCTICVNMSRCWSVSLWHTYRCWPSASSSVDTETTRMVSSLPVMCSSGVSLLLVRDTTELRAASFY

SEQ ID NO: 186243 - protein, 101 aa, Zea mays
  unsure (1)..(101): unsure at all Xaa locations
  Clone ID: MRT4577_101446C.1.pep
MSFTGTHATCPACDWTVHVIAVFMAVGCIYHIGCFKCSXCIGVLSMCRSSSMDGVLYCTTXFDQLFKETGTFSYTFTPSAMSIDDGEVTWCSTNLSSAFSG

SEQ ID NO: 186244 - protein, 748 aa, Zea mays
  unsure (1)..(748): unsure at all Xaa locations
  Clone ID: MRT4577_101447C.1.pep
MAQWLTGSTLAGGRRESGDRGLASPAKQTSIPRSGSFNEVCSVLSEGRTGLGKAWLAGLRWQGLGWPRTRRARANAGEFELRLSSVQQLLYLAQAMIIRFHDLLIPLTSRVPIVQKGFALGFWEILPLDVHDKLGHDIQDGWHLLRTLNSKFEILCSNYPTCDSRLNRLPSFSQRVVTAATDNWRYGALRERQKNLQPLLKALEELREGGLTTAGVVASIHRRRVLPLTERRLPLWEMTPGVDLEGLQMSSDPLPADDLHRRVADTVGKLDAGAFSQLSMRPDRGCVSLVGFHKPSLPPVLEDAVDRAARRVATEKRKEKKDTKKARARERMRARDALERLHRRQERDGLPRELSPETPDDDDDDEDDDEDDNMAARLGPSPDLRLGQGSSSQPPSGLAPSVSGAGTSGSRSEERGQAKGVLDPLAEVVEVTPGSQAESPVPQESLPVPTAQEGGPRVVVAAPGQSVPLVPRAPKARMVPKPAAGLTSVPAFLQDAPKRGAQAAQVVVGRAPEADSSVGAAVVPRETAGAAAASSPPDALPALAPASAEAVAVLAVEPPVAADAEMAEASLLDASEEXGAEPRPVLGSGNLVPARRSPDGRRQSLRFWTSGASDPLFVLDDEREEQSWDELXDLTDLSAAKSSFIRREADVWGSLRSLRTTLTGATERLSQRSAEVADLRLLCVDLGAEAAAARAEAQRVSEGYCPSAVLATTFKGEILPLVPSSEAGADLAEGGDEAEGAAPSPGDA

SEQ ID NO: 186245 - protein, 338 aa, Zea mays
  unsure (1)..(338): unsure at all Xaa locations
  Clone ID: MRT4577_101448C.1.pep
MADRVAVIPPRDPWPFSTVTVDDPEALVADGLLRPLSGDPQSEWIAPPSGAAPSLPLGYVLSFVSFHERGFRVPASRFMRAILHFYGVELHNLSPNSIVQAAIFAAVCEGFLGIDPLWDLWTHLFSAEPFALTTGERRVRMAVRAGGCILQLRQVRAQQYIPAILVSSNKGWQRRWFYLQNDDGRLPSFSQRVVTAAGTNWRYGAPRERQKNLQPLLEALQVLRDGGLTVAGVVAAIHRRRVLPLTERRLPLSEMMPGVDLEGSRMSSVPLLADDLHRRVVGTVGKLDAGALTQPSMRPERGCISLPLSGLAPSVXPGPRHQGPGPKNRGRPRGYLTP

SEQ ID NO: 186246 - protein, 278 aa, Zea mays
  Clone ID: MRT4577_101449C.1.pep
MVARLGLSPDLRLGQGSSGSRSEERGEAEGVLDPLAEVVEVTPGSQADPPVPQEPLPVLTAQEGDPRVIVAAPGQSVPLVPRAPEARMVPKPAVGLTSVDLTDLSAAKSSFIRREADVWELESALDESTKALAQAAEQRDADHVAMSEAISAFCRVFGLDDVPSGSSPQSRLQALGDHARGRLREALHHGVRRAFAVLASHYDVDLERASEGYCLPDEDEAALVEVQRLDAATAGPSAVLATTFEAEILPLAPSSEAGADLAEGGNEAEGAAPSAGDA

SEQ ID NO: 186247 - protein, 50 aa, Zea mays
  Clone ID: MRT4577_10144C.1.pep
IRHSRLSSAFASNREGSTSRPGKRELCIRTTHQKRDQLDANVTSTSKRQD

SEQ ID NO: 186248 - protein, 123 aa, Zea mays
  unsure (1)..(123): unsure at all Xaa locations
  Clone ID: MRT4577_101450C.1.pep
TARAITTLNYDLVAAAHIASDGSVATPAKVTQKIGTIPEHILYLAGVDETMFGLRKSKGYTXDTRLGNWKLGIGAARIADTLPAQYXPKKFPQNRHYLLDCIDLYVVLNGELLILSYTKEKDA

SEQ ID NO: 186249 - protein, 89 aa, Zea mays
  Clone ID: MRT4577_101451C.1.pep
MAQWLTRSTLAGGRRESGDRGLASPAKQTSIPHSGSFTEVCSVLSEGRTGLGRAWLAGLRWQGLGWPRTRRARANAGSPVGYLFSSAKS

SEQ ID NO: 186250 - protein, 94 aa, Zea mays
  Clone ID: MRT4577_101452C.1.pep
KHKTRGFTCPIVASKITQNNPPSILPPGLPIFFPTNPTAFNTDIRNDFYLGTTKILLGQDDLTRRLKKQKKKTPHVVSSFSQVPGQGRAGPRLF

SEQ ID NO: 186251 - protein, 566 aa, Zea mays
  unsure (1)..(566): unsure at all Xaa locations
  Clone ID: MRT4577_101453C.1.pep
MRPDRGCVSLMSVRSFFLLVSDCPWFSQPRLFARLQEVGFHKPSLPPVPEDVVDRAARRVTAEKRKEKKDTKKARARKRMRARNALERLRRRQERDGLPREPSPETPDDDDDDDDDEDDDMAARLGLSPDLRLGQGSSSQPPSGSVLSVSEAGASGSQPEEQWQAEGFFDPLAQVAKVTSGSQAVPPVPLESLSVPAAEEVDPRVAVFAPRRTVPSAPWAPEAGMAPKPAAAQASAVPAGAEARGASPQARLVVARSGKRRHGSTGLAPRKALKTAPASAAGVAPGLDGRLASAQGAPEQGVQSAQVAVGRAPEADSSVEAAVMPGETAGAAAASSPLDVLPALAPASAEVVAVPAMEPPVAADAEMAEASLLDASEEXGAEPRPVLGSGNLVPARRSPDGQRQSLRXLESALDESTKALAQAAEQREADHAAMSEAISAFCRVFGFDDVPSGSSLQSRLQALGDHARGRLREALHHGVRQAFAVLASHYDVDLERVSEGYCLPDEDEAALAEVQRLDAAAVGPSAVLATTFEAEILPLAPSSEAGADLAEGGDGAEGAVPSSGDA

SEQ ID NO: 186252 - protein, 52 aa, Zea mays
  Clone ID: MRT4577_101454C.1.pep
ADCRRSLSRRACSSPGSVQPWSCCRHCSPWLNLLVRHCFVATSFAVEPHCPS

SEQ ID NO: 186253 - protein, 347 aa, Zea mays
  Clone ID: MRT4577_101455C.1.pep
MGDRVAVIPPRDPWPFSTVTVDDLEALVSDGLLRPLSGDPQPEWIAPPSGAAPSQPPGAGESSFIRREADVWGSLWFLRTTLAETAERLSRRSAEVADLQLLCDELGAEAAAVRAEAQRRQSELGQALGERDQSLGRAAEAESRAEALGGQLAEASARAGALATDLAVAVRSAQSAQATVLDQRARAEGLESALNESAKALAQATERREADHVAMSEAISAFCQVFGLDNVPSESSPQSRLQALGDHARGRHHEALHHGVRRAFAVLASHYDVDLERVSEGYCLLDEDEVALAEVQRLDVAVAGPSAVLATTFKAEILPHAPSSKAGADLAEGGNEAEGATPSPGDT

SEQ ID NO: 186254 - protein, 104 aa, Zea mays
  Clone ID: MRT4577_101456C.1.pep
KFPPRRRRFRQGRIGCQKPPPPPGLLKFQKGGWLVPCSRSPFLPIVGGFFFLQTPFFFFFFPHCYPWVLFLPPVIPFFIFYPPRFLPSEPCCNLFFRWFRGPPP

SEQ ID NO: 186255 - protein, 44 aa, Zea mays
  Clone ID: MRT4577_101457C.1.pep
ECLAKKKKKKKKKKKKKKKKKKKKKKKKKKKKKKKRKKKKRKQK

SEQ ID NO: 186256 - protein, 87 aa, Zea mays
  Clone ID: MRT4577_101458C.1.pep
GVAFLFFTVLLLMHMINGPVLASSSNIFWCFCTFINCFFRSVREAKLLSSKIFPLAARTRGQPEKNGPRIIIRLCFKGPHRDVVCYR

SEQ ID NO: 186257 - protein, 55 aa, Zea mays
  Clone ID: MRT4577_101459C.1.pep
RFSLSETVAVSPTRISGLTLCFLLGRSVTDLTIVLRQPRLLWGSMVADAYKHLVP

SEQ ID NO: 186258 - protein, 111 aa, Zea mays
  Clone ID: MRT4577_10145C.1.pep
TRTLTAAGRHLSFTRRRNNAEGYSVPPPPLLHVWYIPTSFETQQTAKPIYLTRDREEVTHSTAITDPGHTTVVFPVVTKDEERVRTPTFKATCTPTFYYKLHEVEETVLIQ

SEQ ID NO: 186259 - protein, 91 aa, Zea mays
  unsure (1)..(91): unsure at all Xaa locations
  Clone ID: MRT4577_101460C.1.pep
XXPNCRCLXLRLXXSXXXPLQLXXMKXVSREGXVNPCDVSSLXRXLGLFXVVCXSRRVXHXTXRXXWXXXGQSVAXKEVFCGIKXXIPVYL

SEQ ID NO: 186260 - protein, 150 aa, Zea mays
  Clone ID: MRT4577_101461C.1.pep
MRRKGSDCTRISPAEITPMISLASTRRSAGRTASPDRDREEERPRQRRVRGACGSRLLRTARWTAARFYRRARVSIARAFRPPSTTAAKRAQAGAGAASPDCGTPARRRSSRRQQQSSAPTTVVVVDDSHKSEAVEECIRFMNSSSRKYR

SEQ ID NO: 186261 - protein, 64 aa, Zea mays
  Clone ID: MRT4577_101462C.1.pep
GNKPIFPTRGHAADFWWFSTQGWLISNGWPPKGKKDVMFFFLGQAALATYLGLRGGQGFKGNLN

SEQ ID NO: 186262 - protein, 113 aa, Zea mays
  Clone ID: MRT4577_101463C.1.pep
ALAASFPVPPLSEEAGARLKLAAGPSSLGSSNFFGLADLRRAGGPAIPTVQKKFGVGCSGRRAKGVVAMVGPGRFFVGGNWKCNGPKDSVGKLVFELNAATLETDVNVGGAPP

SEQ ID NO: 186263 - protein, 126 aa, Zea mays
  Clone ID: MRT4577_101464C.1.pep
PDSKPFMCVTADSVPIRALSWAPYISEESTNTFVTAGEDGLKFWDLRDPYHPLWELTTAPRAVLSLHWLKDGRGIIISLEDGTLKFLSLARIANDVPATGRPFSGTKTQGVATYQLSEYLIWSVHA

SEQ ID NO: 186264 - protein, 99 aa, Zea mays
  unsure (1)..(99): unsure at all Xaa locations
  Clone ID: MRT4577_101465C.1.pep
FCEXFFFFFFFFFFFFFFFFFFFFFGGKGVAVCTWFCFVSYNLQHVDLQMQFGGPPQKGTAKRLLWILSLGAEQQNTNLAIICTWTCQPFVSGFWVNNQ

SEQ ID NO: 186265 - protein, 56 aa, Zea mays
  Clone ID: MRT4577_101466C.1.pep
RKLLELLPNMDNHTNTCHMLDLAVDYINDLHNQAKVLKDSHDNCTCSACMNQQHFC

SEQ ID NO: 186266 - protein, 83 aa, Zea mays
  Clone ID: MRT4577_101467C.1.pep
ETVCPKGNCPNLTIFLKRVPCQSVNRKKPNLFWVVCLLNYGFFNTKIVGPLFEQVLLCTETLNCLEMNIPGLFLKINFGLGSP

SEQ ID NO: 186267 - protein, 84 aa, Zea mays
  Clone ID: MRT4577_101468C.1.pep
RRQHSPASGGFPWGGPSAPPLVAPRSPGGWAPSGGSSPVGWQGTWPSTACSCCCNKNVLARGGSCLRRAHNKEVVLAPPRGPFV

SEQ ID NO: 186268 - protein, 30 aa, Zea mays
  Clone ID: MRT4577_101469C.1.pep
ELMSSEQSVASTHRTDAACTLVNRSPPSVF

SEQ ID NO: 186269 - protein, 79 aa, Zea mays
  Clone ID: MRT4577_10146C.1.pep
CRSDCAALIIDSHTTVGYAGCYSLGMRPTRHTCVLAWVNSWSDVYDLLLHTRDDRTARYSKARYEEIVKEASCYLTKVV

SEQ ID NO: 186270 - protein, 94 aa, Zea mays
  unsure (1)..(94): unsure at all Xaa locations
  Clone ID: MRT4577_101470C.1.pep
LRPAESRRGPGPRYXINICTTYSCVVLSHHDRVEIIANDQRNRTTPSYVAFTDYERLIGDSAKNHVTMNPINTGFDSKRLISKRFSDASIQNDI

SEQ ID NO: 186271 - protein, 160 aa, Zea mays
  unsure (1)..(160): unsure at all Xaa locations
  Clone ID: MRT4577_101471C.1.pep
MGISRDLMHKRLPTGGKHKAWRKKRKYELGRQPANTTLSSNKTVRRARVRGRNVKWRAIRLDTGNYSWGSESVTQNTPILNVVYNASYNELERTQTLTKSVIEHVDADPFNQXYLTHYVTDFGRKNKTPATNNDNAEGHDVEAAAEETNKSNHVTRNLEK

SEQ ID NO: 186272 - protein, 136 aa, Zea mays
  Clone ID: MRT4577_101472C.1.pep
MAQSHSGKAGSMTSILLLFMLLISNTGTTGAQSGVCYGRVGNNLPSPQEVVSLFKQYGFQRMRIYDRNHEVLQALRDSNIELLLDLPNIDLQYVASSQDNANRWVQDNVRNFWNVRFRYITVGNEVKPWDSFAQFV

SEQ ID NO: 186273 - protein, 35 aa, Zea mays
  Clone ID: MRT4577_101473C.1.pep
FRTQGFIPYCFLGHNFVLLLMVLSAGGLGLLVSFK

SEQ ID NO: 186274 - protein, 129 aa, Zea mays
  unsure (1)..(129): unsure at all Xaa locations
  Clone ID: MRT4577_101474C.1.pep
MSKRGRGGSIRNKFRMLLPLPGASTGNCADITGAKNLDMIAXKGIKGXRLNRLACACGGDMVMATVTKGKHDLRRKAMPAVIVRQRMPWLRKDGVYMHYEDNAGVIVHPMGEMKGSAITGAIGKDITDI

SEQ ID NO: 186275 - protein, 84 aa, Zea mays
  Clone ID: MRT4577_101475C.1.pep
KSYLDLQEGRAHRRLTPSTAPQNYNLKTTGNKILSTKLHSKTYPTKEKTLKGMLARGIQGMAVQEAKTLFCRKAYYEWILKIHF

SEQ ID NO: 186276 - protein, 78 aa, Zea mays
  unsure (1)..(78): unsure at all Xaa locations
  Clone ID: MRT4577_101476C.1.pep
LHYRHASIRVCLCVQITGETVGEVKAVAGMHQRKADMASQSDAFIALPGGYGTLEELLEVITXAQLGIHNKPVGLLNV

SEQ ID NO: 186277 - protein, 46 aa, Zea mays
  Clone ID: MRT4577_101477C.1.pep
KKKKKKKKKKKKKKKKKKKKKNKKIKKKKILKKKKKKFFSFGPEPP

SEQ ID NO: 186278 - protein, 50 aa, Zea mays
  Clone ID: MRT4577_101479C.1.pep
SPSPFSLTYYRVLPPTSHRVRLQRPFQIDHPTFPQSPYLPTYIDEPSPNL

SEQ ID NO: 186279 - protein, 52 aa, Zea mays
  unsure (1)..(52): unsure at all Xaa locations
  Clone ID: MRT4577_10147C.1.pep
GCRGGGPSIXPYEGGSPVCARPRLLWPLACARIRSLDSSLPGNPLWALTHIF

SEQ ID NO: 186280 - protein, 56 aa, Zea mays
  Clone ID: MRT4577_101480C.1.pep
ELKISEQAFIGWMSQGHERGSTNVPSYYMNNIAHNTPRTNSINAERISIFSHLALI

SEQ ID NO: 186281 - protein, 154 aa, Zea mays
  Clone ID: MRT4577_101481C.1.pep
THVQYKNPHHFSWFRDTLISPCFEEMGIPICGGPIFLNQNGAIFAFNRKKFLLSGSFSKKKIVQKIFRIKDERNRLRMFMPQAMGWVHFPCKILAPLSSKLRSCYVCKGGFLLGLFFVGVFPKIPVWGLWPPFLDFFMYGLLCPTLFFNNLGLV

SEQ ID NO: 186282 - protein, 77 aa, Zea mays
  Clone ID: MRT4577_101482C.1.pep
APKVKHSFRAWPGTMEEAISFLIGGSSSSSIDSFSCLTLARTQTSYNHIRPAPMGISFSLRQSISYRSEVKLSRFHI

SEQ ID NO: 186283 - protein, 67 aa, Zea mays
  Clone ID: MRT4577_101483C.1.pep
RQAHAGHANDLDELRALNAAAGAAIAGDTQIALKDRRSVQTYELPRKAGSLKLLTDGHKGAAANAHQ

SEQ ID NO: 186284 - protein, 66 aa, Zea mays
  Clone ID: MRT4577_101484C.1.pep
ECYSYLITVMRTVWFQRHEFVGASSVLLKPQFYIIIINILEAHFTLFCISNCVEGTINLKSTDTFY

SEQ ID NO: 186285 - protein, 71 aa, Zea mays
  Clone ID: MRT4577_101485C.1.pep
ICIFRRLSVGDKQINKGQTPQKNPQIRPLATRGARGLRGTGKLGDWGPFKRAGWFHDGPKIWRLGKSSRAF

SEQ ID NO: 186286 - protein, 119 aa, Zea mays
  Clone ID: MRT4577_101486C.1.pep
ETKSASTSEENGYVVLEGTKKSKQDVDSSQLDMFWLMNKKDLHLSYILKSTSFLYSYIIYDSIAQLDSRSINSTFVSSSNADGGDSNINISKRCSQVEENGLEDNITVLYPFNLEPVDR

SEQ ID NO: 186287 - protein, 81 aa, Zea mays
  Clone ID: MRT4577_101487C.1.pep
RMGSQLQLYLSLSPGKSSAGREPAYSPARLTASSTTRMPAADATRQPTGRTDPPTNGSPAPDTSFARGLPIGPISVAWYIL

SEQ ID NO: 186288 - protein, 140 aa, Zea mays
  unsure (1)..(140): unsure at all Xaa locations
  Clone ID: MRT4577_101488C.1.pep
DLTHAILSVAYGMLTGDHCRICDVGDLCALVSSPFQGDITAPHDKPPHRELLYHLHHNXMHEXPAMDDLLSTTLSYERYFSYYSFYELGGLDRDDEREVLTYYAVAPSQRTGQRAQVSLSXLIMPVLLPQLRSSCPLLLP

SEQ ID NO: 186289 - protein, 40 aa, Zea mays
  Clone ID: MRT4577_101489C.1.pep
FKRGCLQVFSYKEHRVRRVYLYVLPTYGISAAADHDVSKN

SEQ ID NO: 186290 - protein, 117 aa, Zea mays
  Clone ID: MRT4577_10148C.1.pep
IITQQTPQQNCVSLYYIHNITLILCFPVLIHSCSPIYYCSFYRVCLCQCKHCSKLPTASINQSIIPISQPYRSSGRQRHTCHTHSGLHFSSPPLPGPPRDLLALLRAHLHQVAFPLT

SEQ ID NO: 186291 - protein, 102 aa, Zea mays
  unsure (1)..(102): unsure at all Xaa locations
  Clone ID: MRT4577_101490C.1.pep
DTHAPYKVESTSNTIATLATTIFSLLILLALSACVANTTLFPLCSHTLIFFLFSPYISSMIALECENPPLXPYMLQHALAASNIPLSHLFQHSPPLYLLHTL

SEQ ID NO: 186292 - protein, 137 aa, Zea mays
  unsure (1)..(137): unsure at all Xaa locations
  Clone ID: MRT4577_101491C.1.pep
SAARGAPPRGXAWGCRPWRGPRWRXVCSVSSGPXXXGXARRRXXAXGRRGXRCGRRRRGPCGACAPPPXXCXXPXPWXRRAXAVXGARAPPAPPXRRAPAPLXVFCSALPPPXGXRGGPLGGCWXVAVVRXGVVRFF

SEQ ID NO: 186293 - protein, 89 aa, Zea mays
  unsure (1)..(89): unsure at all Xaa locations
  Clone ID: MRT4577_101492C.1.pep
ERMVHVAEQYKAEDDAQRDRVAAKNSLEAHVFHVKGSLKPXSLRDKIPEEDMRKMQDKCREVLAWLEHNQLAEKEEYEHQKRELEQSVA

SEQ ID NO: 186294 - protein, 228 aa, Zea mays
  Clone ID: MRT4577_101493C.1.pep
MERRGQQPGDAQQPGKDGAGDSPPPPPPFLEVSCRSSGKVRRFAAGTTARYALHAINRKLGPGAPPALHVEAVRDGEEPVSFGPSAALADYGRGWRLQTVTAHDAPGIHHAPHADTATPLTRELVAVRCFVSVDGVSTMPPVTAYLIALSKRQRNKQGDRQPSKEDADGTETVRGTCIYVAKIVLAFAFLFLLGGSLTYLLEVIPDMLQTASALELPDFFYDPLTENV

SEQ ID NO: 186295 - protein, 64 aa, Zea mays
  Clone ID: MRT4577_101494C.1.pep
VKFIRHFRQPGCTVFSLNWLYLYSILVPSIPKQAPKCRSRNCATVIEFLMNIHGHSFESHVSLG

SEQ ID NO: 186296 - protein, 88 aa, Zea mays
  Clone ID: MRT4577_101495C.1.pep
CSQSSSSLLVGGGLIVRPASSYPIPRGSRSSLCFEPNTRSRVSSTPSFPSLVNVHTDLKIPIKKMVEVRGDLQGRERRARWRGGDRAE

SEQ ID NO: 186297 - protein, 92 aa, Zea mays
  Clone ID: MRT4577_101496C.1.pep
TNNALCSPGSLRLMASPSPTEFSREAARQSLIAISQTIPETPSPEPVKAPISIAENGKLGDGADKFRSKLMSITDLSSDAQPAQCPPEDIAA

SEQ ID NO: 186298 - protein, 42 aa, Zea mays
  unsure (1)..(42): unsure at all Xaa locations
  Clone ID: MRT4577_101497C.1.pep
MFIGSIKLLESDVMRRVERGKVNLGKVAXLCSKFKPPISRQS

SEQ ID NO: 186299 - protein, 151 aa, Zea mays
  Clone ID: MRT4577_101498C.1.pep
MPPKQKVARAPQENIQLGPQVREGELVFGVARIFASFNDTFVHITDLSGRETISRVTGGMKVKADRDESSPYAAMLAAQDVAARCKELGITALHVKIRATGGNGTKTPGPGAQSALRALARAGMRIGRIEDVTPTPSDSTRRKGGRRGRRL

SEQ ID NO: 186300 - protein, 72 aa, Zea mays
  Clone ID: MRT4577_101499C.1.pep
ADLYPIQCCLLGRRTTLCAVLGDARLDNVMKAIDCGELQTGSGLNQEMGLPRPGETRWGSHYKTVVNIIAYD

SEQ ID NO: 186301 - protein, 43 aa, Zea mays
  Clone ID: MRT4577_10149C.1.pep
ITLNFILAQCPLSPYAIDIFILNIRGLVIVIKSSVIQKTINTT

SEQ ID NO: 186302 - protein, 79 aa, Zea mays
  unsure (1)..(79): unsure at all Xaa locations
  Clone ID: MRT4577_1014C.1.pep
DCCGRYARGATPAAIAVTALAARTWLSVWGVRSMQARGFGSDQSENVDRGAGSIREVGGAFGNRDXAEEERYFRALSRE

SEQ ID NO: 186303 - protein, 172 aa, Zea mays
  Clone ID: MRT4577_101500C.1.pep
LGRPGTFVRFPLSPAFSPCARRPPLPLLRIAFPFSCTDLQTKPPKTRASIPSPTEAKHATDHRPRRDHLLYNSSSWPCSSSCIGDCGGVEIRADIVRLLRSLPTIDGLTFTNRRVQQGSSSSVSDRDLRVHSGDTFTADGEDTADLQRREREAGRWGGQVQIEADVHHRPVF

SEQ ID NO: 186304 - protein, 67 aa, Zea mays
  Clone ID: MRT4577_101501C.1.pep
PSPYNPLKSSFFKTFGAPFPQRGLFSKFLLLGGGFFLAYVRGWGSPALFPIKKGLQDPPQPGPRGKI

SEQ ID NO: 186305 - protein, 99 aa, Zea mays
  Clone ID: MRT4577_101502C.1.pep
GPGLPLGGQIPVGRARKKKGGFFSPPLQFKKVFPPGLSFSGGKRERLLLLGIWELPPPFFPGGAMLFGFFRATQPFLFFKTPSGGVSPPSRASREFGAP

SEQ ID NO: 186306 - protein, 131 aa, Zea mays
  Clone ID: MRT4577_101503C.1.pep
RAMTCIHLDERPWGLIRPLSSMKEYLRLSTFLTSSTEKTNYLPGGNLSLFEARASSNFLAPVFMINGCCLSSGIDLKASWHRAPGYGDKFHAYCRTLAMKIYYKGHWAPSETYEGNLLYVKQTILWIPPEH

SEQ ID NO: 186307 - protein, 59 aa, Zea mays
  Clone ID: MRT4577_101504C.1.pep
TELSFLVVSIKTHHQTYLTQFHLHPHTHQLLNQQTRTQLLSTHFLQQTSPFSTPHLPTL

SEQ ID NO: 186308 - protein, 209 aa, Zea mays
  unsure (1)..(209): unsure at all Xaa locations
  Clone ID: MRT4577_101505C.1.pep
MPQDSFRSVVCRSLSKSHPSSSRSKDGSYPEGIQCDAPYVVTLQPTVCRSCQSQDWRPSQSNREGRSILSQRDYVMGSTLSRHFAEDLLRGAMDLQDSLVMLEKFQTVSQSMRQSTKQRRPGNGEESLDVSGIREALFEASIAKKLXVPGSVSSRFDGQLRNSTDELKRVIKDSLYRAKLLSVSLNGEQLGSLSQSSRSTPXSTAVSSL

SEQ ID NO: 186309 - protein, 86 aa, Zea mays
  Clone ID: MRT4577_101506C.1.pep
HKTMRIRKRVAGPVGCLPLLLVERAVTAPAHEPRAKDAHYMACIIARELPHERGLPRRELPGAVLGTRPARRHVRPFVHPEFADPL

SEQ ID NO: 186310 - protein, 58 aa, Zea mays
  Clone ID: MRT4577_101507C.1.pep
KKKKKKKKKKKKEKKKKRKKTKGGRPKSSNLSYTCIARSILFKSVSKLHFSDRRFITS

SEQ ID NO: 186311 - protein, 85 aa, Zea mays
  Clone ID: MRT4577_101508C.1.pep
CGYMFWETCEIGQLITCLENDWRRCGSGISWRNAVSSTYFLVNSAILMIGYARVLAAPSSWGGYCPARSNITLSGRTIFCQARML

SEQ ID NO: 186312 - protein, 120 aa, Zea mays
  Clone ID: MRT4577_101509C.1.pep
MVQRLTYRKRHSYATKSNQTRVVKTPGGKLVYQYTKKRASGPKCPVTGKKIQGIPHLRPAEYKRSRLSRNRRTVNRPYGGVLSGTAVRERIIRAFLVEEQKIVKKVLKLQKTKDKTSSKK

SEQ ID NO: 186313 - protein, 144 aa, Zea mays
  Clone ID: MRT4577_10150C.1.pep
MTVQIAACMAPLLLRPLLAGECEMDEVFDMDGDDSAQLLAAANAANSAQGIVATLLEEYEGIFHDEHLICSLSPESQIEVGNLEAKGNGFHDAENDVDQELDDDNGVERILSGKLSENSGYAGSDLYDYKSREPDYCIGEQVLR

SEQ ID NO: 186314 - protein, 79 aa, Zea mays
  Clone ID: MRT4577_101510C.1.pep
PRVRFVEYDKNSDDTVTWDEYNIQMYDRVIDFDENTALDDAEEESFRKLHLKDKKRFEKANQDSGPGLSLEEFIAFEHP

SEQ ID NO: 186315 - protein, 151 aa, Zea mays
  unsure (1)..(151): unsure at all Xaa locations
  Clone ID: MRT4577_101511C.1.pep
SSRRELFPEVPLLRNIGRVQQTQERSAQDTTHRRNILQIARSSSHDRTSSLRAYTPADVSPSIERLKRATLKLKTKGYDYKRECAEPLKTGQSPRYMVFACSDSRVCPSVTLGXLQPGEAFXVRNIASMGPPYDKIKYAGTGSAIEHAACA

SEQ ID NO: 186316 - protein, 70 aa, Zea mays
  unsure (1)..(70): unsure at all Xaa locations
  Clone ID: MRT4577_101512C.1.pep
VSFVDLRDNRLNGEIPQSITESXNMLSGTIPAHIGKLTELSGLGLANNELHGSIPDSIGNLINLQVSLVQ

SEQ ID NO: 186317 - protein, 237 aa, Zea mays
  Clone ID: MRT4577_101513C.1.pep
GLLNKEPLIYLSLTLACCALPNLALNVVRKLVKMEAYPPVAAWSAILAHMCQTNTGAFLGADLVMELGYLFQNNRVDPRKKSNRPLLSMKPNSFTFNIVLTASLVFGTTRKAEQLLELMPRIGVKPEVNLLIVMAHIYERNGRRDEIRKLKRHVDEAYGLSESEVRKFYDCLLSCHLKFGDFDYAVDMVLDMIRKGKNAKRSLEAAKAVLETVKNRKLYFPYEKADAENHAVLVAKC

SEQ ID NO: 186318 - protein, 70 aa, Zea mays
  unsure (1)..(70): unsure at all Xaa locations
  Clone ID: MRT4577_101514C.1.pep
MGKDDVIESGXGGXEFAAKEYTDAPPAAVIDAXRLGSWSLYGAVIAEFIATLLFLYITVATVIGYKHQTD

SEQ ID NO: 186319 - protein, 42 aa, Zea mays
  Clone ID: MRT4577_101515C.1.pep
VLYKRNVFKVCLCEFFYVCSEVMHFVQPVLLSLMIDQEYQLV

SEQ ID NO: 186320 - protein, 61 aa, Zea mays
  Clone ID: MRT4577_101516C.1.pep
TKTFWKAYKVLYNFGIIIIMRFDSLKGQTVLNFNYVQIWTEFDYLLQKSITGVSEIQIRRS

SEQ ID NO: 186321 - protein, 186 aa, Zea mays
  Clone ID: MRT4577_101517C.1.pep
MEEAKVVESKDGTISVASAFAGHQEAVQDRDHKFLSKAVEEAYRGVDCGDGGPFGAVVVHNDEVIVSCHNMVLKNTDPTAHAEVTAIREACKKLGKIELSDCEIYASCEPCPMCFGAVHLSRIKRLVYGAKAEAAIAIGFDDFIADALRGTGYYQKANMEIKQADGNGAMIAEQVFEKTKEKFQMY

SEQ ID NO: 186322 - protein, 175 aa, Zea mays
  unsure (1)..(175): unsure at all Xaa locations
  Clone ID: MRT4577_101518C.1.pep
QSLHACVCRAAIERSTYXRSDIDLXDTHARQNHFSGPMTADPIAMYHTDSIITSTCQETDGSAGTGGQDEXHILFIFPGLYRGQHGLDGQDTKSNIXVELXAYMSGYYPYTETXRTLTACTPEIEELIYSNIDNCDPNYKAYDRKTAIICSMSRXISLGLNMTSXQDMHGLNARL

SEQ ID NO: 186323 - protein, 216 aa, Zea mays
  Clone ID: MRT4577_101519C.1.pep
MEEAKVVESKDGTISVASAFAGHQEAVQDRDHKFLSKAVEEAYRGVDCGDGGPFGAVVVHNDEVIVSCHNMVLKNTDPTAHAEVTAIREMWNDSFHLNIQFARFKFSSTVDCMELDAFKACKKLGKIELSDCEIYASCEPCPMCFGAVHLSRIKRLVYGAKAEAAIAIGFDDFIADALRGTGYYQKANMEIKQADGNGAMIAEQVFEKTKAKFQMY

SEQ ID NO: 186324 - protein, 107 aa, Zea mays
  Clone ID: MRT4577_10151C.1.pep
FPWVAALPLILFLGPPFPKAIVPGFFILKGPGPNCGAGTPLFFGAKPSVSRGGSTPKVKCANSGPHLGYYSKFRGVPLPQASNALTLEQGGPEACEFYKIKGAGRPV

SEQ ID NO: 186325 - protein, 49 aa, Zea mays
  Clone ID: MRT4577_101520C.1.pep
ANASTTSSSGGVGRILNYGTLFTNARATWAHSSPESKASADAYAALAYP

SEQ ID NO: 186326 - protein, 87 aa, Zea mays
  Clone ID: MRT4577_101521C.1.pep
NGGPCPIPKRIPGENPLIYTLMRRLFNRNCSKLTLHFSERGLDGKKPLSSSLPGKQAPNSRYSMAINCRPLENLSLDHWLPPLKLFP

SEQ ID NO: 186327 - protein, 182 aa, Zea mays
  unsure (1)..(182): unsure at all Xaa locations
  Clone ID: MRT4577_101522C.1.pep
MGLDVGEIGMGLDLGLDLRLFAARSAGGMAKGAAPAGIQSCIRSLEVERRKIEVFRRELPLCLRLLADXGLEASRXLSCVIDELKLEAAKRGEDDDGATVVDDGDKRKWMSTAQLWVDSDAKSDESDKEQQSEITSPPEPCGAPTPIGATTPSLGSEEQLRQLLSYRCCAQAVYPRDSVVAA

SEQ ID NO: 186328 - protein, 106 aa, Zea mays
  Clone ID: MRT4577_101523C.1.pep
SRLAGRLVFEKLVLGCYAFNGISCEGSDLVLRPEKYRQWQARNERAGLRQLPLKPSIVKVVKDEVMKHYHKDFLVCQDGQWLLQGWMGRVLTAHTTWVANGDASSG

SEQ ID NO: 186329 - protein, 71 aa, Zea mays
  Clone ID: MRT4577_101524C.1.pep
SVSAAQVRQQVAREELVQVHSELRVLCVGQLRLDSGHQPTHHALLGVHLALHADNSRREALAALVRSANEW

SEQ ID NO: 186330 - protein, 133 aa, Zea mays
  Clone ID: MRT4577_101525C.1.pep
MGLDVGGIGMGLDLGLDLGLFAARSAGGMAAAAKGAPAEIESCIRSLEEERRKIEVFRRELPLCVRLLADVIDELKDEAAKRGGDAEAKADDGDKRKWMSTAQLWLDSDAKSDESDKEQLSESCHHVAGAQHA

SEQ ID NO: 186331 - protein, 121 aa, Zea mays
  Clone ID: MRT4577_101526C.1.pep
PAGSGLQILLNQYVTSICTYPRSVASKKRILPMLATESHARWPARKGPGRQTIGTARAPDHKKKTTCSLAAVADSSRPDRLQLEPSTVPDAAMPPACCSSSTSPSLLAEANLQLHAPSAPP

SEQ ID NO: 186332 - protein, 385 aa, Zea mays
  unsure (1)..(385): unsure at all Xaa locations
  Clone ID: MRT4577_101527C.1.pep
MGLDVGEIGMGLDLGLDLRLFAARSAGGMAKGAAPAGIQSCIRSLEVERRKIEVFRRELPLCLRLLADXRTRGLSFSSLAVAALPFSPTVYASRSVLLRFSLTRWSVRPWIALAAVIDEFKLEAAKRGEDDDGATVVDDGDKRKWMSTAQLWLDSDAKSDESDKEQLSEITSPEPKLLGGAPMPIRAVAAVPPLPPPFFRREDSSSGSGLSLVPPAAKPPIPPMSASDNASGRFCATMPPSGSGVNLHSQAQQQARKARRCWSPELHRLFVAALHQLGGPQVATPKQIREVMKVDGLTNDEVKSHLQKYRLHNRRSPGVVAPVSQSVMLAGGLWAPPHQEQSSSQSGSPQGPLQFSGSGVAATVGGDSSSSDEDDKSEGYSRKYV

SEQ ID NO: 186333 - protein, 359 aa, Zea mays
  Clone ID: MRT4577_101528C.1.pep
MGLDVGEIGMGLDLGLDLRLFAARSAGGMAKGAAPAGIQSCIRSLEVERRKIEVFRRELPLCLRLLADVIDELKEEAAKRGEDDDGATVVDDGDKRKWMSTAQLWVDSDAKSDESDKEQQSEITSPPEPKLLGGGAPTPIRAAVSAVAVPPPLPPPLFRREDSSASSGLSLVSLSPATKAAVPISPPVVAASGTTTSARFCGTTMPPSGSEVINMHSQAQQQASRKARRCWSPELHRRFVAALHELGGPQVATPKQIREVMQVDGLTNDEVKSHLQKYRLHNRRSSPGAAAAPVSQSIMLVDGVWAAQEQSSGSQSGSRQGPLQFSRAGMAVGGGDDSSSSDDDEDDDKSEDGYSLKCV

SEQ ID NO: 186334 - protein, 75 aa, Zea mays
  Clone ID: MRT4577_101529C.1.pep
VLDPVNAHTGSPSPWTPSNFLPLYPRSHSHDSPHRVLYTNSGTYASTFVHMAWLLGTHKDSRNAKPIEEKEGKNL

SEQ ID NO: 186335 - protein, 227 aa, Zea mays
  unsure (1)..(227): unsure at all Xaa locations
  Clone ID: MRT4577_10152C.1.pep
FCQKNDILIPNMEDSVPRFGRSXEREGKPISXDHYFRVGIFYATIDSITTEFDHRFNEVSTELLTCFACLDPRESFSKFDVNKLAHLTEIYLDDFSLDDRKAIKDQLATFIIHVRRLEEFRVCHDLASLAIKMVELKRHIVFPLVYRLIELAMLLPVATASVERAFSSMKIIKTELRNKMSDGWLNDLMVVYIEREIFKGIDLESIKKAFQKKKDRNMQLPKSPKRN

SEQ ID NO: 186336 - protein, 56 aa, Zea mays
  Clone ID: MRT4577_101530C.1.pep
GNSQSVLSSPQFYCRPAVLQSAQLLYHLCHPQFWKVDRMRTDARASIRYSRTRRFH

SEQ ID NO: 186337 - protein, 94 aa, Zea mays
  Clone ID: MRT4577_101531C.1.pep
GRIPGRATRPVKCQSFSYQQRCNFHSDSWVLRSLRGWIPNWHHQEPKSKTGHRGDARHTLLYYELELWGQVLMWPPAVESGPGTLNPQSPYLSP

SEQ ID NO: 186338 - protein, 200 aa, Zea mays
  unsure (1)..(200): unsure at all Xaa locations
  Clone ID: MRT4577_101532C.1.pep
MLRRTVPDRAADSSGSAGGGDARPRADGSGAALFAVPRLFVGFAAKRAPDAESSRSPTSPLDPKALLLRSPRRAWGAPGLVDALAADTAAANCLLSPRLRLVRQHSSPPKECGGGGGGHSQPELGKTMSCPAPDTAAAXAATXMSVPCSMFQFRRGDLKSGPEEATRSDTGAYLVSNGNAKRNSFDFGKLPGPGSLPVPA

SEQ ID NO: 186339 - protein, 98 aa, Zea mays
  Clone ID: MRT4577_101533C.1.pep
MTADQWKRFQMTKAVQRGSTSAQGDSSGSSEADARIDNLFEIIRKWESNFSRHLQILLDALNHYAATETVVLLSLCARLSTANQGTEYAGLRQEEEST

SEQ ID NO: 186340 - protein, 95 aa, Zea mays
  unsure (1)..(95): unsure at all Xaa locations
  Clone ID: MRT4577_101534C.1.pep
MSEEKHHHFFNHHKKDEEQPDGEYGYSETVVTATGVGEYERYMMVEKEHMHKQYLDEASASRGGAFGLYXKHEANKDPEHAHRQPSCRRRSTTTF

SEQ ID NO: 186341 - protein, 164 aa, Zea mays
  Clone ID: MRT4577_101535C.1.pep
MLPLRSAAAAPCSVAGLLLHRFSSYSSSSVYSVRHHASSALSSQPSTRPTTTWSSSPNSSSRRIRGFAAWASAPGPAGSADSLATKALEAKIKEQLEADTVTVVDTSGDGRHVCIDVISKAFEGKSAVNRQRMVYKAIWEELQSTVHAVDQMTTKTPDEAAANE

SEQ ID NO: 186342 - protein, 78 aa, Zea mays
  Clone ID: MRT4577_101536C.1.pep
RFICSVTDPATKPRSRAGKSHGVGVIRHCLRKYQSRDGVTGELAATVFVLRFISFPSSIGLRYFAGNRFLWGSLMYVT

SEQ ID NO: 186343 - protein, 48 aa, Zea mays
  Clone ID: MRT4577_101537C.1.pep
APQDQDKVILQFGKVAKDMFTMDYRYPLSAFQAFAICLSSFDTKLACE

SEQ ID NO: 186344 - protein, 164 aa, Zea mays
  Clone ID: MRT4577_101538C.1.pep
MLPLRSAAAAPCSVAGLLLHRFSSYSSSSVYSVRHHASSALSSQPSTRPTTTWSSSPNSSSRRIRGFAAWASAPGPAGSADSLATKALEAKIKEQLEADTVTVVDTSGDGRHVCIDVISKAFEGKSAVNRQRMVYKAIWEELQSTVHAVDQMTTKTPDEAAANK

SEQ ID NO: 186345 - protein, 181 aa, Zea mays
  unsure (1)..(181): unsure at all Xaa locations
  Clone ID: MRT4577_101539C.1.pep
IRHEAALLLAVPDPFSSDLPPMPAPRSXTLAASRPGPPAAPPKWAAPGCSPPPAASTPSPRSPTTRAPPPMAGSGPTRRPSPARSLPRPAPCSPSCDGASGTRVPRPRTTPRPNTRSLPPSAGSAASPSRRPPRPPPRSPPPRCGPSSMPSAPRTPAPXXPXPRSPXSTRSCPSRAPRSRA

SEQ ID NO: 186346 - protein, 70 aa, Zea mays
  Clone ID: MRT4577_10153C.1.pep
FYFLNIRGLGFFFKKKITTTRKFIRIVVLSVLRGKPFFFKKWGRVVMVFLGLFFQIFFKWKKKKGRGPKE

SEQ ID NO: 186347 - protein, 164 aa, Zea mays
  Clone ID: MRT4577_101540C.1.pep
MLPPRSAAAAPCSVAGLLFHRFSSYSSSSVYSVRHHASSALSSQPSTRPTTTWSSSPHSSSRRIRGFAAWASAPGPAGSADSLATKALEAKIKEQLEADTVTVVDTSGDGRHVCIDVISKAFEGKSAVNRQRMVYKAIWEELQSTVHAVDQMTTKTPDEAAANK

SEQ ID NO: 186348 - protein, 87 aa, Zea mays
  Clone ID: MRT4577_101541C.1.pep
LLQCGLAMEAASFYKQMLRAGEKENGSASLMCSAFDALVSLEHGKMVHCRSMKSRFCFEMMHFKCGRLAAQLILKLSSNGKIGLVEW

SEQ ID NO: 186349 - protein, 143 aa, Zea mays
  Clone ID: MRT4577_101542C.1.pep
PPHHAGPHEKKREKNRHRGRAKQTQGKTPPRPARTTTAEGPHHSAATARSKPETKEPLDEREGSLDNQGGHPSRDSTETNHKGTPPRNLHREGKEDNGNHPQRPRGAPTTKSPQRPEPEGPGHPQQTQEPQGTTGATQPTGEK

SEQ ID NO: 186350 - protein, 78 aa, Zea mays
  Clone ID: MRT4577_101543C.1.pep
DGCFGQESVLCPIQFCKVLARGIEWYICTNAPANKNVFFFGQGHFCKGGFLPALNVVGVEPTICMYVTLWFRCWSNER

SEQ ID NO: 186351 - protein, 101 aa, Zea mays
  Clone ID: MRT4577_101544C.1.pep
VVPYFTIVKLRHEQSEDTGSYSCSLEAGCSGLTRPPQCTHSALTEQTGEQTGGICAQRWDWEGPLQGSPLPSKAEEGSFPLPKTWCPFPPLLPATCCCCCC

SEQ ID NO: 186352 - protein, 87 aa, Zea mays
  Clone ID: MRT4577_101545C.1.pep
LMSAFRWSYRRLRAHRRLRTRVWPDTVSPRLWREFATPFIRRRYSPGDNINKDVVVEDIARFYVRMGETFTLIRVGNILIAELCGPR

SEQ ID NO: 186353 - protein, 125 aa, Zea mays
  Clone ID: MRT4577_101546C.1.pep
FFQQQQIFSFNQLGALDPPGFLPPPILFPFCPLGSASRGSFFAPPPVLPFFPPVSGYPPTLFQLPPMVAFVPPGLSNPAASFPPPLLGGGPFLNAFLRGFPNKGFLDGGCGPPQIKRYLFRFLCW

SEQ ID NO: 186354 - protein, 92 aa, Zea mays
  Clone ID: MRT4577_101547C.1.pep
PPWVPFSPRGLSGPSRSKTGFKLPGGGLNKQPRLEGRGSSRGEGFVCPPPGFLVKSPFFSPQKWSLGPWFVILTPNFGDPRTQRGGRFFFFS

SEQ ID NO: 186355 - protein, 94 aa, Zea mays
  Clone ID: MRT4577_101548C.1.pep
TREPTRLHVATTDGDDCASRACRRYPRVPWPPPSLPKPIVPRTITVTTELRVRRRHSFDSGMPSLFACPPLEHRHHSVLGENHRCVPGASGASA

SEQ ID NO: 186356 - protein, 39 aa, Zea mays
  Clone ID: MRT4577_101549C.1.pep
ESPESLRSKVDEAVAVLQAHQAKEAAQKAVNSATGVPTV

SEQ ID NO: 186357 - protein, 140 aa, Zea mays
  unsure (1)..(140): unsure at all Xaa locations
  Clone ID: MRT4577_10154C.1.pep
PDYILETWGSSADTIERIDGQVDVGDTYEGRSQRNDHXTXMRPEDIDYKRPDTECHYSSHLTFEMAAALTAAYIEIKDNITYFDKLREGANALNKFGRLQNVRYSPNGSDQAIFYNCTTYWDXLECCGAWVYFDTWNNSY

SEQ ID NO: 186358 - protein, 128 aa, Zea mays
  Clone ID: MRT4577_101550C.1.pep
MGDVASMTYLPSVRFLSGHSWFSSDLLLVETSLIVVFSQGTSTDQDISFSNKHAKMLKTQKFTSELDHLVDTSKVNLEVLKTWIAKQVTELLGFDQIVSIQRTVFYKERVAGMYSTMSYAIAQFASRG

SEQ ID NO: 186359 - protein, 48 aa, Zea mays
  Clone ID: MRT4577_101551C.1.pep
KGRQLFHSNLGSPEPQNFFHTPMGMAIYLDSQLYVYTTSHLNPPNPFF

SEQ ID NO: 186360 - protein, 36 aa, Zea mays
  Clone ID: MRT4577_101552C.1.pep
IELGDTTGKVCSGKRGGARMGSEKASAHVILSPPFF

SEQ ID NO: 186361 - protein, 89 aa, Zea mays
  unsure (1)..(89): unsure at all Xaa locations
  Clone ID: MRT4577_101553C.1.pep
RNDAGILVRRKRLRTKILHKXKAKNYWQGGVCLAFADEVLCWLYGTVKENEDYVLQFVHPFNRLELLRAQSPCPEAITLHVQQLSGAAD

SEQ ID NO: 186362 - protein, 242 aa, Zea mays
  unsure (1)..(242): unsure at all Xaa locations
  Clone ID: MRT4577_101554C.1.pep
FLRSASRLARPASILSARAGPRLTSSLRQPNAFRTLTATASQQGKVLLVLYDGGIHAEQEPKMLGTTENELGIRKWIEEQGHELVTTSDKEGEGSEFDKHLVDAEVIITTPFHPGYLTAERLAKAKNLKLAVTAGIGSDHVDLNAANKTNGGITVAEVTGSNVVSVAEHVVMTILALVRNFVPAHEQIAKGEWNVAEVAKNEYDLENKVVGTVAVGRIGERVLRRLKPSSXQELLYFDYQPL

SEQ ID NO: 186363 - protein, 530 aa, Zea mays
  unsure (1)..(530): unsure at all Xaa locations
  Clone ID: MRT4577_101555C.1.pep
MDFSEQDVDVFGEDYDVHDGGAEAEAEADGGGDSSGSSSPSSSSSSSAAASSSSSSGGSSLSSSGGAAGEGEDGADAGDGEEYDSSNLIATRSAGAAGYLDDERREYENQEVEEERDLFGSDNEEYVRTPARSHYLVPVLPPIRNTNNHSRGGFGGRGGRGPPLLPRPGGHPGRHNFGYGRFGNGRHVEGLVSDMKLNKSDETXNRRAVTFQEPCEIACLCRGEGGFVYFDDRSSNLFKXQSKHTAQRFSINGFGSIIESNHVXSEGFXDLLXTYRNSNILLQNTIHFVTYRNNLNKILATAYLREPWKMGVHKRRGVVYLDVHKLPERPKSEVERKRCYWGYSFENLATENSFSDDGRGIDANVEFCSVIKTKLGAHRIVMGAEMDCCDATDDGRRFYVELKTSRELEYHTVEAYEKEKLLRFWIQSFLAGVPYVVVGFRNDAGILVRTERLRTKDITQKVKAKNYWQGGVCLAFADEVLCWLYGTVKENEDYVLQFVHPFNRLELLRAQSPCPEAITLHVQQLSGAAD

SEQ ID NO: 186364 - protein, 59 aa, Zea mays
  Clone ID: MRT4577_101556C.1.pep
FTLAVLPPSSCIGEDMCQRSARSQNTCLHIHGQEQDPNSVRCGSADPIGRCGTYGAIEH

SEQ ID NO: 186365 - protein, 131 aa, Zea mays
  Clone ID: MRT4577_101557C.1.pep
MASCSSSPRPPTIPLLLLFLLLHFSSVLAAPAPPALSQQAGTGGGGNATDSAAAWTPRLRKTFLDGGMERWRGRRLVGRFQVCAVCTCCGGPHGMCIPAPCCYAINCNIPNRPFGVCSFTPRTCNCLTCHL

SEQ ID NO: 186366 - protein, 132 aa, Zea mays
  Clone ID: MRT4577_101558C.1.pep
APFKKFPNRAVKAFKGKKSGDPVPGFDSRPYFYSRSFGLGGQFYGAKVGETPLFGASAPPSTKPKFGWYWIKGGKVLGPFLEGGSPAENKVFAKGAKTPPPVATPGGLKKDGPPFPTKILDAPVPCKIPGPR

SEQ ID NO: 186367 - protein, 185 aa, Zea mays
  Clone ID: MRT4577_101559C.1.pep
PPLSSGLACVLAGLLAGLAFGLVGGAGVRAGARRPGFFVGMVLFLFFAGALALCGLVVGVVLSSRAGRSRAASGLVSVVVAVPPPVAWSCFFFVCPCALPFPRRGGGGSKKTSSVGSRRLWLCGRGLSFLVPFFSLSWWGVGCGWCFFLPGFCLGRGWGWAVGVLWWLRASLPPPWFGPLWSSLS

SEQ ID NO: 186368 - protein, 72 aa, Zea mays
  Clone ID: MRT4577_10155C.1.pep
RSHGCVPDSSEGSSIIFNFFFFLDLLALHKLFLIVYPSSYCPTYFSTLLTPVPFNMIMIVFTESETTSSSTC

SEQ ID NO: 186369 - protein, 81 aa, Zea mays
  Clone ID: MRT4577_101560C.1.pep
NIQLIHLSNPEEKSGTTLPIQNATESHIVNNEFQFKHYEEHLAAVILDHASVSPNPGISPSHVTHKHTHYHNEPQTTCINL

SEQ ID NO: 186370 - protein, 98 aa, Zea mays
  Clone ID: MRT4577_101561C.1.pep
LRCEASGTQTLPASVMGAHGLAVALSVRCFMLDGEAIAALDKYTWRSPAARVDPFGFRSNPNELYHGTWLRWGEESANARVLCVVTTASGRFPALWRP

SEQ ID NO: 186371 - protein, 94 aa, Zea mays
  Clone ID: MRT4577_101562C.1.pep
IFKAFGFHFTSCLTYAVTVTHVRGAIHRMKGIYLFVKLSVPCIERLTRETKLCLDRKAEVLQITVNHIYDISKVMLYTELGIHAGNYLDYQTCQ

SEQ ID NO: 186372 - protein, 52 aa, Zea mays
  Clone ID: MRT4577_101563C.1.pep
MLSHSQTSLDKALCQTLAFKHSGFLMPAPLIVFVVCPQTELDVDCIPEHEIQ

SEQ ID NO: 186373 - protein, 167 aa, Zea mays
  Clone ID: MRT4577_101564C.1.pep
MSCSSAASIGQPPPEEEKKCLNSELWHACAGPLVCLPTVATRVVYFPQGHSEQVAASTNKEVDGHIPNYPNLPPQLICQLHDVTMHADVETDEVYAQMTLQPLNPQEQNDPYLPAEMGIMSKQPTNYFCKTLTASDTSTHGGFSVPRRAGERVFPPLDFTQQPSAQE

SEQ ID NO: 186374 - protein, 62 aa, Zea mays
  Clone ID: MRT4577_101565C.1.pep
ARYKGGGSRGPPFLGPPFLLGISALGSTFEAQPLAPGAGETGNVTILFVKTFAGAPFWVCQG

SEQ ID NO: 186375 - protein, 203 aa, Zea mays
  Clone ID: MRT4577_101566C.1.pep
MSSSSAASIGQPPPPAPPPEEEKKCLNSELWHACAGPLVCLPTVGTRVVYFPQGHSEQVAASTNKEVDGHIPNYPNLPPQLICQLHDVTMHADVETDEVYAQMTLQPLNPQEQNDAYLPAEMGIMSKQPTNYFCKTLTASDTSTHGGFSVPRRAAERVFPPLDFTQQPPAQELIARDIHDVEWKFRHIFRGQPKRHLLTTGWS

SEQ ID NO: 186376 - protein, 59 aa, Zea mays
  unsure (1)..(59): unsure at all Xaa locations
  Clone ID: MRT4577_101567C.1.pep
MEMHADVDGCSVPLAVLLKRELCNQKVERPDILFGEANKSKXGEDFTLLVPRCHRTPGG

SEQ ID NO: 186377 - protein, 440 aa, Zea mays
  Clone ID: MRT4577_101568C.1.pep
MEMHADVDGCSVPLAVLLKRELCNQKVERPDILFGEANKSKKGEDFTLLVPRCHRTPGGSGGGENAGDDDTISVFAIFDGHNGSAAAIYTRENLISSVLAAIPPNLTSEEWKAALPRALVAGFVKTDKNFQIKAARSGTTVTFVIIDGWVVTVASVGDSRCILESAEGSVYLLSADHRLDANEEEVERVTASGGEVGRINIAGGAGIGPLRCWPGGLCLSRSIGDIDVGEFIVPVPHVKQVKLSNAGGRLVIASDGVWDALRFQEALNYTRGLPAEAAANRIVKEAVTSKGLRDDTTCIVVDILPPEKLSPPLKRPGKGVIKALFRRRPSDEMSEDQMDRGCLETDVVEEIYEEGSAMLARRLNINYPEGNMFKLHDCAVCQLEMKPGEGTSVHGNMPKHSRVDPWGGPFLCSSCQLKKEAMEGKLHSRNSQSAVQPLPK

SEQ ID NO: 186378 - protein, 151 aa, Zea mays
  Clone ID: MRT4577_101569C.1.pep
MNNQRKPGDWNCKNCQHLNFSRRDYCQRCRDPRPDLQFGDGYSTVGVLTSLDIRPGDWYCSCGYHNFASRSSCFKCGTIVRDFPAGQGAAGAEGDFAGGRDSAAVRAGWKAGDWICTRPGCNVHNFASRMECYRCNAPREAEAPGGKRRLG

SEQ ID NO: 186379 - protein, 165 aa, Zea mays
  Clone ID: MRT4577_10156C.1.pep
GAPGYAAPELWMALPASEKCDVYSFGMVLFEILGQRRNYDPCRGESREWFPRWVWERYEQGEIEYVVSCDGIGEADMEKAEIMCKVALWCVQFQPAARPTMSSVVRMLEGEMPIVPPVNPFHYVMDSSSGSTSSGLWSDTYQSSRETIGIAIDSELSVSPIAKST

SEQ ID NO: 186380 - protein, 33 aa, Zea mays
  Clone ID: MRT4577_101570C.1.pep
KRANNYYIYPNTATTDYLILTIIMFTSNKVLKF

SEQ ID NO: 186381 - protein, 85 aa, Zea mays
  Clone ID: MRT4577_101571C.1.pep
ELDDKLWHTLGKRKREPRALLLVFGLPFGSMGYDNVCRLDVSRFVFTDGICKKLLCEFGCKSHHILPATFTDFYLFFYNISKHYR

SEQ ID NO: 186382 - protein, 118 aa, Zea mays
  Clone ID: MRT4577_101572C.1.pep
ARGHLSLSPGQTPTQVQPLGKGKQLGGGGHSADLSPARRVLIRPHHYNRHLFQREAASAFCGPGNAHSYSGLALSNDAGPRLTWTHELHHPLVAVFNHLGGALQAAPITVTTSTRIPI

SEQ ID NO: 186383 - protein, 102 aa, Zea mays
  unsure (1)..(102): unsure at all Xaa locations
  Clone ID: MRT4577_101573C.1.pep
GDHASERPKVIPTPIIFILQATTQLLAEANLIQVVADSIINTGLREEPTLLDPAPVMRQLAXSLSXLRRVNPPILLLTTVARESAFKNITTIPDLPADYLIN

SEQ ID NO: 186384 - protein, 49 aa, Zea mays
  Clone ID: MRT4577_101574C.1.pep
LMLSLGLLLSDHKTSPRIFTDLAPFLNFASYLLINPVLMTPICFICTFC

SEQ ID NO: 186385 - protein, 57 aa, Zea mays
  Clone ID: MRT4577_101575C.1.pep
KVGTFFFFDKLKPTVGAKKHIPQTKVYTLFHYLARLIQKKWGFNSYKNIPTLPIWGF

SEQ ID NO: 186386 - protein, 272 aa, Zea mays
  unsure (1)..(272): unsure at all Xaa locations
  Clone ID: MRT4577_101576C.1.pep
MAPSVVSKVLSGSALLAAVSAQNFGGSGRGEGAFSYVQPLNTTILTEYGSSPAVYPSPKISGAGGWEMGLEKAKAFVAQLTLEEKADMVTGQAGPCVGNIVAIPRLGFPGLCLHDGPLAIRVADYASVFSAGVSAGATWDKDLMYERGYAMGEEFRAKGAHVFLGPVAGPLGRSAYAGRNWEGFSSDPYLSGVAMEKTILASQDAGVQACPKHWIGNEQEIMRNPTYRRDDXTEQAQAAISSNIDDRTMHELYMWXFGNAIKARAASVMCSY

SEQ ID NO: 186387 - protein, 105 aa, Zea mays
  unsure (1)..(105): unsure at all Xaa locations
  Clone ID: MRT4577_101577C.1.pep
LLFAXXXXVXXLGLXWLXXXLSFLFLGXXSLXPWGLXXLXXGXFPLAXLVXXXCXXXLWFGASXSGXAXXGWLGPXFWLXXLCLXFLXVFVXVVXFFFCVFVRAF

SEQ ID NO: 186388 - protein, 227 aa, Zea mays
  Clone ID: MRT4577_101578C.1.pep
MAASLPLSAAIVGAEESVDKEVLEMEYLFEKFLMPSDLCSNTEWLGIPEEHVRKFGMMLEDRDGYSVIFFQDGVVPGKLWCFRYWKSNGVHGLTKGWRCFVREKGLKAGDTISFFRGSACGRLFICCRLGTHATFASSSTLHHGFSMPPPPARPLVGLQSGMLARDVPSLGQARLHDGNQDGGGAPSRHVPSSGRRVEAQLSRVSSRRQRRTMKHSIPEPTIETPPI

SEQ ID NO: 186389 - protein, 78 aa, Zea mays
  Clone ID: MRT4577_101579C.1.pep
QLVLPELQRARARGYRSALAPRARSVASRRRSPAPRCCVGLAEQLSQLAAPSGSRNAASPQMAGRRLVTLTLLAAAFL

SEQ ID NO: 186390 - protein, 60 aa, Zea mays
  Clone ID: MRT4577_10157C.1.pep
MGRHYSVRATILVTGLYKLVSSTPGVIMCHSGPFLLCVNVRCFRSLCCPPPCSNYTKKQK

SEQ ID NO: 186391 - protein, 67 aa, Zea mays
  Clone ID: MRT4577_101580C.1.pep
AVKPNTGECLLPKLPHEGSQMEQPDPEPSSVPHSSTLTPLPRRTFFLDQEVNYDPQKHLLVNKNINH

SEQ ID NO: 186392 - protein, 115 aa, Zea mays
  unsure (1)..(115): unsure at all Xaa locations
  Clone ID: MRT4577_101581C.1.pep
QPTECPYTISLVKSLKRLGDSRPQPVKLYRSTLVSSHLAASSASPPAAPPCRHRCARMPSCSDPVARSLDYQFVLHPPAERQGYSSARSSNLLGHCARRAHGLLMLXSPARSSQM

SEQ ID NO: 186393 - protein, 87 aa, Zea mays
  unsure (1)..(87): unsure at all Xaa locations
  Clone ID: MRT4577_101582C.1.pep
QVKWYRDILLAVIVSCYFKLFLFTMMVWEFPSSVIFIVEMFVXVSGMHIYISNSLVVPQFPKAHCFVVCLLAHAAKYLTQRWILGTT

SEQ ID NO: 186394 - protein, 75 aa, Zea mays
  unsure (1)..(75): unsure at all Xaa locations
  Clone ID: MRT4577_101583C.1.pep
PKNQNKLEAPQAXEDTKDATSPTQAIKRPQGVNLNPSTGEGMRLENPTIKKLLNHYILRQFLGLFDFKLYLKNLV

SEQ ID NO: 186395 - protein, 38 aa, Zea mays
  Clone ID: MRT4577_101584C.1.pep
KRIPRRSPQRAAVMPVPRKRNFYLPALICLAGHPGCGV

SEQ ID NO: 186396 - protein, 154 aa, Zea mays
  unsure (1)..(154): unsure at all Xaa locations
  Clone ID: MRT4577_101585C.1.pep
SLGGVLLSVTGTEAMFANLGXWTSVSIRVAFAVVVYPCLVVQYMGQAAFLSKNLGSIPNSFYDSVPDPVFWPVFVIATLAAIVGSQAVITTTFSIIKQCHALGCFPRIKVVHTSKHIYGQIYIPEINWILMILTLAMAIGFRDTTLIGNAYGIA

SEQ ID NO: 186397 - protein, 63 aa, Zea mays
  Clone ID: MRT4577_101586C.1.pep
SPTRPLAGNKKSVRENQYNKGVNIQQRVPMYARRNRAIIPRPTAPVPLVIDSLAHVVTYLEPS

SEQ ID NO: 186398 - protein, 82 aa, Zea mays
  Clone ID: MRT4577_101587C.1.pep
SLFSATQKTCFLWGRRVTLKLVGKLAPWLLNFGKVGPPDEKPTPPLFCSTNNPEIRAMDRQNHFYMLGGGRQKFKYAGWEPP

SEQ ID NO: 186399 - protein, 61 aa, Zea mays
  Clone ID: MRT4577_101588C.1.pep
KIFLPNKLKTLLQCFKKKTKWTSKNTRGPPPRAFIKESGEPLKWLPNFQAFKFLGFLKPKL

SEQ ID NO: 186400 - protein, 74 aa, Zea mays
  Clone ID: MRT4577_101589C.1.pep
TTFNSIWLPKPQTTFIVQQDTILHPNSIPRLPHQNALIDTAIFPQLHLDSDDTAIRAPGPDPLEPIPTTTLHSF

SEQ ID NO: 186401 - protein, 132 aa, Zea mays
  unsure (1)..(132): unsure at all Xaa locations
  Clone ID: MRT4577_10158C.1.pep
GSHMKKTISXEQTVKAVMKWRETANDNVPXRQAECLLYVLTSAITTPSXHNRATYPSHVIYPVHXLLHKSLFRSXVAESAPAIPAHELXDMYPVAYQHQLDKLEPERLKPCLYTVVNIDISDADFSFNMRRP

SEQ ID NO: 186402 - protein, 225 aa, Zea mays
  Clone ID: MRT4577_101590C.1.pep
PAGTANSHAAVRRLSSGSGAETPSTYYLVTSRKYSPVPRNQLLSPLIVHDGRLVQRPTPLVALVTFLWMPFGFALALMRVYINLPLPERIVYYTYKLMGIRLVVKGTPPPPPKKGHPGVLFVCNHRTVLDPVEVAVALRRKVSCVTYSISKFSELISPIKAVALSRERDKDAENIRRLLEEGDLVICPEGTTCREPFLLRFSALFAELTDRIVAVAINTKETMFP

SEQ ID NO: 186403 - protein, 547 aa, Zea mays
  Clone ID: MRT4577_101591C.1.pep
PTSRAYINSTSPPHSTAKQLARSSTTSLLWVWGRDTEHVLPARWWRLPEFKPIEECCSEGRSEQTVAADLDGTLLISRSAFPYYLLVALEAGSVLRAALLLLSVPFVYVTYAFFSESLAISTLVYISVAGLKVRSIEMVARSVLPRFYAGDVHPESWRVFSSFGRRYVVTASPRVMVEPFARAFLGADKVVGTELEVGRDGKATGFMARPGVLVGDHKKKAVVKELGDALPDVGMGDRETDFDFMSICKEAYLVTSRKYSPVPRNQLLSPLIVHDGRLVQRPTPLVALVTFLWMPFGFALALMRVYINLPLPERIVYYTYKLMGIRLVVKGTPPPPPKKGHPGVLFVCNHRTVLDPVEVAVALRRKVSCVTYSISKFSELISPIKAVALSRERDKDAENIRRLLEEGDLVICPEGTTCREPFLLRFSALFAELTDRIVPVAINTKETMFHGSTVRGFKLMDPYFFFMNPRPTYEITFLTQLPKDLTCSGGKSPIEVANYIQKTLSGQLGFECTSITRKEKYGMLAGTDGRVPSKNKEKEKEKEKDKN

SEQ ID NO: 186404 - protein, 183 aa, Zea mays
  Clone ID: MRT4577_101592C.1.pep
MIEPSFSDKLPVPKKFKGHRNEETVKGVDFLGPNCDFVTSGSDCGSIFIWRKKDAELIRAMRGDKRVVNCVEQHPSGIVLASSGIENDIKIWEPGEGENRSIVQADEDDDNTVWIHGSSDSDDFFDDNGFGLMVMEPIHLYENSDNDSYEEDTSSEEHDSDGDSSAGDEDSDSGNSAGDEGDD

SEQ ID NO: 186405 - protein, 70 aa, Zea mays
  Clone ID: MRT4577_101593C.1.pep
RLVSVLGCLLHLHARDLQTARRWNFHGQKSELTLSTLSNMNPLTRTKCRQMSFWCSTPRCVFLYSTENCT

SEQ ID NO: 186406 - protein, 191 aa, Zea mays
  unsure (1)..(191): unsure at all Xaa locations
  Clone ID: MRT4577_101594C.1.pep
MGVAPHREHHCPTESAPRCLVPLPVAYRRPVPWPRSRDMIWYNNVPHPKVHWWQTXLDWVRKSGNYFVFPGGGTQFKNGVASYIKFIEQILPNIQWGIHTRTVLDVGCGVASFGGYLLDRNVITMSVAPKDEHEAQIQFALERGIPAFLAVIGTQKLPFPDNSFDVIHCARCRVHWYADGGKPLLELNRVL

SEQ ID NO: 186407 - protein, 95 aa, Zea mays
  Clone ID: MRT4577_101595C.1.pep
YPFDVNFPHTRRLFVSFWVCLVCAFLFNSHILFCPSCRRCRWVPWTLQSRFLCQYWASSKLNSPSTVSLCFWSSLLSDCELLGDWPDLILDGMTA

SEQ ID NO: 186408 - protein, 91 aa, Zea mays
  unsure (1)..(91): unsure at all Xaa locations
  Clone ID: MRT4577_101596C.1.pep
PVVPTQKTRXNKVAGSNTHLMRRIQRGPIPGISPKLQEKKPKPPKDFVPEKSPLEVKKIPVQKKTMEMLPALGKAHLPGVKPQVKVSNAPP

SEQ ID NO: 186409 - protein, 53 aa, Zea mays
  Clone ID: MRT4577_101597C.1.pep
TLNSGDTIVMAATSTVVGVLSQQDGGRVNILNLQLREDLIFRTPNMLILLLFQ

SEQ ID NO: 186410 - protein, 89 aa, Zea mays
  Clone ID: MRT4577_101598C.1.pep
SSLQTLFNTLVISICTEALFTVRTPLYTYILHFSGPSPLILCSVELYLFTCLFEFTIAKICYSFLTTGSLYSLAAHSASPGWGPIDVHG

SEQ ID NO: 186411 - protein, 58 aa, Zea mays
  Clone ID: MRT4577_101599C.1.pep
FRSSSGCRCPCVFCIARLLLCHDVSDCDTSSVASKFRHLTACFCGVDVVMLHAAWLLF

SEQ ID NO: 186412 - protein, 98 aa, Zea mays
  Clone ID: MRT4577_10159C.1.pep
SELMAMLGAIKSTGRRHLDQVELLVVRLLLGHLFFSFNELILINFYLLNTGIFSHWLFVEEGRGEHGCGVGCLGGNGGTLHTLEGVTGAVWVKEGSRP

SEQ ID NO: 186413 - protein, 443 aa, Zea mays
  Clone ID: MRT4577_1015C.1.pep
MSIPSFPSYNQHSPLIHPPPKRHQSIGGDLYLARTRLLPPPPTGQGHAFPPLNGPAPFQLQPSPPLPHGAMKRTAAEAAQQQLLDELAAAAKAAEAGNSIGAREILARLNHQLPLLGKPFLRSASYLKEALLLALAEGHHGGCHLTSPLDVALKLAAYKTFSDHSPVLQFTNFTATQALIDEIARSTSSCIHVIDFDLGVGGQWASFLQELAHRRGAGGAALPSVKLTAFVSAASHHPLELRLTRDNIAQFAADLGIPFEFSAISADTINPAELVSATADEVVAVVLPVGCSARAPPLPAILRLVKQLAPKIVIAIDHGADRADLPFSQHFLNCFQSCMFLLDSLDAAGIDADSTCKIEKFLIQPRIEDAVLGRGKVDKPIAWRSAFAAAGFAPVPPSNLAEAQADCLLKRVQVRGFHVEKCGVGLTLYWQCGELVTVSAWRC

SEQ ID NO: 186414 - protein, 213 aa, Zea mays
  Clone ID: MRT4577_101600C.1.pep
YLDAGRYFALEFLNRSPLPWRRRYVKHYVMASTGAGGFLLPLRNLVSVPRDALEAPDALVALPSPAVFGPGTPPLVVTRARNYTARDIPEFLAAIGVPPLGVMLYETRALPLQLGFRAPVVPTTCINGVGQPTMEQLVYWGGNFSETPQVVYGDGDGFLPVASIVALDTVIGGDPRQEYYKSIKLAGTSHAGVVSDAAALKRVVDEILWSPPI

SEQ ID NO: 186415 - protein, 126 aa, Zea mays
  Clone ID: MRT4577_101601C.1.pep
HASDYPFGLIAGVHNNVLEFVIKEICMTGNIAMRHEMMGATAHFWRYRAAYYPDLIEALTIHAPTFVYRTNYVISSQTYNASTDAYAVESYDSYLLNHVLYAHCSVLDEDDATEHRSDTLSILVND

SEQ ID NO: 186416 - protein, 63 aa, Zea mays
  Clone ID: MRT4577_101602C.1.pep
LTTIVSTLKSQPVRENKENKNVSMDECVTTQYHGYKDNALIFLPCHVPDVTGQTRKRGRTRGR

SEQ ID NO: 186417 - protein, 79 aa, Zea mays
  Clone ID: MRT4577_101603C.1.pep
HVVTKSRSSSHFQDPKNLLGFMNTSKGSFGSQGFTQRGTCNEPVTKLVLGTVCPSFYGALWCKPIVWGNLEIWKFKWGK

SEQ ID NO: 186418 - protein, 94 aa, Zea mays
  unsure (1)..(94): unsure at all Xaa locations
  Clone ID: MRT4577_101604C.1.pep
NGIMGYENEVSILQGXTIDSRSSIFYSKATIALNDHFIKLFSCYNNXMXYSNLVDYLIRHMFNTHYATIEIDFYLTIEGRHQCPLNSDHLCCLS

SEQ ID NO: 186419 - protein, 769 aa, Zea mays
  Clone ID: MRT4577_101605C.1.pep
MAAASSAAPARHSCAKLSVPVEDPKAVTAGGGTVFVKATWLPSRFSLAVTDGAGAWVADASDHEVRLRAEQWDQPVADYIALAERYLAFQQPGSTYSFHDAGKGQRRRTQRILRVGGDFHKKLAWTFERQGTKLEWRWKLQPSPNTQQTISEILDFLMDANIRLSVCPFASPLHFFSLPVILKQEEVVRKTQSFDKLKQEAEKCLQQSERFNNEKAEFEQAAFSKFVAVLNSKKAKLRQLRDKVVELEPAVKPPKEEAGQEQEEEEENSTDRTELFEGENDKEASAKDEHSGETGSGNVPSSPGESAATSRGRGRGRGLLVSVLFLPFLNPDRLRRWLFGGFVIENSAKSEMGEALLRDSSGFFLGMESLPCPSWSVELEMGATLNKELRTRDCSWGWNVGPICSSTYLRHIGTVILPNSVTVYELWRCPPLVRARAGELAPWPRLLASRLGYEDTTLALTLRLPGSDSGRSSSLAAPSAAPSPKARVVGWPPVRSYRKNALADSSKANRAANFVKVVVSRRSSASAPPAPGSHRRSLPQRVFFPSRAVPSCFLRTRRAELAPDLCSSLARRVLPCTCPWRPSSQPARPPVLCVARCSSSHGAQPPSRLTGSPSAAPSFFLPQLPRFSLHLPPFSVACPAELPCAPGFSPSLLEFGQARAAPWRPASSVLSLDAHSVPSNSCAVPCSGSMAAPNSLRALAYNSTAHLPTCHGHRALLPDFCSPRALISLFASAHNSPSSMAGSLLAGDAPAPAQPRLVRSVFLVSRAAR

SEQ ID NO: 186420 - protein, 207 aa, Zea mays
  Clone ID: MRT4577_101606C.1.pep
MAAASSAAPARHSCAKLSVPVEDPKAVTAGGGTVFVKATWLPSRFSLAVTDGAGAWVADASDHEVRLRAEQWDQPVADYIALAERYLAFQQPGSTYSFHDAGKGQRRLAWTFERQGTKLEWRWKLQPSPNTQQTISEILDFLMDANIRLSEEVVRKTQSFDKLKQEAEKCLQQSERFNNEKAEFEQAAFSKFVAVLNSKKAKLRARG

SEQ ID NO: 186421 - protein, 106 aa, Zea mays
  unsure (1)..(106): unsure at all Xaa locations
  Clone ID: MRT4577_101607C.1.pep
RELMDLSPKKXFTETFLSADLHGALLIVAECKAASYKGVNGIMIRDTAETFGIISEDNRFRVVPKAGSVFVLQADRWKFTLIGDKLSPREKLKEDQRQQHAQSLIR

SEQ ID NO: 186422 - protein, 84 aa, Zea mays
  Clone ID: MRT4577_101608C.1.pep
LAWTFERQGTKLEWRWKLQPSPNTQQTISEILDFLMDANIRLSVCPFASPLHFFSLPVILKQVCQSLSSAYVDDQGMNWFLRRR

SEQ ID NO: 186423 - protein, 210 aa, Zea mays
  unsure (1)..(210): unsure at all Xaa locations
  Clone ID: MRT4577_101609C.1.pep
PECEASAFRVVDQLELLENFNVNPIIVPVPVICTLELITCPVFTTGKINLLXNLLSADLHGALLIVAEHKAASYKSVNGIMIRDTAETFGIISEDNRFRVVSKAGSVFVLQADRWKFTLIGDKLSPREKLKEDQRQQRAQSANQIVSNVPTKALKIFAPRNTCFCLELYPRTTASGFIKSWFSFRTSSRPLEVHTESCHCSMVVLGWLPQ

SEQ ID NO: 186424 - protein, 190 aa, Zea mays
  unsure (1)..(190): unsure at all Xaa locations
  Clone ID: MRT4577_10160C.1.pep
PNEEAVKRSGNARTDARKQIRGGDPNGIKEVGDXATLFCLALRDPRCTLWEVLPQVPPXGRPLDEDGSCYYGEDANCGNTLLLSLEALVKDCLLVPDELTDPEDTEYVEFNTVAYLEEPLIAPXHETLLLSHXSVYNTLXASKKIQIYHCWLXEDAALFDGIDINVYAFSCHERSEPLKNHQIGPWGDIY

SEQ ID NO: 186425 - protein, 120 aa, Zea mays
  unsure (1)..(120): unsure at all Xaa locations
  Clone ID: MRT4577_101610C.1.pep
KTGSVRKYNAKDLPQVDFGRIKLELAKVEMPRLMTSNAEIXPSXPFKSARSSASLHTTIQSAAPMKTLSGLGTEARXSSRNMXSTQDDTACRIEHYSVAVXLWKGDTLEEHWWCTERCLH

SEQ ID NO: 186426 - protein, 209 aa, Zea mays
  Clone ID: MRT4577_101611C.1.pep
GRVGTEVVHNVIYDIIQKGGDAGKITKGAKKLKLEKGILLDNYVQRGSRLVDSQARSLLIHSKRSKRHMSLKQHKKCGSFDLDGTFHKYDLYKPMHEMWKDYIRELMDLSPKKKFTENLLSADLHGALLIVAECKAASYKGVNGIMIRDTAETFGIISEDNRFRVVPKAGSVFVLQADRWKFTLIGDKLSPREKLKEDQRQQRAQSLIR

SEQ ID NO: 186427 - protein, 199 aa, Zea mays
  Clone ID: MRT4577_101612C.1.pep
RPLHGVLAYAVPASYLLVKRALSDAIVLRVAVNESLTDRLHVDLTAAFYVLNAVGGGTGSGLGSLLLKRLTVDYGKKSMLGFTVYPTPQVYTWAVEPYNKVLFIHSLLWHTDVAILLDNEAIYDICRRSLDIERPTYTNLNKLESEDILYLTAFLKFDGALNVDDYQFQTKLVPYPKIHFMHSLNAAIISGEKAYHQQI

SEQ ID NO: 186428 - protein, 44 aa, Zea mays
  Clone ID: MRT4577_101613C.1.pep
FDSQILTRCCVLIQEEADPPTSGLVPYLLQSLHQLPSCQRPPTS

SEQ ID NO: 186429 - protein, 124 aa, Zea mays
  Clone ID: MRT4577_101614C.1.pep
STGPVKYSAKAAPKKDLPAGAVFVSKTANKNKKKRQNKKKTENGGEPALESSEAETGATEAAETEPTGGADVEKRIKALTKKLRQIAQLKEQAAAGKVLDAAQKEKLHSESQLTEQLNQLQAKQ

SEQ ID NO: 186430 - protein, 58 aa, Zea mays
  Clone ID: MRT4577_101615C.1.pep
MCSPIFAEIVPERSRTSIYALDRSFESVLASFAPPVVGFLAEHVYGYNPVPYGACHCT

SEQ ID NO: 186431 - protein, 78 aa, Zea mays
  Clone ID: MRT4577_101616C.1.pep
PKVTFSPPWGDKKNVQGRGKQFQLLQLFKLGLGRPFLKIKNLKSLPGSRIKFCPPWKVFPFPRASNNFLGKQRAPSFF

SEQ ID NO: 186432 - protein, 68 aa, Zea mays
  Clone ID: MRT4577_101617C.1.pep
MTRTAHATIKNTNYLCYIVKTTLDHLLLYKDRKACSLYYEVRCTEKPDCSGNPFTEYITDMNYEPINP

SEQ ID NO: 186433 - protein, 36 aa, Zea mays
  Clone ID: MRT4577_101618C.1.pep
GGVACSSPLVILHQDSLLMCPRPWRRFWAWSRLVPN

SEQ ID NO: 186434 - protein, 91 aa, Zea mays
  Clone ID: MRT4577_101619C.1.pep
RGHSLDHHLPAVPSSPVPLRPRAHTFASPGPLCGDTHVPVEDARPVAVADEFTLSGSPMPGHRNKKATRSKTLQPSHSLGSVPSEGSAYGV

SEQ ID NO: 186435 - protein, 197 aa, Zea mays
  Clone ID: MRT4577_10161C.1.pep
MIFWPSLYAREYDSFAAISITAYYAYTGIFVQCPRVSSGMTIGAYHNDARSHRRECRTRYGRRQAMRVDSEGWLMSDIALHEEAVAPIFSRPPRGLNTCADALRERAVQVVWCDDAKRGDVVQAHAPKLGVADTLALAQSTAERNRIVSSLLHLTGFSTFAYFALEFSRERVESLYLHEAFTPATYRGDYVRHNHHD

SEQ ID NO: 186436 - protein, 154 aa, Zea mays
  unsure (1)..(154): unsure at all Xaa locations
  Clone ID: MRT4577_101620C.1.pep
MPTTCSTWGLTEHAMAEAVHRRALWMPRREPLPRLLRAFLTLERLNLSACASLAASVADGPAAATTWWWCASASATGDMESTLKGIRGSDTPFVMDLDGATTVAGGIEDTYGEDRATEEQLATPXWTRSCAPASTLSSPTSGACCCSTSSFRLP

SEQ ID NO: 186437 - protein, 32 aa, Zea mays
  Clone ID: MRT4577_101621C.1.pep
LFKFALLYYKLNEGPWALHVYITGHLAWHILS

SEQ ID NO: 186438 - protein, 284 aa, Zea mays
  unsure (1)..(284): unsure at all Xaa locations
  Clone ID: MRT4577_101622C.1.pep
MSYAYLFKYIIIGDTGVGKSCLLLQFTDKRFQPVHDLTIGVEFGARMITIDNKPIKLQIWDTAGQESFRSITRSYYRGAAGALLVYDITRRETFNHLASWLEDARQHANANMTVMLIGNKCDLSHRRAVSYEEGEQFAKEHGLVFMEASAKTAQNVEEAFIKTAGTIYKKIQDGIFDVSNESNGIKVGYAVPXSSGXGAGSSSRFIHEQPRFSFSLLFKLVRSFCKANHSRLLTYVLSVTKLKSVLWKKKKKKKKKKKKKKKKKKKGRTIIGDQRLTNACMTTK

SEQ ID NO: 186439 - protein, 210 aa, Zea mays
  Clone ID: MRT4577_101623C.1.pep
MSYAYLFKYIIIGDTGVGKSCLLLQFTDKRFQPVHDLTIGVEFGARMITIDNKPIKLQIWDTAGQESFRSITRSYYRGAAGALLVYDITRRETFNHLASWLEDARQHANANMTVMLIGNKCDLSHRRAVSYEEGEQFAKEHGLVFMEASAKTAQNVEEAFIKTAGTIYKKIQDGIFDVSNESNGIKVGYAVPNSSGGGAGSSSQAGGCCS

SEQ ID NO: 186440 - protein, 60 aa, Zea mays
  unsure (1)..(60): unsure at all Xaa locations
  Clone ID: MRT4577_101624C.1.pep
MENAIDRERVFLAQLLAAGSSASSXPQLAASASTAGDIAAYQTSSSFREDVVFVAAYMTP

SEQ ID NO: 186441 - protein, 223 aa, Zea mays
  unsure (1)..(223): unsure at all Xaa locations
  Clone ID: MRT4577_101625C.1.pep
ERREERGERRERPPPPLPLSSLSXLTRPLLFAAPPSPATTPATLRXPATPPTPVPATPXPPXPRLTPCALPARXVLLPGSTPPPRXPRSRAPIGRRRXAPPPXASEWASDPSIRAXPPRPPWTTSXGPAGPRLRPPXPQGKAAPXRPPAPRGPPDLPGPIPDPPPPPPTTSSSGPPRRCPRPRRRRRRRSTTSSTRSRSPLPPCRRLSRSTRPCPVFDKPVYD

SEQ ID NO: 186442 - protein, 113 aa, Zea mays
  unsure (1)..(113): unsure at all Xaa locations
  Clone ID: MRT4577_101626C.1.pep
KNGTPVKPCSINFHVDPPXKKISSRFLTKEXKTPPQKGFKCTFKRGVLHLYLTSKGYRYRLLKWLQRQGKLGSHWTGASRIFRYPGAWIPVEYVSSVQLDPMLNRDPPFGFTD

SEQ ID NO: 186443 - protein, 66 aa, Zea mays
  unsure (1)..(66): unsure at all Xaa locations
  Clone ID: MRT4577_101627C.1.pep
KTYGPLDRRPLSEAXVLLSNKRHRALAEPVAPRTLREGQRPMQDEGVSVFVLFPCEICRQLSSTNQ

SEQ ID NO: 186444 - protein, 89 aa, Zea mays
  unsure (1)..(89): unsure at all Xaa locations
  Clone ID: MRT4577_101628C.1.pep
MQQHLPWXHLAGAYPQTLLAFNQLAAWNAAAYLQQQRLPPFTQLADVSPIALLTQQQLLPFYLYAAPNAGTLLQLQQLLPFAQLALTDP

SEQ ID NO: 186445 - protein, 95 aa, Zea mays
  unsure (1)..(95): unsure at all Xaa locations
  Clone ID: MRT4577_101629C.1.pep
PKKLGLKVGRTPPESXFSKLGVPHWPNWGFKKTNFLWPFPPKESFSLLQGRLKLSPQAPGEDFLEFGPGTLFFFPKGINCPWEFPRAVAKPSNFE

SEQ ID NO: 186446 - protein, 151 aa, Zea mays
  Clone ID: MRT4577_10162C.1.pep
RTRGEKAEKVFEDMFVKWKNLSSKYYTALLKVYANQNLLDKGEELAKRMDEEGAKFGTPTLNALVKLYADAGEVEKAESLLHKLSLKNNVKPSYSSYMTLLDSYSKKGDVHNSEKVFNKLRQIGYTGRIRMYQFLLHSYLHAKAPAYGFKE

SEQ ID NO: 186447 - protein, 124 aa, Zea mays
  Clone ID: MRT4577_101630C.1.pep
YAPTSDNDSTLYKTSRVPHERKTYAYMKQTVSTHHYHQTKMMINNSHMHMVFDINEEGHNRLHVANYTMLTRCRCPNFRNCTCSCLQESHYEPTLGPTSLMGLLPKGRLKWYCVYTQHQGHLRT

SEQ ID NO: 186448 - protein, 46 aa, Zea mays
  Clone ID: MRT4577_101631C.1.pep
SKEGFPRGQQGVIFAGKQVEDGRTLAGYSIQKESTLPLVLRLRGGQ

SEQ ID NO: 186449 - protein, 138 aa, Zea mays
  Clone ID: MRT4577_101632C.1.pep
MDKSMLGDLDGLPEEDKMRMAAMIDQLQIRDRFVPYQRISWAEQGRSFMVWKPVELARDLLPLHFKHYNFSFVRPLTTYVSTSKTPSTIYTTSILLVTEIVAAKSRFKFGSICVAFVYVQSKLMEKKTLASGGVTVAL

SEQ ID NO: 186450 - protein, 160 aa, Zea mays
  unsure (1)..(160): unsure at all Xaa locations
  Clone ID: MRT4577_101633C.1.pep
NSFFSHPIFLWGVEFYFLKLVKTGTKIFFFYTFPRSHIFEAKSIPFFFISWYVVFGGFFLFTLVMGCFLSFYLPFCYSLITFPFFTYXCLIFFFSLFFFFFFSFSFFSFXFMFLFTFTFXIPFIVFLKFTKFKLFLFXLIFPFFFXFFFLIVFFFXFFFY

SEQ ID NO: 186451 - protein, 198 aa, Zea mays
  unsure (1)..(198): unsure at all Xaa locations
  Clone ID: MRT4577_101634C.1.pep
SPSCSSVSIAPRTGRPAASAPRELSAQLRRLYASALAPSAGTAPSPTAXSTSLSMSIYGSTPPPPMSTPGSRAXPSASPSRCFPSAAASTSAAPAASACSSASRGSSPAPTLSPLASARPTTTRRPPSIRRSTVHVLSRRSCAAAPPPRGSSWLPVPSRLSPAARLTRCSSSPCSLCSCWGSHWSSPELVVSNRVFSS

SEQ ID NO: 186452 - protein, 312 aa, Zea mays
  Clone ID: MRT4577_101635C.1.pep
MEKSRVLVVGGTGYIGRRLVRASLAQGHPTLVLLRPEIGLDIDKLQMLLSFKAQGARLVEASLEDHAGLVAAVAQADVVVSAMSGAHIRSHNLSLQHKLVEAIKEAGNIKRFIPSEFGMDPSKMGHALEPGRVTFDEKMDLRRAIEDANIPHTYVSANCFAAYFCPNLCQMRTLLPPKEKVHVYGDGNVKAIFCDEDDVATYTMKSVDDPRALNKTLYIRPPENVLTQNDVISKWEKLSGNVLEKIHIPADEFLASMKGTDLANQAGVGHYYHIFYEGCLTNFEIGDDGADATLLYPEVQYTRMDEYMKRYL

SEQ ID NO: 186453 - protein, 57 aa, Zea mays
  Clone ID: MRT4577_101636C.1.pep
QKIHKNVNVVWCYMNKKSTIEHVMFCSETPDQFLAPMLFFSLILDRLSNLTKHFRSS

SEQ ID NO: 186454 - protein, 81 aa, Zea mays
  Clone ID: MRT4577_101637C.1.pep
KNLEGFPPPIKKEHQGGECSFLGGGSGFHLEKSGTAFLFTRASGGNKGFLWFFYNFANSGLLVGHYFEQPNPPNVLKIFRL

SEQ ID NO: 186455 - protein, 179 aa, Zea mays
  unsure (1)..(179): unsure at all Xaa locations
  Clone ID: MRT4577_101638C.1.pep
SRAGGADEGPGVAGPTSRVLILARRADRRRCLPFLVPRALRAAPPTFSPGWPLPPCLRAGAPVMSYSRAFTSVHGERPSSEYAKSRRGALGTQCGGVLGARSRGRFADAGFGPLLALYRGATISFHVVKLTIWGLWRNEMHKRAXSVXSLRRLGPFYIKVGQALSTRADILPSACCEEL

SEQ ID NO: 186456 - protein, 70 aa, Zea mays
  Clone ID: MRT4577_101639C.1.pep
MARTLSIVSVAVVAEVLLLASAATTSEAAITCWQVSFGIAPCLSYARCTGSAQSSSCCNVVRNLKSAFST

SEQ ID NO: 186457 - protein, 98 aa, Zea mays
  Clone ID: MRT4577_10163C.1.pep
RPAGSPPSQHFKGAGRKHQKSQRRSLDRRLLHLDPPNRQRKALCNRAGVPVRPDGRGAGRPLPQEEGRHHRLYKFDPWELPCKYPVIYNHAKNSEIVV

SEQ ID NO: 186458 - protein, 78 aa, Zea mays
  Clone ID: MRT4577_101640C.1.pep
RGRPMFPRPTRFHAPGGFPFVHAETSPSFFFCPICPVKPRPWPLKFLGSRQPRPSSDRFMGARIISPPPPLCPPSFFI

SEQ ID NO: 186459 - protein, 86 aa, Zea mays
  Clone ID: MRT4577_101641C.1.pep
LVRTPNAAFLNEKIIKRRYSGGLTVSTYSHSEMTLCVTAGFNQQRMEKAFRGRGRGTPRMWMLLLWNIPGSWFAHEKEKHMPLRIL

SEQ ID NO: 186460 - protein, 407 aa, Zea mays
  unsure (1)..(407): unsure at all Xaa locations
  Clone ID: MRT4577_101642C.1.pep
MCGRARCTLSPAEVARAFGFPTTSANAGGGGDGPAVPTLHLNRFRPSYNVLPGAYLPVXPCGHYQVAPTEEEVXGEGPVIQCMKWGLVPSFTGKAEKPDYFRMFNARSESVKEKVSFRRLIQKNRCLVAVEGFYEWKKNGSKKQPYYIHFQDHRPLVFAALYDAWTNSEGEITHTFTILTTHASTSLNWLHDRMPVILGSKDYVDAWLNDVSVKLEEITAPYEGADLVWYPVTSALGKASFDGPECIKEVHIGATDKPISKFFTKKSTAYDLSGKYENMSRELAHAYKAAKVECDGSVENQGGDGNQHQSREKQTTNCTIKDEPVTLEPQVFETPWSIEHEDTMTLAGATLETQRDLGFKRKIEDTQVEASMKPSQLTRKEKAVKAASDGQASLLSYFARKQGRSMK

SEQ ID NO: 186461 - protein, 45 aa, Zea mays
  Clone ID: MRT4577_101643C.1.pep
ASSERVIRDDCIGLGFTNVKDTMDDYYYRRRSPDLLPTAVLALLA

SEQ ID NO: 186462 - protein, 245 aa, Zea mays
  Clone ID: MRT4577_101644C.1.pep
MAMSDTGSSFAQWAALYHHHDPAGGPVLPDDDDDDAADAGNGIGIGSGTATAASPTSGGSSGGSPTTKAAWGQQHLLHGVEGPRVAGKPAAARRRSRASRRAPVTLLNTDAANFRAMVQQFTGVPAPLAGAFRVGDGAPVISFAADYGFPPASSSSAVNVSFFDHQLHRSQQHPAAPPVHRQQQQYAGASPFGGYSSGLVQGGGASDVFPASAEDRMLLQSILAAQMPHMPPVSGANTSSHGFFA

SEQ ID NO: 186463 - protein, 160 aa, Zea mays
  unsure (1)..(160): unsure at all Xaa locations
  Clone ID: MRT4577_101645C.1.pep
IQRFRECELIHGRWAMLATLGALSVEWLPGVTWQDAGKVELVDGSSYLGQPLPFSISTLXIWIEVLVIGYIEFQRNAELDSEKRLYPGGKFFDPLGLAADPEKTAQLQLAEIKHARLAMVAFLGFAVQAAATGKGPLNNWATHLSDPLHTTXIIDTFSSS

SEQ ID NO: 186464 - protein, 63 aa, Zea mays
  Clone ID: MRT4577_101646C.1.pep
VQRCSQASPRLGSSKVLVMQYRLCHAVSSVAGLVLTRYHASCGCNVDVSFLAPSSKYQHMRSS

SEQ ID NO: 186465 - protein, 77 aa, Zea mays
  Clone ID: MRT4577_101647C.1.pep
ASNPLYTEASGPAGMYSVNVTASTTNPVVNLSTGVVDVPISSTLFARFQFAVYFVDRVLRPPQLFHTASSAPAPGHV

SEQ ID NO: 186466 - protein, 194 aa, Zea mays
  unsure (1)..(194): unsure at all Xaa locations
  Clone ID: MRT4577_101648C.1.pep
METNLRAQSPLCSRTRPALAVRPDAAATGLTLSVIRRSRFTRGGLVRCMVSSSDYHKSSPRRTSTSKSKGVPSGGYASRPTAESSTKKIEQSSDDEGDFSRTNGSLYGEAAEQASTAEESSQVYSTGDISSSAERGEAGTEEEADQNQSSALFSVSVDDDSIDRKLDEYRXGKISAXXSSKPKSSSLAKCWLDK

SEQ ID NO: 186467 - protein, 90 aa, Zea mays
  Clone ID: MRT4577_101649C.1.pep
GHAPPACGRRRLDGSTDVPSVVDRCCGGDHGVSSGGERGDDAHLMDCRGTGDRLHFLQAFLSSRERRQGRRSKRQAHLGSRPCGCVASGR

SEQ ID NO: 186468 - protein, 104 aa, Zea mays
  Clone ID: MRT4577_10164C.1.pep
TPKTMADGILASVCAYIYHFINTSYENLYSRFCDDVFLTDENYEVAHVTITCNLQAESMFLMVKEVMDPSSIYGFNKDKMDRKSTRVYFSSFSEHIMTGDAHSL

SEQ ID NO: 186469 - protein, 108 aa, Zea mays
  unsure (1)..(108): unsure at all Xaa locations
  Clone ID: MRT4577_101650C.1.pep
TILWYSKQGASKNSCGNLINKKTPNLTPFVATVATSVYFPATHHPYLVAASSDQQQALASNVSTPSVIGTAIPSLYFXTSVFKKEKVSLAGRDQXIVRGGRDLLPLLP

SEQ ID NO: 186470 - protein, 139 aa, Zea mays
  Clone ID: MRT4577_101651C.1.pep
EKPIFSSKQVEPFGTRKERTNPARSGDQEQDPASCSRVRSFQQLRCRIRTQASCRRTNPPSYGTDKASQLPDTPSPPSPISDASALDGGARGPPEPGRQVGRAVPPAAVDVVHQHQPFHSAARGSVAPHGGHVDHRRHP

SEQ ID NO: 186471 - protein, 316 aa, Zea mays
  unsure (1)..(316): unsure at all Xaa locations
  Clone ID: MRT4577_101652C.1.pep
SSKLAPHGTCAPIRHLSYLKTSRVQPPFRFHLQAPSPSHXSHDHHHSHSHDDHHHHSHGDGGGHAAGGSWVGEDGRVWHSHDGLAPHSHEPIYSPGDFTKRAPPLASRDFADRAFTVGIGGPVGTGKTALMLALCRFLRDKYSLAAVTNDIFTKEDGEFLIKHGALPEERIRAVETGGCPHAAIREDISINLGPLEELSNLYKADLLLCESGGDNLAANFSRELADYIIYIIDVSGGDKIPRKGGPGITQADLLVINKTDLAPAVGADLSVMERDALRMREGGPFVFAQVKHGVGVEGIVNHILQAWEIATGNKRR

SEQ ID NO: 186472 - protein, 45 aa, Zea mays
  unsure (1)..(45): unsure at all Xaa locations
  Clone ID: MRT4577_101653C.1.pep
FNPLAXANPLVGPFLQQQQFFPYNRFFFINPVLLRQQPIVGGAIF

SEQ ID NO: 186473 - protein, 122 aa, Zea mays
  unsure (1)..(122): unsure at all Xaa locations
  Clone ID: MRT4577_101654C.1.pep
AAQAVHFSRLRRILLPLAPQKDLAPQAAIAVRRPKXAPLLRMIDPPASWSLPXCSPRACHSDIERPPCCARVRMHALLLCSNEHGSVIPLNVHVCVSVPLCMIVVPGPPKCYATVIYLHVYV

SEQ ID NO: 186474 - protein, 39 aa, Zea mays
  Clone ID: MRT4577_101655C.1.pep
NILAKPCLFDTNNKQQLVYGTLNKDPYYFKLNLYRYPNS

SEQ ID NO: 186475 - protein, 236 aa, Zea mays
  unsure (1)..(236): unsure at all Xaa locations
  Clone ID: MRT4577_101656C.1.pep
MTISLPATAAALSVVLAALCLLVVPAAGFYLPGVAPNDFEKKDHLPVKVNKLTSIKTQLPYSFYSLPFCKPDTIVDSAENLGEVLRGDRIENSPYVFEMRVPQMCQIVCKISVGEKEGKVLKEKIEDEYRVNMILDNLPLVVPIQRVDQEGAYFYQHGFHVGAKGQYSGSKDEKYFIHNHLSFTVKYHRDAQRDVSRIVAFEVKPYSVKHEYGQWNDXKTHLTTCDPNAERIITSS

SEQ ID NO: 186476 - protein, 31 aa, Zea mays
  Clone ID: MRT4577_101657C.1.pep
VLINSLLHDNTFRHIIFINCMNYLYISTNML

SEQ ID NO: 186477 - protein, 90 aa, Zea mays
  Clone ID: MRT4577_101658C.1.pep
GRVARRVGGQYFVRFRVGTPARPILLVTDTGSDLTWVKCRRRRHDAPAPGYSAPASNGSSSSSSSLAPAASSHARVFRPDRSRTWALISC

SEQ ID NO: 186478 - protein, 48 aa, Zea mays
  Clone ID: MRT4577_101659C.1.pep
SYTLETTSTHTNKTGYQQIHCSCEQLLGQLHSSSTGQQASQILHPRVR

SEQ ID NO: 186479 - protein, 122 aa, Zea mays
  Clone ID: MRT4577_10165C.1.pep
SRRARRMRTATVARRPDSSRLLASISYGGCFSPIIPAPVRVGEDELPPSWDPISSPLVTMLGRGSPRLNMLARGSPRFNMLLSKGAQKKKSPIATASKTHGGSPKDLLSFTYVQSFTCAGEW

SEQ ID NO: 186480 - protein, 37 aa, Zea mays
  Clone ID: MRT4577_101660C.1.pep
MSMACPLSADPFCPQAADASGPMPIFLVKAWVPGRVG

SEQ ID NO: 186481 - protein, 127 aa, Zea mays
  Clone ID: MRT4577_101661C.1.pep
APKAAAYAGKPTGGGFLPRTNVPVNPKLLLQETSPRAKGRAPCGAASMKQLPLFWGVPRTSDPAGAPGLKTRRYQVGRCCNLVPPPRGLWLAGKKAPPLQPDWDSRCWENCGGKIIGAPFSPGPPFF

SEQ ID NO: 186482 - protein, 64 aa, Zea mays
  unsure (1)..(64): unsure at all Xaa locations
  Clone ID: MRT4577_101662C.1.pep
PGQEAISEYTGTVITXVSHDRYFIKQIVNRVIEVKDQTIQDYQGDYNVSCPTVLYFPQLWFSDL

SEQ ID NO: 186483 - protein, 94 aa, Zea mays
  unsure (1)..(94): unsure at all Xaa locations
  Clone ID: MRT4577_101663C.1.pep
PSERKQGPLSHDPKDHVHNKLPAWHVSVVSSLAYRSLLERTXTWPPPAGRSALRRTVSADGMHRLLPAXLDTTPLHXARQEPITPSAQVNYTKL

SEQ ID NO: 186484 - protein, 865 aa, Zea mays
  unsure (1)..(865): unsure at all Xaa locations
  Clone ID: MRT4577_101664C.1.pep
MLSGIIDGLTGANKHARLKGTVVLMRKNVLDLNDFGATVVDSISEFLGKGVTCQLISSTLVDANNGNRGRVGAEANLEQWLTSLPSLTTGESKFGVTFDWEVEKLGVPGAVVVKNNHAAEFFLKTITLDDVPGRGAVTFVANSWVYPAGKYRYNRVFFSNDTYLPSQMPAALKPYRDDELRNLRGDDQQGPYQEHDRVYRYDVYNDLGEPDGGNPRPILGGSADHPYPRRCRTGRKPTKTDPNSESRLSLVEQIYVPRDERFGHLKMSDFLGYSIKAITQGIIPAVRTYVDTTPGEFDSFQDIINLYEGGIKLPKIQALEDMRKLFPLQLVKDLLPAGGDYLLKLPIPQIIQEDKNAWRTDEEFAREVLAGVNPXVITRLTEFPPKSTLDPSKYGDHTSTITAEHIEKNLEGLTVQQALDGNRLYILDHHDRFMPFLIDVNNLEGNFIYATRTLFFLRGDGRLAPLAIELSEPYIDGDLTVAKSKVYTPASSGXVEAWVWQLAKAYVAVNDSGWHQLVSHWLNTHAVMEPFVIATNRQLSVTHPVHKLLSSHFRDTMTINALARQTLINGGGIFEMTVFPGKYALGMSSVVYKSWNFTEQGLPADLVKRGVAVADPSSPYKVRLLIEDYPYASDGLAIWHAIEQWVGEYLAIYYPDDGALRGDEELQAWWKEVREVGHGDHKDAPWWPKMQAVSELASACTTIIWIASALHAAVNFGQYPYAGYLPNRPTVSRRRMPEPGSKEYEELERDPERGFIHTITSQIQTIIGISLIEILSKHSSDEVYLGQRDTPEWTSDARALAAFKRFSDALVKIEGKVVGENRDPQLRNRNGPAEFPYMLLYPNTSDHSGAAAGLTAKGIPNSISI

SEQ ID NO: 186485 - protein, 113 aa, Zea mays
  unsure (1)..(113): unsure at all Xaa locations
  Clone ID: MRT4577_101665C.1.pep
VIEERTVRLDTELVPNRGTNSRAESGRAPPTYGEXRRRFYKLIDPRLEGNLSVKGAQKVAHLAHQCLSRHPHAHPLMRQAEEELNPQHNLKDMASAYYFFQTMHAERMAHSSS

SEQ ID NO: 186486 - protein, 48 aa, Zea mays
  Clone ID: MRT4577_101666C.1.pep
LHAHCNRSLFSLAIIAHHLSSCKCRAPVSGYRATENSIFVKKKKKKDL

SEQ ID NO: 186487 - protein, 80 aa, Zea mays
  Clone ID: MRT4577_101667C.1.pep
MDVSYTILNTEAWLKKLDEYIITRSCITGYQAFKDDWAVYTSLSSAPSSKYINVARRFNHIDALPRLSAITAHGHGVKVE

SEQ ID NO: 186488 - protein, 69 aa, Zea mays
  Clone ID: MRT4577_101668C.1.pep
PVDHASERFNTYLSTNFLPPFNSTPLGHLSELILAYLLPLLTYLTSQHTFSPYMLFTTDNATNASSTRT

SEQ ID NO: 186489 - protein, 37 aa, Zea mays
  Clone ID: MRT4577_101669C.1.pep
METVILRCKQKHLHGRYILKNNEQLIKSQYHGYKECF

SEQ ID NO: 186490 - protein, 206 aa, Zea mays
  unsure (1)..(206): unsure at all Xaa locations
  Clone ID: MRT4577_10166C.1.pep
MGATSRXLSCFLLAELLEGVTAATTFNQRRGGASRLGNSGRVACNDARAASEMPHSSSSTTTNSASCMHPMPHPKATPKAMTDSDATSKHDLGPRXECTAVIYAEHIYPAETLAIALAGKMSHTKAEPNIVTKRXQTSDAEPEXEAIQEDIAVXNAEAKPEPKPEXKPEARPEPXETKAEPIPEPTAESETEAQTKAEPKPEPIPE

SEQ ID NO: 186491 - protein, 118 aa, Zea mays
  Clone ID: MRT4577_101670C.1.pep
ERAMCLPVLLLVKALAAGGKSDHLAGCCYSHWRGASFVIQRHLYQLNPPLDLLVSLPCVMSVFIDRGYTNHILGCTSSFPVMGNRPFFFLKKCRCSCIRLPQNMYGPFLKFDNISRNQ

SEQ ID NO: 186492 - protein, 156 aa, Zea mays
  unsure (1)..(156): unsure at all Xaa locations
  Clone ID: MRT4577_101671C.1.pep
GGGGFFFFFFFFFFFFFFFFLPEVSGVFSQKKKRGRFQTTTTVNPKXLSRPGGKGPFSPALPRPLPISPSPQPNCPRAHIELRANSCLPPGSRDRETTATSAGLGAGPLEPGPPGAVAEVXEVKNPGAGDGPVEEGGAALGEVLPQPVLPGPRGPG

SEQ ID NO: 186493 - protein, 93 aa, Zea mays
  unsure (1)..(93): unsure at all Xaa locations
  Clone ID: MRT4577_101672C.1.pep
PSEFTSTTRGQDIAAPHATESATXAXXXPQSXXXPXAXXPQNXPPETTRGAEQPAEQADRRQQAQAASDKQQPXAQKQQQATAQXNQQTNATQ

SEQ ID NO: 186494 - protein, 156 aa, Zea mays
  Clone ID: MRT4577_101673C.1.pep
VIPSDLPVGAAEAEAGGDPSGEHHAHEVMSLSQSESETEGSEDYEDSSSTQSDGTTATAEENGSATPKPIRRSASMDSPLFLVAVPEAQDDVMQYNCKLPNAREMKVFRVKEKDAAGTSSTSCQSGRFKIGRSMSSSGQGFFFSRNGRSSGAVLPL

SEQ ID NO: 186495 - protein, 88 aa, Zea mays
  Clone ID: MRT4577_101674C.1.pep
TPPETKSMNAHLRGADTMGGKPAQLHKRRPTSPPTKADKGNYDAGKQDTKLAAAERTGAPPRDTSPLPEYQQPRGPKERPWGANRAAN

SEQ ID NO: 186496 - protein, 47 aa, Zea mays
  Clone ID: MRT4577_101675C.1.pep
RGRSAVAMTAANAFRSTPLLVVRLRRLSAAASHVRCPCGGSSIVTAS

SEQ ID NO: 186497 - protein, 183 aa, Zea mays
  unsure (1)..(183): unsure at all Xaa locations
  Clone ID: MRT4577_101676C.1.pep
SWSWSLFLLSFFRSFPCGFFFFFFGPCLFFGSWPHLLLACPLSAFFPFCGRPGLGGFEPLLPGAVWPRGPPPGWXGGWAAGSPAXPPPXPASGGLGPPCGPXGPAFLGAPRRPPPGGVPRSPAVPFPPPGFGXHFPPSPPPPRSXSPXPPRPPSRARGXPPVPGGPPAPPPPPLPRCVPPPGK

SEQ ID NO: 186498 - protein, 146 aa, Zea mays
  unsure (1)..(146): unsure at all Xaa locations
  Clone ID: MRT4577_101677C.1.pep
LVRSQNFVCSAFVPVDDAPFPHWFCTRHGVDIGSPWRXPMVKXDNAGGQEVXASAKEPPCSNHVSRKHEERNQGRSLDPPIWERLGSGRFLACLCSGRGKCGVPPWCVRAGIXLEFSMKKVRRKQGKIAPSYGIFSDCLAPKCGSS

SEQ ID NO: 186499 - protein, 60 aa, Zea mays
  unsure (1)..(60): unsure at all Xaa locations
  Clone ID: MRT4577_101678C.1.pep
PSKXLQSNYIHLSLNAHTLLSIYYLTHSFKPYWQLSTNYQHFNHYLLQHIISTCNIQYSL

SEQ ID NO: 186500 - protein, 125 aa, Zea mays
  unsure (1)..(125): unsure at all Xaa locations
  Clone ID: MRT4577_101679C.1.pep
LRVGGLVGPRCCFTCGLGAIQTHXSSVNRTCQGPNGTRXAVSMNNETFDMPXTXLLQAHYQHHYRGVLVVNFPVVPTTRLDYTGAPPNNTXGTHGTQXVPLSFNITGQVGLHDTSNLGAHSHPVH

SEQ ID NO: 186501 - protein, 224 aa, Zea mays
  unsure (1)..(224): unsure at all Xaa locations
  Clone ID: MRT4577_10167C.1.pep
GCRLGKQIHLPYHSSESMYGXDLVHSDVWAPAPFASKGGHLYYIIFIDDFSSHTWICFTKNRSEALSIYKILSTMFNTQFNTFIRVFVXDSAGDTFLELFARFLIRKGMFVYFSCPSAHAQXNGVAERKHRHLLENPRALMLASSVSPHFWTEVISTATYLTNIQPSSALRDDIPFQRLFGKMPDXSSLSLFGCVLCACKSRALKIDXHSLMSVFLGYSVEHEC

SEQ ID NO: 186502 - protein, 235 aa, Zea mays
  unsure (1)..(235): unsure at all Xaa locations
  Clone ID: MRT4577_101680C.1.pep
MADRVYPAAKPNPPPGAAGNSNGVFYLLYRPQRPSFSVSSVRLASLNLTSSATAPVLSDAITLTVTARNPNKKMVYLYDDLTLLVATAANAVPLGSATVPGFAHAAGNTTVLTATVSASAVGVDPSGASSDIKRSGGGSFSVVVDADTSAGVRVGGLKTKKIGIQVHCEGIKLTAPPPPPPAPKRAKGKNSTAALAPALAPSAADATPAKTATVSTAAHSCKVRVXRAKIWKWTF

SEQ ID NO: 186503 - protein, 40 aa, Zea mays
  Clone ID: MRT4577_101681C.1.pep
KRPPGQVQFFFGWQENQYKYIWLSESIISFNNRIEMVIPP

SEQ ID NO: 186504 - protein, 380 aa, Zea mays
  Clone ID: MRT4577_101682C.1.pep
RVRAQRQRAHPQRQASTAPAAATRSAAAPQGQGPTACIPAAAPPPPPPAAGASNAGEGERGPSTGPPEQSHSTSGSHPKPRTASPPMADRVYPAAKPNPPPGAAGNSNGAQASSFPAPKSQMYQRPIYRPQAPAKRQRGRSCRCSLCCCFCWALVVVILLAFVAAVCGGVFYLLYRPQRPSFSVSSVRLASLNLTSSATAPVLSDAITLTVTARNPNKKMVYLYDDLTLLVATAANAVPLGSATVPGFAHAAGNTTVLTATVSASAVGVDPSGASSDIKRSGGGSFSVVVDADTSAGVRVGGLKTKKIGIQVHCEGIKLTAPPPPPPAPKRAKGKNSTAALAPALAPSAADATPAKTATVSTAAHSCKVRVRVKIWKWTF

SEQ ID NO: 186505 - protein, 173 aa, Zea mays
  unsure (1)..(173): unsure at all Xaa locations
  Clone ID: MRT4577_101683C.1.pep
QVIACMGDRTWQQPHAQASSPDAGTKVQASSSSVHGNIIRKEPAGGGGYDDMAEFDQALFLYLNSSQDQASVIQDQPQTLNIFPSEPMHVVEPAAPKESMGATTNNTAWNNAGAGPSKQPPSNLPSRTTATPAGPRKDGSKPPAAVKREGSSSGGAMGSGTPXTSNQQEGPTR

SEQ ID NO: 186506 - protein, 43 aa, Zea mays
  Clone ID: MRT4577_101684C.1.pep
ACVLGPSPGSNIDSTLTLVRAYGRKLKNDYVNDRTPGRTSGSA

SEQ ID NO: 186507 - protein, 137 aa, Zea mays
  Clone ID: MRT4577_101685C.1.pep
ATSQYIPADTYETATLFLTMLTVCTSILVQKLVLERESTSLTCCPGTVYIKHSGLRHNTAVHSCRRPYRRTTPVPAATRLIVKKAASLDSCQTYSTFFLQTEEYSYTEHMLPSTALGHNQLIGHASHDLAQPHYSPL

SEQ ID NO: 186508 - protein, 90 aa, Zea mays
  Clone ID: MRT4577_101686C.1.pep
LCFRPSPIIIGASQRARRRTLFTSNISAERDLLPFLIVPHRTRIEPLHLRSSVCLRLLPFTLIEFFSCHQGNLDLVAHATTALPRPLISP

SEQ ID NO: 186509 - protein, 88 aa, Zea mays
  Clone ID: MRT4577_101687C.1.pep
PSPASRSTLATYLGVRMFALGLAAGWVASMCSLSLRMFHQQTYLTRHLSERSRVSVRHFVINPARVNGALHGYKIPVYMLSSRIPSLR

SEQ ID NO: 186510 - protein, 69 aa, Zea mays
  Clone ID: MRT4577_101688C.1.pep
MAHSEFSIMMAYCFRSKRLQVRTCQPINDVFCLLNNAVNGALKRSWRGLGISCPKHYLERLFIHSFKIP

SEQ ID NO: 186511 - protein, 35 aa, Zea mays
  Clone ID: MRT4577_101689C.1.pep
SLLKDALTYILIEYLYNSSRDNLVHIRIILIKYLL

SEQ ID NO: 186512 - protein, 146 aa, Zea mays
  unsure (1)..(146): unsure at all Xaa locations
  Clone ID: MRT4577_10168C.1.pep
MSSSHSQARSQESAMDNLQVTPTSAFTQCNDLWPEGLDLCHKYRVSSAMQTQVISNKAPIGIXATVDNTXWTVRDTPSXNAELAGRXQALNIQYRNMSQRPSAVWIVYRRSTAYTVEATAYRAESCGVDLLGARNAQLDMQQVGIY

SEQ ID NO: 186513 - protein, 137 aa, Zea mays
  Clone ID: MRT4577_101690C.1.pep
RGGPPPFQGGGAPIGGGGVPSGGGPSNVFCRAFTQIAHQIGGPMAGVFIVSPNWGGGGPRAKKGPSVSLIKRFPPPLFLKEVQGQSKWGLFFAHWAKKINFRFFFFFQTPMVFRFFKFLTWQRPLGFPQGILEVSVS

SEQ ID NO: 186514 - protein, 436 aa, Zea mays
  Clone ID: MRT4577_101691C.1.pep
VVLFDQTDANPKADAASRPARCPDWLRPEMLQCPIALDLMTDPVTVSTGQTYDRESITRWIKAGCHTCPVTGERLRTADVVPNAALRGIIERMLLSNGVSLPDPSSSGHRHGALGNTAVPFGPAAAGAARLAVAYVVAQLSMGSTAERRKATCEARKLCKHNMFYRACLVEANAVPWLLCLLSSTDASVQDNAVASLLNLSKHPRGRAALFEAGGVGLVVDVINVGARAEARQNAAAVLFYLSSNAEHAEEIGRIPEAIPTLVQLIRDGAHRGRKNAMVSLYGLLQCASNHGKAVGAGAVSALAGLLSGDRDDLASDAVTLLARLAEQPAGAQAVLARPGLVARVVEALATSASRSGKDHCVALLVSLCRHGGDKVVALLGRMPGLMSSLYTLVADGSPQTCKRARALLNLIHRHYEMDGQQPASEVPGERVVRVL

SEQ ID NO: 186515 - protein, 124 aa, Zea mays
  unsure (1)..(124): unsure at all Xaa locations
  Clone ID: MRT4577_101692C.1.pep
MAGGGGVHDFXQEMGSLMAREEPXYSGGRAXMRGGRDGQGFHRATGLGXRLLHWWRGRGGFXSGAGLETKQARAEDGFVTLGSLRVRGRALLXPDGGLTMVGMVNKSVHGGGFYPSGSDGGCPP

SEQ ID NO: 186516 - protein, 55 aa, Zea mays
  Clone ID: MRT4577_101693C.1.pep
KGAPNLKFNGERRQNVAIKVGKKAKVAGAWALASLMVKLGVTPPPPAFKGTLQGG

SEQ ID NO: 186517 - protein, 42 aa, Zea mays
  Clone ID: MRT4577_101694C.1.pep
VSCVRRKRGLSSIMVPARLLFGFLASGVRRLLWKKHFNPLAW

SEQ ID NO: 186518 - protein, 32 aa, Zea mays
  Clone ID: MRT4577_101695C.1.pep
VIRPASLPASPRLAIPQVLMPYGSKLLYTGEV

SEQ ID NO: 186519 - protein, 68 aa, Zea mays
  Clone ID: MRT4577_101696C.1.pep
THASKRGYTIMLTPPSTIPISVLGSMHHLLAIHLQPPHAILFPVGRHSRLLVGSHWRVSCCCVGGGFS

SEQ ID NO: 186520 - protein, 57 aa, Zea mays
  Clone ID: MRT4577_101697C.1.pep
HQSTFSYICILGLRHYFSVVGDMSVENKVQRKTKISTTLYSSLRIKASYSDSCSCNP

SEQ ID NO: 186521 - protein, 59 aa, Zea mays
  Clone ID: MRT4577_101698C.1.pep
LIVYWLIVTQLAIIRLTATSLGTKSRPDFYSNEPSIEGKLKLIHWTPFGILFHSIQGIV

SEQ ID NO: 186522 - protein, 100 aa, Zea mays
  Clone ID: MRT4577_101699C.1.pep
HSLILFTYFYFINLSTLLLSCLNITVGTINHYPLFTPSSTSLQTLILHYTFITTIYHSMLTTYTTNPTSQYETNLIFPTQLLFNTYTLHNLLHPIIHILY

SEQ ID NO: 186523 - protein, 75 aa, Zea mays
  Clone ID: MRT4577_10169C.1.pep
QVSLYLVEKKVIKVRRINVFWGNWCTPQTSQKHTTRNQGGQRRGRLKINLSDLTGIFLVGKFAGLKPLMPGASIN

SEQ ID NO: 186524 - protein, 59 aa, Zea mays
  Clone ID: MRT4577_1016C.1.pep
ALVCVKNWLIGFNSQKKGEPNPGKRKFYSKNKEKNWEILNRLRSSLVLPVPNEKKSINF

SEQ ID NO: 186525 - protein, 193 aa, Zea mays
  Clone ID: MRT4577_101700C.1.pep
QRERHCQPRNDKPLSPRRPYPFIVIEGAQRTGRRILGKTLAKSIGARVVGGVPRCMIKLRHLFEEETELKRLFFGVCNYVTAFNVRHMLEHMPVVLIGYWMDQATFNIAKECSAGLPPPDSFLYKFPADLLKPDLVFYLNTPREEGLATAMFADQMFNNRLPVHIDCAWNLLSSARGEPLQYKLLRVCGGPDF

SEQ ID NO: 186526 - protein, 163 aa, Zea mays
  Clone ID: MRT4577_101701C.1.pep
MARILAAVWPIVKGCITGGVFGITIADWSASYVTLHGASMHPTFDPQQAERALVDKRCLHRYHFSRGDVVVFRSPRDHRELVVKRLIALPGDWIQIPEKQEIQQIPQGRCWVEGDNAATSFDSRSYGPVPMGLLRGRVTHIIWPPHRIGRVDRKMPEGRIVPL

SEQ ID NO: 186527 - protein, 42 aa, Zea mays
  Clone ID: MRT4577_101702C.1.pep
KKKKKKKKKKKKKKKKKKKKKKKKKKKKIKKKKKNFFGAEPP

SEQ ID NO: 186528 - protein, 73 aa, Zea mays
  unsure (1)..(73): unsure at all Xaa locations
  Clone ID: MRT4577_101703C.1.pep
LPLPVRXSIVSRRACVHLSPMAGRPSQSLLPEPLPHRVRVHPRQCLPEPSEVQGHVLAAQVDARHVLDRDLEL

SEQ ID NO: 186529 - protein, 112 aa, Zea mays
  Clone ID: MRT4577_101704C.1.pep
GNMSVNSGWEISSAHTTLASCCCRIVYGFYDRSVKIAEPLSSSVSLSLFIQQTLLLPVKMCTAPTASAGFSSDAHFLHLSHRCCSLSVCRDCCWDIAINMVCSRIECAKLLL

SEQ ID NO: 186530 - protein, 76 aa, Zea mays
  Clone ID: MRT4577_101705C.1.pep
IARPPLVVYFFFLGFFFFFYKDTIQKAHKRLTLASTSIYTVHNCSKTQHYVLAGDVTRYNIQSQKYGNVIFSPTQL

SEQ ID NO: 186531 - protein, 72 aa, Zea mays
  Clone ID: MRT4577_101707C.1.pep
TTVTLTPIRRTSQVLRGRLETNLGSQSFCAPLIILLSYLVSRPTLVYTDPLSTAISTTSPTFYFDANIFTLS

SEQ ID NO: 186532 - protein, 132 aa, Zea mays
  Clone ID: MRT4577_101708C.1.pep
PETKSVCNTQPLVYFVKRWGQTAIVHTQYIGLVTREGFCRGKSTPSTLEEVVEGARRGHPKKRLLDVPKNLCLPGIVVLKEERFCLFFVRPNNHGRLFVLFEAHEQGHFGGFSHKKGLTGASLFLEGGVSGL

SEQ ID NO: 186533 - protein, 363 aa, Zea mays
  Clone ID: MRT4577_101709C.1.pep
MARVRSTARVDREGDETEATETVPISEAMKRSGLVTSEDAPAAEAEQADIEETDSEDDYNSAVLSKPSHLDFGKSTISEGDLPKMVKLGYFSEAKKELIRFGGEEATPKPGKDEVVVFKSFFKAGLRFPLNKMIADVLKKFGIYLHQLTPNAIVRLSVYIWALRSQGVEPFAEGFCRVHELHYHTKARADGLHENFGCYNFAYRKTTKFPVISYRSKWRAGWKSEWFYIKVDEDKEKLVESPLELVFGETKPQCNMTPEGPTQIALAEFRVIAEHISTRDLVQEFLAFRVFPTMKEWAMPKLEGKKKEGELVRLPYHYKFKRHFKVPCQEWLDTIEVMCNEILGNYSRKEDQLMTAAFGTRPK

SEQ ID NO: 186534 - protein, 390 aa, Zea mays
  unsure (1)..(390): unsure at all Xaa locations
  Clone ID: MRT4577_10170C.1.pep
TAAPRSRRPRYPSSASKEGVINESQITKGFDRLIDSLDDLALDVPNARCLLKSVIHKASSEGWLSESCLKPLPPEPKKGSEVDDAAVRQFKEKAVLIIKEYLLTGDIIEVMSWLEAENYSCCPSFNAIFVQKLVNAAMDRKSREKEMASVLLSSLCMPPEDVVAGFHLLIDAAEDAALDNPAIVEDLTMFFARSVVDEVIAPSDLEALXRRTPAASXDGSAGMLALRNAHALLGAKLSAERILRCWGGGGSGKAGWELDEVKDKIGKLLQEYDCGGDIREACRCIKDLGMPFFHHEVVKKALVAIIEKRGRDERLWGLLSECYGRGLITPNQMTKGFDRMADCVDDLALDVPDAAKQLGCCIERAKKDGWLDPSFSMTTPGLPVANGVCS

SEQ ID NO: 186535 - protein, 37 aa, Zea mays
  Clone ID: MRT4577_101710C.1.pep
KKKKKKKKKKKKKKKKKKKKKKKKKKKQKKKKKKKKK

SEQ ID NO: 186536 - protein, 49 aa, Zea mays
  Clone ID: MRT4577_101711C.1.pep
TSGCLLRYLLLPPNFFGRSVKLNRFFVLSRTIASSIQSDAMLISIPTVH

SEQ ID NO: 186537 - protein, 175 aa, Zea mays
  Clone ID: MRT4577_101712C.1.pep
MYPAKPAASSSQPAAEMAQPVVGIPISSPGAVAVGPVVGKWSSGLCACSDDCGLCCLTCWCPCITFGRIAEIVDRGATSCGVAGTIYTLMACFTGCHWIYSCTYRSRMRAQLGLPEACCCDCCVHFCCEPCALSQQYRELKARGFDPDLGWDVNAQKAAAAAAMYPPPAEGMMIR

SEQ ID NO: 186538 - protein, 99 aa, Zea mays
  Clone ID: MRT4577_101713C.1.pep
PLASLSSLLFSLHAICTNRCLHLHLHLHPTQRRTGCLTCWRPCITFGRIAEIVDRGATSCGVAVTIYTLLACFPGCHWINSCTYRSRMRAKLRPPRTLA

SEQ ID NO: 186539 - protein, 57 aa, Zea mays
  Clone ID: MRT4577_101714C.1.pep
LCSVIWVLTMCSCARSISMSMSDAYVEVLAALYRHLARKRIRTRPGTSDRMPERTRG

SEQ ID NO: 186540 - protein, 81 aa, Zea mays
  Clone ID: MRT4577_101715C.1.pep
RTNGPGQTTNRRQTPITTGRVPVLKCCFQVKQATPHYCIHSSTSNASENPNYLAAHGPESCTGPKVSSQGVDWRNVVQVQP

SEQ ID NO: 186541 - protein, 121 aa, Zea mays
  unsure (1)..(121): unsure at all Xaa locations
  Clone ID: MRT4577_101716C.1.pep
LGYAXVTDGGAVYTNMFDAIVDATHAAVEKAGVQGLELVVSEXXXXXXXXXXXXXENAAAYNNNVVRHVDGGTPRRPGKALETYLFAMFNENGKAEGVEQHFGLFQPDMSEVYHVDFTAGX

SEQ ID NO: 186542 - protein, 136 aa, Zea mays
  Clone ID: MRT4577_101717C.1.pep
LTAACIYLHPTQRRTGCLTCWCPCITFGRIAEIVDRGATSCGVAGTIYTLLACFTGCHWIYSCTYRSRMRAQLGLPEACCCDCCVHFCCEPCALSQQYRELKARGFDPDLGWDVNAQKAAAAAAMYPPPAEGMMIR

SEQ ID NO: 186543 - protein, 223 aa, Zea mays
  Clone ID: MRT4577_101718C.1.pep
DLRLRDVNDHSGTPTLSMKLLIDRKAQRVLFAEASKDVVDFLFSLLTLPVATAVKLVGKKAMAGCVGNLYAGVEKLDSTYVQDGAAKDALLCPTVVSPAANASSSLLPLPEPSVQPKMYRCINNSYCSCLNYITDEHGKACPRCGCSMTTEMQYLPSASPRSDSGQVAAAQRTAGGFVQGIVTYMVLDDLTVTPVSAIVSSITLLETFAGADIGDIEQKNVQL

SEQ ID NO: 186544 - protein, 231 aa, Zea mays
  Clone ID: MRT4577_101719C.1.pep
QFGLPLSSLIPGDPAAQVLPAMKNLESALRSAGVAGVPVTTAVATSVLGASYPPSQGAFSEAATTVMAPLVSYLSSRGAPLLVNVYPYFAYSSSGGQVALGYALLSADAGAASSVTDAGVVYTNMFDAIVGATHAAVEKAGVQGLELVVSETGWPSAGGEGATVENAAAYNNNVVRHVDGGTPRRPGKALETYLFAMFNENGKAEGVEQHFGLFQPDMSEVYHVDFTAGSP

SEQ ID NO: 186545 - protein, 108 aa, Zea mays
  Clone ID: MRT4577_10171C.1.pep
MTKTMQVLNEASWQETFKALWISTLRLVQRAREPLEGPIPHLDARLCMLLALIPLSIAANLQEESDMFGVEWNKILPQRQGLISSLQNLIPYSGLLVPPSSVVNAANV

SEQ ID NO: 186546 - protein, 111 aa, Zea mays
  unsure (1)..(111): unsure at all Xaa locations
  Clone ID: MRT4577_101721C.1.pep
MAAVGEASGRRAASCFFEVGQREIGSSSSRASSCRISGSEGLILRMNQYGKLRGHSGCVNTISFNPAGDLLVSGSDDTDIILWDWLGKTEKLTYPSGHXQNXFHGRVMXFT

SEQ ID NO: 186547 - protein, 93 aa, Zea mays
  unsure (1)..(93): unsure at all Xaa locations
  Clone ID: MRT4577_101722C.1.pep
FXLSGFSSVRCAPVFPASFLFAVGSPLALXFFASLLLPLAGWPGGLLRVALWSLVVWLSPSXLLPSGPPAGAVLLGRXXXXACXSALAPPGFR

SEQ ID NO: 186548 - protein, 87 aa, Zea mays
  Clone ID: MRT4577_101723C.1.pep
QVSLCTCSVKKHRLVSSCANHVQAIFLSIEPVPNLHKLSGAHPNSISCDYLSFHLDLVILFLMNHVGFIIRISGSPIDSAPLSGYLL

SEQ ID NO: 186549 - protein, 84 aa, Zea mays
  Clone ID: MRT4577_101724C.1.pep
KAGHELQKPARPQHKKRHIRRATELYTERARDVKPSQQPKTMNAQKGHTTREIATHLAQTDNMKDARQSQIQIRLRWDKQRAKT

SEQ ID NO: 186550 - protein, 94 aa, Zea mays
  Clone ID: MRT4577_101725C.1.pep
EPLDLRVRQRFGGGGVGGRRPRSRSRSATRSASRCRGARKGQAREIVEVRAGSLGSPWLAAAPSTSTAAGTGTSAFSPTLASTSTRTSSATDSN

SEQ ID NO: 186551 - protein, 251 aa, Zea mays
  Clone ID: MRT4577_101726C.1.pep
MAGKEERKRVLVVGGSGYLGQHLLAASSTVDRLDVAFTHHSPAPPQPLLETLPSVRAFRADLRSGDGFEAISASFGQPHVVVNCAAMSVPRACELDPPAAMATNVPSSLVNWLLSFGNEDSLLIQLSTDQEDETMPVNMYGKSKVAAEKLIVEKCSNYAILRSSIIYGPQTISPVAKSLPIQWMDGVLSQGQQVEFFSDEFRCPVYVKDMVDVILSLTKTWFPDDGKKVQVLPDVGGPDRVSRLQMAESVA

SEQ ID NO: 186552 - protein, 78 aa, Zea mays
  Clone ID: MRT4577_101727C.1.pep
NLRVMRTSKKGQEKIEGSENRLGHPSRAPRPRELSEREEFTFRLVEGHTDGALLSYAVAASSFLPPFARASKIGKAFN

SEQ ID NO: 186553 - protein, 322 aa, Zea mays
  Clone ID: MRT4577_101728C.1.pep
MAGKEERKRVLVVGGSGYLGQHLLAASSTVDRLDVAFTHHSPAPPQPLLETLPSVRAFRADLRSGDGFEAISASFGQPHVVVNCAAMSVPRACELDPPAAMATNVPSSLVNWLLSFGNDDSLLIHLSTDQVYEGVKSFYKEEDETMPVNMYGKSKVAAEKLIVEKCSNYAILRSSIIYGPQTISPVAKSLPIQWMDGVLSQGQQVEFFSDEFRCPVYVKDMVDVILSLTKTWFPDDGKKVQVLLNVGGPDRVSRLQMAESVAVVRGYNPSIIKSVSASSVNRGVASPPDISMDITKLTQILGIKPISFQDGVRSTLDAEDST

SEQ ID NO: 186554 - protein, 100 aa, Zea mays
  unsure (1)..(100): unsure at all Xaa locations
  Clone ID: MRT4577_101729C.1.pep
MRERPVPXKKKKKKKKKKKKKKKKKKKKKKKKKKKKKKKKKKKKKKKKKKKKKKKGGAGFRGPKFTSPSLPRKSFFLGAPKLNYWAGFLNLRAGKNPGFF

SEQ ID NO: 186555 - protein, 93 aa, Zea mays
  Clone ID: MRT4577_10172C.1.pep
SITYQYEVKKLRQPCLPVKTLDPMTFLTAEMLPPPQQLGRPVLEGSGCLLGRMYTWNTGCAQITPGTVCAHPVRRKLASPTPWKPRRHTPVLD

SEQ ID NO: 186556 - protein, 98 aa, Zea mays
  Clone ID: MRT4577_101730C.1.pep
DSLVSAPARASVFRHTGSHKQRCHLHDQREPMVQERSVRKLPVLSSSDHVASYLVWCGIHSSVLIARFSLVSKWFFWQMEHATAGALAALSGSPLLKI

SEQ ID NO: 186557 - protein, 76 aa, Zea mays
  Clone ID: MRT4577_101731C.1.pep
SRVITLTGFTTKFFITQAKINEDLAPKIKLTSPTRLKSWGKEPRCEINRGDPHKGGNPRLEHQKHVRTGTTASGRG

SEQ ID NO: 186558 - protein, 55 aa, Zea mays
  Clone ID: MRT4577_101732C.1.pep
MDDEDYYDYCYSVVGDAGDGGSVESLVPVDYDDGLEADGTERCAVHTRSVMCGSK

SEQ ID NO: 186559 - protein, 67 aa, Zea mays
  Clone ID: MRT4577_101733C.1.pep
GEQAVLLKTHVDQMKSIMIQNIHKAFYRSHQIDQLPTRTHQLHYESVDLMRQGVHLQLKMCYQNINV

SEQ ID NO: 186560 - protein, 58 aa, Zea mays
  unsure (1)..(58): unsure at all Xaa locations
  Clone ID: MRT4577_101734C.1.pep
WGSKPGSCGAVYTHNETIDXRXRLRRLALYTIDLIEDPYFMRIHLISYXCKLCLTLYN

SEQ ID NO: 186561 - protein, 57 aa, Zea mays
  Clone ID: MRT4577_101735C.1.pep
FFSVPPSTPLGHLIRRVGASFSPFHLYTNRIPGRIRSHLFPDPWKSKGISKLEHLQP

SEQ ID NO: 186562 - protein, 122 aa, Zea mays
  unsure (1)..(122): unsure at all Xaa locations
  Clone ID: MRT4577_101736C.1.pep
YSSFHILFYFFSTYSYTSRGALLLPPGHPPLSIHXLTIHQLPTKPPQQSSNSYVPILLIFPLTIILLLSTITYTYQTPSKLLTPSSSSTFYSITTSFYYFTYKSIIYIYLHYPLSINHPITL

SEQ ID NO: 186563 - protein, 869 aa, Zea mays
  unsure (1)..(869): unsure at all Xaa locations
  Clone ID: MRT4577_101737C.1.pep
KKNVKWQMRKLKKLGKVVKDMRYTIYSPLDGQPCADHDRARCTXVDTGNMHXKKVSSVRPPAMTNSLWDWVFCEGPATISENTVXGRXNFKLQLEDMYGFYDLESAEDFILTAWSAFNLKHQHLSRVPEKPTCLCELSGSDLIGLPLKSPLAFNETIYALPMLTVLTDKGTGIVTSVPSDSPDDFMALQDLVTKPALRAKYGVKDEWVLPYEIIPIIHIPEFGDKSAEKVCHDLKIKSQNDKEKLAEAKRMTYLKGFTDGTMIVGEFSGRKVQEAKPLIKSKLLEEGTAVLYSEPEKKVMSRSGDECVVALTDQWYITYGEAEWKQKAVKCLDRMNTFSTETRNGFEHTLGWLNQWACSRSFGLGXTRIPWDEQFLVESLSDSTLYMAYYTVAHLLQNGNMYGKEISSVRPEEMTDEVWDFVFCDGPAPKSEIPAALLNKMKHEFKYWYPFDIRVSGKDLIQNHLTFCIYNHTALLPEHHWPIGFRCNGHLMLNSEKMSKSTGNFLTLEDAIKKYSSDATRFALADAGDGMDDANFVTETANSAVMRLTKEISWMEEVTAAESKLRTGPPTTYADRVFSNEMNIAIKETEKSYNAFMFRDALKSGFYDLQLARDEYRLSCGAAGMNRDLLWRFMDVQTRLITPICPHYAEHVWQKIMKKEGFAIKAGWPVADTPDPTLRIANKYLQDSIVLMRKLLQKQESGSKKPKKGAAPAPPSEEKKMSIGLIYVNEHYSGWKEQCLRVLQSKFDSQSRSFSPDQEIAEALKECPIGQEMNLKQVQKLCMPFIKLKKDEAKEVGPQALDLKLPFGEMDVLRENLELIKRQLGLEQVEVLSASDEAARAKAGEHASLLEKNPPSPGDPIAIFLSKQS

SEQ ID NO: 186564 - protein, 104 aa, Zea mays
  Clone ID: MRT4577_101738C.1.pep
NFSKKGGFGNFFNHARGGLSIQIPPNWGKNQNPFVWGLNLPFLGAFQRAPKILSFFFPPPGVPPFSTFFNGPVLLLKSFNQLDRDLVGGFWGPIFGGARSIKLF

SEQ ID NO: 186565 - protein, 220 aa, Zea mays
  Clone ID: MRT4577_101739C.1.pep
MAPSAATASILLALIAILLPSVTAAAALQMRHRLGASLQVASLNASEPPTTFFEVDRPIRPPRGSAGPCSTLLLSATFGATYGRPPATAAYAPPACLGDAGGAGALALAVLEWAADCRGRQFDRIFGVWLSGAELLRSCTAEPRPNGILWSVSRDVTRYAALLAEPGEVAVYLGNLVDKTYTGVYHANLTLHLYFRTDSQPETQPPPQQQQQADLNGPIS

SEQ ID NO: 186566 - protein, 563 aa, Zea mays
  Clone ID: MRT4577_10173C.1.pep
MPPIPKRGEHLLVLLIVACAATAATAAGTVPFYPSAESAAAAHCDGTLYPELCLSTLADIPDLHKKPLPDVICAAVNRTEDVVVATSSNCSYYLQDRSLSARDRLAINDCLELLSTTMDELRASTADLASPAGRGSASAGVSQGARRATMEHVMTVLSAAITNQYTCLDGFAYQSGGRVRRYIEPTFHHVSRMVSNSLAMAKKLPGAGASAAPAPPRQPFTGYGQMVKGFPRWVRPGDRRLLQAPASAVAADAVVAKDGSGDYTTVAAAVAAAPTNSKKRHVIYIKAGAYMENVEVGKKHVNLMFVGDGIGKTVIKASRNVVDGYTTFRSATVAVVGNNFLARDLTIENSAGPSKHQAVALRVGADLSAFYRCSFVGYQDTLYVHSLRQFFRDCDVYGTIDFVFGNAAVVLQGCNLYARKPLPNQSNIFTAQGREDPNQNTGISIQRCKVAAAADLAAAQSSTKTYLGRPWKQYSRTVYLQSELDSLVDPAGWLEWNGSFALDTLYYGEYMNTGPGAGTSGRVKWKGYRVITSAAEASAFTVGNFIDGDLWLAGTSIPFTTGL

SEQ ID NO: 186567 - protein, 88 aa, Zea mays
  unsure (1)..(88): unsure at all Xaa locations
  Clone ID: MRT4577_101740C.1.pep
GSAPGAGVHAWALYTTGGYIVGLLLGSTAVAYLTDTPISDKSEFGGWXPASLSMXEWWLAIVTKLQACSVTAVTPVGMNPVSRLNWMV

SEQ ID NO: 186568 - protein, 114 aa, Zea mays
  unsure (1)..(114): unsure at all Xaa locations
  Clone ID: MRT4577_101741C.1.pep
SHPQRVVFAGDMPKEKRDVDMISISTSVVKVFSTIEQKLNLMCFKSAFVHWYVGEGIEXESXFWEVREYLAALHKDXEEVCGKFXEKXHGDEGSEYYTLNWRGVVGLCVPLLYV

SEQ ID NO: 186569 - protein, 146 aa, Zea mays
  Clone ID: MRT4577_101742C.1.pep
DEAHLRMLRYHARPRVVHEVRGSLWSCTSAPRGRIPAVQEGHGVVGDVAAEVEAARGTKSQPMNASLQVQRAARPEHYHGGDAVSRPRPHRPCSNTTVVVRIHRLPLHVHLSLSLGISVSTRMRCCLSPILPGTDVYEPHIRSRIM

SEQ ID NO: 186570 - protein, 59 aa, Zea mays
  Clone ID: MRT4577_101743C.1.pep
LGHPASNKYILRALPARLVSLVTHPPKTSWFVQLGRVLGPIVGGLHDMNKCKSLTPGLF

SEQ ID NO: 186571 - protein, 84 aa, Zea mays
  Clone ID: MRT4577_101744C.1.pep
DHHGLLFKVGRGEVAPKCRSSSRRAVPRRGRFSLARTQRAKSVGWTSRGRCTSCKPLTGALCAALTFAQGSCRRWTGLFPASSP

SEQ ID NO: 186572 - protein, 86 aa, Zea mays
  Clone ID: MRT4577_101745C.1.pep
LCVIYLIQINYRDFLQSPLQPLMDNLEAQTYETFEKDVVKYTQYRRAVAKALVDRVADDAVSTTRTVLMVVGAGRGPLRRASYARP

SEQ ID NO: 186573 - protein, 103 aa, Zea mays
  unsure (1)..(103): unsure at all Xaa locations
  Clone ID: MRT4577_101746C.1.pep
LSLLHKLLKHSLLNTPKNYFFFSFYSSLYHSPITILILYLLTHTYHHTTTIIHSFFKXYININFFFHLNKFILFLQTPIFSYLKYHLLXPQNYILFLKTFIAL

SEQ ID NO: 186574 - protein, 81 aa, Zea mays
  Clone ID: MRT4577_101747C.1.pep
KPSILWSRLKPGYHIRELYRKPHSTIGQLGLYLIPLKKTRRVCGVRPERTTRLRARAGGQQASKILGSCPVPVRSPGTVGC

SEQ ID NO: 186575 - protein, 370 aa, Zea mays
  unsure (1)..(370): unsure at all Xaa locations
  Clone ID: MRT4577_101748C.1.pep
MATTGGGKAALVLGRLLLLLCVLGHGAAQRYNAIWSFGDSISDTGNLCVGGGCPSWLTTGQPPYGETFFGRPTGRCSDGRVIVDFLAEHFGLPLLPASKAGGDLKKGANMAIIGATTMDFDFFKSIGLSDKIWNNGPLDTQIQWFRQLLPSVCGKDCKNYLSKSLFVVGEFGGNDYNAALFSGRSMAEVRGYVPXVESKLVXPGGDREGADPWNLVVPXGCSPIGCFPXIYLTLYGTSNAADYDRDGCLRAYNGLSSYHNALLRRSLSGLRRTYPHARIMYADFYTQVTHMIRAPHNFGLKYGLKVCCGAGGQGQYGYNNKARCGMAGASACADPGNYLIWDGIHLTEAAYRSIADGWLKGPYCSPPIQH

SEQ ID NO: 186576 - protein, 76 aa, Zea mays
  unsure (1)..(76): unsure at all Xaa locations
  Clone ID: MRT4577_101749C.1.pep
MYLNTLTNQIFMSDLDIHIPTTFNPFAXTNALDSGASSGSKDYVHVRIQQLNVLKSLTTVHXLNNKFIYSKILKDL

SEQ ID NO: 186577 - protein, 159 aa, Zea mays
  unsure (1)..(159): unsure at all Xaa locations
  Clone ID: MRT4577_10174C.1.pep
LRIKKLVFTLASLXRLRNEKLVXRLKKLDVCNASIFYLRSKDDIFMLRVVELKSCKPSTSTVEHITICTRCRDVNIDAIHDHMALIKQQNDHIAKLDAKIAEHDLENEQFKFARSMLYKGRRPGIKDGIGFRQGGNVQLNAQPNPLSNFVKGEANKPQD

SEQ ID NO: 186578 - protein, 92 aa, Zea mays
  Clone ID: MRT4577_101750C.1.pep
RIAPVHTTPRRSGPAAAPAKPKARTSGRAPKKSDNTKHYEILGAPKSAAQDNLKKAYRRAAVRTHPDRGGDLETNKELAQAYEVLSDPEKRE

SEQ ID NO: 186579 - protein, 206 aa, Zea mays
  unsure (1)..(206): unsure at all Xaa locations
  Clone ID: MRT4577_101751C.1.pep
MSKPLLDIFAVPNDTFLTRKDIKLNNAILAEDKHLPMYDEXTRKRNGEYMXHXPTHNSITRAQXMIQTPAATSYMPXIGKDKIGEXMKNNCQAGXGTAHYYEDETAPTGTCAVCVDGGETSLIAXAVSVKLLTIXHLERPXNCXLTEKVKYIYIAGLFISESADSIQLVXDXDAKNNKVFLMNLSAPFICELLRDAQKNDLPYADY

SEQ ID NO: 186580 - protein, 38 aa, Zea mays
  Clone ID: MRT4577_101752C.1.pep
KRPGHERSLFCSSEHELLQSSKAMSNHRISLICMLGVV

SEQ ID NO: 186581 - protein, 95 aa, Zea mays
  Clone ID: MRT4577_101753C.1.pep
PNMGGGRFPPSVFFFSVCGVFLPGGDPHGRWSVLFSGTSGVCSSFLVFCFVPKKNVSLGPVARSLLCMGLSIKNSNLLLRVKPTIYFKITTKIIY

SEQ ID NO: 186582 - protein, 89 aa, Zea mays
  Clone ID: MRT4577_101754C.1.pep
PQEISLIPNPEQVLSMLGYLYPKLTNVSPGAIIGPGLTPSGYRIEVEKRKAGIQNFRLEKRFLKRSEGIEKAKGWGEISESGRLPCERG

SEQ ID NO: 186583 - protein, 119 aa, Zea mays
  Clone ID: MRT4577_101755C.1.pep
KEQLALCLRYVDALGRPCEHFIGVVHVDDTSSLSLKNAIEALLVSHGLTLTRIRGQGYDGASNMRGDIKGLKTLIMQESPSAYYIHCFAHQLQLVLVVVAKGNNDCVWFFDQVTLLLNI

SEQ ID NO: 186584 - protein, 92 aa, Zea mays
  Clone ID: MRT4577_101756C.1.pep
IIIVVAKQCMVLQLQPVCMLVFCTHRRGGALPCEAVAASVYVTVAIEIVIVVATDHDHSFLFLYFVTSMMANFANLFMSSSNCYMIIKQDIF

SEQ ID NO: 186585 - protein, 124 aa, Zea mays
  Clone ID: MRT4577_101757C.1.pep
MAGLLMPSSWLPHMISLVLRSPPNTFTADLALDGVLVWERHHDMAPEGLDEAVYECDKVVEATEHGMAALVGVSTTDAGDEVGDIGGRGSGDERGGGRLGFFGSETVRRAYSEAMSRADLGDAE

SEQ ID NO: 186586 - protein, 68 aa, Zea mays
  Clone ID: MRT4577_101758C.1.pep
LQVSNTPGLENTNTSRIFFKRFHLLTTRLVKVGVFYGQNRQHFFLLAKRVEQLQCHLDSKTRETHNTT

SEQ ID NO: 186587 - protein, 92 aa, Zea mays
  unsure (1)..(92): unsure at all Xaa locations
  Clone ID: MRT4577_101759C.1.pep
PIKDGAHYFVYAFNFIHKRIDVLDSNDYFNCSNQEERHKVVFAXIPSLMQPSRKFPTSSYPELASGDGLLLMCQSKQVKAIVFFCMKVHGIL

SEQ ID NO: 186588 - protein, 79 aa, Zea mays
  Clone ID: MRT4577_10175C.1.pep
HPHVVTVDLGTEKARWGLNNKKFLVHPRWIEAANFRWHRQPEEDFPVTALRKRAKRKIVIMMWLARRKRARIKRILQLA

SEQ ID NO: 186589 - protein, 83 aa, Zea mays
  Clone ID: MRT4577_101760C.1.pep
CRRILLEFGLLVGLTGEEILTSFSNDTLGESGIIDFFVHCMRYDDIVHKVDSCGYRVFLTTGFYVSFFSKTMYFLYTVLHLCV

SEQ ID NO: 186590 - protein, 103 aa, Zea mays
  unsure (1)..(103): unsure at all Xaa locations
  Clone ID: MRT4577_101761C.1.pep
AWGSLDALIGRLRAAYEENGGRPESNPFGARAVRVYLKEVREGHAKARGIPYEXKKRNRTIVVMVSSGGGGSSGAVASPSGGGDTAIGGGVGSSASITLQQCH

SEQ ID NO: 186591 - protein, 132 aa, Zea mays
  unsure (1)..(132): unsure at all Xaa locations
  Clone ID: MRT4577_101762C.1.pep
EPPRQCPETESIVWSIRFRIADAMTAGLLLLHQAKTEPLDHRDLKPANVLVYHYLLSKISDDTLARLMPQSAAYFTRXRMTXAAATFXHLXPEVQQTGVLTTKSNMYSVTFMLLQSITARSAMGLTHHGGER

SEQ ID NO: 186592 - protein, 194 aa, Zea mays
  unsure (1)..(194): unsure at all Xaa locations
  Clone ID: MRT4577_101763C.1.pep
MAWSTGNPSSADRVVSLKNYRRVKGLCACCAEKWFSGRKCAATVQQPQLHAMEEVWNLFAEEFVTAPDAESIEAPDDQLFKNLSHSAWLGTETHQTPKLHGSIQQQPLLILLDSISSHTNVNEQVVAXLQGVQTVSHPLKVWVANGILVAYRHQLLQAHWYIQEXEFVSNIMFLPXLPYYDNGRGXMDWLASFN

SEQ ID NO: 186593 - protein, 222 aa, Zea mays
  Clone ID: MRT4577_101764C.1.pep
MATGVAPEPEKKTVVFPGWVMLDRFGRTYCHGDLDAACEEANKKKTAVEVVTSTGHHCFMSFTFSDHKEGISYLDLHWPLEGSAKSESPFSVHAYPYLRATDKDLVLFDISLPSQTSFFDLPPDLFVYTAAGPSPWVQRLPLYIEDRERPFLRSNFTTGILRLAHHRFIVADLNVYLKNEGSHDCSMLAELCVFNSETEEWKVIEGVPPQPQDQSNGQFPIL

SEQ ID NO: 186594 - protein, 251 aa, Zea mays
  Clone ID: MRT4577_101765C.1.pep
MSIQQASVQFCISFPLSNCCFMRWVIRWKPPWPLQLRQNISTELRPIPWPSFRAFHEATARWGCSSLLMLPSWLPSAWCYSGYQSDVQGILSRTTNRMAWSTGNPSSADRVVSLKNYRRVKGLRACCAEKWFSGRKCAATVQQPQLHAMEEVWNLFAEEFVTAPDAESIEAPDDQLFKNLSHSAWLGTETHQTPKLHGSIQQQPLLILLDSISSHTNVNEKLLLVLQGVQTVSHPLKVWVANGILVAYRHQ

SEQ ID NO: 186595 - protein, 327 aa, Zea mays
  unsure (1)..(327): unsure at all Xaa locations
  Clone ID: MRT4577_101766C.1.pep
PFVRKLTCYVSDDGGALLTRDAVAEAARFSALWVPFCRKHAVEPRNPEAYFSPGASNGFKAWRADYKGTAWPELARDRRRVRRERVGGRVGIDALQAGXCGGRRRRCXRSCWRRGAAEDHAGAVELLVDNPGPGSTPRLGVSGTVDGVSNLLDLSSVDVRVPALVYMCREKRRGRVNHGKAGALNALLRASAVLSNAPFILNLDCDHYVNNSQALRAGVCHMLDGEGGNGNDVAFVQFPQRFDGVDPADRYANHNRVFFDCTELGLDGLQGPIYVGTGCVFRRSALYGVDPPLWRPQGDDAGKGAANGIETGKLGVSTPSFARYMRS

SEQ ID NO: 186596 - protein, 72 aa, Zea mays
  Clone ID: MRT4577_101767C.1.pep
GRVVFSDLASESTENELVLCKIQEDSLFIPEVQSLSDTTYVARFKALHGRSDGLLIYGSNSSSEIISQRHVP

SEQ ID NO: 186597 - protein, 116 aa, Zea mays
  unsure (1)..(116): unsure at all Xaa locations
  Clone ID: MRT4577_101768C.1.pep
RPKRARTALRRVRGSGGAVDAELEYVARSVGAARALEQGAFRGVLRRVLRLLLPVSVAVPLFLQLSGVFVFAVVSPVLFQXAGFDSNTALMGAVILGTVNLASPIIVQKKQSKKER

SEQ ID NO: 186598 - protein, 44 aa, Zea mays
  unsure (1)..(44): unsure at all Xaa locations
  Clone ID: MRT4577_101769C.1.pep
MAIGKNKRISKGKKGGXKKTVDSFFXKDWYYINAPSVFNGGNNW

SEQ ID NO: 186599 - protein, 121 aa, Zea mays
  Clone ID: MRT4577_10176C.1.pep
TGPEFPGRPTRPVTVDLGTEKARWGLNNKKFLVHPRWIEAANFRWHRQPEEDFPVTAPKEKSKEKDSDNDVAGKQARSEDKENTAAGMKETRNDEGNVTGKDKADAKENVVTTSATCPADS

SEQ ID NO: 186600 - protein, 210 aa, Zea mays
  Clone ID: MRT4577_101770C.1.pep
KTDGAGASTAPDDADELDPGAGAGHRAETGRSAGELRERARELRELETDARSKEKRAQRREEQGHGKETLRRGRSRGRGRAQRKTATTGKGARRPGEMRAWERRTGARARELSRAPELEAEREYAAACHGRESTEQRELGAPWEESWSAGRGQKEGDEAEGAAQRPGELGETSAGRTMADRNNQAARRAQLPWEIRPAASRQGPGRPRGT

SEQ ID NO: 186601 - protein, 92 aa, Zea mays
  Clone ID: MRT4577_101771C.1.pep
SRRGCEFASAQGEECARLSRWTVAIMSGLLLMAALAGFVGAYWIRRGLLAFNLVAMTSRVVLIISLLAISDTVMRGSGAYNVHSCTYNYYSI

SEQ ID NO: 186602 - protein, 65 aa, Zea mays
  Clone ID: MRT4577_101772C.1.pep
MVYDHTEMNKQMHVKNKGSIKLDCDEAHPQAEQVQFKIVCYLSIWWQIMGCLPRSGATVVRFRPS

SEQ ID NO: 186603 - protein, 56 aa, Zea mays
  Clone ID: MRT4577_101773C.1.pep
AEAKAYPSKHSMGHGQEQKHASSAKKILLNFTNSQAGNQENQRGETLGVTRLKKKR

SEQ ID NO: 186604 - protein, 46 aa, Zea mays
  Clone ID: MRT4577_101774C.1.pep
KKKKKKKKKKKKKKKKKKKPKKKKKKKKKKKKKKKKKKKKKKGRPF

SEQ ID NO: 186605 - protein, 112 aa, Zea mays
  Clone ID: MRT4577_101775C.1.pep
KLQCLHYFLLQKPSWNPPLHHLPPNHRITRQSTSPSPISQNTPSAICSMGTFLASSVQSLGPSCTWGTKSGTNRSPNQSGRQFKLPLKTSSALLYPSVAPCWARWWPEQESA

SEQ ID NO: 186606 - protein, 171 aa, Zea mays
  Clone ID: MRT4577_101776C.1.pep
PLFFFFFYFFFFFFFFFFFFFFFPFQLLQLFIYIITDRSLKHVHHHYYHRYYNHYKQKLQCLHYFLLQKPSWNLPLHHLPPNHRITRQSTSPSPISQNTPSAICSMGTFLASVSKPIRSPVQATPEDQLRPPLPERCTMLGTLVAGTGEGRGERRERERRRTKSYRGSPAG

SEQ ID NO: 186607 - protein, 94 aa, Zea mays
  Clone ID: MRT4577_101777C.1.pep
MARVIELRVKRENENLGQMPGRCPYYRWQREYFEKLVKERLIALLFDDWEEDDGEVDSKKVSEVGNSEDIATSVCNGCSTCGSSGDVHVLMICL

SEQ ID NO: 186608 - protein, 115 aa, Zea mays
  Clone ID: MRT4577_101778C.1.pep
TVLTKFNIPFQLLQLFIYIITDRSLKHVHHHYYHRYYNHYKQKLQCLHYFLLQKPSWNPPLHHLPPNHRITRQSTSPSPISQNTPSAICSMGTFLASTHTKANQIIQNQISKNTK

SEQ ID NO: 186609 - protein, 142 aa, Zea mays
  Clone ID: MRT4577_101779C.1.pep
MQKESGPAGGDANVSSPRSKVASEDVEEVEDKVWDRPKKRKSTDFDIAKSIELLASSFLKVEQARMEMYRETERMRVEAEIKKGEMELKRTEIMAKTHLQIARLFARKLKQSSGKNGGSSSVTAEVDTLTKKARMVSVNATS

SEQ ID NO: 186610 - protein, 36 aa, Zea mays
  Clone ID: MRT4577_10177C.1.pep
GTERSAPINFRTHDMPLQTGLITVCAVQPQLFHTAP

SEQ ID NO: 186611 - protein, 71 aa, Zea mays
  unsure (1)..(71): unsure at all Xaa locations
  Clone ID: MRT4577_101780C.1.pep
XIXRTAXLTXTXKILXVHIIYSFFWLSFDDYYXARLXSHCIFXFDTGFCLVVVVTDXXGPVWYXLXLLILS

SEQ ID NO: 186612 - protein, 77 aa, Zea mays
  Clone ID: MRT4577_101781C.1.pep
ISLICLSLALSVGLFDYILSRIPYALLYSVCVLASFSLAGVLSPRFSPYVLSSHLQPVFIISGVKAGRACQGRFIPV

SEQ ID NO: 186613 - protein, 74 aa, Zea mays
  unsure (1)..(74): unsure at all Xaa locations
  Clone ID: MRT4577_101782C.1.pep
AIARAFPHIXCTVMDLPHVVAEAPAGTGLCFLAGDMFDHIPPADGILLKSQSAASNNPHASSSPSANQSRCPPR

SEQ ID NO: 186614 - protein, 93 aa, Zea mays
  Clone ID: MRT4577_101783C.1.pep
YVSVYSTCASAFTVEPVGLYYEPVLHTTCMIAPCMAWRQAQSMMCIMAVITYALDMSQKCLSWHPDQLITTALSRVYSYVSTRSTRWISQQSV

SEQ ID NO: 186615 - protein, 65 aa, Zea mays
  Clone ID: MRT4577_101784C.1.pep
QIQQLLSSICVMLSAVIIHITVIIVQLTAYSHIRFNNTWYPFIAVHYEQAPMLPAAFPQQSGILR

SEQ ID NO: 186616 - protein, 71 aa, Zea mays
  Clone ID: MRT4577_101785C.1.pep
PKLNSPPWLSRNGTKYPFFPFSDFQFPNFSLSQHNSPPPPSKKPLHSPPVALFLCCIILIGLKIISFVVPV

SEQ ID NO: 186617 - protein, 245 aa, Zea mays
  Clone ID: MRT4577_101786C.1.pep
MSWIARSIAATLSSPRSSDADDADYDPASAQSGAGPEEEESHGSSPNPGPEAGEPEQPGTPSRGVKDDISELTETLTRRLWGVASFLAPPPTPPEASTPRAATPAQGEDEGIEDGEEAAVLSPRTAGIRSDLAEIGGRMWSGFSMLQNNLAVAEISKIASSLLPFGQGEADEGESVPGITEEVVVFVRHISTRPETWLDFPLFISERYADGIAKALRTCVLYFSIWSLLTWKGSDWRGAWFRTND

SEQ ID NO: 186618 - protein, 81 aa, Zea mays
  unsure (1)..(81): unsure at all Xaa locations
  Clone ID: MRT4577_101787C.1.pep
XXXXXXXVCFXFFCEKTEDNSPAYFLLPMYVCIYIRYGYTNPAARYIHILPDRSVNQSRRPKKYLTFTFFVNGITPLPYKL

SEQ ID NO: 186619 - protein, 36 aa, Zea mays
  Clone ID: MRT4577_101788C.1.pep
RTKLLPLVVGPPRDDQSFSQAPSLAGATIFGAFGGL

SEQ ID NO: 186620 - protein, 114 aa, Zea mays
  Clone ID: MRT4577_101789C.1.pep
SGSSGESFVSTKPSGPHARAPCCGCPDSEVRRRIIEEGVSLGQAVPRQEGTGQDPAVGDVVSIARFYRGGRGRRRTCGASTGRRAAAENGDRIWISAEVHGWCRLVWWERSWTE

SEQ ID NO: 186621 - protein, 55 aa, Zea mays
  Clone ID: MRT4577_10178C.1.pep
PISQCKNGVVDPEVKLMIFSCCFLHKFWTIGMIHFYHCNIKRIIILSVCKIMSSY

SEQ ID NO: 186622 - protein, 50 aa, Zea mays
  Clone ID: MRT4577_101790C.1.pep
HEGLLFRGFRRGERELLLLGSFNHLFFGGSVFFLSFQFDAFCTRGLQQDL

SEQ ID NO: 186623 - protein, 53 aa, Zea mays
  Clone ID: MRT4577_101791C.1.pep
DVVLEGLLSVKIVSSISLRRGYGIGHRYLMVRRSDERMCILGCINCIVIFREL

SEQ ID NO: 186624 - protein, 123 aa, Zea mays
  Clone ID: MRT4577_101792C.1.pep
AADRSAAWQRRPFVDEASAPFSFSTAAGRASPCLRLPSLAVPSPWSGSAAEVVCYLLDDMGSNHASQLLATAINPCRMPPARYITQPHRRCPFSQHAVVGSRCCYLHPSHSPCSTKMPPRSLT

SEQ ID NO: 186625 - protein, 85 aa, Zea mays
  unsure (1)..(85): unsure at all Xaa locations
  Clone ID: MRT4577_101793C.1.pep
YYNLTTLATKICVAACGLLEHFASATNAXVIPQCSLAPXAYITQFLXPVTSMGLEHPAVQAYRLHGGXGASVLQQPISPRRQQWL

SEQ ID NO: 186626 - protein, 243 aa, Zea mays
  unsure (1)..(243): unsure at all Xaa locations
  Clone ID: MRT4577_101794C.1.pep
MAAVTSTASICPAAAGALSSLPSFITRKPTSGSRRLQQAAATTVCHCRPARVEEGEEGLLGRRDALLLGIVFSAANPPLLAPAGALADEATAESQEGFTTYEDEANKFSIQVPQGWLVGAGEASGIKSVTAFYPEQAAADSNVSVAITGIGPDFTSLKSFGDVDAFAEGLVNGLDRSWQRPPGLAAKLIDSRAANGLYYLEYTLQNPGERRRHIVSXAIGMAXNGWYNRLYTVTGQYIDDDDS

SEQ ID NO: 186627 - protein, 97 aa, Zea mays
  Clone ID: MRT4577_101795C.1.pep
LQSYAVSHTNYDVAPTMYILIEELHNNYQNIINVYVLVPRILHHITITDQSIKETIQKRAAVMRRSASATRSKVTRVPGYVSLTFQPNLRLTQSRLP

SEQ ID NO: 186628 - protein, 70 aa, Zea mays
  Clone ID: MRT4577_101796C.1.pep
QTSVVLYSFQLVCHFSTPTGYLLVQSSIIDYGVCTNENLTLMSNPWAPKNQMIASTHNFQTVSLIRKDPY

SEQ ID NO: 186629 - protein, 207 aa, Zea mays
  Clone ID: MRT4577_101797C.1.pep
CIITCVLYVVVRVEEGLLGRRDALLLGIVFSAATPPLLAPAGALADEATAGWLVGAGEASSIKSVTAFYPEQAAADSSGFCVSLSLLPSPPVSVAITGSGPDFTSLKSLGDVDAFAEGLVNGLGRSWQRSPGLAAKLIHSKAANSLYYLEYTLQNPGERRRHIVSAIGMAFNGWYNCLHCDDPGEPGAAPSSRFIFAEKNANYVLLT

SEQ ID NO: 186630 - protein, 43 aa, Zea mays
  Clone ID: MRT4577_101798C.1.pep
GVVLQSFLQQQPQGELTALMTAQVAQQLQAMYGLQMQQPGPCP

SEQ ID NO: 186631 - protein, 76 aa, Zea mays
  unsure (1)..(76): unsure at all Xaa locations
  Clone ID: MRT4577_101799C.1.pep
GGEKPTAGSKRAALLAVAVPFRRRINYLGRRHRRRPLXVLFVSFLKVKSVLLLFKLRSRVQGPTSPFRRLLILFVV

SEQ ID NO: 186632 - protein, 139 aa, Zea mays
  Clone ID: MRT4577_10179C.1.pep
LLVRGRVGAFQKNILGQDWSIKQRIAAVLVGGLKLASVGFISSVGAGVSSDLIYAARGIVKPSENVETGRKRSPIWKSAAVYSCFLGTSTNLRYQIIAGLVEYRLGESLVTYYNQPLIAGLLSFAARTLNSYWGTQQWV

SEQ ID NO: 186633 - protein, 81 aa, Zea mays
  Clone ID: MRT4577_1017C.1.pep
FFVTRHRLGSVLCNSQQMIGQGVVGLEVSRCKIHSCSINHSPSVSCQLSVTSIHNYTQSMGSQIISLLPRDLAIAFTTCHP

SEQ ID NO: 186634 - protein, 132 aa, Zea mays
  Clone ID: MRT4577_101800C.1.pep
MTRSSKPIHSRLHILRKDIKVCFATFSKAEAKLTTVDGLNETELVTVGTINHSTEARVPGVNLPGGSGADGGAPAGDAYDDDDLHLCGDESDEDNKSGDERAYGAKASSKKKERAKSSVLMHVKPLDDQTDM

SEQ ID NO: 186635 - protein, 579 aa, Zea mays
  Clone ID: MRT4577_101801C.1.pep
GRDAGIPDWYSVSETKTGGGPTSPNVATKESAALCIEDIEILHGDLQGLTDTVDFLKSLSELNGNDLKSPKKQDLERTAASVLFDWETEIYVARAPGRLDVMGGIADYSGSLVLQMPLREACHVAVQRNHPSKQKLWKHTKARQLVNGGLVPVIQIVSFGSDLSNRAPTFDMDLSDFMDDGKPISYEKARELFCQDPSQKWAAYVAGTILVLMTELGAQFTDSISILVSSAVPEGKGVSSSASVEVATMSAIAAAYGLNIIPRDLALLCQKVENHVVGAPCGVMDQMASACGEANKLLAMVCQPAEVKELVSIPTHIRFWGLDSGIRHSVGGGDYGSVRVGTYMGRKMIKCTASDLVSESLTSGSPAQSDCYKENGVGVLKSEAALEYLCNLPPHRYEAVYAKDIPEVISGEAFSEKYGDHDDTVTVIDPKRSYSVKAPTRHPIYENFRVEAFKTLLEAGNTDEQLSALGELMYQCHNSYSACDLGSDGTDRLVNLVREVQHRRTSEGGSPSLFGAKITGGGSGGTVCVVGKNCARSSEEIAEIQHRYKAETGYLPILFDGSSPGAGKFGYLKIRRRCP

SEQ ID NO: 186636 - protein, 199 aa, Zea mays
  unsure (1)..(199): unsure at all Xaa locations
  Clone ID: MRT4577_101802C.1.pep
AALEAACSHPSCSQXPIASLLPPYLPSMIASICENPTLQAYRLQRAIAASNIPLSPLLIQQSPSLYLAQSLAQTIKAQQLQQLVLPXINQVALVNLSPXSQQQQFLPFHQLPTLNPAAYLQQQLLPFRQVVTDYSQXQQLLPFNQLDALNAAAYLQQQILLPYNELAAASXASFLTQQQMLSFYKKSCANPATLLQLQQ

SEQ ID NO: 186637 - protein, 91 aa, Zea mays
  Clone ID: MRT4577_101803C.1.pep
RFVQDSGALLHTLMQQTHVIEQHDMSIDEYYSAFDRLMNALTSMVPACTTVPCPAHKFIEKFFTYRFVMGVRSEFDSLRARLLHSSDTLTM

SEQ ID NO: 186638 - protein, 281 aa, Zea mays
  Clone ID: MRT4577_101804C.1.pep
FFFFFYINSNTRRFGSRWLQSKSSSGLISAKEDKYKKEVVLLAINHKHPDYMAFRPEKRVQELVEHEKDVAESSVTKQLEVAEIYKPSSHVKPIFVAVEADMEKYYSAPEASDIVFRYVEKEKLVKPTDRAKVILDVTLCDALYKGAIKKGSAYPTEIHKKDLGSAFLNRMQVHHKVSRGTQEVIRKGAIRTIQIMTERRQGNKKMTRLSGLECFLMDPDSLASELQKKFACSTTTAELPGKKGQYEVLVQGGVIDDLAKHLVDHYDVPKRYIEVYDKTKR

SEQ ID NO: 186639 - protein, 52 aa, Zea mays
  Clone ID: MRT4577_101805C.1.pep
KGQEHITMQDIQQCQNTDLLYNTRASPNTTQLLRNPPNTYCKASRKWSEHLP

SEQ ID NO: 186640 - protein, 105 aa, Zea mays
  Clone ID: MRT4577_101806C.1.pep
ARARAPKGKNLTTPNAKKKKAFLAKIMNKIPGSHKSSFEKPAHKGNPPGKQRTSSKVPIPRGFLARARPLGNQKEPSVGMWVRFWFPLTKSLFQGGSPGQGPCPF

SEQ ID NO: 186641 - protein, 131 aa, Zea mays
  unsure (1)..(131): unsure at all Xaa locations
  Clone ID: MRT4577_101807C.1.pep
SITAGSLNQQLHITXWGDGRGKALDNGRLLTMSLDHTSESGXQSRHEYMFGKINMQLPVWSDNSAGTVTAYYLSMQTRAHNEDYFEILRNASGPXYTLHTNMIMXGGRKSRYIRXLCVDPTIEFHTYSIVW

SEQ ID NO: 186642 - protein, 131 aa, Zea mays
  Clone ID: MRT4577_101808C.1.pep
QAGGGVLDSRVPDGRPILLGPHPQAAGGCTAGPPQSRASQASGTAQRSVTHTCWRRPHPASLRRAARRRHRAGAQSRARSRNRSLPLPGGQSGSRSLPGGQSSQAGGTSAQPPAASHQPKCRTAARTILSY

SEQ ID NO: 186643 - protein, 53 aa, Zea mays
  unsure (1)..(53): unsure at all Xaa locations
  Clone ID: MRT4577_101809C.1.pep
RERSRXLRRWNXGRXLEACGRGPTSPWRSKAAGQMVIVECRQTELAPFSANPG

SEQ ID NO: 186644 - protein, 116 aa, Zea mays
  Clone ID: MRT4577_10180C.1.pep
AWNSCPPRASPPLIDRSGLKVNRNSTGVVLPSASPPEGGCRERPPRPQGCGRAGSAPPPRSGGSPTSSMDREAPQSAPRCRSCTGAPAFVVVSVVWCLLAGRNLVGSIVFSSLATR

SEQ ID NO: 186645 - protein, 82 aa, Zea mays
  Clone ID: MRT4577_101810C.1.pep
LGGPSKPGGLQVAQTDQRGQTNKPSYYTEDKDMPHHRHDTPKHHMTSEKKKRPHETNTQRREESQTRQLDRFWEAGQGTLDP

SEQ ID NO: 186646 - protein, 186 aa, Zea mays
  unsure (1)..(186): unsure at all Xaa locations
  Clone ID: MRT4577_101811C.1.pep
RSQFHLKDGFSQLPLLRADISSYRVSVVLVTCLCILAVDFKIFPRRYAKAETYGSGIXSFKAVLCSISPLVFLGFARIISTWGVDYQVHVGEYGVHWNFFFTLAAVSILTSVVRIHPKHCGLVGLLILAGYQIWLSSGLNEYLISDKRSADIITQNKEGIYSILAPGEGHTHGCRQDTFRDLDSGN

SEQ ID NO: 186647 - protein, 63 aa, Zea mays
  Clone ID: MRT4577_101812C.1.pep
STSVSCDSSTAAPARLLQNLRSMPGFKDVIFRTHTTLAYSRAELASCSLSACIYPSENMSQDA

SEQ ID NO: 186648 - protein, 53 aa, Zea mays
  Clone ID: MRT4577_101813C.1.pep
PIGIFFFRRKKRLQGKRNPIWCLTRPKKQGGYSPLLLLRPTLKKGAALMNTPV

SEQ ID NO: 186649 - protein, 166 aa, Zea mays
  unsure (1)..(166): unsure at all Xaa locations
  Clone ID: MRT4577_101814C.1.pep
FGALNVDVNEDETNLETYPGIYFMLXYYVPVISAEMAYHEQLYAHLITTRTCEPSSMMAXSKPLHGQCMAWCLMCRGVVTRKDVNNAVDSIKTKLTIKLVDWCPTGFKCGFNYQSNCEVPSGDLVNEHAAECMDLNFTSVVEVFSPIVHKFDLMYAMISSKHWYVR

SEQ ID NO: 186650 - protein, 123 aa, Zea mays
  Clone ID: MRT4577_101815C.1.pep
RVGGRIGEIGKVMLEQCKALALRMQALYTQADEVYSERTREVLLQALVKLTIQADTAHMDLSVVSTESGQEGQEYIMMAACNSADSNKDMTTTITALEKLNGASQFEDYHMCIAIDTYVTVWG

SEQ ID NO: 186651 - protein, 54 aa, Zea mays
  Clone ID: MRT4577_101816C.1.pep
GPRSLVYSFIGDGGRSVALLHGCQCQLVLESALAMGGSSTWATIMSFMVTRSPI

SEQ ID NO: 186652 - protein, 197 aa, Zea mays
  unsure (1)..(197): unsure at all Xaa locations
  Clone ID: MRT4577_101817C.1.pep
MAQQIGNSVFDTYQTSLTGRYCSKEMSQLFSQRSRHSTWRSLWLYLAESEKELGIETVTEEALQQMRDHLVVSDSDFEVARVEEKRRRHDVMAHVHAFGEVAPKAAGIIHYGATSCYVTDNAELILMRDAMNLLLPKLAKVIDNLSKFALQWKDEPTLAYTHLQPAQLITVGKRAAQWAQXLLMDLESSSTSRESSS

SEQ ID NO: 186653 - protein, 183 aa, Zea mays
  unsure (1)..(183): unsure at all Xaa locations
  Clone ID: MRT4577_101818C.1.pep
MTPLLYGAVNHTADHPALKSHLRTTENDSLSRNHLXSSSPQIIKGGCPLSSYTQSXRARRPTAAQMMMPSSIPHRYWIPSDFSFAVDTSAYQMERAXNENVKTECSCDHLXHNHPGLILNGTNLSHXSNSNRMNDTHGRLLXEKYMHAYRISISWTKILTDATXDMSVNPNDLEHYLCLITLV

SEQ ID NO: 186654 - protein, 68 aa, Zea mays
  Clone ID: MRT4577_101819C.1.pep
ILQAASNETDLIASQPVHVPNCVDPRIRFFQHTGSRLTNTAHLSASSHSLRQQGILPPKPEPTTSALK

SEQ ID NO: 186655 - protein, 93 aa, Zea mays
  Clone ID: MRT4577_10181C.1.pep
LDIRNQRILSPIRNSEEWLKGPFDHLEKARFRFQKVDLEPDEFRLNGSFELDREKENWINAPFISWDHLERFKTEPFIFENQRAMNKVRHRVF

SEQ ID NO: 186656 - protein, 108 aa, Zea mays
  Clone ID: MRT4577_101820C.1.pep
RQLREHLAVKYVQVVSDVKCDDLNGEEKMHQHEMPNTENDDGVMALLPSIVACSLPCLEVLIEGLRHCRELREGGCWSTAVRRPPPWHGSLRGHIREGERRRSAESIL

SEQ ID NO: 186657 - protein, 83 aa, Zea mays
  unsure (1)..(83): unsure at all Xaa locations
  Clone ID: MRT4577_101821C.1.pep
MDAADVWGRSSSWSSFSAXXXXRRLLARYDLXXGXDDADAGGDDVRDPCXXGVEPYNCPLCXEDXEXVGLWCVVDDEHVVEVK

SEQ ID NO: 186658 - protein, 226 aa, Zea mays
  unsure (1)..(226): unsure at all Xaa locations
  Clone ID: MRT4577_101822C.1.pep
MGSLDARYRPAGAAEDTAKRRTQKSKSFKEVEKFDVFVLEKSSGCKFXRSLQLLLFAIMSAAFLTLLYTPSVYEHQLQSSSRXYTCAISSNAVEDHDTSPLVHGIMFXIDQXVFLIQQHNVYVVLMLSVMLLQXVNGWIWDKRSSDPRYVSSASIQWVDVYKSIQNLNVGEQKLSVGLXNFNRTEFGAWTHMLPESDFSVIRLEHANEIITWQTLYPEWIDEEEEP

SEQ ID NO: 186659 - protein, 140 aa, Zea mays
  unsure (1)..(140): unsure at all Xaa locations
  Clone ID: MRT4577_101823C.1.pep
TEQRPEGKGRHLVQRYMVVVPQHSLLQDCMIRMEDGTTTXPDTGINTSLDANQYSTQHMTAHGKANGASETEPGLARYRYPHRAEPQHKSVSSKRAEVSEEVGEGEGRSRLDSEILRCPGRPVPGLQGTHALNLQDPSRR

SEQ ID NO: 186660 - protein, 634 aa, Zea mays
  Clone ID: MRT4577_101824C.1.pep
MGSLDARYRPAGAAEDTAKRRTQKSKSFKEVEKFDVFVLEKSSGCKFRSLQLLLFAIMSAAFLTLLYTPSVYEHQLQSSSRLVNGWIWDKRSSDPRYVSSASIQWEDVYKSIQNLNVGEQKLSVGLLNFNRTEFGAWTHMLPESDFSVIRLEHANESITWQTLYPEWIDEEEETEIPSCPSLPDPSFSRATHFDVVAVKLPCTRVAGWSRDVARLHLQLSAAKLAAATARGNRGIHVLFVTDCFPIPNLFSCKDLVKREGNAWMYKPDVKALKEKLRLPVGSCELAVPLNAKARLYTVDRRREAYATILHSASEYVCGAITAAQSIRQAGSTRDLVILVDDTISDHHRKGLESAGWKVRIIQRIRNPKAERDAYNEWNYSKFRLWQLTDYDKVIFIDADLLILRNIDFLFAMPEITATGNNATLFNSGVMVIEPSNCTFQLLMEHINEITSYNGGDQGYLNEIFTWWHRIPKHMNFLKHFWEGDEDEVKAKKTRLFGANPPILYVLHYLGRKPWLCFRDYDCNWNVEILREFASDVAHARWWKVHNKMPKKLQSYCLLRSRLKAGLEWERRQAEKANFTDGHWKRNITDPRLKTCFEKFCFWESMLWHWGENKNNSTQSSAVPATPAATSLSSS

SEQ ID NO: 186661 - protein, 212 aa, Zea mays
  unsure (1)..(212): unsure at all Xaa locations
  Clone ID: MRT4577_101825C.1.pep
IKGPATSLRVASAAAYDIFRRDPLKTFFLNGSVSLKGRQARQSNVYRFKRNNVQSNLFDRXYTRLARPYGNAILSSFEDHEXKILYHADLDMNDDSTXMSHDTSQDLAFCIILENKYRTAQQASADCYRRTQHALHKGDEDLARDALKGRXSYDDHVRCLRAQLDQQKGVLEHTXLSTRFLDIKSTQGTAEIDTXLRARAQSAWTASKVSEM

SEQ ID NO: 186662 - protein, 145 aa, Zea mays
  Clone ID: MRT4577_101826C.1.pep
PPVILKKKANKLPPRPVPRRTRKFAGEGVELKAPALDKRAIKKIMKAVGLIAKNVGIAQRAQKEYADLFKTFLSEIHVKALAPLFGWQVPAPPPPQGLDLKEKTFVVPIALVSMNPERVLKWNVKGLNSSAKKKKKKKKKKNPPP

SEQ ID NO: 186663 - protein, 78 aa, Zea mays
  Clone ID: MRT4577_101827C.1.pep
SRDFLLFWFSGSWKRFYGTTPMKFCIYFSQDIITVEISLLGLSFYFFDSSFSSETVNCSCNKKECRCVCLKKKKKKRP

SEQ ID NO: 186664 - protein, 45 aa, Zea mays
  Clone ID: MRT4577_101828C.1.pep
NTCSQYGLRHRACGRCVKHSSSRDLHVHSTSCPLQEAIDSVGHEP

SEQ ID NO: 186665 - protein, 116 aa, Zea mays
  Clone ID: MRT4577_101829C.1.pep
CSPFFWSFPPFASPPFLECCFILLCRWLYGVGHGHLASGHFSIFVRSFTLSALKDLAPRPRPGGFMTVCPPPFLTHYAPAPPPAPTFATSHYRAPRPAQRYHTGLYRNAQKKKIKK

SEQ ID NO: 186666 - protein, 66 aa, Zea mays
  unsure (1)..(66): unsure at all Xaa locations
  Clone ID: MRT4577_10182C.1.pep
MSDSEEHHFESKGDAGASKTYPQQAGTVRKNGFIVIXNCPCKAVQVSTSKTVHPRHSLCPYRCSSH

SEQ ID NO: 186667 - protein, 178 aa, Zea mays
  Clone ID: MRT4577_101830C.1.pep
MLAVFSGEVVEVPAELVAAGSRTPSPKTRASELVKRFLAGNDPAVSVELGSLGNLAYSHANQSLLLPRSFAAKDEIFCLFEGVLDNLGRLSQQYGLSKGGNEVLLVIEAYKTLRDRAPYPASFMLSQLTGSYAFVLFDKSTSSLLVASGPEGEVPLFWGITADGCVAFSDDIDLLKGS

SEQ ID NO: 186668 - protein, 60 aa, Zea mays
  Clone ID: MRT4577_101831C.1.pep
ANIFIYNYISYANIYIYIYIYIYIYIYDVLGLTMLCIINFMVYCNESMFFHKSINATGRI

SEQ ID NO: 186669 - protein, 176 aa, Zea mays
  unsure (1)..(176): unsure at all Xaa locations
  Clone ID: MRT4577_101832C.1.pep
SARGRGIPKHLKRLNAPKHWMLGKMGGDWAPHPSPGPHKLRECLPLVVLLRNRLKYALTRKETQLIVAQRVVKVDRKVRTDLNFPAGFMDVIQIDRTNDKFRLLYDNKGRFTTVPIDDEETKFKLLKIKKKSIGPKGVPYVVSHDGRTMRYPXPCCRANDTVKYDLDSGKILEFVK

SEQ ID NO: 186670 - protein, 98 aa, Zea mays
  Clone ID: MRT4577_101833C.1.pep
FKRFKRNFINHHFILILNNNKPLLKLFQDDDVLHYSVFALAQPFSALNWVDELADDLFEPRLEVWPASRLHHSFFNRQLRNLNDSMFGWANQQLESLN

SEQ ID NO: 186671 - protein, 163 aa, Zea mays
  Clone ID: MRT4577_101834C.1.pep
NYANLVDQEELQKLLIASQQQIEQSKAKDTELEALKEQLGHLILERDSLLDDMDQRKTDLLEAQLLVEQLEQREQMLEAQIEMLQLEKDSLQQKTLEMDETIELLARSNQPDINPRMGDNHHRGSSEFSRRLAQSDMLLSHARHEHSRRHAAGSSRTHHGRHR

SEQ ID NO: 186672 - protein, 164 aa, Zea mays
  unsure (1)..(164): unsure at all Xaa locations
  Clone ID: MRT4577_101835C.1.pep
MPSFWLHQYXVAPRVLPTPGDEHPKIYRMNLCATNEVLAKSKXWYFLRKMYKAMKSNGQCLVINEIFERNPTGIKNYRIWXMSYQMQNXYHNMYEEYRDTXLNGVCAIKCRXMASRHRVRTPWIQMIKTATVHFELCKRDYTKQFHYSEMKLPLEYRKDRPPTR

SEQ ID NO: 186673 - protein, 136 aa, Zea mays
  Clone ID: MRT4577_101836C.1.pep
LTLGKVETNLWDCHFQLFIFFQGDLAEKPRGRTYNGPNGNNAYIALSDLQARRSYRRGKFLLLATAIRVLQLLYNPGQRSRAATNTSGVWRLTHQHSTSKHPRASSVPAVVRPRASGRVPARMLMPRVGEEHVGLS

SEQ ID NO: 186674 - protein, 147 aa, Zea mays
  Clone ID: MRT4577_101837C.1.pep
SACCAEEEGLEPEHPLHVRTEPWSRCRARSAVCRGWQRRSWCGVFRRSKSQGHGASSQSPAVVRDSSKSVTASFCAGVNRPYQIMYTGIRTCSAAPLWYVRSARSGGLYSSNEAPAGHGDTSRAQDQPGRTGELPTWLVLCHPRKQL

SEQ ID NO: 186675 - protein, 106 aa, Zea mays
  Clone ID: MRT4577_101838C.1.pep
YESQETPQLGRTNPCIVMRLIPEALQGMSKEDPFLGYQLDSLNLSTCTLYGHQEVSVVQNRGLSWFCPRGSRILVCAIRIFLDPESHSVTWTSASILGMCLTANSK

SEQ ID NO: 186676 - protein, 122 aa, Zea mays
  unsure (1)..(122): unsure at all Xaa locations
  Clone ID: MRT4577_101839C.1.pep
MEGSMISSSALAVAPQGLPPLGRRASSFVVVCSKKKIKTDKPYGIGGGLTVNDDADGXRKGKGKAVYQVVHEYHANVDGYSPIYKEDDXAPNGRGYVHGTIGLLIWVDTALXILGGGCLLCY

SEQ ID NO: 186677 - protein, 96 aa, Zea mays
  Clone ID: MRT4577_10183C.1.pep
RPPARPKGFSTPPFPKVASKLRSVSQRPGRLNQCHVPLERERPNHLPCLQRAYTHIAILNSYSKAYNHNSSHSIIYPISNQPFAFSNFFKQLYPYD

SEQ ID NO: 186678 - protein, 57 aa, Zea mays
  unsure (1)..(57): unsure at all Xaa locations
  Clone ID: MRT4577_101840C.1.pep
CRSTNLLQQKLGWQPQXAAAGPRRPEAHSQGDPGGLPMVPRIFSSSAGVSCAGSSTV

SEQ ID NO: 186679 - protein, 97 aa, Zea mays
  Clone ID: MRT4577_101841C.1.pep
TKKLKGLPPVRTDQNHGTSAGDLDMVGLVHEPHAWRWLVIISCRLRCPVPDTPSRPALPRPDIIPRALPPWTGQDWKHSSHCHRHPSQVRHRPLPSW

SEQ ID NO: 186680 - protein, 42 aa, Zea mays
  Clone ID: MRT4577_101842C.1.pep
CLADITGCITTKELGTVMRSVGQNPTEAELQDMINEVDADGN

SEQ ID NO: 186681 - protein, 74 aa, Zea mays
  Clone ID: MRT4577_101843C.1.pep
RQSPISQDYVQVKNESETQDSVPTLRKAKGGVGEKTIGQEFTLTWSKQRRTRVLIEWGTKTVQMEERSVDVTRG

SEQ ID NO: 186682 - protein, 54 aa, Zea mays
  Clone ID: MRT4577_101844C.1.pep
MELIQRNQKKKKKKKKKKKKKKKKKKKKKKKKKKKKKKKKKKKKKKKKKGGAPF

SEQ ID NO: 186683 - protein, 78 aa, Zea mays
  Clone ID: MRT4577_101845C.1.pep
NFGKRKRGSDLTIDNCPRTDIFFTKKTLDNLLGHPESDESIQAVFCVPPQDMGHLSISNPHVGELGGGPFVSIKKSLL

SEQ ID NO: 186684 - protein, 99 aa, Zea mays
  Clone ID: MRT4577_101846C.1.pep
LFFYHFFLFLPKRKSPFSLHFGPPFLGVYPPVGCITLTFPHKTPGGGELLGGTPSYFKPPAPLKTGRERKTPGFFPPQSLNGDRGDPPKGGVPIKGGGA

SEQ ID NO: 186685 - protein, 105 aa, Zea mays
  Clone ID: MRT4577_101847C.1.pep
KKLGKIELLSDFNTEYTVTVPEQSKRVTLKPKPGREFGSKCCFCFFFIAFRSTQFALYKQRSRPALSSQLGPGPRAKLPIYSRRPDQPDSTPPARSSYGASRLAR

SEQ ID NO: 186686 - protein, 157 aa, Zea mays
  Clone ID: MRT4577_101848C.1.pep
FFGLDLDLDLDCPAGCCQKETLEHGRQAGRCRPRADAAVCAAYCPHGRRRRRRRRRGLAFPGGERKENQSRVDRIGPIHITAPPLPSLHTLLFSSLQTRFRESNPVQSIFSLPLFSAGAAAAKVCVFLSVRPVDEHGGDGGHGHGVALHLLLLSSPP

SEQ ID NO: 186687 - protein, 61 aa, Zea mays
  Clone ID: MRT4577_101849C.1.pep
RLTGRRLLYDLFWYNDDYILYDYFLEKEKLHKFSFAQSRFNFITSRVMVPVFNVWVLLNCF

SEQ ID NO: 186688 - protein, 91 aa, Zea mays
  unsure (1)..(91): unsure at all Xaa locations
  Clone ID: MRT4577_10184C.1.pep
GVPVGDGXAPRKVDDAVAQQFARPEIRHDRSREIGGARRIGARLAGGDGRIDERKEVAVEGGVELRVXAHDVGIVELRADRAVDQRAQLLD

SEQ ID NO: 186689 - protein, 86 aa, Zea mays
  unsure (1)..(86): unsure at all Xaa locations
  Clone ID: MRT4577_101850C.1.pep
TCTYGNILHILSENHGKIHGSSIMMYVACLIMGPISSAEFAKGAQEFSECPSXGRKVXDLGWFPRGKMAGPFQEVAFNTPDGTVSA

SEQ ID NO: 186690 - protein, 56 aa, Zea mays
  Clone ID: MRT4577_101851C.1.pep
HNIFLVHQGQPHMPRHEFRTTKHIKKVKTAPILRSYRFSSYIYPGTRMVKPTQAYY

SEQ ID NO: 186691 - protein, 129 aa, Zea mays
  unsure (1)..(129): unsure at all Xaa locations
  Clone ID: MRT4577_101852C.1.pep
MSTNVLSVIMLVAVSTCVANATIFPQCSHASIAYLVXAYLSSIIASICENPALQPYRLYQAIAARNIPLSPLLFQQSPALSLVQSLLQTIKAQHLEQLLLPLINQVTLAYLSPYSQQLQFLPFNQLSTL

SEQ ID NO: 186692 - protein, 88 aa, Zea mays
  Clone ID: MRT4577_101853C.1.pep
FWAAMTPAVGVVNPRAPGPGAEVVEDEEEAAVAWRELRGKAVDVAAADDERAVLARSHQGRPPSKEGGASAGGGAGPVDTDGGSPSSS

SEQ ID NO: 186693 - protein, 107 aa, Zea mays
  Clone ID: MRT4577_101854C.1.pep
EGQRLARALLLLPFSFHSAPSPSPTFSNLLNAGSPCPGLHHLDYNSLFDTSKVTSSISWYSKYKSSQCKFHFFTWKLTPSFFTVRHIKSQIYTQCQIEKTYILRAKK

SEQ ID NO: 186694 - protein, 193 aa, Zea mays
  Clone ID: MRT4577_101855C.1.pep
MESKSPSTSCVISPAATLTMLAGESSWAMHIANFLASTPQDGTRVTDGQQPPAVPGGSGSSFSSSSSFDSFSDNDDASFITSEFMCNDDEDDDESVKDTACSSSAAAQQKATMENFHMKQMAATDAKQFNDMPQLMAKYLEAMSSKQQVTTGADHQAAISSSSADEKAIHESNELRKRGLCLVPISMLINYLG

SEQ ID NO: 186695 - protein, 151 aa, Zea mays
  unsure (1)..(151): unsure at all Xaa locations
  Clone ID: MRT4577_101856C.1.pep
HIPTHDLSSLDSPFSEEEIWKTILSLPSSKAPGPDGFTGKFYKSCWQIIKGDILAAAMAVWNRRLLNFDLLNSAYIILLPKKEDAXLVKDFRPISLVHSFAKLITKLLANRLAGHLDKLVSHTQSAFIKGRSILDKFMLVQQTAILFHQKR

SEQ ID NO: 186696 - protein, 341 aa, Zea mays
  Clone ID: MRT4577_101857C.1.pep
MFSGTGPSGGAAHSTSTGGGGGSPSDRGGPAPSASASVSTPASESTVARRLNGLDPHGDDAPSSQPATSKKKKRGARAVGPDKNGRGLRQFSMRVCEKVESKGRTTYNEVADELVAEFSDPNINIDSPDPDNSSAQQYDEKNIRRRVYDALNVLMAMEIISKDKKEIQWRGLPKTSMNDIEELKTEVNGLKGRIDKKNAYLQDLQDQYACLQNLVRRNEQLYGSGDAPSGGVALPFILVQTRPHATVEVEISEDMQHVHFDFNSTPFELQDDSFVLKAMALSGEETDCTQAPGANGGECSSTRNNYWHHHQQPQPPGPRVVRVPNSPPIPGILKGRVKHEH

SEQ ID NO: 186697 - protein, 94 aa, Zea mays
  Clone ID: MRT4577_101858C.1.pep
LPHDRYFDAPTAGGEEPDEDVEKVTKPKDRPSTRHITENGLTKSRRLLTSSSFNTEHATIDTPRDTQRKRAESGRSNGANGHTTTRIMAKDPPR

SEQ ID NO: 186698 - protein, 57 aa, Zea mays
  Clone ID: MRT4577_101859C.1.pep
DSFRSSPVWDSFSSRKIHRIREACQLKVVDSWSSHAWLNRRLKVTSWHHLKIHGTLE

SEQ ID NO: 186699 - protein, 87 aa, Zea mays
  unsure (1)..(87): unsure at all Xaa locations
  Clone ID: MRT4577_10185C.1.pep
GLHWEGHGIDFCKFFATLDIVNXLLGNTNGRFTGEAHVGVPTAMQTEFALNRNTQNMGRGYDEETRCKKQEYYSALDNQVSQRGSFE

SEQ ID NO: 186700 - protein, 79 aa, Zea mays
  Clone ID: MRT4577_101860C.1.pep
LPPSCVDVFSHSCGISTHTLATRHPSGEPRWSTRPFCYRGALSHWNGCRRLLLELSSLPGLSVPITCSKLRYEVGPFTG

SEQ ID NO: 186701 - protein, 60 aa, Zea mays
  unsure (1)..(60): unsure at all Xaa locations
  Clone ID: MRT4577_101861C.1.pep
RIIIGTMVMECLFSCNFFQPYESYCLLTLVHSFQVTRKTIFVMLRKFTSDSLSXPAHTNN

SEQ ID NO: 186702 - protein, 69 aa, Zea mays
  unsure (1)..(69): unsure at all Xaa locations
  Clone ID: MRT4577_101862C.1.pep
SVLHTHLFIRGVRDTDQLAHLVDAEYVDKYEKAMALMNQLTDDDPRNXEQEWRVHCAYCDGAXYDQVGF

SEQ ID NO: 186703 - protein, 64 aa, Zea mays
  Clone ID: MRT4577_101863C.1.pep
VLLLTNQLTFKGQTGTNGGHKNTMFTYVDSSYRKCCHKDNIDTMLTCMDRFDTSTITISIVAIN

SEQ ID NO: 186704 - protein, 90 aa, Zea mays
  Clone ID: MRT4577_101864C.1.pep
NDVHARCVVCSDEQERAGSASSDRIRVTVPSSPRATKMTLLLLRLLQLQLLVSSRPDSCVRTRPPAPWQRASTQPMRASLLPCRQPHRRA

SEQ ID NO: 186705 - protein, 140 aa, Zea mays
  Clone ID: MRT4577_101865C.1.pep
DDDDTHHHAARRNQNNKMQIKYWDQHKDWERQRMYRLFCASLGGSHRVLTPHRAHRLDLPPPHQTSLLPQRLCSMSEYQRQISLLPHTGTCRSHCGHATPTTASETTTTRAHVYAEYLSMQITERTTLLPFFQPRKHGTI

SEQ ID NO: 186706 - protein, 148 aa, Zea mays
  Clone ID: MRT4577_101866C.1.pep
CCCPCSCCTTTTCSSASEKQCDDEDASGPWELNAAAPGRRKLHRLFSLPCGVAAACACEGSGADSTDWQSASALSLAFLPFLPDSNKFLSHWLALPICARRTTPRMKEQRPGGHSLLSGTETGTALMSGLNPVPLPNTPAICPHCTGH

SEQ ID NO: 186707 - protein, 104 aa, Zea mays
  Clone ID: MRT4577_101867C.1.pep
SKQGGAFLPPVPGEVILGFFYAIKKIMDSVKNPQKKSLPATLKVVAGAMSRRYGENAGKATQKGFLTAGHPVGTGWNLFKIRKGVTPLSSMPGKMVKRAIKNRK

SEQ ID NO: 186708 - protein, 106 aa, Zea mays
  unsure (1)..(106): unsure at all Xaa locations
  Clone ID: MRT4577_101868C.1.pep
PFHKGLHWALKSGASAPRIPNPPHXASRPKQAPPANGTVAPRANQKAPHNYLQFEFFQCKDIRTCESQNGKSGSGPQPAKKAKAXTIKKKKKKKKNKTVPARPAPA

SEQ ID NO: 186709 - protein, 120 aa, Zea mays
  Clone ID: MRT4577_101869C.1.pep
AGRAQRRAFASPGRLHGEGPHRDKAGREPDAAGVHLLQAQGRALQEGGEQYTVPSLELLEHSLEAAVHRVRSEKDRKIGGEIDCLQNIIRGRHEERYGLCDKVSTRFCELQTLRTPRDCT

SEQ ID NO: 186710 - protein, 106 aa, Zea mays
  Clone ID: MRT4577_10186C.1.pep
MEASPPRSDTFSRDYKPGPSFERLDADAALGESFSSSTASFSFIDMDPEEQLFSMRWTSSSSEGDGLRFGLPRAAGACSSPLLAASAGFVFSDDSLLLPCDASACF

SEQ ID NO: 186711 - protein, 199 aa, Zea mays
  Clone ID: MRT4577_101870C.1.pep
MGRGRSEIKRIENPTQRQSTFYKRRDGLFKKARELSVLCDVDLLLLLFSTSGKLYHYLSPTVPSVKDLVERYEATTHTKVWTDIRQERRAELEKAEQMCELMEKELRVMTVDDGEQYTVPSLELLEHSLEAAVRKVRSEKDRKIGGEINYLENIIRGRHEERYGLCDKLAHSQASNNGGEGGGSTPPSGGGLELKLGFN

SEQ ID NO: 186712 - protein, 75 aa, Zea mays
  Clone ID: MRT4577_101871C.1.pep
FTLRINPLDYCLTYTRQQGYCSFSSASYSRLTISDTDVPSLADLVNKQKITVLHNTGSDDPNSKGAPKADLERIC

SEQ ID NO: 186713 - protein, 85 aa, Zea mays
  Clone ID: MRT4577_101872C.1.pep
TKRIGFRSTEAVQPQQTATGDEDNAGSIHGMPAMRRRAPVPRPAGLRRADVRGGRADLREADHEVRCPRRASAATTSAAPPTWSW

SEQ ID NO: 186714 - protein, 116 aa, Zea mays
  unsure (1)..(116): unsure at all Xaa locations
  Clone ID: MRT4577_101873C.1.pep
RRRRTGGAAGAGGDRVRGLDGGHGQQQPDPHPAARRSRAAAIVRGALHVVSIGTNDFLENYFLLATGRFTQFTVPEFEDFLVAGARAFLARIHRXXARRVXFAGLAAIGCLPLERT

SEQ ID NO: 186715 - protein, 207 aa, Zea mays
  Clone ID: MRT4577_101874C.1.pep
MGRGRSEIKRIENPTQRQSTFYKRRDGLFKKARELAVLCDVDLLLLLFSGSGKLYHYLSPTVPTVKDLVERYEAATHSKVWADVRQERRAELEKAERMCELMEKELRFMTVDDGEQYTVPSLEQLEHSLEAAVHRVRSEKDRKIGGEIDCLQNIIRGRHEERYGLCDKNFLQIWPQLAHSQAWNNGGEGGGSTPPSGGGLELKLGFN

SEQ ID NO: 186716 - protein, 309 aa, Zea mays
  unsure (1)..(309): unsure at all Xaa locations
  Clone ID: MRT4577_101875C.1.pep
MAPTCRPRPDAALLLLLLTASSVGVARAAPRVPAVIVFGDSTVDTGNNNQIPTPLRADFPPYGRDMPGGPRATGRFGNGRLPPDLISEALGLPPLVPAYLDPAYGIDDFARGVCFASAGTGIDNATAGVLSVIPLWKEVEYYEEFQRRLRARVGRSRAAAIVRGALYVVSIGTNDFLENYFLLVTGRFAELTVGEFEDFLVARGARAFLAQIHRLGARRVTFAGLSPMGCLPLERTLNALRGGCVDEYNQVARDYNAKLLAMLRXLQAARPGLKVAYVDVYQNMLDLITNPSTLGRERERERERERERD

SEQ ID NO: 186717 - protein, 91 aa, Zea mays
  Clone ID: MRT4577_101876C.1.pep
LHLMSSLLPPFLVLMSAWSGGGGFCCPVKFRSLVAIDLRGFGHPPLKKSVFFWNCGSVACRRAASKAWSRTAPCSDGSGVGEETQMGVGGY

SEQ ID NO: 186718 - protein, 135 aa, Zea mays
  Clone ID: MRT4577_101877C.1.pep
KNKWERKTECLQSRQPTALGKPTSSSKHHTSHQSRTAYLYHHRLTAAAFILMQLHHLSCLPKPCRSPALCFLHAQHPSPVPLLHGTPSVPVCAHHPSAPQWCTASTLLAYMNPRSEDRAEGKQNQAAWTPCCKHR

SEQ ID NO: 186719 - protein, 77 aa, Zea mays
  Clone ID: MRT4577_101878C.1.pep
ETLNGNQILCFACSWRLGFHKRSPSASKFFRQVSSCCTATYTSDQPNMRNWWKPSLVFSFSTRNCPSFSSEFPPWPS

SEQ ID NO: 186720 - protein, 75 aa, Zea mays
  Clone ID: MRT4577_101879C.1.pep
PCFGTLEREKVTGNWRGSGIGPFWGFCSYKRFCYNAPFFGGERLKLILGLQTLGSTNLRKVFPAFGRSCFRFLEF

SEQ ID NO: 186721 - protein, 152 aa, Zea mays
  Clone ID: MRT4577_10187C.1.pep
MKIAYICVDPGIPVFGCKGASIHVQEIIRAFQNQGATVTLFAAKLGGEPPKDLVDLPVHCLPKVPKGDLAMREQGLFQQNQTLQNLLTQAAPYDLRGAMVTNATLNRANLTSANFAFAKLYDVDVTGATVEGMNIQNAEIYNTGIGIGGGDD

SEQ ID NO: 186722 - protein, 47 aa, Zea mays
  Clone ID: MRT4577_101880C.1.pep
STSARDWRFLVLPARPLLLCYPITLRRYNSPSRATNPQAVDTPPTGR

SEQ ID NO: 186723 - protein, 64 aa, Zea mays
  Clone ID: MRT4577_101881C.1.pep
TRLRPRMVDPMFASKRWQTLSYVMMSMSRDRMTLHYLHHAPISKKLARNTGICAHKCSKSQYLL

SEQ ID NO: 186724 - protein, 46 aa, Zea mays
  Clone ID: MRT4577_101882C.1.pep
IEGSKEDIQSYHLVMIGKVDGCILCIGLFLSPSSNVKQVHLLTKNG

SEQ ID NO: 186725 - protein, 24 aa, Zea mays
  unsure (1)..(24): unsure at all Xaa locations
  Clone ID: MRT4577_101883C.1.pep
PTVRKGFRLKEPYCXLKKGFPGSS

SEQ ID NO: 186726 - protein, 37 aa, Zea mays
  Clone ID: MRT4577_101884C.1.pep
DFVMLILSCDTKRQTVSVDVFESKCMNPTVTTTAILG

SEQ ID NO: 186727 - protein, 185 aa, Zea mays
  unsure (1)..(185): unsure at all Xaa locations
  Clone ID: MRT4577_101885C.1.pep
MVLGLRTKTRKDSAFHVDFNILIQEISPWPPSESLKSLRSVVLFWENGERNSGKTSTVAPSIGSGSTAGKIEFNEFINLQAIFQKEGSSKSGKWQKNLLELNLYEPRREKLKGQHLGSATLDLAEHAMFHEDTSVXVPLSSKRSFKNNAQPMVYLRIQPLDGDNSSVSSRDALSPEASDKDSKEF

SEQ ID NO: 186728 - protein, 262 aa, Zea mays
  Clone ID: MRT4577_101886C.1.pep
GVPSFGLYVHLRVGPYVCAEWNFGGFPVWLKYVPGIRFRTDNGPFKAAMQKFVEKIVSMMKSEGLFEWQGGPIIMAQVENEFGPMESVVGSGGKPYAHWAAQMAVGTNAGVPWVMCKQDDAPDPVINTCNGFYCDYFTPNNKHKPTMWTEAWTGWFTKFGGAAPHRPVEDLAFAVARFVQKGGSFVNYYMYHGGTNFGRTAGGPFIATSYDYDAPIDEFGLLRQPKWGHLRNLHRAIKQAEPALVSGDPTIRSIGDYEKAYV

SEQ ID NO: 186729 - protein, 64 aa, Zea mays
  Clone ID: MRT4577_101887C.1.pep
MDYYQEVDYCSEEERSLPPAGFGRLFGGVQYDVVEVCSSTTTRTNAAVALHHHHHGDHVDHLLR

SEQ ID NO: 186730 - protein, 73 aa, Zea mays
  Clone ID: MRT4577_101888C.1.pep
QSLQYLLRSTVPCDSISYRSNTDRVWHSLAGTYPYAYAYSYYVVPDLWRCAQARTDHLESEIHKQISQPKGSE

SEQ ID NO: 186731 - protein, 99 aa, Zea mays
  Clone ID: MRT4577_101889C.1.pep
GYPPRSSRARQNARGCYTLSPHSVDGVNVVHHPAVSANVTLTPRYAILLAPVSSDNNDHPETALEHSYPSTVALTMENLVGARSTREKPTRGTISGNST

SEQ ID NO: 186732 - protein, 65 aa, Zea mays
  unsure (1)..(65): unsure at all Xaa locations
  Clone ID: MRT4577_10188C.1.pep
TSVSNHLTFTGIYRTLTHEMLEDPAFKGRDKDMQRTDREXDYNVLGXKXCHPGVAVVQTYKIMNG

SEQ ID NO: 186733 - protein, 119 aa, Zea mays
  Clone ID: MRT4577_101890C.1.pep
KPPLISGGQCYPRGPPFPLKTEDSPGRWVPHPPGRGHLKKPHLFKAASFFPGKVLGCFFGLRPRPPPHKFWNRGFFFPPFPFPLGVEGPPPNLRGGPRVYFLGPGGRAEKIWAPLVGPL

SEQ ID NO: 186734 - protein, 81 aa, Zea mays
  Clone ID: MRT4577_101891C.1.pep
SGHAPRCTGFRTPPVGKGALRGPPPSRWRGGFIQWNGPLGPEPPNLVRAGREPKAPVVTLDFNLKALSINPHHGSFWPWAF

SEQ ID NO: 186735 - protein, 73 aa, Zea mays
  Clone ID: MRT4577_101892C.1.pep
PLVFLDRLGSSRPTRTTGQYKLVQPDLHYVFDEPFLREHTADRLKWDSCIRPPPLGSGARYTYARSAGMLPTS

SEQ ID NO: 186736 - protein, 193 aa, Zea mays
  Clone ID: MRT4577_101893C.1.pep
MAGLISLRAGPRSSPSLARSSSAWASPPASHVAVRLPSPLFRCAKLRRSRSLLAAALEISKDGSAAVLANSLPSQGAIETLRNADAVCFDVDSTVILDEGIDELADFCGAGKAVAEWTAKAMTGTVPFEEALAARLSLIKPSLSQVEECLEKRPPRISPGMADLVKKLKSNNIDVFLVSGGFRHMIKVGPIIS

SEQ ID NO: 186737 - protein, 128 aa, Zea mays
  Clone ID: MRT4577_101894C.1.pep
RCCCYTLMFCSCLLATFCSCSCYRFGKNMRKANLGSCFLQSLCSNKMCASHSKYFVGENQTASWTCWTDWCNHILLLTTLSALKDQLDFNFTSGLSPSSRSNSTFRQVWYQIETCLLVCNNINLLVMC

SEQ ID NO: 186738 - protein, 181 aa, Zea mays
  unsure (1)..(181): unsure at all Xaa locations
  Clone ID: MRT4577_101895C.1.pep
LVRGAIETLRNADAVCFDVDSTVILDEGIDELADFCGAGKAVAEWTAKAMTGTVPFEEALAARLSLIKPSLSQVEECLEKRPPRISPGMADLVKKXKSNXIDVFLVSGGFRQMIKPVAFELGIPPENITANQLLFGTLREYAGFDPTEPTSRSGGKAXAVQQIKQDHGYKTVVMIGDGATD

SEQ ID NO: 186739 - protein, 197 aa, Zea mays
  unsure (1)..(197): unsure at all Xaa locations
  Clone ID: MRT4577_101896C.1.pep
RGRPGHYHNLTSIIXAAYDGAMMARXDLVAELPIXVILLLQRDIARTXRTLEKPLIVATNMLERMIDHPTPTTGXGSDIALGVRERADAIMISEETAHATHPLKEHLLLHTEGLRTKSCIYNPTTSPIAIXHLDXLHNDEFSPPQLXKAXACHATIMXAHTLRTPSLXFTQTRSMPGLLKHYRSSTTLFSFTNEELV

SEQ ID NO: 186740 - protein, 98 aa, Zea mays
  unsure (1)..(98): unsure at all Xaa locations
  Clone ID: MRT4577_101897C.1.pep
SLLSTEEAVVAEDPETEXPVEXXRFMLXEVXNVKKVPKVKKAPKEKKLFAXEKPAAHPSYAEMIVEAIAALQERKGSSSVALNXFFQGKHGGKLPTNF

SEQ ID NO: 186741 - protein, 233 aa, Zea mays
  unsure (1)..(233): unsure at all Xaa locations
  Clone ID: MRT4577_101898C.1.pep
MLAPHPRPPPTLPLPRIPSLLILIPHLPSLPPPSSELHPHRRGCSTPARRQWPPPRVRSCRSPTGLPRTSTRPCSCCSSRRKSTRRSVKSRSESVRVVVLSPVTPPPPPPPPFAPTLPPPHRKPLSPSPPCSPLNDKLAPRSSTDAIETNPFLSQPPSLPTSTHPPRPPPVAGPPPPPPPPPPPPPPPSVGYWESRVRKPDMSKEXRSLALSPPPQAANFRSVPAPTDAFPSR

SEQ ID NO: 186742 - protein, 93 aa, Zea mays
  Clone ID: MRT4577_101899C.1.pep
TNKIFFFGRGLNKPHFQFQPFIYLTFAGMGHNKSPHLIIHNFHRTNHFTISTTTIIKKWSHHKTKGYNCPLYVKITLARDHIFYATIKRSRWT

SEQ ID NO: 186743 - protein, 74 aa, Zea mays
  Clone ID: MRT4577_10189C.1.pep
PSCWTTICDSPTAILYSLLTLMLMLLKTLIYWIPSLVQAHAADHHVLLDTTLQARHLHLREVRDRETTTYYKLI

SEQ ID NO: 186744 - protein, 173 aa, Zea mays
  unsure (1)..(173): unsure at all Xaa locations
  Clone ID: MRT4577_1018C.1.pep
MAAPSHLHLPGCPQTLALPLPWPRGFSAPPGLLSRSRRLRPVAALGPADAGDLLGRVEALLYTVADAAAXAEPVAAAGTKESAAGDWLSGITNSMETVLKVLKDGLLSLHVPYSYGFAIILLTVLVKAATFPLTKKQVESALAMRSLQPQVKTIQERYAGDQERIQLETARLY

SEQ ID NO: 186745 - protein, 80 aa, Zea mays
  unsure (1)..(80): unsure at all Xaa locations
  Clone ID: MRT4577_101900C.1.pep
TTCIXVQXPTSSSHSCNVNRPCPLHEESGTRASSILFFQNVSTASPIEQNQTLMVHQVXHIPLYTYAYSHSERTSASRYR

SEQ ID NO: 186746 - protein, 66 aa, Zea mays
  Clone ID: MRT4577_101901C.1.pep
RLRLWAGVVVEPLLELRPRAASEGGGHQQRRQHRPSHHRRSDELLVLAAAGYVLRMQCKLLVSRVS

SEQ ID NO: 186747 - protein, 53 aa, Zea mays
  Clone ID: MRT4577_101902C.1.pep
SRGSKSPVAFSRLTARGASKLDSPRHGRRSGWRSRTAPGNALAPLSSPSSLPT

SEQ ID NO: 186748 - protein, 53 aa, Zea mays
  Clone ID: MRT4577_101903C.1.pep
INESEQLFTVMPYLSAKNQLTLVFFIWLTGLVALMMFQEPNAELFDRSRAFVH

SEQ ID NO: 186749 - protein, 89 aa, Zea mays
  unsure (1)..(89): unsure at all Xaa locations
  Clone ID: MRT4577_101904C.1.pep
MEHKGEMKVVVRTVCSLXPSSSRKCLEESLQYIFGENKGILVAQKIGVSIMGGLVIGFGQKVLDISFRNRPEQMXAFLRHPYVFQQPFG

SEQ ID NO: 186750 - protein, 89 aa, Zea mays
  Clone ID: MRT4577_101905C.1.pep
LRDATCFREEPHILTQLGTHTSYFSCSRPPSPPPALWLDLLSSGYKANWPRAQGLGHQHAQRTETFPRAHFMRRSVVGQEEFSFREQST

SEQ ID NO: 186751 - protein, 126 aa, Zea mays
  unsure (1)..(126): unsure at all Xaa locations
  Clone ID: MRT4577_101906C.1.pep
MARVRDRTEDFKEAVRVAALSHGYTEAQLAALMSSFIIRKPSPKSPFTNAAIKTLQSIREXLERFIVKHRXDYVDLHRSTEQERDNIEHEXXVFVKACKEQIDILKDRIHKEXKNGSGKTWLGTRG

SEQ ID NO: 186752 - protein, 77 aa, Zea mays
  Clone ID: MRT4577_101907C.1.pep
STYSLHSYAYIEVIFAGIVYAGKCYRTYCGFSRKKNGACCSSRGVGSSSTSTFTLIIMLPRHSHDLIRNFLSKDVCF

SEQ ID NO: 186753 - protein, 132 aa, Zea mays
  Clone ID: MRT4577_101908C.1.pep
VMQCIWHAAFINNLHLLQIRPKIKIYIKWMGDLARESCVDASARADHSPHGVVQEGSGVGGLQRAPAQYYPPDEYRGPRLLARLRLWKNRCCPRCSPVSRVCSNSGDKLCGIPGSTLMITPRSKSPRYCAQL

SEQ ID NO: 186754 - protein, 56 aa, Zea mays
  Clone ID: MRT4577_101909C.1.pep
KSEMLVDIELSSPTITNTISFPRTTTIGSITLPWVDNTCKYHFNVCIGMQCVGTLS

SEQ ID NO: 186755 - protein, 144 aa, Zea mays
  Clone ID: MRT4577_10190C.1.pep
RTYEMATSFYSNSKQQTSVAPIAEEADAHRLRTREQFARGAARSRRMDEIPAGPPVSGASERALPAQERSKQEAAGQEHHIPVFSNPDLGQQEQEEQPSSWPTPAAPPARAPMDDHSKTQAVKDRLKDKTAKVAAKAVRVLFGN

SEQ ID NO: 186756 - protein, 100 aa, Zea mays
  Clone ID: MRT4577_101910C.1.pep
RTRGQDQAPPAFSTLNSGDTIRHGRHIDRRQQAEHHARGRAPPGAVSRSGARVVPCGASAGADVPEEAHRAQLRAGDHPEHLRVPYLCAGSNSSRIIWRT

SEQ ID NO: 186757 - protein, 267 aa, Zea mays
  Clone ID: MRT4577_101911C.1.pep
MEGGSGAAHRPWDTASQLQYSFRTSVSSLSEVEEVEEEACPPPVAVEDRVFVAVPEDTKNGKSTLLWALENPAKDCAGVVVAHVHCPAQMIPMMGAKVHHSTVNPQRVNEYRKKVRAEVEEKLDEYVLVCRRQKVSCQKVVIEMDDAVRGLEQLITLHGVAKLVMGAAADKHYSKKMKSLKSKTALRLTEVAAPSCKIWFTCKGRLICTREANTTVPAMPPPSPALTSASRSSVSSVASQLRMLLSRSESDGSSSNGSPRHDLTRSR

SEQ ID NO: 186758 - protein, 113 aa, Zea mays
  Clone ID: MRT4577_101912C.1.pep
EARHPPLVIVGSSGTAKGAGLAPFVTWHQGLPICLGFLLHLRPSVPACGCFTWCLLINYCDRCALASKFRIYPLLSPCVAVWIGIDDVILINSGPGRPWSQAPAAQSSLVSNP

SEQ ID NO: 186759 - protein, 101 aa, Zea mays
  Clone ID: MRT4577_101913C.1.pep
AIVRRASIDLPETGHMPTDYRLRAPASVSQQRFRLSLPTSPPPLAFCPGGGADPDERGGIGDERLRTGRPSKSFTRRGGQCIGPSRNTRSGSRSRIYKAWT

SEQ ID NO: 186760 - protein, 130 aa, Zea mays
  Clone ID: MRT4577_101914C.1.pep
RGIFIAGNLSTTTVLFRSWLEYPLQGHAKQGQRNPPQCSDKFVWLEDAHNVRHGHSYINTPAVLSSAVFAIFHLLHKSIHGSWAITSCFMNVPIPSVNTSSSGRPVTRVNTNHTKASPFWSEVSVSSKKC

SEQ ID NO: 186761 - protein, 66 aa, Zea mays
  Clone ID: MRT4577_101915C.1.pep
SKKSLAKISVLLSQDQGFEFHRKLGITYRGLISFFLREDYGPRKTLRHMLGQGTHHSPDLYTFRRS

SEQ ID NO: 186762 - protein, 179 aa, Zea mays
  Clone ID: MRT4577_101916C.1.pep
RPRGRGRDASGHAAGGRQEAAFRRPTGRRGPHAARSVRRVPGSRAPPQRVPLRLRRRRRRRRGRKGGRCQRGSRRRRRRVASGPEVRLRRAAEPAHATELAAGAGGHPGGGRQQDRAWSHRGINRNGWGNSSAAFYPSYRSSVLLPPFSSSLLASPSRRRSAGPDIREAQDKTYKGGSL

SEQ ID NO: 186763 - protein, 71 aa, Zea mays
  Clone ID: MRT4577_101917C.1.pep
AVVTTQSTFFFFFFFFLVFFFFFFFFFFFFFFFFWEVEGPQWCQMARQAANRNFIGTRWKSLNRIDPHNLS

SEQ ID NO: 186764 - protein, 92 aa, Zea mays
  unsure (1)..(92): unsure at all Xaa locations
  Clone ID: MRT4577_101918C.1.pep
QAKEGVHNSVPPPPSLARDLPHDAPGQSGLCYILVFTCTIKLAGITFTGDPAKNKKDLFGAXKKKKKKKKKKKKKKKKKKKKKKKKKKGGPV

SEQ ID NO: 186765 - protein, 82 aa, Zea mays
  Clone ID: MRT4577_101919C.1.pep
DECWLFYSVTQVEKTDRRFSLDTIIWLYSRTVLCELDSFSAPNYRYFWRPYVKRCSESFFRVFKYLCLLDKWLFYVPLASYY

SEQ ID NO: 186766 - protein, 75 aa, Zea mays
  unsure (1)..(75): unsure at all Xaa locations
  Clone ID: MRT4577_10191C.1.pep
LTFKKGRVPSLGDKPGGPKGVXFFVPLVKMFQXVSPPRGMPKGGGSSPMQLPKFXVVPQPIQNQFSVAKTKEAAA

SEQ ID NO: 186767 - protein, 184 aa, Zea mays
  unsure (1)..(184): unsure at all Xaa locations
  Clone ID: MRT4577_101920C.1.pep
MAMAAADGKSRRFALACGVLSQYVKAEQQQMAAPRAPAXRPLSLMPGADVGADEQQEPAAARAEEMPGPAPAPAAAPPLTIFYGGRVVVFEDFPAEKAAEVMRLAAGADLPIARKASLQRFLAKRKDRLVERAPYARPSSPAEAVKPASWLGLGQHGSRPPHHRAVIYWIDLDQWRFNWLMMGS

SEQ ID NO: 186768 - protein, 67 aa, Zea mays
  Clone ID: MRT4577_101921C.1.pep
SSRSAEEDRNLAAGEEGDEFLPLLLHAEVVSIHPSIARWHQLSVYGSRSELLSNLDFRKGEKGTTIS

SEQ ID NO: 186769 - protein, 173 aa, Zea mays
  Clone ID: MRT4577_101922C.1.pep
MAMAAADGKSRRFALACGVLSQYVKAEQQQMAAPRAPATTTTTLSLMPGADVGADDQQEPAAARAEEMPGPAPAPAAAPPLTIFYGGRVVVFEDFPAEKAAEVMRLAAGDDLPIARKASLQRFLAKRKDRLVERAPYARPSSPAEAVKPASGSASASWLGLRSTEADRLTIAL

SEQ ID NO: 186770 - protein, 89 aa, Zea mays
  unsure (1)..(89): unsure at all Xaa locations
  Clone ID: MRT4577_101923C.1.pep
QDKTRKXTGXEALGTXERKVKFFSKTIEVIVTGYFFFLXXXXNGGDRVSYXEIVTHLNFSYDDVVLLLHSLFCAKYKIVSSVPSGRCIC

SEQ ID NO: 186771 - protein, 143 aa, Zea mays
  unsure (1)..(143): unsure at all Xaa locations
  Clone ID: MRT4577_101924C.1.pep
MPDQANQPXVLHKLDGQFQLPSIISEGVRARXLCPPVLLYERRFATRNYMTQSLWGPSTSVSGGLNVLVMQTLLCANAPAEKGGTNFMTDFMMGRLFSAAVSKTAAASIERVKLFIQNQDEMIKSGRLSXEPYKXIDDCFKRT

SEQ ID NO: 186772 - protein, 141 aa, Zea mays
  Clone ID: MRT4577_101925C.1.pep
MASSSGLRSCSAVGVPSLLAPSSRSGRLAPFCAYATTSGRVSGGGGWVPGLPRPALLGGSSPGDFGFCPVGLVAVPVNFARFKGSEVSHCRWAVLAVPGVLVPVALGLGTWVLALVWAVVPGGLAPFLGSPVRGGSLLALL

SEQ ID NO: 186773 - protein, 109 aa, Zea mays
  Clone ID: MRT4577_101926C.1.pep
YRAYCFHPLCRRSIVVLPRRSRERDVRRRCPPPPPPSRICRSPPPSLPSVHCAPPSSFAARCTLQCCLQDTGHGLLQDPVQGRLLQDPNPNASERMKPTWRREMKWHST

SEQ ID NO: 186774 - protein, 135 aa, Zea mays
  unsure (1)..(135): unsure at all Xaa locations
  Clone ID: MRT4577_101927C.1.pep
MAIKREIFTAATFDFXGGSFPAKICIEPSDPXDVKTAKGKKKHAFKSKSRFXQLEFAQNKRQNAWQQFLTKGKAQKVGFFSGCKKESIFKFPGDPKGKVGVPGSGKGLTHFQRREKHLPLKGGAGDSPDYYQELT

SEQ ID NO: 186775 - protein, 185 aa, Zea mays
  Clone ID: MRT4577_101928C.1.pep
MPPAPKSGDALFASVDRVNAELFTLTYGAIVRQLLTDLEEVEEVNKQLDQMGYDIGTRLVDEFLAKSNVSRCVDFKETADVIAKLGFKMFLGVTATVTNWDVEGTSCSIVLEDNPLVDFVELPDTCQGLQYCNLLSGVIRGALEMVSMKTEVTWLRDMLRGDDAYEMRVKLIKQVPEEYPYKDDD

SEQ ID NO: 186776 - protein, 185 aa, Zea mays
  unsure (1)..(185): unsure at all Xaa locations
  Clone ID: MRT4577_101929C.1.pep
MPPAPKSGDALFASVDRVNAELFTLTYGAIVRQLLTDLEEVEEVNKQLDQMGYNIGTRLVDEFLAKSNVSRCVDFKETADVIAKLGFKMFLGVTATVTNWDAEGTSCSLVLEDNPLVDFVELPDTCQGLQYCNLLSGAIRGALEMVSMKAEVTWVRDMLRGDDAYEMRVKLIXQVPEEYPYKDDD

SEQ ID NO: 186777 - protein, 61 aa, Zea mays
  Clone ID: MRT4577_10192C.1.pep
LLTFHASLVRGRLALTPFRYSQYGCVYIPAWSKSLSVLSQPRSIGAATIHNRPYMGSGVEA

SEQ ID NO: 186778 - protein, 83 aa, Zea mays
  Clone ID: MRT4577_101930C.1.pep
RRALLVLQYDRAGAECYITRVLRTPAFCPRVPPIIPYLLPTRHHLPIHDRRHLIPITASTPTTSQRTILETERGRQLKSHSLW

SEQ ID NO: 186779 - protein, 185 aa, Zea mays
  Clone ID: MRT4577_101931C.1.pep
MPPAPKSGDALFASVDRVNAELFTLTYGAIVRQLLTDLEEVEEVNKQLDQMGYNIGTRLVDEFLAKSNVSRCVDFKETADVIAKLGFKMFLGVTATVTNWDVEGTSCSIVLEDNPLVDFVELPDTCQGLQYCNLLSGVIRGALEMVSMKTEVTWVRDMLRGDDAYEMRVKLIKQVPEEYPYKDDD

SEQ ID NO: 186780 - protein, 228 aa, Zea mays
  Clone ID: MRT4577_101932C.1.pep
SCLGLLPSEGNKPLLVYEYMESGSLDKALFGNGRLNLNWSTRYKICLGNSRGLAYLHEESSIRIVHRDIKASNVLLDATLNPKILDFGLAKLYDDKKTHVSTKVAGTFGYLSPEYAMRGHMTEKVDIFAFGVVMLEIIAGRPNYDGKVDQDMAYLLEWVWQLYEEDHLLDIADPKLTEFDSVELLRAIRIALLCIQSSPHQRPSMSRVVSMLTGDMSLWTMAGDDGHR

SEQ ID NO: 186781 - protein, 149 aa, Zea mays
  Clone ID: MRT4577_101933C.1.pep
PLFRPRVRNQQVDDGSNAPVTYVLKGSQAEQMLCPQWQPQTMENTPVTTNSTLEKQIQEDFCQRAMSQDGTQQPFSSDWRLSNCTATSIDPALPKPAAGGFEQVTGNIHYLRQIKWLLLLFHAKTCTYPVGSCKFHGCVQNWGFFVFAK

SEQ ID NO: 186782 - protein, 46 aa, Zea mays
  Clone ID: MRT4577_101934C.1.pep
FGGVKFFFWAFFKKKKKKKKKKKKKKKKKKKKKKKKKKKNKTPPHK

SEQ ID NO: 186783 - protein, 338 aa, Zea mays
  unsure (1)..(338): unsure at all Xaa locations
  Clone ID: MRT4577_101935C.1.pep
CYTYGELRTATENFSSANLLGEGGYGSVYKXFTFWQGKLVDGSVVAIKQLSETSRQGKKEFVAEIETISRVQHRNLVKLFGFCLEGNKPLLVYEYMESGSLDKALFGNGRLNLNWSTRYKICLGNSRGLAYLHEESSIRIVHRDIKASNVLLDATLNPKILDFGLAKLYDDKKTHVSTKVAGTFGYLSPEYAMRGHMTEKVDIFAFGVVMLEIIAGRPNYDGKVDQDMAYLLEWVWQLYEEDHPLDIADPKLTEFDSVELLRAIRIALLCIQSSPRQRPSMSRVVSMLTGDSEAPEAVSKPSYVAEWQSNTEGTSSSVSTAEAVSVAPFLNPVVDDGR

SEQ ID NO: 186784 - protein, 95 aa, Zea mays
  Clone ID: MRT4577_101936C.1.pep
TAWPRCSPRYGARCSCRCTSLWSDPVPKFPASGMSSAPLAKIVIIVFSSRRASFQYTGFCARPNRLRPCQHVVKDSRRIMCRSYEAAVALIPRAE

SEQ ID NO: 186785 - protein, 51 aa, Zea mays
  Clone ID: MRT4577_101937C.1.pep
RKGGPRTARAGMSLSMPVPVAVAIRAGAGRRAAGNCANGCGRCGVKDRQTN

SEQ ID NO: 186786 - protein, 80 aa, Zea mays
  Clone ID: MRT4577_101938C.1.pep
REVLTPEGKTLGGSGGPPFSSKGGFFFPKKKKKKKKKKKKNEKKSDQKKKKKKKKKKKRKGGRRLVSSSTRELIPDRYLQ

SEQ ID NO: 186787 - protein, 48 aa, Zea mays
  Clone ID: MRT4577_101939C.1.pep
VRYVKPSSDRQRRAFCVRVHCVATTTNISPPLAFHVKRKHLKVSEGVG

SEQ ID NO: 186788 - protein, 56 aa, Zea mays
  Clone ID: MRT4577_10193C.1.pep
TSRRRSCWSRRATTLAASSARRPTVTALPMSCVTIEDTHPSIYIHVSLDHSVADGL

SEQ ID NO: 186789 - protein, 49 aa, Zea mays
  Clone ID: MRT4577_101940C.1.pep
GTCHSGLPTQYVTTYCSVHIAAYNHSTVPGTNVTSRPIHLDYSKISIAI

SEQ ID NO: 186790 - protein, 103 aa, Zea mays
  unsure (1)..(103): unsure at all Xaa locations
  Clone ID: MRT4577_101941C.1.pep
GDLCDLLSIRPFPLYSFFAMYYLLXLILHLYLMNTSTAFYLPFFSYFFLIFYMFFYYFFIFFYFIXYYYLFIYFXFFFFFFFNYPFIFFIVFFYFYLIFYYII

SEQ ID NO: 186791 - protein, 101 aa, Zea mays
  Clone ID: MRT4577_101942C.1.pep
WRSTPTTANPVRLPTPTSSTPSPTTSTTKTSTDCRRRFFARPDPFRQLGVVYEPTYFQGSTSHPSPCTCFYVAALVVFNCQLRSCENLTWYIMYIRRIRTC

SEQ ID NO: 186792 - protein, 92 aa, Zea mays
  Clone ID: MRT4577_101943C.1.pep
TSPLPLPPSSRFHPNSPQGIEMNNSTSPAVDWGDDSAGEMDSEDAAPSSSMGISIAIGSMMEVDADDRQPSPPPDADFFNAFPDDFDDQDLD

SEQ ID NO: 186793 - protein, 103 aa, Zea mays
  unsure (1)..(103): unsure at all Xaa locations
  Clone ID: MRT4577_101944C.1.pep
LPPPSIPTRRRLAEGRAWHVLRDAQLCSAPGLTADASRXLGMSTSRSAEETSQVAITFLDSDDDEGKAPLSFERANKTASTVKDIPSIVNPDIFGNIGDYVPL

SEQ ID NO: 186794 - protein, 75 aa, Zea mays
  unsure (1)..(75): unsure at all Xaa locations
  Clone ID: MRT4577_101945C.1.pep
MDRLADGLAAASLSDPADQSAATAXLPSADYLLSVMRAVEGADATIRTQXLEEISRLKEELMRKTQQLQRXREDA

SEQ ID NO: 186795 - protein, 37 aa, Zea mays
  unsure (1)..(37): unsure at all Xaa locations
  Clone ID: MRT4577_101946C.1.pep
MXQTLPYTNWGSFKCTWVNYTXIFHWTCDPSSIPKVV

SEQ ID NO: 186796 - protein, 162 aa, Zea mays
  unsure (1)..(162): unsure at all Xaa locations
  Clone ID: MRT4577_101947C.1.pep
DSAAIATKRPRGRDHGTTSGRGGGGAXRRMPRRLDSGXRGELXHEAARSFLGLVGTTTQPPFSICCAAWRAPRELPPLQKERKAASPPSSPWMDQTPAVMAAPYYRIAPSSDPIKAQDFLLSVPSALCPPVTGSKLSPPARPPAGDRLRSGTGKARQPSRRK

SEQ ID NO: 186797 - protein, 95 aa, Zea mays
  Clone ID: MRT4577_101948C.1.pep
HGQPATSASVCSPRPASYLLRVERSTCSSPSGSTIRVGRSDRARVWSAQPVAVPILIRTGSRKSDGTLLVALCPPDKKTPCRSYLGVPCLTAPCL

SEQ ID NO: 186798 - protein, 60 aa, Zea mays
  Clone ID: MRT4577_101949C.1.pep
LRGFRGKAGPFYKIYHAVNASSFWDTKLKSIFSRKPNPRRVSRNLIHSMWKHGEMNGFTV

SEQ ID NO: 186799 - protein, 155 aa, Zea mays
  unsure (1)..(155): unsure at all Xaa locations
  Clone ID: MRT4577_10194C.1.pep
GRFFFFFFRERCNGSTYCYDPSKGHDFVTSSLLXGLNPYEELLHSISVREKIERSSSKGLAEPGNLFKNMMAMLRDVTVCYDGTMRTSCSNSIVQFDSTNVSSSVTPGDPVGILADTAFVNAAYKAVLDPVFGHSVEHPPGAQNPRMIASRRQGQ

SEQ ID NO: 186800 - protein, 87 aa, Zea mays
  unsure (1)..(87): unsure at all Xaa locations
  Clone ID: MRT4577_101950C.1.pep
MKSLILLAILAALAVVTVCYESHESMESYELNPFITRRDANTFISPQQXWRARVHERIRERSKPVHELIRAACDDYRLCERYAMVYG

SEQ ID NO: 186801 - protein, 172 aa, Zea mays
  unsure (1)..(172): unsure at all Xaa locations
  Clone ID: MRT4577_101951C.1.pep
MSIELHTLYFPDRFQIVLGPEGSFASKLISLKDFPAGEELARLGKECQMTQHKAYTSVQFEEETAGPEGRGGHFELNSELVYINHSCEPNVAFELPGRWSGLAEGKWRLRSLCDIKKGDALAFAYFSTEWDMAQPFQCQCXAQHLAWXMIRGAKYMSKGTLNKYFINAHILK

SEQ ID NO: 186802 - protein, 130 aa, Zea mays
  unsure (1)..(130): unsure at all Xaa locations
  Clone ID: MRT4577_101952C.1.pep
CTILRDWKTASQIIEHLDSSLSSISFGXTHHILNFLGKCGRTESMMKLFYKMVTSCSTVGLSTYTILLRNLLIVGKWRKYVEVLQWMEDAGVCPTLYMYQSVLPYIWRDNSMDYVTLMQEKINALREKVT

SEQ ID NO: 186803 - protein, 99 aa, Zea mays
  Clone ID: MRT4577_101953C.1.pep
MSGAGEEDKKPAEAGGAHINLKVKGQDGNEVFFRIKRSTQLKKLMNAYCDRQSVDMNAIAFLFDGRRLRGEQTPDELEMEDGDEIDAMLHQTGGSVPGA

SEQ ID NO: 186804 - protein, 85 aa, Zea mays
  unsure (1)..(85): unsure at all Xaa locations
  Clone ID: MRT4577_101954C.1.pep
EQNSPPFKTFFRRMHATLVFFPNFVPVAPFESSKAEIPFXKFLKGAPPNLGPFPFARDPPLPFLPPPFCQLPEESRAPLKFQPNF

SEQ ID NO: 186805 - protein, 82 aa, Zea mays
  Clone ID: MRT4577_101956C.1.pep
SKAGKKRESFFARVLLNPRELGGWCGGVLFPLASHPKHRSELLGYSGQRRWTDAPQHYSQQGGISTRLNQGRSSNSTRYFRR

SEQ ID NO: 186806 - protein, 953 aa, Zea mays
  Clone ID: MRT4577_101957C.1.pep
MSQSPGGREGIYYSRQRKPERNGSVFTPIAAMYSSGHALPVANRSHGLVFGSLSKDWDDIRQRKDQLVNFLASLERASGDSAAAGKIEDSKLASPSVEPTEQKEKAAIIVLDSDDEDGNGSGNSKLASETNKELGTSGLINNIAERMAFNGSQAFGTVHTYGDKNTQIVPYGQCSALVNQFPLQTSWQPSIQFERVVLQKRPEEQRMQDLVAASIAEKRAETQVFLSLPTEKKRRRSDPSLHASDDTATVPKQRKSKGATVVAAANLSLVSQQTATSPEPDMVIEEEEKHKNESDGLDDYWKDFALAVESTKLDEVDEAAIEKEDNGKMEDIDCNHDIRIHEDLGHVCRVCGMIVRRADSIIDYQWKKASRRRTNGYGGHSKDADEIDCGTVKLSEDFIVADIAIHPRHARIMKPHQLEGFNFLVKNLIGDKPGGCILAHAPGTGKTFMLISFIQSFMARYPSARPLVVLPKGILGIWKTEIKRWQVQDIPVYDFYSVKAEKRVEQLQILKSWEDKMSILFLGYKQFSTIVTDDGGSNVTAACRDRLLKVPNLLILDEGHTPRNRETNVLESLNRVETPRKVVLSGTLFQNHVEEVFNILNLVRPKFLRMESSRPTARRIMSQVEIVGRSSKGLADGAFTKAVEETLLNDENFKRKAHVIRGLRELTKDVLHYYKGDILDELPGLVDFSVFLKLTPKQKDIIYKLEAHDRFKRNAVGSALYIHPCLSELSEVNAEHRANTFRDDLVDSLVDSITVRDGVKANFFMNILSLANSAGEKVLAFSQYISPMIFFERLLVKKKGWHVGKEIFMISGDTSQEDRELATDHFNNSADAKIMFGSIKACGEGISLVGASRVVILDVHLNPSVTRQAIGRAFRPGQQKKVFVYRLVAADSDEVKVHETAFKKEVIPKLWFEWSEHCTTEDFKLGQIDIDDSGDELLDTKAIRKDIKALYRR

SEQ ID NO: 186807 - protein, 74 aa, Zea mays
  unsure (1)..(74): unsure at all Xaa locations
  Clone ID: MRT4577_101958C.1.pep
RPXIHYXTQCLDLAXCFAHGAKRSFWRGPRISPTSCIDYAKTPLHRPRSRLRHHATMPTHFRTDPPPLIAAVSP

SEQ ID NO: 186808 - protein, 81 aa, Zea mays
  Clone ID: MRT4577_101959C.1.pep
RRVVSSGLGSRPHRIERRRHSRSPAISRRPPRAAHRPPQRVIFQRLLIGEPKPAGERLMNDRVACGRASSSCTGRSCVVTT

SEQ ID NO: 186809 - protein, 123 aa, Zea mays
  Clone ID: MRT4577_10195C.1.pep
PARTLTNKQTITITTYTQTTSPNTQSMPYLSSGNNYLFSPYISQNHATMAPSVYILLQRDTESTVIISSVYLDLQDANAALLHLAQEAGIDPATAKPTADAGSEQPSLVKEPLRWEAADGTAA

SEQ ID NO: 186810 - protein, 42 aa, Zea mays
  Clone ID: MRT4577_101960C.1.pep
LYRFGLFINFLLIIVHINMKIIYLYNDEKTCKTRLHCQLYNR

SEQ ID NO: 186811 - protein, 63 aa, Zea mays
  Clone ID: MRT4577_101961C.1.pep
LIHDLVGNLLLPSLSIYIFGCAASPLSWGGGVCPLLSACPLSAGGFAGPPSPPAGPLLGRVLL

SEQ ID NO: 186812 - protein, 162 aa, Zea mays
  Clone ID: MRT4577_101962C.1.pep
KNLKLIDVDVPVVGGHAGITILPLLSKTRPSVTFTDEETEELTKRIQNAGTEVVDAKAGAGSATLSMAYAAARFVESSLRALAGDPDVYECTFVQSEITDLPFFASRVKLGKNGVESVISADLQGMTEYEAKALEALKAELKASIEKGIAFVNKQREAAASV

SEQ ID NO: 186813 - protein, 92 aa, Zea mays
  unsure (1)..(92): unsure at all Xaa locations
  Clone ID: MRT4577_101963C.1.pep
TSYRRGSWLGLHEEMRLDMQRIWRRNLGRDDRCIADNGKXRFPFLDEDVIRLLLNIPLWEVANLDQPSGIGDKRILREVAELLGLYEAAVLP

SEQ ID NO: 186814 - protein, 41 aa, Zea mays
  Clone ID: MRT4577_101964C.1.pep
GPAGFRSTRVGTGQHFTLGASSRMAAHHGDLSRRMAGPPSR

SEQ ID NO: 186815 - protein, 41 aa, Zea mays
  Clone ID: MRT4577_101965C.1.pep
ITCLSIKTMDYRKRDASTHNKTDKHGACRKTYLESKKSHNL

SEQ ID NO: 186816 - protein, 322 aa, Zea mays
  Clone ID: MRT4577_101966C.1.pep
METAERGTTVCVTGAGGFVASWLVKLLLSTGRYTVRGTVRHLGDGKNAHLKTLEDAGERLQLVKADMLDYGSVASAVAGCQGVFHVASPVPSGKSSNPEEDVIAPAVTGTLNVLKACYEAKAKRVVVVSSVAAVFNNPDWPKGEAFTEDSWSDGEYCRKNEEWYFLSKTLAEHEAFAYAAKTGLDIVTICPSLVIGPLLQPAVNTSVKVFLSYIKGDQEIVKDGPKNLVDVRDVAGALLLAYENLQASGRYLCSSPAIRVSDIVNILKTEYPTYTYPQKFVEAEGSNTYNTEKLRKLGWTSRPMEDTLRDSIECYRAMGILN

SEQ ID NO: 186817 - protein, 61 aa, Zea mays
  Clone ID: MRT4577_101967C.1.pep
SGGKKTFFVVGPRFFWDWSFFINNWCHGLFFWEGLKNWFWLVLKKGPSESRNNGGFVGVSG

SEQ ID NO: 186818 - protein, 65 aa, Zea mays
  Clone ID: MRT4577_101968C.1.pep
RLLTNASKGQSITVQCSIQMNVYQCTSLMLQYSNSPAKLKNSTANGLGGNHWNSKKISFLDMPLS

SEQ ID NO: 186819 - protein, 263 aa, Zea mays
  Clone ID: MRT4577_101969C.1.pep
SHASADAWVWICLICGHVGCGRYKGGHAIEHWKETQHCYSLELETQKVWDYAGDNYVHRLIQSKTDGKLVEYNFHGDHTAESTCSLCSGDAAMDEALLNSKFEAIVEEYNDLVTFQLEKQRNYYESLLLEVKEETEKEISAATEKAMSTKLQKLEVKFDKCMEEKKFLDEVNGNLVKNQEMWIETIRKAQAREQAALRLKDEKIEKLQEELRGLIAHFDCQSDTAQASNAISSDIPGGMILPVASESSSSGGVVGGTGNGEQN

SEQ ID NO: 186820 - protein, 47 aa, Zea mays
  unsure (1)..(47): unsure at all Xaa locations
  Clone ID: MRT4577_10196C.1.pep
IQNSEPDMIQLKASSNQIASFQESSXRSTTASLNLLGGGSSRTXGSA

SEQ ID NO: 186821 - protein, 105 aa, Zea mays
  Clone ID: MRT4577_101970C.1.pep
PKKNTGTKAVTTPTRVGIDSIWPNYLAVDPRNMPWRVQESNGFSSPKFHRPGAPVQANLAGFRWGPPRCIGGPNHPGGCPGQSGEGPGAGVSHAPTHSDCRNDQR

SEQ ID NO: 186822 - protein, 65 aa, Zea mays
  Clone ID: MRT4577_101971C.1.pep
RPRKKPLKVKGQSLFPKKGKIGKELVKASSLGFWFKNGNLGSKPTGTKIPRPKAHLHARKKELLV

SEQ ID NO: 186823 - protein, 80 aa, Zea mays
  Clone ID: MRT4577_101972C.1.pep
NKDRINQLGVKSTCSRAACHRWNQWRRQPPSSTKQFLIQLRIASAILCFARTLLGLHNQASLSTEAGMADGQTRGDFLSS

SEQ ID NO: 186824 - protein, 105 aa, Zea mays
  Clone ID: MRT4577_101973C.1.pep
DYEWVYSLRCDNPALLNPFCSHGQVVHRFGALTAYTVSPEDSEALVDIDADDYRIWNRRSLEEDTPQDASTDYSAVTAYLFRADPYATENVNNSFPERRKTPTPE

SEQ ID NO: 186825 - protein, 51 aa, Zea mays
  unsure (1)..(51): unsure at all Xaa locations
  Clone ID: MRT4577_101974C.1.pep
MTRHKTFRIXKKLPKKMSQNRPIPYWICMRTDNSIMNNAQSRYWYRNKVAF

SEQ ID NO: 186826 - protein, 72 aa, Zea mays
  Clone ID: MRT4577_101975C.1.pep
TSAPPMRCSCSRATLVIESRTPCPHWGAQHPCSQARPECAAARARLFWFLPSMVPSVVGVMVPAALASLRSV

SEQ ID NO: 186827 - protein, 61 aa, Zea mays
  Clone ID: MRT4577_101976C.1.pep
DAWVSLVISLVDILFSYYGVNVSFYRMWFRCTYFFLRLCNDFQDFMCAYIDISTLLESSPL

SEQ ID NO: 186828 - protein, 177 aa, Zea mays
  unsure (1)..(177): unsure at all Xaa locations
  Clone ID: MRT4577_101977C.1.pep
LFRPPKRRPNTGRATTEPTKPPPAPTTTPRTEKTTPTRTSXAPTTSXQTEAERIPKTRKTRHTGTEETTTTSTKRTTAKATPPDNRTLRTREKTADEEHRTRPLKTPKRTHHTRARNTNRTHPRHKGRTTRQTATGTXKPRETTRTPNTTKKGHHTPEDETKKQTTRKNXPEQTPKQ

SEQ ID NO: 186829 - protein, 82 aa, Zea mays
  Clone ID: MRT4577_101978C.1.pep
NGWLKARSSKIGRKELRKSVCKYILKGKTQKYELCCAIIFFSSQINYLVLTEQSLCACCGTVTVGRRREKFLKKRPQSHFEK

SEQ ID NO: 186830 - protein, 151 aa, Zea mays
  unsure (1)..(151): unsure at all Xaa locations
  Clone ID: MRT4577_101979C.1.pep
LYNHAQISXRAARPAAIALARSSPVVRANVGAFSAIRNYATAKPATSEVTSILEDRISGLNSSVDIQETGRVLSIGDGIARVYGLKNCQAEEMVEFSSGVKGMAMNLEADNVGIVVFGNDRLIREGDTVKRTGNIVDLXVGEALLGRVIDA

SEQ ID NO: 186831 - protein, 40 aa, Zea mays
  Clone ID: MRT4577_10197C.1.pep
LCPVLRQFAPNQPVLLDPRCVKWFLRMFIIIFMSDQGRSH

SEQ ID NO: 186832 - protein, 66 aa, Zea mays
  Clone ID: MRT4577_101980C.1.pep
CSFHALGWKKKRARVLSFLLCFLFTWFAALYFCGKNISNDICTCWQHTDANLTLYMSMTNEVGFPQ

SEQ ID NO: 186833 - protein, 139 aa, Zea mays
  unsure (1)..(139): unsure at all Xaa locations
  Clone ID: MRT4577_101981C.1.pep
VDPRVRKKLFTLSKDFYVRKYVNPYRRAFSSKNGKKVSKAPKIPRLVTPFPPQRKGARIPSKKKGISXKKSFRLXYQKLFAQRLKEQRAPRSESLAQRRSKLFSPVKAFAPPPALENSVFWGLCKGYLGTGKGPPQLPL

SEQ ID NO: 186834 - protein, 58 aa, Zea mays
  unsure (1)..(58): unsure at all Xaa locations
  Clone ID: MRT4577_101982C.1.pep
SIVSLLVPHISIIMTFKCCSTHTSFFQEDGVXKDSSEMVDTYLSDASKQCAATNECIS

SEQ ID NO: 186835 - protein, 71 aa, Zea mays
  Clone ID: MRT4577_101983C.1.pep
SMMSVAGTSMPPTAAVGPMQESACAEESQRRLASTLRDTCYAEGRDLSQHALWSFSILYLDHVPQSYHRPC

SEQ ID NO: 186836 - protein, 193 aa, Zea mays
  unsure (1)..(193): unsure at all Xaa locations
  Clone ID: MRT4577_101984C.1.pep
GMEKNVFGNHYVTIAKADTQTPXAFASDPLKTLSNRDDREFNSANAAKDAALPSTLHSGMYSSAVGSETTIHVDPEIVEIEGSSPVSTQFSVQDSNFIRSPSPHGXTFRHKFLRMLLPFWSSALPTLPVTAPSKKESDALEGSRSRHQRSSRMDPTKILLAMAIMACIATMGILYYRLSQRGLSETFLEDETQ

SEQ ID NO: 186837 - protein, 374 aa, Zea mays
  unsure (1)..(374): unsure at all Xaa locations
  Clone ID: MRT4577_101985C.1.pep
MCSPRASRFAGSRHFVDPPPPCXRRGFTASSIRSPSVACAYASRNISYXCXRTMLNGLLILSMTGHNTVRLAILFSKVELKKQHDWVACXVHTKCLISHIQSFPTQTAPDGYVCPSCSAPIWPPSSIKDTGSRLHTELKEAIVQTGMEKNVFGNHYVTIAKADTQTPPAFASDPLKTLSNRDDREFNSANAAKDAALPSTLHSGMYSSAVGSETTIHVDPEIVEIEGSSPVSTQFSVQDSNFIRSPSPHGPGAMTRKGANTVDRQNSEISYYADDEDGNRKKYTKRGTFRHKFLRMLLPFWSSALPTLPVTAPXKKESDALEGSRSRHQRSSRMDPTKILLAMAIMACIATMGILYYRLSQRGLSETFLEDETQ

SEQ ID NO: 186838 - protein, 45 aa, Zea mays
  Clone ID: MRT4577_101986C.1.pep
SYTITNMDEIGLLEHAIPLLPFSFSQNPFAFSFRVIMFLMKYSSL

SEQ ID NO: 186839 - protein, 115 aa, Zea mays
  unsure (1)..(115): unsure at all Xaa locations
  Clone ID: MRT4577_101987C.1.pep
EKAAXEAGEQAVLEAEXLAREAEEKAAEIAKEEEEIAQLIEKQSSFRXYQAEENSXSELQARAAQRAEEKAAHEAEAEAALEAERLAKEAEEKAAAIAKEEEDIAQLLAKKITKG

SEQ ID NO: 186840 - protein, 97 aa, Zea mays
  Clone ID: MRT4577_101988C.1.pep
ASPTCIRARGSCTNATSRLPPDIDEDSTYQILVRLVDGSTTCPHYSTHTVSGAVLLEASASISRVPAAALRIVTGSFDVSPSNVLSSSADGQFPSAS

SEQ ID NO: 186841 - protein, 340 aa, Zea mays
  Clone ID: MRT4577_101989C.1.pep
MQACACHFSPVLAPPRSRISASHSPGMATLKVPATVPPVADDCDQLRKAFQGWGTNEALIISILGHRDAAQRRAIRRAYAEAYGEELLRSITDEISGDFERAVILWTLDPAERDAVLANEAARKWKPGNRVLVEIACTRTSAQIFATRQAYHERFKRSLEEDIAAHVTGDFRKLLVPLVSTYRYDGPEVNTRLAHSEAKLLHEKIHHKAYSDDEIIRILTTRSKPQLIATFNHYNDAFGHRINKDLKADPQDEYLRTLRAIIRCFSCPDRYFEKVARQAIAGLGTDENSLTRVITTRAEVDLKLIKEAYQKRNSVPLERAVAGDTSGDYESMLLALLGQE

SEQ ID NO: 186842 - protein, 57 aa, Zea mays
  Clone ID: MRT4577_10198C.1.pep
ETYSTMEPSYRPVYSYKLAPYRLDIQLIYYYHCRQKTCGKPSLLLDTTTLFAFLPEN

SEQ ID NO: 186843 - protein, 28 aa, Zea mays
  Clone ID: MRT4577_101990C.1.pep
ENASHIQAFCFPQIILSSLFVFLLTFNI

SEQ ID NO: 186844 - protein, 96 aa, Zea mays
  Clone ID: MRT4577_101991C.1.pep
LPGRTTRPTPHQPRPNNRAPGHTHDLKAAHNVPPVKLDVLPDLTVHDATRLEDRPIPLLTPWLSMKAKSLNRKHSSYTDRHARSIHPASSPYTGTE

SEQ ID NO: 186845 - protein, 46 aa, Zea mays
  Clone ID: MRT4577_101992C.1.pep
AYKSIRVSFKALFVLLCCVQFVNFGFKRLHVLALKSVVKETTQTKS

SEQ ID NO: 186846 - protein, 112 aa, Zea mays
  Clone ID: MRT4577_101993C.1.pep
GRRRGAALLLHVHGTEAHRLLQYCFLPIKLLYLLADTSKTRSNLTRQQLKPAPDAPPSRPCRTYSVHRQKLLLLPTPCEQKSQPRAQKRSAPGPRNGKRVTSVKQGGVCPGR

SEQ ID NO: 186847 - protein, 52 aa, Zea mays
  Clone ID: MRT4577_101994C.1.pep
SIVYVIETATIVRASGFDHAHTDRSIELFALHIVLCYVPVFNLHCKLVKFCI

SEQ ID NO: 186848 - protein, 93 aa, Zea mays
  Clone ID: MRT4577_101995C.1.pep
GLLKHHRIPAPGSQQIDPDRGEQLPKETRCPTLRERENSGPPPPTPRGHGHHQASSTTRGAAGGNFMGRPPTTTPRPGKRGMQLPIAKTHTLP

SEQ ID NO: 186849 - protein, 103 aa, Zea mays
  unsure (1)..(103): unsure at all Xaa locations
  Clone ID: MRT4577_101996C.1.pep
DSISRRPHTHGLGTRYTHHSQSNPYGRAPVARGTGACGYTTFYSGGNSCRTMDSACGYCILYSQWFGTYTHGLDTAVFNNXLSCGPCFEVRCDHLGGGSHSCL

SEQ ID NO: 186850 - protein, 152 aa, Zea mays
  Clone ID: MRT4577_101997C.1.pep
FATRVEGWARQAPGKALEWLGSIGGSGTTGYNPGLKSRLSITKDDSKSQVSLSVSSMTTDDSARYYCTVVHQETRRDCPDGFVACWQCGRINDGCRRYGCCCRGECHERDTYAAFGFTYAYDFHVDAWGQGLLVTVSSESETSPSIFPLSLG

SEQ ID NO: 186851 - protein, 67 aa, Zea mays
  Clone ID: MRT4577_101998C.1.pep
APWTTLSFSARNSNDTQILYTARFSEKLVRKKLNQTDPMLSQRTRPPLRAFSLPTDFQHPETNYPSV

SEQ ID NO: 186852 - protein, 167 aa, Zea mays
  unsure (1)..(167): unsure at all Xaa locations
  Clone ID: MRT4577_101999C.1.pep
RFFFXFFFFFFFLGKKAILLHFIHGNLGGVHKVLSHXASQNKNQSLGIEIPTRQKQFIISTSNIVVVVLESWDYPSRKVFPHFKICQKNIETSTQIKKNVEHSHPTLRKSYSQGIRQEKSRNSRSTSPLAACLRGSSQDTEAPRHRGEVTTLTCQGFNETSNNXSEX

SEQ ID NO: 186853 - protein, 136 aa, Zea mays
  Clone ID: MRT4577_10199C.1.pep
PLVDKVADKLPGWKANLLSRAGRLVMVKTVLSSVPIYLMLALELPKWVFKAIDKRRRGFLWKGQGDANGGNCLVSWEAVQRPLKYGGLGILNLEMFGWALRARWLWLQKTDASRPWAGLPIRVHRNAKALVDVAIT

SEQ ID NO: 186854 - protein, 361 aa, Zea mays
  Clone ID: MRT4577_1019C.1.pep
GTASPVTGGQTALLRIINAALNRKLFVTIAQHKMTVVATDASYTKPFTTSVLMLAPGQTTDVLVTMDQPPTRYYVAARAYVSGQNVAFDNTTTTAVLEYDCGCASDFGPKIQPAFPAALPAFNDTSAATAFAAGIRSPDRVKVHENVDEYLFFTVGLGLFNCKPGQLCAGPNNNTRFAASMNNVSFVFPQTDSLLHAHYYKIPGVFTTDFPAYPPVQFDYTGQNVSQALWQPVPATKLYPLRFGSVVQLVLQDTSIVTPENHPIHIHGYDFFILAEGFGNFDPKKDVEKFNYVDPPQRNTVAVPVNGWAVIQFVADNPGVWLMHCHLDVHITWGLAMAFLVEDGYGELQSLEPPPVDLPMC

SEQ ID NO: 186855 - protein, 45 aa, Zea mays
  Clone ID: MRT4577_101C.1.pep
PITYYISSCLAITEPNCQMTVLKKHCLEQYSCSVSNRQLSKRTSR

SEQ ID NO: 186856 - protein, 101 aa, Zea mays
  unsure (1)..(101): unsure at all Xaa locations
  Clone ID: MRT4577_102000C.1.pep
GLLFLACGXAGLXPLASXXALFFWLFPLVXSXVLXXXGXFFGXXGLVXALFXXLXXSVXXXXCFLFXCLSXXLVAVXSXVXFFSAXWFXCLXGXGLLXPSG

SEQ ID NO: 186857 - protein, 278 aa, Zea mays
  unsure (1)..(278): unsure at all Xaa locations
  Clone ID: MRT4577_102001C.1.pep
LGEQGRVPVLLLKLDDPVPRRKPAIVFLHSSYKCKEWLRPLLEAYASKGYVCVAIDSRYHGERASNETTYIDALKSAWRNGDTMPFVFDTVWDLVKLGDYLGEREDVDPCRVGITGESLGGMHAWFAAFVDTRYSVVVPIIGVQGFRWAIDNNMWLARVNSIRALFEEARIDLGKSELDTEVVEXVWEKVAPSLDSQFDAPYSLPLLAPRPLLLLNGAEDPRCPISGLGEAISKAAKAYEESGCAEKFMFIAEPGVGHKITIXMVKAASEWFDRFLHA

SEQ ID NO: 186858 - protein, 361 aa, Zea mays
  Clone ID: MRT4577_102002C.1.pep
MAASATDADAGAGLRSEFLQVLLSRRRDLQVPLSVEQGSPVKDPMYQNPPSTMEANPMESCPSKDVENLREKLVEENFYLITELGEQGRVPVLLLKLDDPVPRRKPAIVFLHSSYKCKEWLRPLLEAYASKGYVCVAIDSRYHGERASNETTYIEALKSAWRNGDTMPFIFDTVWDLVKLGDYLGEREDVDPCRVGITGESLGGMHAWFAAFVDTRYSVVVPIIGVQGFRWAIDNNKWLARVNSIRPLFEEAGIDLGKSELDTEVVEKVWEKIAPGLDSQFDAPYSLPLLAPRPLLLLNGAEDPHCPISGLGEAISKTAKAYEESGCAEKFMFIAEPGVGHKITIDMVKAASEWFDRFLHA

SEQ ID NO: 186859 - protein, 189 aa, Zea mays
  unsure (1)..(189): unsure at all Xaa locations
  Clone ID: MRT4577_102003C.1.pep
MVKLAKAGKTHGEAKKMAPPPKEVEEDSEDEEMSEDEDDSSGEEEVVIPQKKGKKATTTPAKKXVVVSQTKKAAVPTPAKKAAVTPGKKAVATPAKKNITPAKVIPTPGKKGAAQAKALVPTPGKKGAATPAKGAKNGKNAKKEEXSDXDEDEEDEDDSDEDEDDEXEDEFXTPNSKGVKPAKXAPAAL

SEQ ID NO: 186860 - protein, 73 aa, Zea mays
  Clone ID: MRT4577_102004C.1.pep
PRAGAGPEDSAWSTSISRRGPAQLIGDLFEQDHGDIREQRVARDARTDVTASARAETGITYMAEISSRPVRTC

SEQ ID NO: 186861 - protein, 158 aa, Zea mays
  unsure (1)..(158): unsure at all Xaa locations
  Clone ID: MRT4577_102005C.1.pep
RGGTVCEGLRGVPYCCYPAXTQPRAYCSTDDVMKWEDPRWIGNAEELLQGVRTVEDDLYTTLNNKVSRVYATPXTERKKRVYMNAPFKITSIDHYSGLDFKLVRMGLEDMYLXQPGGMYHKFGKDYYLRTVMAYMNVLDGTNPCEEWNAAHVIEHDNL

SEQ ID NO: 186862 - protein, 113 aa, Zea mays
  Clone ID: MRT4577_102006C.1.pep
GQNPPGPFSNGKRKRGGGRSFSFPSPPKGKRPMGKLPYPPEKRGGRPRGLGGNFGQLRPGKGGKPPTSPPLGGFSPTTGGGPYSPLAPGGAKTRGVLGGANTEKKPGLLFCGP

SEQ ID NO: 186863 - protein, 166 aa, Zea mays
  unsure (1)..(166): unsure at all Xaa locations
  Clone ID: MRT4577_102007C.1.pep
ASRFIKCVTVGDGAVGKTCMLISYTSNTFPTDXEDYNRLRPLSYRGADVFLLAFSLISKASYENVSKKWVPELRHYAPGVPIILVGTKLDLRDDKQFFVDHPGAVPISTAQGEELRKLIGAAAYIECSSKTQQNIKAVFDAAIKVVLQPPKQKKRKKKVQKGCTIL

SEQ ID NO: 186864 - protein, 179 aa, Zea mays
  unsure (1)..(179): unsure at all Xaa locations
  Clone ID: MRT4577_102008C.1.pep
MCVPPSRSSARQRTSTFDTVPQRRCTMRNTSGKPXSVTQSGPXEGTERVLHLPPLSGQTTTYXMSAKIPGKYSWNTXSECPTKRRLSHRTXMEAINCCXAMPAPIPRVFPEILARNVVKFXQDVRFKAGSQILDEEGLDYLGNPSLIHTNEILIIXMCQAALMIVVEAYRIGGDPLGEV

SEQ ID NO: 186865 - protein, 197 aa, Zea mays
  Clone ID: MRT4577_102009C.1.pep
MSASRFIKCVTVGDGAVGKTCMLISYTSNTFPTDYVPTVFDNFSANVVVDGSTVNLGLWDTAGQEDYNRLRPLSYRGADVFLLAFSLISKASYENVSKKWVPELRHYAPGVPIILVGTKLDLRDDKQFFVDHPGAVPISTAQGEELRKLIGAAAYIECSSKTQQNIKAVFDAAIKVVLQPPKQKKRKKKVQKGCTIL

SEQ ID NO: 186866 - protein, 57 aa, Zea mays
  Clone ID: MRT4577_10200C.1.pep
RDSCQKFYQAEIEEHDFISAVEKSRKHINTWVAEKTDGRIAELLSPGSVDPLTKLVL

SEQ ID NO: 186867 - protein, 190 aa, Zea mays
  unsure (1)..(190): unsure at all Xaa locations
  Clone ID: MRT4577_102010C.1.pep
NSARGFSSIEEYFYKKQHATCMDHAHQIIRSLRNDTNRRESISDSNALLNVYLSNDDIAKLLVPLLKLRQACCHPQVGSSGLCSLQHNPLSMDEILQVLIGKAKIEGEEELRKIVVALNGLAGLAVIEQRNQEAISLYKEALALAHENINDFRVDPLLNLHXQLHLAELLRLVLSIYKNAHKIRLLKVQS

SEQ ID NO: 186868 - protein, 59 aa, Zea mays
  Clone ID: MRT4577_102011C.1.pep
PGSFMKKKKMLRFNKQFGANPATLYKMNKLVPLVKLVLTNPAAFYQQKIMGGALFKNAK

SEQ ID NO: 186869 - protein, 60 aa, Zea mays
  Clone ID: MRT4577_102012C.1.pep
TSCPTSVATSGVGSCNAGSPVVCWARSARIPKKHPPVSVPLWGVKKRAVNQVLEPNSELT

SEQ ID NO: 186870 - protein, 130 aa, Zea mays
  Clone ID: MRT4577_102013C.1.pep
KKQTVVLPLREAIDAVMISIQFENVIEDILQACENKNPQIKSEVVQFISRYISNSQLNFLSNKKNLKLLTNALIKTLNDNDGSVREFSAESLGILMKAVGEKAMTPLLAEVDSIKISKIKEYHDKAVIKY

SEQ ID NO: 186871 - protein, 137 aa, Zea mays
  Clone ID: MRT4577_102014C.1.pep
LLNPAGDARFALESYVALKMFAGFHRKDLGLSSLSLHGRGSGSGSHDRRRFFEEFAEANAAGAAEFQVQRASDDPRWGAALREFLRERYVSVVHERMEAAFFGRGGGDAPPRAAWYGEFAEMARRVWLLHLLFLAFG

SEQ ID NO: 186872 - protein, 63 aa, Zea mays
  unsure (1)..(63): unsure at all Xaa locations
  Clone ID: MRT4577_102015C.1.pep
XRAPFAVALTAEEVEDDVYALTGARPRRRPRKRPRVVQRQLDALFPGLWLTEITADAYKVPDE

SEQ ID NO: 186873 - protein, 40 aa, Zea mays
  Clone ID: MRT4577_102016C.1.pep
DATAYRHSSYVSRRRSFRVLCEIWIRLLTIEITYVPYDSI

SEQ ID NO: 186874 - protein, 114 aa, Zea mays
  Clone ID: MRT4577_102017C.1.pep
ARGPGEGQGRTRGDTVRSGELVIPNRLCCSLWLHGLCVRVICTMRLVFFSFSCLVSVFLLHGSSVKTYVYTVETEVFSVSVTPILTPKPLTHSTSVLIYTGFYCFFSVFCLYRW

SEQ ID NO: 186875 - protein, 63 aa, Zea mays
  unsure (1)..(63): unsure at all Xaa locations
  Clone ID: MRT4577_102018C.1.pep
VIGTNIDKSTSSIFPFLCVFIREVNILKAPKFDLGXLMKVHAGHIEYVGVQLDSPAQQDQAGL

SEQ ID NO: 186876 - protein, 193 aa, Zea mays
  unsure (1)..(193): unsure at all Xaa locations
  Clone ID: MRT4577_102019C.1.pep
RAPGPSPWPPASAAVPAPPCSSSPPAPSSPSQARGPRPRHPPGGRQQSGTXYSFWRPSSMXPPARAPPPXGPARPPXPPLXGCPPPPPLPTPXAELSPHHLGSAPVGWCPDPSGRAGSKSAPLEGIRPGVRASDLGTRRDDIMVERGQGNSDLGDLSEGGGVGENWGRSPSVEEEKRVRRRAGSRPCHTATCS

SEQ ID NO: 186877 - protein, 57 aa, Zea mays
  unsure (1)..(57): unsure at all Xaa locations
  Clone ID: MRT4577_10201C.1.pep
LNSRRDALFLYLLPFTLILILFXTAFFLNRSTFGETRVNISLLSNTSLFIMTIHTFN

SEQ ID NO: 186878 - protein, 663 aa, Zea mays
  unsure (1)..(663): unsure at all Xaa locations
  Clone ID: MRT4577_102020C.1.pep
SSRLGAQDIFDLATSREDENVEDYSLRLSSMVAQLATLGXDIGRAHGVGKFLRSVSTRFKQIVVAIQTLLDVSTLTLAEVTGRLKAAEEELEAPLSSVHHNSKLYLTEEAWEARRKQRETERSSKGDANRVSGRRGGRGGRGRGRGSDMGSSSSSGPGGSIGKAQEGDSVCGPGGRGPDVVACYSTEGEFLSAXRGQLLRPRQHRASHPGRDQALPPLPRPIQPHPVRQWQALGLARSSWTGDGAKPPVGSGELVHLRXRGSFVQLCAKEERNPRSWIYALGATNHMTGSWAVFAELDTAMRGSVRFGDDSVAEIEGCGMVLFXCKNGEHHSFADVYYIPXLTANIVSLGQLEEADYDIHLRSSGMEIREPEGRLLVRIPRVGNRLYVLNIDVARPVCLAARGEESDWRWHARLDHINMPTLRKMAREELVRGLSAIEKDRAAAAIKEFQARAEAESGCKLLGLRTDRGGEFTSKEFMEYCAVDGMHRQLTAPYSPQQNGGVERQNAMVVGTTSSLLKEKGLPAWFWGEAVITAVYLLNRVPTKAVEGRTPFEVWYGKKPVVHHLKTFGCIVYVKNMKPHLKKMEDRGRKMIFVGYECRSKAYRAYDPATKRVHVTRDVVFDESTQWDWSKGAKTSTSADHGGNDTFTIQYRVVAGQGVEVAK

SEQ ID NO: 186879 - protein, 180 aa, Zea mays
  Clone ID: MRT4577_102021C.1.pep
SLPHIKRGSGEARAGIPPIAAEIPLRLSRVTKLSSFLAPTAMDEVTEAVNNLNISGVGAAGVAGAEGHKKNRIQVSNTKKPLFFYVNLAKRYMQLHNEVELSALGMAIATVVTVAEILKNNGLAVAKSIMTSTVDIKDETRTRPIQKAKIEILLGKTEKFDELMAAAAEEREANGAEEQS

SEQ ID NO: 186880 - protein, 105 aa, Zea mays
  Clone ID: MRT4577_102022C.1.pep
PCRQRGKAIGSGADNNATFSSSKAGLEFPVGRIARLLKAGKYAERVGAGAPVYLGAEFEYPAAEAVELIVLAEWERKKILNVPCLIPTAPGRGRLPARAAYARHQ

SEQ ID NO: 186881 - protein, 74 aa, Zea mays
  Clone ID: MRT4577_102023C.1.pep
IKHDAQSPWYQSKKSLNTRATIPSSLLRKMMRHSNSKGQAQRWDYHFLIFRAYSRIWQENAPMITPFQPHHIDA

SEQ ID NO: 186882 - protein, 412 aa, Zea mays
  unsure (1)..(412): unsure at all Xaa locations
  Clone ID: MRT4577_102024C.1.pep
MTGTTWIIDSQRFGAFVKNISGSSDIKVWSAAGLTIPLKCDQLMTXSCXVVHQWPGLPKGVKFDPSDQELIWRLMAKHGKSGIKPHPFIDEFIPTVEEDEGICYTHPQKLPGVKQNGSVSHFFHRTFKAYNTGTRKRRRINTDDADVRWHKTGKTKPVLVDGKHLGCKKIMVLYISPLKGGKAEKTNWVIHQYHLGTGEDERDGEYVVSKLFFQQQFKPGDKNAQELTTSDDLESMAAESNLPDFTTLPTDKHVGTVQEVVHNPEHNLYQLNRNCEISIEETVVLPPSVKTTKDGDNLQSQDQKLWEGDSQFELLDSQQLAEGLALCDEFLLSQSQTSCGGGDEPRETKPCLAAYAHLSAEDFKKDLEECQRLEPTDNTNLELDNTDEFRLSQIEFSQDSFMTWAAEKITDD

SEQ ID NO: 186883 - protein, 100 aa, Zea mays
  Clone ID: MRT4577_102025C.1.pep
LSSLVLHLADFTALAGCVVVSSELAIYYAGVSSGDTIVSGSNVEGLSVDSATEAARSFDAVWQWTWSSYRGLIISVVPMQCRIHGKKAALLRILLDHSVR

SEQ ID NO: 186884 - protein, 201 aa, Zea mays
  Clone ID: MRT4577_102026C.1.pep
MTGTTWIIDSQRFATKIKNASGSSDPSKQKWIGNPSKECPKCSHVIDNSDVVHQWPGLPKGVKFDPSDQELIWHLMAKHGKSGIKPHPFIDEFIPTVEEDEGICYTHPQKLPGVKQNGSVSHFFHRTFKAYNTGTRKRRRINTDDADVRWHKTGNTKPVLVDGKHLGCKKIMVLYISPLKGGKAEKTNWVIHQYHLGTGED

SEQ ID NO: 186885 - protein, 99 aa, Zea mays
  unsure (1)..(99): unsure at all Xaa locations
  Clone ID: MRT4577_102027C.1.pep
GPPYLGQXCTFSIXTSIWIEVLVLVYIEFQLNTELDLENRVYPGVSYFXTLGLXADPQKKDRLXLTEIKLAGLPMVAFVGLLVQAATFGKGALTNVGPP

SEQ ID NO: 186886 - protein, 66 aa, Zea mays
  Clone ID: MRT4577_102028C.1.pep
APGDVILIYCNRCNSNIITKVQKTKPVPCYSVGVEIIVHDLKWNNTKHMMKLISELHDSVRKRTRR

SEQ ID NO: 186887 - protein, 48 aa, Zea mays
  unsure (1)..(48): unsure at all Xaa locations
  Clone ID: MRT4577_102029C.1.pep
XPARVLGADEKGLXLSSLPPGXFGSKKAKSVPPELPRNPGWAQTAKPP

SEQ ID NO: 186888 - protein, 86 aa, Zea mays
  Clone ID: MRT4577_10202C.1.pep
RGESERVSRHPTVRVLRMPAAVRIYIEMLAHSRDSAMQLYMDKKKNRRYEKHIRYESRKLLADMKNRVKGRFVKSTEALIAAMYGG

SEQ ID NO: 186889 - protein, 32 aa, Zea mays
  Clone ID: MRT4577_102030C.1.pep
QAHIYIVVDCLHYLATWQHKHARVYSVCASAS

SEQ ID NO: 186890 - protein, 84 aa, Zea mays
  Clone ID: MRT4577_102031C.1.pep
LTNLLQTQFLQKLSTPSSPPTQTCFYFNYLLVYLFCSTCFSDRHEPRRPHYRLLLPPEHANKARGLGLLRKPGSERNWACRNQE

SEQ ID NO: 186891 - protein, 106 aa, Zea mays
  Clone ID: MRT4577_102032C.1.pep
SEKAFKTQGRGECTGACLDNTTLVLLDVDHLTIILVLALDQVGSSISITMRSSPRLKSTWLWSFTSRLINVPRSNRFDNREGDNGSQFRHPIELLAIVAQTSLIVS

SEQ ID NO: 186892 - protein, 47 aa, Zea mays
  Clone ID: MRT4577_102033C.1.pep
SLTYQFCWTKLFYLNFYNITTLHQSSYSLILSCTYSIRILQLFINQC

SEQ ID NO: 186893 - protein, 97 aa, Zea mays
  unsure (1)..(97): unsure at all Xaa locations
  Clone ID: MRT4577_102034C.1.pep
RTCATLDLDAPNSLLHXLKCRCKPDRHLMLIGPPGSXKGSQTTLMKDEYXDCAFXTGDMLRAAAAAKTSLGIKARHAMSTGEIVSDNWAVRIIDEAM

SEQ ID NO: 186894 - protein, 69 aa, Zea mays
  Clone ID: MRT4577_102035C.1.pep
NSPIPLMFCYCCIRSTQGRSARLRRRHPLVVLVLTLSPSPFCVAPMLLPHLAPFLRSPALSPHQCRCHT

SEQ ID NO: 186895 - protein, 63 aa, Zea mays
  Clone ID: MRT4577_102036C.1.pep
LVLTKVLRLPYSHDTAMRSCCCATTRGGRLLLFCLDDNATTGARRLRESYCFCDSEMNTLSLK

SEQ ID NO: 186896 - protein, 142 aa, Zea mays
  Clone ID: MRT4577_102037C.1.pep
MATAWGIDPFLKAALPTRVLRRRGPSLHRRAPGSSPYDTGAGSHTSCKLAQNRRSQTAARGACNRPAVTSTPHPRQNQWVKGRTAMQVACNCTTGTHPFDFDASSMEALAHTSCNRCAGYYVRETAPPLTPMPRLLPRLTDP

SEQ ID NO: 186897 - protein, 91 aa, Zea mays
  Clone ID: MRT4577_102038C.1.pep
APRKDLARAGVIFPRGMPAPKGARPLPLSGPGLSGPGALPFPLFSPRGAPSCFVFPGSFLNGAVWVSPLVGKTFFPPPATGVFNLAIMFFL

SEQ ID NO: 186898 - protein, 162 aa, Zea mays
  unsure (1)..(162): unsure at all Xaa locations
  Clone ID: MRT4577_102039C.1.pep
MYLKSDSGLGGWITIPAVADVLKYSCIVCWSSREKNNVEQDLKEKEDTIKQRTSEVQDLQDEVQRENTNLQKLQAQKQQVQELLDGLDEQKSQLEEQLKEVRKKCAEEAQLISSLKAELTSQESQISTYEEELAKAREELSRLQQETAXIXERSVESGKAQL

SEQ ID NO: 186899 - protein, 63 aa, Zea mays
  unsure (1)..(63): unsure at all Xaa locations
  Clone ID: MRT4577_10203C.1.pep
MFSKCVVRYDQLRDQQAHLVHHSKFPMCAHNDLSEYHRSCKSIQSQVDAHEPCXSPPCIAWSM

SEQ ID NO: 186900 - protein, 59 aa, Zea mays
  Clone ID: MRT4577_102040C.1.pep
RSRVAQLWVWGRACNNNGPYLLLRENLYNSCKYDEYGRQLAPYSYNVLALTLVMRWIEK

SEQ ID NO: 186901 - protein, 237 aa, Zea mays
  Clone ID: MRT4577_102041C.1.pep
HEVAAAAAPTPGESPRAPEPPPAPAPAASKKNSSASVGAKRKGGPGGLNKVCGVSPELQAIVGEPAMARTEIVKQLWAYIRRNNLQDPNNKRKIICNDELRLVFETDSTDMFQMNKLLSKHIRPLESKNDSKPEAKKLKPQGDEPISSVETDVNQLPLMVSDALATFFGTGEREMVHSEAVKRVWDHIKSNDLEDPENPTVILCDSKLKQLFGRESLTAHGVSELLSDHLYTQSTNI

SEQ ID NO: 186902 - protein, 68 aa, Zea mays
  Clone ID: MRT4577_102042C.1.pep
GRDSTGMQRHTKMKEKPTYHHNAFCYTELIIHHHKCRTLTEHLTLVIKRMTLMNIVKIHFEIQTHTYL

SEQ ID NO: 186903 - protein, 66 aa, Zea mays
  Clone ID: MRT4577_102043C.1.pep
SSFFNFDQVRKNVPTSTASNQSHSVIMKYVLMVHLFELYFGTDSTYICEIHTYVGSTYPPHYARKG

SEQ ID NO: 186904 - protein, 425 aa, Zea mays
  Clone ID: MRT4577_102044C.1.pep
MLSDQELAQYVESLVQHTAAQGGTGISADAVVRQLGAQLGVDLSPKAQLIRSVLVALLGPAAAPAPDPTGSRKDPFDPATAAAAGGPRAETPPQQMHFSTAAASSAPAPSPAVPHFFPQQHQHQMQYFLSAPQQYQHQQQQQRAGASPSPFDIPASYRYGHQPLPQADQAQLQRLVQLQHQQQQLAAAARVAAAAAPTPGESPRAPEPPPAPAPAASKKNSSASVGAKRKGGPGGLNKVCGVSPELQAIVGEPAMARTEIVKQLWAYIRRNNLQDPNNKRKIICNDELRLVFETDSTDMFQMNKLLSKHIRPLESKNDSKPEAKKLKPQGDEPISSVETDVNQLPLMVSDALATFFGTGEREMVHSEAVKRVWDHIKSNDLEDPENPTVILCDSKLKQLFGRESLTAHGVSELLSDHLYTQSTNI

SEQ ID NO: 186905 - protein, 80 aa, Zea mays
  Clone ID: MRT4577_102045C.1.pep
LGLLAPPPPFFGGPPGGGSFGFEKKGGVLRGGFIFSGFPPLFFYGFWLGFLTPRGPRLYSCFPFFVFKFFKMPSKLNSPV

SEQ ID NO: 186906 - protein, 75 aa, Zea mays
  unsure (1)..(75): unsure at all Xaa locations
  Clone ID: MRT4577_102046C.1.pep
ATXDAXTYTLHDAPAGSVITGRLRALTIAQTLAIQAVSRHRTSYSWAGDSSLSACAHAIMLITHIISRADASAQG

SEQ ID NO: 186907 - protein, 69 aa, Zea mays
  Clone ID: MRT4577_102047C.1.pep
ATLHLQTGRQMWSPGFAFTILKRFMPEEKLADVKGATLTADGTGVVFDVPAADVEDYIQGIMDLLLFVK

SEQ ID NO: 186908 - protein, 86 aa, Zea mays
  Clone ID: MRT4577_102048C.1.pep
ERFFFFLKKNSPHFLKNSRTPLNKKQTKTSTTTKTKNAVKPNIKIPPPRIPKHNPLKAPPKINPLTHLLQIHHPKNHNATPRKTLA

SEQ ID NO: 186909 - protein, 34 aa, Zea mays
  Clone ID: MRT4577_102049C.1.pep
PSGQYHLDHHLTLKMAGISRRQPTYEDQIQQHIQ

SEQ ID NO: 186910 - protein, 109 aa, Zea mays
  Clone ID: MRT4577_10204C.1.pep
NSHLYPPHVIAIANCDCGAPHDHNNPSSSSLSLRTNQSEYNSPYSHAHIGRSNPTVQKRRRPPLTWKREREQRRGEGLPRLYATSWNSLVPKSFFHSGRYQEIIQVSHL

SEQ ID NO: 186911 - protein, 62 aa, Zea mays
  Clone ID: MRT4577_102050C.1.pep
TTTYSKQSRFLLMGARMANLGVLNETTVMQMRGAANALLNFNHVWRTTHFCRDEHLCLFILF

SEQ ID NO: 186912 - protein, 225 aa, Zea mays
  Clone ID: MRT4577_102051C.1.pep
MVQCLDGVRQLLAVLLNCCDVELKQPRGLQDPQVLARETVFSVSEVEALYELFKRISSAVIDDGLINKEEFQLALFKTNKKESLFADRVFDLFDTKHSGILGFEEFARALSVFHPNAPLDEKIDFSFRLYDLKQQGYIERQEVKQMVVATLAESGMNLSDEIVESIIDKTFEEADTKHDGRIDKEEWRNLVIRHPSLLKNMTLQYLKDITTTFPSFVFHSQVDDN

SEQ ID NO: 186913 - protein, 95 aa, Zea mays
  Clone ID: MRT4577_102052C.1.pep
RSHGWIEKCKCKGTTRNEEREVGVASTDRSKALSHRGSGLARPFTSLRILVSRSPRMYDISLPSAVETSSSSGRSGSRRGLALAAAAAAGLQPGR

SEQ ID NO: 186914 - protein, 122 aa, Zea mays
  unsure (1)..(122): unsure at all Xaa locations
  Clone ID: MRT4577_102053C.1.pep
QTSKRRASGRQQHAAERPRPGSSTQQQQGAVGGGHHRSRSHSSRQQGRRXSSSSTASARDPLTHRGNARAPGQPPPKKSSEARNNGGGRGRTTRPARQLREQQERQRHNRGPPLPVPGRNGP

SEQ ID NO: 186915 - protein, 125 aa, Zea mays
  unsure (1)..(125): unsure at all Xaa locations
  Clone ID: MRT4577_102054C.1.pep
LVVXGSAXGVGAPLLASXALWPLGAARARGSFGAPAPWAPLFLSRAVVPLVVVCPPXAXVFXXXLGRXXRLXLXSFGLGPXPVFALFXXGLVXAFCAXXLVXXFVXGGLFLNCPLVXLVFFXXEG

SEQ ID NO: 186916 - protein, 187 aa, Zea mays
  Clone ID: MRT4577_102055C.1.pep
MSYMRGDLLTRMRKLVKGLARPEPRWLKALERAPPVTFPRPEGKIKTLVLPEDVYVTKFNRIHPDSLYHDAIKISGFDPPPARVFAWRVLELKEQGVDEDVAMAVADNEYRTEKKAKKKAYKELKEIARSEGRKPPPNPYPSAIKEIQAEEKKYVMDRLHNPKVIEIANKMKEERDRMLRDRAAGQR

SEQ ID NO: 186917 - protein, 93 aa, Zea mays
  Clone ID: MRT4577_102056C.1.pep
ARLKIVCLGKSSPVTSLSRRRGRLDRISASKLKATDVQTVALVVIKLPSNHPLHTLVCGHWCHIYYLPCVMYVSLSRSAMLSIAGIWLPDSLF

SEQ ID NO: 186918 - protein, 52 aa, Zea mays
  Clone ID: MRT4577_102057C.1.pep
QEAPPPIGPPPERNPPPGLLFQKKFCPPNPPGEGPPPGVKLSKTILFELKPL

SEQ ID NO: 186919 - protein, 81 aa, Zea mays
  Clone ID: MRT4577_102058C.1.pep
KRSSALAADLLRLTVTPRVPAPDAGCYIEGATRCLFRSAGIRVQGQALRATLCMCDCYKTSQGGDGLTRSCQLLGCSPGAF

SEQ ID NO: 186920 - protein, 172 aa, Zea mays
  unsure (1)..(172): unsure at all Xaa locations
  Clone ID: MRT4577_102059C.1.pep
KPLQIPRSFPVPVNSGLVYEEESSDDDDDNDSDNVGLLETQPDSIESEALTCPAEELDLLXKVAKKXVLLPVPKLSSFTQKVVQCRXKEVMEGSNLQQLPQGYLGKMLVYKSGKIKMKLGDIIFDVNPGVESRMLQRAVALNTRDKHCCLLGEIENRHVIVTPNVDSLLNDK

SEQ ID NO: 186921 - protein, 69 aa, Zea mays
  unsure (1)..(69): unsure at all Xaa locations
  Clone ID: MRT4577_10205C.1.pep
XXVCXXXKXRFIEGGEVDDTLGRYSHVMXIISXVSGHLYDHLQXWDPXESALPXXTXXGXPXVKGXGLX

SEQ ID NO: 186922 - protein, 56 aa, Zea mays
  Clone ID: MRT4577_102060C.1.pep
VRFKVTNGGFGCRPARTKVRGLGPQGPLPLLKPAGPPPLGGPPLSSLPNGGRAESF

SEQ ID NO: 186923 - protein, 54 aa, Zea mays
  Clone ID: MRT4577_102062C.1.pep
STGIEHGEPHYLEEDGDGHPWPRVPAPRTYVALMGEQETISRDQLLLGSKHTSF

SEQ ID NO: 186924 - protein, 38 aa, Zea mays
  Clone ID: MRT4577_102063C.1.pep
FFFFFFFFFTASMTMDHAWYCVIVLLVNYLPIATNTTI

SEQ ID NO: 186925 - protein, 86 aa, Zea mays
  Clone ID: MRT4577_102064C.1.pep
PRDNELTPATPRVVQTPPFICKSVVTTYSAKRCVKDLIAGGVFTHPLCGGHLLPPATGQTWLRHLASPPVEEPGEIHVLMNQPPTQ

SEQ ID NO: 186926 - protein, 105 aa, Zea mays
  unsure (1)..(105): unsure at all Xaa locations
  Clone ID: MRT4577_102065C.1.pep
MRGGSRPAPVVLFLLAASGICAQFTAVLAGDPQTSNDDKKAEAXSQRGHTGKTVLFVLLGVGAVILLSFVIFKYWQKKKRQEQHARLLKLFEEDDDIEVELGLRD

SEQ ID NO: 186927 - protein, 58 aa, Zea mays
  Clone ID: MRT4577_102066C.1.pep
SMIVASSHPLAKSGCWLQVFVDSPLRLPRIGSLRMLCSVKQNIRLSPLMGDIFAVQAA

SEQ ID NO: 186928 - protein, 36 aa, Zea mays
  Clone ID: MRT4577_102067C.1.pep
SARQLSDVVIYEGRTDPFIPARSEIWKHLPADPMKE

SEQ ID NO: 186929 - protein, 79 aa, Zea mays
  Clone ID: MRT4577_102068C.1.pep
PRVRRPDIKSQYSSLLYQLLLDPRDRVCFEAINCVLGKVDNTESTEDRAGGWIQLTREILKLPEAPSVASKGVLAKSSE

SEQ ID NO: 186930 - protein, 90 aa, Zea mays
  Clone ID: MRT4577_102069C.1.pep
ASNILFIPGDSKGPTIGASMYVVFLVMPSVHLDSAVQAKECDGVAEVESKLDGTDSVVVNGHYVGCIVTKGFELAAGDRVKISQKDVAIL

SEQ ID NO: 186931 - protein, 75 aa, Zea mays
  Clone ID: MRT4577_10206C.1.pep
MKLVLVVLAFIALVSSVCCTQTGGCSCGQQQSHEQQHYAQQHYSQKQQHQPPSQHDLLPLHQQQLVHMQPLLHQL

SEQ ID NO: 186932 - protein, 69 aa, Zea mays
  Clone ID: MRT4577_102070C.1.pep
SDFFRKNCKKKVFEGVVEDKLMDWMVLGNPTPWREFPLDEQPPKWGCHLGPQVKKKGQGWVGQNIKNRI

SEQ ID NO: 186933 - protein, 59 aa, Zea mays
  Clone ID: MRT4577_102071C.1.pep
LGSGCLQGRALDGAPPDAPSMLRRTVPSYGMHRLLPGDLHRFNTVAAKKEPMTAGDHEN

SEQ ID NO: 186934 - protein, 97 aa, Zea mays
  Clone ID: MRT4577_102072C.1.pep
GRQWAYIIKPCSANTDPIFGSNKLTGTDKWYPEGLWFDPLGCCNGSPEKIKELRTNEIKNGRLSMLVVMGAWLQAEYTGTGPIYNLLYHLADPGHAT

SEQ ID NO: 186935 - protein, 79 aa, Zea mays
  unsure (1)..(79): unsure at all Xaa locations
  Clone ID: MRT4577_102073C.1.pep
MNENLFASFITPTIIGLPIVVTIIMFPSILFPSSERLISNRLHSFQHXLIKLIIIQIMLIHTPEGRTXALILYPIIXVF

SEQ ID NO: 186936 - protein, 73 aa, Zea mays
  Clone ID: MRT4577_102074C.1.pep
TLSQCSGLSFGRGSPLPTIPSATSSCLGIDALPILSCAVASVIGIGLAMWGPSGGNGLSNRRRDLEPLEPLEP

SEQ ID NO: 186937 - protein, 90 aa, Zea mays
  Clone ID: MRT4577_102075C.1.pep
MCPLRVILIFLSATVAGFFLVRGLNAEPDQFDADADADESGSPRAPLPLHSKVGSAVKAGFWTMVDMASGRYLWRTLVAQPANSESEKAR

SEQ ID NO: 186938 - protein, 67 aa, Zea mays
  Clone ID: MRT4577_102076C.1.pep
QLSYLIPYLTSYFKLHSANNVIYNTMQIPYFTQSTADSLTLYFDHEFLLYIKSNPENSMLFQKLCEI

SEQ ID NO: 186939 - protein, 104 aa, Zea mays
  unsure (1)..(104): unsure at all Xaa locations
  Clone ID: MRT4577_102077C.1.pep
GRPGRXKEKKKKKKKKKKKKKKKKKKKKKKKINKKXRQKPKXKIKKKKKNKNRTPPPFCFLSPRHPLALPVPATPQFPSGGPHPFWWGGEKRGGVGVYGPQKPK

SEQ ID NO: 186940 - protein, 57 aa, Zea mays
  Clone ID: MRT4577_102078C.1.pep
AQGEGAQDRPPPLFSMLGFLVRAFVPGKGPLKNLVGPIVDPVNNKGWAYAPNFVPGN

SEQ ID NO: 186941 - protein, 79 aa, Zea mays
  Clone ID: MRT4577_102079C.1.pep
MAANLAELPHCTTRGALFGSWKGLSYYYEVVANYQQYDGLRQPPSEKATICPTSSFTSCSDAYQVGLSHYIRTLIASCI

SEQ ID NO: 186942 - protein, 71 aa, Zea mays
  Clone ID: MRT4577_10207C.1.pep
STHPPHEHWPKTLKLIPSPYIKNQTHIPQTKNIILPKHIPCPKLSTPYQKFILLNTSQLPQSSTNNYTTPA

SEQ ID NO: 186943 - protein, 77 aa, Zea mays
  Clone ID: MRT4577_102080C.1.pep
AGAPVCLGMSLSPGRLSRVVAWCLCHIFFFLCDYVYIVICSITNILHITFSLYNFYLLKYRHTRLKIRFARKTCTIH

SEQ ID NO: 186944 - protein, 106 aa, Zea mays
  Clone ID: MRT4577_102081C.1.pep
GDWVPRGRQGLIVRRTALDVDALYSEDSGSPYYFQGGFNVASMVAMAAGVAPIVPGFLHKVGVLPSVPSAFVTSYNNAWFVSFFVAGAVYCLLCNRRGKQEREHYS

SEQ ID NO: 186945 - protein, 65 aa, Zea mays
  Clone ID: MRT4577_102082C.1.pep
MVIPSPAMAPAITKFLNPYILNMHFTNNFMSAHVIHTPTATVACSSSSHDKLLMPSMESTLIFLL

SEQ ID NO: 186946 - protein, 60 aa, Zea mays
  Clone ID: MRT4577_102083C.1.pep
MAKNYPTVSAQYSEAVEKARRKLRALIDEKSCAPLMLRLEWHSAGTFDVSSRIGGPFGPM

SEQ ID NO: 186947 - protein, 108 aa, Zea mays
  Clone ID: MRT4577_102084C.1.pep
GSPLREFLHVDDLADGVIFLMEHYSGLEHVNVGSGSEVTIKELAELVKEVVGFQGNLVWDSSKPDGTPRKLMDSSKIQGMGWKPKIALKEGLIETYKWYVENVISNKK

SEQ ID NO: 186948 - protein, 376 aa, Zea mays
  Clone ID: MRT4577_102086C.1.pep
MYVTRPTNPSLITALQNPNSPSSEAAATAILIRTRSSPAAAPSGPSVDMGTVTAADPHPSFLADKDAKVFVAGHRGLVGSAIVRRLLSLGFTSVVVRTHAELDLTRQADVEAFFAAERPRYVVLAAAKVGGIHANSTFPADFIAANLQIQTNVVDAALRCGSVRKLLFLGSSCIYPKFAPQPITEGALLSGPLEPTNEWYAVAKIAGIKMCQAYRIQHGLDAVSAMPTNLYGPHDNFHPENSHVLPALIRRFHEAKATNAPEVVVWGSGSPLREFLHVDDLADAVIFLMDHYSGMEHVNVGSGSEVTIKELAELVKEVVGFQGNLVWDSSKPDGTPRKLMDSSKIQGMGWKPKIALKEGLVETYKWYVENVISNKK

SEQ ID NO: 186949 - protein, 100 aa, Zea mays
  Clone ID: MRT4577_102087C.1.pep
TGHLAQHRQLEGPVGTGAGKPPPHHLRAPGRLLWPGWAGSGAATGPSRGGRGNFSVPVRATRVPPWGAGCGPLPCISSPGSGASPGADATTLLSPHRAPR

SEQ ID NO: 186950 - protein, 83 aa, Zea mays
  Clone ID: MRT4577_102088C.1.pep
IDPEQGFMRTKESMDVYSTRDPHLAFHQRISFCLDLHNQSVKAMRYPPKSYGKDLESAEERREREQQDLELAKEMAEDDDDGF

SEQ ID NO: 186951 - protein, 57 aa, Zea mays
  unsure (1)..(57): unsure at all Xaa locations
  Clone ID: MRT4577_102089C.1.pep
EAAVPMIGPRCYKPLFRETCGPRHGTGRXFSWVNPPGPRLFVSKKKYFDKLKKGNHV

SEQ ID NO: 186952 - protein, 63 aa, Zea mays
  Clone ID: MRT4577_10208C.1.pep
SMQLRFSHHIMVTCTCCHFQMRLTKSANLYLHPISMNGMQMSMCGNAILNIVSRLRHLSVSSI

SEQ ID NO: 186953 - protein, 77 aa, Zea mays
  Clone ID: MRT4577_102090C.1.pep
LSSVVATESRKTSSPPISGLAPLISRHSASNQFINMNYVSKHARVGAPCSQDEIFSLGILCHRATQEISYTACPYEA

SEQ ID NO: 186954 - protein, 79 aa, Zea mays
  Clone ID: MRT4577_102091C.1.pep
FSRPLWSLRPWLKALQGQRQRISSGAASAPAGCVCAPPPTSSTSAAPPARSESQCPRTRAPPSTGSSTSSPLISVCKIH

SEQ ID NO: 186955 - protein, 536 aa, Zea mays
  unsure (1)..(536): unsure at all Xaa locations
  Clone ID: MRT4577_102092C.1.pep
MVAPGGGAGGGPSRWPAAEELDTVRKKVVEISGRDEQEVMVAACPYRICPLGAHIDHQGGVVTAMTINYGVLLGFVPSNGSEVLLHSGQFEGAIRFRVDDLQKPIDKPENINWGSYAKGAVSALQNSGYDLRKGIIGYISGVKGLDSSGLSSSAAVGIAYLLALEHVNDLVISPVDNIQLDKYIENKYLGLENGILDPSAILLSRXASPSYVCFSELNKSQQPQGQLPFKILLAFSGLQHNLPKKRGYNTRVSECKEAARXFAVSSLLITCIAVFNHADKYTLMFPIFIWVHICSSSTVFVIHLSYPICSLILXSLIMFLFXLSASGCEDTPNILCNXMFYVIFLVVTQCKSIICLTFSLLXVDPVVYETQKVIITFRSIFLSFSCHSXNLFLQCVLEENLSRRAEHYFFEMKRVTKGRDAWAHGNLQELGQLISESGRSSILNYECGSKEMIQLYEILLKAPGALGARFSGAGFRGCCLAIVESDRAEDAAAYVRAEYEKAQPELVSRIPADRRVLVCEPGDSARVILPDPHLSS

SEQ ID NO: 186956 - protein, 101 aa, Zea mays
  Clone ID: MRT4577_102093C.1.pep
RRIALAAAKATGNRSRIGGKDAKRVIIKVGTARGTRHEGRGATGNLGGPWEQGKEINALGDQANIASSGAGGEGKHRLKYRKLGNSSKAEMQKPQTEPEGK

SEQ ID NO: 186957 - protein, 164 aa, Zea mays
  Clone ID: MRT4577_102094C.1.pep
KYNLSDIFFVIIVDPVVYETQKCVLEENLSRRAEHYFFEMKRVTKGRDAWAHGNLQELGQLISESGRSSILNYECGSKEMIQLYEILLKAPGALGARFSGAGFRGCCLAIVESDRAEDAAAYVRAEYEKAQPELVSRIPADRRVLVCEPGDSARVILPDPHLSS

SEQ ID NO: 186958 - protein, 439 aa, Zea mays
  Clone ID: MRT4577_102095C.1.pep
MVAPGGGAGGGPLRWPAAEELDTVRKKVVEISGRDEQEVMVAACPYRICPLGAHIDHQGGVVTAMTINYGVLLGFVPSNGSEVLLHSGQFEGAIRFRVDDLQKPIDKPENINWGSYAKGAVSALQNSGYDLRKGIIGYISGVKGLDSSGLSSSAAVGIAYLLALEHVNDLVISPVDNIQLDKYIENKYLGLENGILDPSAILLSRYGYLTFMDCKTASPSYVCFSELNKSQQPQGQLPFKILLAFSGLQHNLPKKRGYNTRVSECKEAARALLHASGCEDTPNILCNVDPVVYETQKCVLEENLSRRAEHYFFEMKRVTKGRDAWAHGNLQELGQLISESGRSSILNYECGSKEMIQLYEILLKAPGALGARFSGAGFRGCCLAIVESDRAEDAAAYVRAEYEKAQPELVSRIPADRRVLVCEPGDSARVILPDPHLSS

SEQ ID NO: 186959 - protein, 67 aa, Zea mays
  Clone ID: MRT4577_102096C.1.pep
MVVARGLFRVYGSTMPRPCFFLGDRVDPPASDTDPMLEWARKSHWSMGDNIEKCLRLQVHIKGFVNK

SEQ ID NO: 186960 - protein, 83 aa, Zea mays
  Clone ID: MRT4577_102097C.1.pep
VGFAFVLGGQKNPLYMIAQTATFDNHPHRNNLTIKSTQTGPTSSRHQVFLYPLANNKILLKPAHKNPYGPGSYYPPLWNCFEF

SEQ ID NO: 186961 - protein, 427 aa, Zea mays
  Clone ID: MRT4577_102098C.1.pep
MISNGKPHLDTVRKKVVEISGRDEQEVMVAACPYRICPLGAHIDHQGGVVTAMTINYGVLLGFVPSNGSEVLLHSGQFEGAIRFRVDDLQKPIDKPENINWGSYAKGAVSALQNSGYDLRKGIIGYISGVKGLDSSGLSSSAAVGIAYLLALEHVNDLVISPVDNIQLDKYIENKYLGLENGILDPSAILLSRYGYLTFMDCKTASPSYVCFSELNKSQQPQGQLPFKILLAFSGLQHNLPKKRGYNTRVSECKEAARALLHASGCEDTPNILCNVDPVVYETQKCVLEENLSRRAEHYFFEMKRVTKGRDAWAHGNLQELGQLISESGRSSILNYECGSKEMIQLYEILLKAPGALGARFSGAGFRGCCLAIVESDRAEDAAAYVRAEYEKAQPELVSRIPADRRVLVCEPGDSARVILPDPHLSS

SEQ ID NO: 186962 - protein, 146 aa, Zea mays
  unsure (1)..(146): unsure at all Xaa locations
  Clone ID: MRT4577_102099C.1.pep
MVEASASFMDKVEAAAGDAVVDGASVGVGDARKEDEEMAPVEPLPEPPDEGGPVAWPMPEFCPLTVDGALKESFLETLWKDAAPEMERPAREADEALSPESRPSSSKRHRSGTASPSSRSSPYRNILQVFQQCRQDVVXETPTKNY

SEQ ID NO: 186963 - protein, 79 aa, Zea mays
  Clone ID: MRT4577_10209C.1.pep
RAIIGTYGEGTMYIVSRGYSDQRNSRHVTSFVLERHHYYISVFLVPNNNACVISGKERIEHTGEHGLTTKEGNVITRAG

SEQ ID NO: 186964 - protein, 42 aa, Zea mays
  unsure (1)..(42): unsure at all Xaa locations
  Clone ID: MRT4577_1020C.1.pep
VMPNLGKKLTDEEVDEMIKEADVXDGDGQINYEEFVKVMMAK

SEQ ID NO: 186965 - protein, 63 aa, Zea mays
  Clone ID: MRT4577_102100C.1.pep
AFRGRFIALTVVKQGRAICSNHGRFIHSGRLATGLVFEGLKDTNHLEMPKSLEKCLESGLNVD

SEQ ID NO: 186966 - protein, 265 aa, Zea mays
  unsure (1)..(265): unsure at all Xaa locations
  Clone ID: MRT4577_102101C.1.pep
FLNLEFRFGVHGNKSWGLENGFLNPSAILLSGFGYLTFMDCKTASPSYVCFSDLNKSQRTRGQLPFKILLAFSGLQHNLPKKRGYNTRVFECKEAARALLHASGCEDTPNILCNVDPVVYEAQKCVLEENLSRRAEHYFFEMKRLXKGDAWAHGNLQELGQLISESGRSSILNYECGSKEMIQLYEILLKAPGALGARFSGAGFRGCCLAIVESDRAEDAAAYVRAEYEKAQPELVSRIPADRRVLVCEPGDSARVILPDPHLSS

SEQ ID NO: 186967 - protein, 101 aa, Zea mays
  Clone ID: MRT4577_102102C.1.pep
EASGELKLKTSGGRRKKLRCAAGLSGLHPSICFVGFFACDSASRSVAYLPLLLHNVQIIRARGSSTLRSRSRGCRERDPWSWESPFRRTDVATPLPTPTVA

SEQ ID NO: 186968 - protein, 375 aa, Zea mays
  Clone ID: MRT4577_102103C.1.pep
MELGKPLSAHRCSYTATYTHCSIGFSPRVVRTSWIRAAAEGGDGGADRRRRGASFAADGPRVVEVAAAPVATSGGAAGAAGSAGFGARDAELAMWDKLGAVVRLSYGIGIYGAMALAGRFICQMAGIDCTGGFHPSLTALVEGLGYAAPPIMALLFILDDEVVKYSPHARAIRDVEDEELRSFFCGMSPWQFILIVAASSIGEELFYRAAIQGALADIFLRSTELMKDARGIASLSGIVPPLVPFAQTFAAVITAALTGTLYYVATTPKDPTYVVTPAMRSRTGRENLKKLFAAWYERRQMRKIYSPLLEGILAFYLGFEWIQTDNILAPMITHGIYSTVVLGHGLWKIHDHRRRLRQRIQKVRSEGSSSADDTL

SEQ ID NO: 186969 - protein, 73 aa, Zea mays
  unsure (1)..(73): unsure at all Xaa locations
  Clone ID: MRT4577_102104C.1.pep
MELSLSQLSCKDIXELIAAGKDNFASVSCSGGGVAVPAAVPAAGSAPAAEAKIEDNVDDKEXSDDDMGXSLFD

SEQ ID NO: 186970 - protein, 103 aa, Zea mays
  Clone ID: MRT4577_102105C.1.pep
FLATPTLQLPLPPRLALGTQARDCGGAQARALSNGGAVPDSASPSRQSPCALAPFLCSPADSACAPPAPLSPPVERRRRPAPAAALRCLRPAGSGSQQALLPQ

SEQ ID NO: 186971 - protein, 142 aa, Zea mays
  Clone ID: MRT4577_102106C.1.pep
MANAPAMASSPPASADDGGPSSPSVAVPRVLPSRLLLDTPPPSSGRARGPRGGSAAAASRRGGLCGGTRRESTLPAAASNGTGGRRPERDWLAEAAMMIGGPVEDAGLASADILQLAMAKGPMFEWLSYWPEEGYLKEDHPY

SEQ ID NO: 186972 - protein, 104 aa, Zea mays
  Clone ID: MRT4577_102107C.1.pep
MARGLTALLRRLLAPSTYPSHSPSTPLAGAVSRRTVTYMPRPGDGAPRGVTLMQDDGLGPLVTGAARQAMALMHAPIVCETYEGRGDMPTSPGEVIEYFGRNKV

SEQ ID NO: 186973 - protein, 88 aa, Zea mays
  Clone ID: MRT4577_102108C.1.pep
CVNLALQPRTPGRYNRLDHTKHQPVSTTRAVESRMNQVRPQVGRIYGCGGGGGAGRLGSGDSRIWAAQQRISSGEGCAAAVCSRRSTA

SEQ ID NO: 186974 - protein, 667 aa, Zea mays
  Clone ID: MRT4577_102109C.1.pep
MPKRHRDSEGRQRSSSSRRRRSPSPSDSDAASSDSSGSPRRSRGRHRHRSRRRRDTPSTSSDASGSGSEDSRSDSGRRGRSGGRRRRDVTEEQIIEYMAKKAQKKAEKVAKKLKANSVSGYSNDSNPFGDPNLTEKFVWRKKIEHDVSQGQKVDFSVKSEKKKQLERMAEIEKVKKRREERAIEKAQHEEEMALIARERARAEFQDWEKKEEEFHFDQSKVRSEIRLREGRTKPIDVLLKNLSFSDEFDIELNEPYLVFKGLTVKEMEELCDDIKMHLDLDRESQTNVKYWEALMVVCEWELGEARKRDALDRARVRGEEPPPEVLAEERGLHASIEGDVKSLLDGKTSTELEDMQSQIESQMRSGTAKVVEYWEAILKRLHIYKAKACLREIHASILRKHLHRLEHPGAAEQDVDSEKEVDNKLEDEMHEDEDDKRYSPEPMPQQTDNEFEEADGSFSPQLMHGNEDEDAIDPEEDKAELDRKREAVVLEHQRKVQEAMKTKARVPDEMEMKAIKTMGAMEEGDAVFGAGAEVNLDSQVYWWHDKYRPRKPKYFNRVHTGYEWNKYNQTHYDHDNPPPKIVQGYKFNIFYPDLVDKSKAPTYSIEKDGSAGETCFIRFHAGPPYEDIAFRIVNKEWEYSHKKGFKCTFERGILHLYFNFKRYRYRR

SEQ ID NO: 186975 - protein, 195 aa, Zea mays
  Clone ID: MRT4577_10210C.1.pep
MSHWKEKENAPPLPLYPSGASNPSHLLPCKRPLQSPSPCPPLRRPLVDITGNASEQRGGYGYTTPLPNASRPCGFLLHDDEDDMNEAFLREVDAICEERARSTARKEEKEKEKEKKPAEEHKGTGGVALMAAAGTIDAAGTEIATLDDAFWEEVSAICEECDAQSAAKSQERTKEEGSLVLSCDDASLPPAISIT

SEQ ID NO: 186976 - protein, 57 aa, Zea mays
  Clone ID: MRT4577_102110C.1.pep
KKKNRPISDFYSNCKLSPKVQSRLKNLILNFCWASKFILNSTNCNFKVQASEGLNEL

SEQ ID NO: 186977 - protein, 85 aa, Zea mays
  unsure (1)..(85): unsure at all Xaa locations
  Clone ID: MRT4577_102111C.1.pep
MFGNIGKIPIIGELAGXNKNANLKGNVVLVRKTGLGLNVTRMAGXLLDGVGEFLGRGVTCQLIRFTVVDPNNSNRWKLGAEASLE

SEQ ID NO: 186978 - protein, 52 aa, Zea mays
  Clone ID: MRT4577_102112C.1.pep
QSDSMLWTPRPANKRNHLVTPIFDKFSFPFDKYLSTSYVNTITYGLVSLLMQ

SEQ ID NO: 186979 - protein, 160 aa, Zea mays
  unsure (1)..(160): unsure at all Xaa locations
  Clone ID: MRT4577_102113C.1.pep
KSAKQGATQKTNRRAKRKEGRQARAPRRDRQAAERGKNSKGKKKGNPRVGPVREGKTKGQGKEQRRQKKRAKDDARKGRKAGTHKTGRPGGRKKERKRIQRKRERGHNKRVHXTKTQTTEGQTATKQNPPPHQEGGRTHTRTQQTDXNAXHTHTRXHQTD

SEQ ID NO: 186980 - protein, 115 aa, Zea mays
  unsure (1)..(115): unsure at all Xaa locations
  Clone ID: MRT4577_102114C.1.pep
SCTWRARDVSGDIYNRGGLNAAPDPWLTKALSLGDDSDIMLAYWASKIAEAPQTDLNGWKALTPDATAHTIGHVQCTVILGKVAAPFTHIINSGXPAFKALVSRSYLREHLQMPV

SEQ ID NO: 186981 - protein, 60 aa, Zea mays
  Clone ID: MRT4577_102115C.1.pep
SCSKHTPELHAYNNRTNIQQAEAYRFLHYMSREWGLPPSSFMLSTTQSQCVLGTYSSVYR

SEQ ID NO: 186982 - protein, 71 aa, Zea mays
  Clone ID: MRT4577_102116C.1.pep
VVCKELSAPPVGNVLSSGPAGSGRPVGLSQWRGPLAGQRPNVGRGGREPQKPVAILDSGLESYSHNAAPGS

SEQ ID NO: 186983 - protein, 148 aa, Zea mays
  Clone ID: MRT4577_102117C.1.pep
FSPSQRSRSLVGVALQPAGTSVCSCRVSCCPCRKRSTWLVSGLALCSSLPGSRRTTRGLVGWGSALLGGAKEGPPRCEVVWWISLDHVRCCSRVVMYKECNDHAPLGCRRRPRTLSSSVVSPVMDAVPPGMVRPRKHCSPIVWSSCRI

SEQ ID NO: 186984 - protein, 63 aa, Zea mays
  Clone ID: MRT4577_102118C.1.pep
LSLSFSSHGAPPLTPMARACFPHGTRPTSPMAASPWSKLPALLYLELPPTALSYLRPRIQSHL

SEQ ID NO: 186985 - protein, 460 aa, Zea mays
  unsure (1)..(460): unsure at all Xaa locations
  Clone ID: MRT4577_102119C.1.pep
MAGLLHLQSTLLPSASALRRRAGAPVPSSSRRRCRVEAKIREIFMPALSSTMTEGKIVSWTAAEGDRLAKGDPVVVVESDKADMDVETFHDGFLAAVLVPAGDSAPVGSAIALLAESEEDIPVAQSQAASFSSTSPLPPPPQETAQEASPSPPPPPPSAPVAVSAPTPPSPATQGGGRVXVASPYAKKLAKXLGVDLFSVTGSGPGGRIVAKDVEAALAAPKKAAPVTAALAGXVHVGSTVPFTTMQXAVSKNMVESLAVPTFRVGYTITTDALDQLYKKIKSKGVTMTALLAKATAMALVQHPVVNSSCRDGKSFTYSKSINIAVAVAIDGGLITPVLQDADKLDIYSLSRKWKELVDKARAKQLQPHEYNSGTFTLSNLGMFGVDRFDAILPPGTGXAIMAVGASEPTVVGTKDGRIGIKSQMQVNVTADHRVIYGADLAAFLQTLAKIIEDPKDLTF

SEQ ID NO: 186986 - protein, 193 aa, Zea mays
  Clone ID: MRT4577_10211C.1.pep
MEVTATPRIQEAKTVPGTAKATVDDEVTLRRFELTDVDAMMEWASDPQVAAFCRWEPYASAEPLLEFLRDAVLPHPWYRAICVSGAVVGAVSLAPTPERCRWELGYVLARAHWGKGLATAAVRRALRDAFADLEPEGLRRVEAMVDVGNPASQRVAEKAGFRREGVLRRHYWHKGRARDMVMYSFLSSDPLPD

SEQ ID NO: 186987 - protein, 129 aa, Zea mays
  Clone ID: MRT4577_102120C.1.pep
RCGLITPVFQDADKLDIYSLSRKWKELVDKARAKQLQPHEYNSGTFTLSNLGMFGVDRFDAILPPGTGAIMAVGASEPTIVGTKDGRIGIKNQMQVNVTADHRVIYGADLAAFLQTLAKIIEDPKDLTF

SEQ ID NO: 186988 - protein, 453 aa, Zea mays
  unsure (1)..(453): unsure at all Xaa locations
  Clone ID: MRT4577_102121C.1.pep
MAGLLHLQSTLLPSASALRRRAGAPVPCSSRRRCRVEAKIREIFMPALSSTMTEGKIVSWTAAEGDRLSKGDPVVVVESDKADMDVETFHDGFLAAVLVPAGESAPVGSAIALLAESEEEIPVAQSQAASFSSSSPSPPPPQETAQEASPSPXGEEVAVSAPALPSPATQGGGRVVASPYAKKLAKDLGVDLFSVTGSGPGGRIVAKDVEAALAAPKKAAPVTAARSDVPLGSTVPFTTMQGDPSNHPVESLAVPTFRVGYTITTDALDQLYKKIKSKGVTMTALLAKATAMALVQHPVVNCSCRDGKSFTYNKSINIAVAVAIDGGLITPVLQDADKLDIYSLSRKWKELVDKARAKQLQPHEYNSGTFTLSNLGMFGVDRFDAILPPGTGAIMAVGASEPTVVGTKDGRIGIKSQMQVNVTADHRVIYGADLAAFLQTLAKIIEDPKDLTF

SEQ ID NO: 186989 - protein, 78 aa, Zea mays
  Clone ID: MRT4577_102122C.1.pep
EPRILLPSGTDNPCFYRSCQRIVFVIKHVCLFSGWYCYHIPLFLVLYIFLKHEQIGGIFSEAITGMYMQLLVCTWLIK

SEQ ID NO: 186990 - protein, 110 aa, Zea mays
  Clone ID: MRT4577_102123C.1.pep
MLQIRLSKIGSSDSGGAAASTAAGAGAPAAVGAAAALGGSILESVTVACPDHLVIADLPVAKSLGAVTTSAAAATRAIGRRSRRPLGERVHICSRCEFPIAIYGRLVRTC

SEQ ID NO: 186991 - protein, 44 aa, Zea mays
  Clone ID: MRT4577_102124C.1.pep
MRGIANAKRSMNAADEATMRPSNATMAIPPPDAGEVEMQVQGYF

SEQ ID NO: 186992 - protein, 67 aa, Zea mays
  Clone ID: MRT4577_102125C.1.pep
QPGGVQVLDNLFKPQPGQNKPPPRGGPENPVVKFQQGFPGQEHPLVLSFAPCSCVLSFVNSDLFFFF

SEQ ID NO: 186993 - protein, 142 aa, Zea mays
  Clone ID: MRT4577_102126C.1.pep
MATSAAMFVVPSSSTPPPSSGVAITATLDPKSDVQERVVPSRQTTAVVHLSNTCTSVGLEIKFHTVCQCSRARLPPSRSENVDGINMKLIERFSEQQMVYYSFDSVVDDPNNFYPLEFLNSSILNGLPPHILKLMVNCPGYC

SEQ ID NO: 186994 - protein, 76 aa, Zea mays
  unsure (1)..(76): unsure at all Xaa locations
  Clone ID: MRT4577_102127C.1.pep
INKSIXNSKVNIYNYLEAHPHISWVPHPTYKPTYPHAHPHAYPLPYPSTQYTPHQMWGVLGRGLNHTSINLNNKET

SEQ ID NO: 186995 - protein, 149 aa, Zea mays
  Clone ID: MRT4577_102128C.1.pep
MAMRMAAAAVALVAVMGVLAPRAAAQTPNCAEKLIPCSPYMNTTGTPPDTCCGPLKDAVQNDLKCLCDLYASPEIFKAFNISLDQALGLSKRCGLSDTTAACKGLSPTQSPPGSPPSGGSSNAARRALPASFAGLVTSLFLALWSVLLA

SEQ ID NO: 186996 - protein, 96 aa, Zea mays
  Clone ID: MRT4577_102129C.1.pep
LQALRPQRHHRRLQGPFSYAVSSRFAAIRRQQQRRPSRSAGQFRGTGDELVPSSVVCNGVNKSSAMLVLPHSRWFAHTIRYNSTFVLLCIGRVRCV

SEQ ID NO: 186997 - protein, 370 aa, Zea mays
  unsure (1)..(370): unsure at all Xaa locations
  Clone ID: MRT4577_10212C.1.pep
SIYTTVEVQEGMKIDKGYISPYFITNQDKSIVEFENTRVLLTDQRVNDVQEILPLLEKTTQLSVPLLIIAEDVSHEVYSTLVLNKLNGLLNVAVVKCPGLGDEKKAILQDIAIMTGADFFASDLGWGLHGITSDQLGMAQKITITSESTTIIAHPSMRPEIEARIMQPSKXLILXNGCGLDVSCVHCIDFQDREVXILTVGAATEAELEDRKLRVEDAKNATFAAISEGITPGGGVTYVHLSKHIPSIMDLVDDTEEKMGVNIVGKALLVPAMTIARNAGADGPAVVEKLLASEWRVGYNAMTDEFEDLVAAGVVDPCRVARCVLQNSASIAGLILMTQAMMFDKIKKKKSPIPEIPGIPPLQISQKAKA

SEQ ID NO: 186998 - protein, 149 aa, Zea mays
  Clone ID: MRT4577_102130C.1.pep
MGVRAAAAAVALVAVMGMLAPRAAAQTPNCAAKLVPCSSYMNTTGTPPDTCCGPLKDAVKNDLKCLCDLYATPEIFKAFNISLDEALGLSKRCGLSDTTAACKGLSPTQSPPGSPSGGGSGSNSGHHTLSVGFSGFMSFLSLALWSVLA

SEQ ID NO: 186999 - protein, 38 aa, Zea mays
  unsure (1)..(38): unsure at all Xaa locations
  Clone ID: MRT4577_102131C.1.pep
FLHGQHQEYWMSGKCWGENKSIPPERILFLSCSXIRIG

SEQ ID NO: 187000 - protein, 64 aa, Zea mays
  Clone ID: MRT4577_102132C.1.pep
NSLGLPLTATVLCAIGTGAKILYIIMCRRNQGLLNRAVILTGMMTKKNGKPNLRKTVMPAAPTR

SEQ ID NO: 187001 - protein, 46 aa, Zea mays
  Clone ID: MRT4577_102133C.1.pep
SSITYLTALITTLAPDHICSVLHTYPLHFHYTIYTIEKHHHTNLLH

SEQ ID NO: 187002 - protein, 52 aa, Zea mays
  Clone ID: MRT4577_102134C.1.pep
RPWNTRPPSFRARSPLRSRHARSYRGAARLACSSTSLRLSTSRRARRRSPPT

SEQ ID NO: 187003 - protein, 129 aa, Zea mays
  Clone ID: MRT4577_102135C.1.pep
MAPKVALFLALSLLFAATAHGCEPNCSGPVVPTPPVVPTPSSHSHGRCPIDALKLKVCANVLGLVKVGLPQYEQCCPLLEGLVDLDAALCLCTAIKANVLGIHLNVPLSLNFILNNCGRICPEDFTCPN

SEQ ID NO: 187004 - protein, 105 aa, Zea mays
  Clone ID: MRT4577_102136C.1.pep
KHICMLFFPQIMTTLGRGSMGNIFLIVSLVFVMVIQSTSFPTRDDVRCDVLQQRCAPNNCNIQLCRVWYGERQFKSAFCKRTPPFPDQCCCQMRGQPPNSYVQVP

SEQ ID NO: 187005 - protein, 88 aa, Zea mays
  Clone ID: MRT4577_102137C.1.pep
LKTTLDAVQETKRKSFKLKHNNYYFPSALLQASPANARARDQNTSLRRGRGRSASASSRMVSGTRSTNSSRSICWTVSVTSAPCRGRC

SEQ ID NO: 187006 - protein, 118 aa, Zea mays
  unsure (1)..(118): unsure at all Xaa locations
  Clone ID: MRT4577_102138C.1.pep
FTSEAXXXISFDLVSDLXQRMISMDAVSRPSAVAFTGSSFFRDDTRXRDNMQKTEFLKALSDMWKDFDSRVLRYKVLPPLCAELRNMVMQPXILPMVLTIAEFXDKGDFELATLPALV

SEQ ID NO: 187007 - protein, 88 aa, Zea mays
  Clone ID: MRT4577_102139C.1.pep
SGLVMVQVPLAPGWHSISVCSSPSAVDPTNCVTSCARATSLLQFRIRLRWNVRGSHYQLVEEVAVTSGVVVLSFVPKSVVYHGALRYW

SEQ ID NO: 187008 - protein, 61 aa, Zea mays
  Clone ID: MRT4577_10213C.1.pep
NVAPVPWQGQQGGASLQCLCPMVFGPPFYDRPRGFMLMHTPLTFQKSPHSCSFSSTKFCLG

SEQ ID NO: 187009 - protein, 93 aa, Zea mays
  Clone ID: MRT4577_102140C.1.pep
LALHCMQSVLLMGDALDGACTAGIFAVDERQESVAQGKLNGDLAFTPHEYVPIRTHVSSDGVRRMRVVSLCCLPFCLTNVVPKYMMFFYFYTL

SEQ ID NO: 187010 - protein, 55 aa, Zea mays
  Clone ID: MRT4577_102141C.1.pep
HVYMGCEVLKCLMGLTGVYLFSCTPRKIVQQCLMGLIGGPFSCTPRSTNNVWPYI

SEQ ID NO: 187011 - protein, 993 aa, Zea mays
  unsure (1)..(993): unsure at all Xaa locations
  Clone ID: MRT4577_102142C.1.pep
MGLLEIKHGLLQVAETLDFLHNNAHLAHRAISPETVFITSNGSWKLGGFGFALSVDQATGGLTSSQLFHYSDYDVEDTALPLQPSLNYTAPELVRSGDSKVGSACDMFSFGCLAYHLVARRPLLDCHNNVKMYMNALTYLTSEAFSNIPSDLVSDLQRMISMDAVSRPSAVAFTGSSFFRDDTRLRALRFLDHLLXFLLFPFSLFSLISLKAAIWCASLLXKSPLTRLFELYLSTXGKNLACLTREXRHNLVPKMVLIFKITFXQERDNMQKTEFLKALSDMWKDFDSRVLRYKVXSTAIHPCLLPTNATPMCPLSVSIILLCTTSLKLLKPGYVKLYIYPDGQIPXFGCYQHTLYGVLEINKIIYKPQFLYLKLVTIXQFSSXHSDIVFLFVLFKLFCPGKRTALYLFDPLVISKLTHTLXQVLPPLCAELRNMVMQPMILPMVLTIAESQDKGDFELATLPALVPVFTSASGETLLLLVKHADLIINKATQEHLISHILPMLVRAYDDNDPRLQEEVLRRTVSLSRQLDTKLVKQAVLPRVHGLALKTTVAAVRVNALRCLGDLVPSLDKEGILGILETVRRCTAVDHTAPTLMCTLGVANAIYKQCGVEFAAEYVIPLIFPLLTAHQLNVQQFAKYMLFVKDITSKIEEKRGVTVTDNGNTEVKASPSLANGIHSEPMPGQIPAAKSSPAWDEDWGPTKKTGVPSLSVDSSAQTKQPSVHPFDFSTQTKQSTPLPFDLSTQVKQPSLVSHATAATIPPAQPQPVQSLVPSSGPQSSGSCAPVDIEWPPRRSSSSDFSASLSISKENESGRLSSDGLDDIDPFADWPPKPSNVTSITATEHRPSINQNISGFSSGNIGFGGSGNSIGQAKSNQMSWSNTSNLMGMNSTGSYLNQGSAALGFGNPIGGLSTGLSNPSSSSTGLSMMQPKSDFGSLSMSANNAANGPPRLAPPPSTSVGRGRGRNQGQSALSRASRPPHSNSSSGQQPILDLL

SEQ ID NO: 187012 - protein, 97 aa, Zea mays
  Clone ID: MRT4577_102143C.1.pep
GGLWSPRFIARELPPFFKKMGGAPLAHGVRVKEPPLLGEPPAQKGFEVWRGCFFLGILWGGRVVSWFYNKMNIPFLSVAPPLDCVLLEIQTKVNITF

SEQ ID NO: 187013 - protein, 735 aa, Zea mays
  Clone ID: MRT4577_102144C.1.pep
LSLTSSQLFHYSDYDVEDTALPLQPSLNYTAPELVQSRDSKVGSACDMFSFGCLAYNLVARRPLLDCHNNVKMYMNALTYLTSEAFSNIPSDLVLDLQRMLSMDALSRPSAMAFTGSSFFRDDTRLRALRFLDHLLERDNMQKTEFLKALSDMWKDFDSRVLRYKVLPPLCAELRNMVMQPMILPMVLTIAESQDKGDFELATLPALVPVFASASGETLLLLVKHADLIINKATQEHLISHVLPMLVRAYDDNDPRLQEEVLRRTVPLSRQLDTKLVNKAVLPRVHGLALKTTVAAVRVNALRCLGDLVPSLDKEGIMGILETVRRCTAVDHTAPTLMCTLGVANAIYKQCGVEFAAEYVIPLIFPLLTAHQLNVQQFAKYMLFVKDITSKIEEKRGVTVTDNGNTEVKSSPSLANGIHSEPMSGQIPVAKSSPAWDEDWGPTKKSGVPSLSVDSSAQTKQPSVDPFDFGTQTKQSTTLPFDLSTQAKQPPSVSHVTAATIPPAQPQPSLQSLAASSGPKISGSCVPVDIEWPPRRSSSSNFNAPLSISKDNGSGRLSSDGVDDIDPFADWPPIPSNVNSISATEHWPSINQNISGFSSGNIVFGGSGNSVGQTKSNQMSWSNTSNLMGTNSTGSYLNQGSAALGFGNPNGGLSTGLSNPSSSSTGLSMMLPKSDSGSLSTSVNNAAHGLLRLAPPPSTSVGRGRGRNQGQSALSRASRPHANSASGQQPILDLL

SEQ ID NO: 187014 - protein, 797 aa, Zea mays
  Clone ID: MRT4577_102145C.1.pep
MRGVRADGGGGAFSSSTAENSCFDAAQYSFFGKAPMEGAELGGLLEGGVDGDGGGFGGHDDAGYQFSSTGEEIDCMSNLSEIDDLASTFAMLNRNISGTRNPGIIGDRRSISRESSLTADWVQDADFSNWVDQDILDGDESLDSKQWCSQLQSSPHFGESKPLSRTSSYPNQPLQHRSSEPILLHRSTSFTSYPPSGESPGLPYPAQGLTRHSSIPSPGAGHLMGSPSSSLSGSPYHMPGLSHGLPYGRNMSYTTGDLSTNNVLQNEWSNQAGPLVFDHLNRRPSFLQPHLSLSSSSMSSLLFSQQHQRLAPGQPPLQNYINMQPHLFHHHQPPDVPSPRDKRSRSGRGGKHNIRFSQQPSDAGSQHSESSGIKFRSKYMSSEEIESILKMQHSANHSNDPYFDDYYHQACKAKRSVTFQKSNFCPMSIKDFPSKSRSGVDQHSYLQVDANGGVSFSAIRRPRPLLEADLPGSGDGFYDHKSSKRSLEKEPMLAARITVEDSLRLLLVVDDIDRFLQSSQPQDSSFQLKRRREVLLEGLATSLQLVDPFGPNKHGHSGGLAPKDDLIFLRIISLPKGRKLLARYLRLLFSGSELTRIVCMAVFRHLRSLFGGLPSDYSAAETTIVLAKAVSSCVRHMELSALSACLAAVVCSSQQPPLRPLGSASGDGASLIIKSVLDRATELLADPHSAANYSRSARSLWHASFDAFFGLLTKYCDSKYESIVQRFAMQGSNSMGGPETTKAVSREMPVELLRASLPHTNEQHRQTLLDFARKSTHLPGFSPTANRGLVNSESVPG

SEQ ID NO: 187015 - protein, 230 aa, Zea mays
  unsure (1)..(230): unsure at all Xaa locations
  Clone ID: MRT4577_102146C.1.pep
CSPGAGLPGRPTRPQTSGSCAPVDIEWPPRRSSSSDFNASLSISKENESGRLSSDGLDDIDPFADWPPKPSNVTSITATEHRPSINQNISGFSSGNIGFGGNGNSIGQAKSNQMSWSNTSNLMGMNSTGSYLNQGSAALGFGNPVGGLSTGLSNPSSSSTGLSMMQPKSDSGSLSTXVNNAANGLLRLAPPPSTSVGRGRGRNQGQSALSRASRPHANSVSGQQPILDLL

SEQ ID NO: 187016 - protein, 102 aa, Zea mays
  unsure (1)..(102): unsure at all Xaa locations
  Clone ID: MRT4577_102147C.1.pep
NVRTRRRGPGKDLSFVFRGPPPLIWVQPDIVSSAQKSPASRGVWCAPPGPFKSAEPNSRVRAGVCSHNGMVSPRYTRLWPLTMCSARRCRKAVGRPGILXPG

SEQ ID NO: 187017 - protein, 959 aa, Zea mays
  unsure (1)..(959): unsure at all Xaa locations
  Clone ID: MRT4577_102148C.1.pep
MALNMKTLTQALAKASAVIEKTVSTTVQEVTGPRPLQDYELLDQAGSGGPGLAWRIYTARPRDGAPSAPYPVVSVWVLDKRALAEARARAGLSKAAEDAFLDLVRADAARLVRMRHPGVLHVVQALDETKAAMAMATEPVFASVANALGCLDNVGKVPKELKGMEMGLLEIKHGLLQVAETLDFLHNNAHLAHRAISPETVFITSNGSWKLGGFGFALSVDQATGGLTSSQLFHYSDYDVEDTALPLQPSLNYTAPELVRSGDSKVGSACDMFSFGCLAYHLVARRPLLDCHNNVKMYMNALTYLTSEAFSNIPSDLVSDLQRMISMDAVSRPSAVAFTGSSFFRDDTRLRALRFLDHLLERDNMQKTEFLKALSDMWKDFDSRVLRYKVLPPLCAELRNMVMQPMILPMVLTIAESQDKGDFELATLPALVPVFTSASGETLLLLVKHADLIINKATQEHLISHILPMLVRAYDDNDPRLQEEVLRRTVSLSRQLDTKLVKQAVLPRVHGLALKTTVAAVRVNALRCLGDLVPSLDKEGIMGILETVRRCTAVDHTAPTLMCTLGVANAIYKQCGVEFAAEYVIPLIFPLLTAHQLNVQQFAKYMLFVKDITSKIEEKRGVTVTDNGNTEVKASPSLANGIHSEPMPGQIPAAKSSPAWDEDWGPTKKTGVPSLSVDSSAQTKQPSVHPFDFSTQTKQSTPLPFDLSTQAKQPSLVSHATAATIPPAQPQPVQSLVPSSGPQTSGSCAPVDIEWPPRRSSSSDFNASLSISKENESGRLSSDGLDDIDPFADWPPKPSNVTSITATEHRPSINQNISGFSSGNIVFGGSGNSIGQAKSNQMSWSNTSNLMGTNSTGSYLNQGSAALGFGNPNGGLSTGLSNPSSSSTGLSMMQPKSDFGSLSTXANNAANGPPRLAPPPSTSVGRGRGRNQGQSALSRASRPPHSNSSSGQQPILDLL

SEQ ID NO: 187018 - protein, 59 aa, Zea mays
  unsure (1)..(59): unsure at all Xaa locations
  Clone ID: MRT4577_102149C.1.pep
SHXXHSLIPLFFSYTYLFCPLTNPPNFLTTPTKTYNNLSKLFXHYPTTYLXTSIHKSPP

SEQ ID NO: 187019 - protein, 47 aa, Zea mays
  Clone ID: MRT4577_10214C.1.pep
FGRPGWYLYFIMPLFRTRTLFTTSIRDNAHEPSSINENISIFTTYFI

SEQ ID NO: 187020 - protein, 180 aa, Zea mays
  unsure (1)..(180): unsure at all Xaa locations
  Clone ID: MRT4577_102150C.1.pep
KVKYIYFKKKKKKKKKKKKKKKKKKKKKKNTPNPKSFIQSSKPNSGLKSSLAVPRARTKKTERKSTGGKAPRKKLATKVGRKSAPATGGGKKPHRFRPGIVGLREIRKNQKSTELLIRKFPFQGLVRKIAKNFKTDXRFQXSPAVAGLKKAAKANLGGFFKDTNLCAIHAKGVIIMPKDI

SEQ ID NO: 187021 - protein, 48 aa, Zea mays
  Clone ID: MRT4577_102151C.1.pep
VLAPHVDPLCLLHSSQDLQVLHMLCLVFIVKGVILANQNSLHIFPVCF

SEQ ID NO: 187022 - protein, 333 aa, Zea mays
  unsure (1)..(333): unsure at all Xaa locations
  Clone ID: MRT4577_102152C.1.pep
MKQWRDDIDRLLDMECSGSTRSRPQSSRRQHEASASVRSPSVRGAQTNNLRAELNXKCAGEDARVSLDMVQERRQNFEGRDDTRVSXWRRRVYITAITVAGGNTAMMATYFHVALSGHSQTWLMNLAPGSIYSWEELCVRFTTNFASGYQQHGVEAHLHTVRQEPGETLRTFISRFIWCXRAAKGRAWHSAPHTRAAQTGGSGAXPRDGKKKKKGRSHEKPQSTALVVAAATGGRGDHNKRPRPQRGNSDSCPMHPNSRHSVVECREIIDLAKRVSERREQSSKDGSPPHRRPGKERVDDGEVATAERDLGYQSFERVLKDIITGDSYSGGDS

SEQ ID NO: 187023 - protein, 107 aa, Zea mays
  Clone ID: MRT4577_102153C.1.pep
LKKRVHFPPAGNDCQTEPKTAVQKAPTKSDGDVFHPIVVRPSQQVVGPNRNWVKAVNTPSWRQGPPLFVPDPNPSVPVIGRSVPPVKVCPFEKMVSPQVGCCGITPV

SEQ ID NO: 187024 - protein, 211 aa, Zea mays
  unsure (1)..(211): unsure at all Xaa locations
  Clone ID: MRT4577_102154C.1.pep
PISLLAPGPSARSSLAMALVDALPGRVCLGYRAHAELSLPRVFLPRAQLALAPAPSGWLRAHPSARSSGRRPAEILPHPHGALLLVPSSPMATGCSSPHLPSPHARAGFLLARLPSSPFPWPSSSLLSVRARLLLCPPMAAVPSLVAGVRPASSRRTHPSLASPXKRALLQLGPTVELFSGAXMQTVFLNFALAVEAVAMAFCPRFWPSPL

SEQ ID NO: 187025 - protein, 73 aa, Zea mays
  Clone ID: MRT4577_102155C.1.pep
RVSGPVRNNTDPIHAGRRWSSSSPGRPCARTSRRCSCSHVIKKHTDLFVDSIHVLLLISVASWTLPPSAIHAQ

SEQ ID NO: 187026 - protein, 321 aa, Zea mays
  unsure (1)..(321): unsure at all Xaa locations
  Clone ID: MRT4577_102156C.1.pep
MDIFLIRACLLRLLLVLFAAAATSPAAAQSQPPSPARILDAALQDYAYRAFARPRTGIVYNATLPGNLTGIAVSAVRLRSGSLRRKGFPGYFQFGVPTGVVVQPYVERVVLVFHDLGNWSDHYYPLPGYTYLAPVLGLLVYDAANLSAAGLQELNVIASGGPISVRFGGNVRAVPAGSAAPRCVVFDLDGVPQFRDLEATDMCSTYRQGHVSIVVNSSGIAPAPPPPGXSPVDSDHWRKXTKGSSKAWKIAVSVVGAAVALGLMAALLLCLVRHKRDKKLQVMERNAEVGETLRMAHVGRTQAPVALGTRTQPVIENDYTA

SEQ ID NO: 187027 - protein, 77 aa, Zea mays
  unsure (1)..(77): unsure at all Xaa locations
  Clone ID: MRT4577_102157C.1.pep
SKGAEPTRAPFLGRGPGISSRETMPHGLHSGTHAETSASYHQCRMATAARRSGESVSWRXHGRRQRDVKTRQADGGG

SEQ ID NO: 187028 - protein, 140 aa, Zea mays
  Clone ID: MRT4577_102158C.1.pep
MEQQQVKPSLPPSDAPMDNQDSSPLPAVTTADPVPRALSNDSATQAASPNPVAPSSPSAPTSATTQDAAGRESPSSMFSTSGLSSWAKNLKIPQPSSGQESPPGKNTVSRLASGLGLRLSPKYPQQDESAEGSTTPTTAQ

SEQ ID NO: 187029 - protein, 141 aa, Zea mays
  Clone ID: MRT4577_102159C.1.pep
EVLPLADNFPGNSGLLTAAKEARYDKEALIKFFRMLIRRRYFSNELPAPSPWSLTPREDTILPVETVNDDDMFQRKSYGGQSYKYNGVTPLPAQRNLTPPPTLYPQQPMSSSSENYRYHRFSSSSIPDSSGGSKSRANLNI

SEQ ID NO: 187030 - protein, 248 aa, Zea mays
  Clone ID: MRT4577_10215C.1.pep
AAEDSLSRTEINVDVLKEARMFHFNSEVLLNPSMHDTLFRAIELSKKFGSKVFFDLNLPLPLWTSKDKTKEVINRAWKEAEIIEVSRDELEFLLDHEYYEYKRNTPPQYYLEGFHFTRNWPQYYHYSPEEIAPIWHDGIKILLVTYGTLRIHYYTPKFHGCVVGTEDALITPYTTDRTGSGDAIVAAAIRKLTTCPEMYEDQDTLERQLRFAVAAGIISQWTIGAVRGFPTESATQNLKEEVYVPSMW

SEQ ID NO: 187031 - protein, 92 aa, Zea mays
  Clone ID: MRT4577_102160C.1.pep
MASRCLAAASEAAVVFLIRPILAIVFVFTLILLGWYVAWTTVLVHVPLVQEIAGLRPKKPSKPKPANRGRVAKFYRNQAEAAQRNCKSEGAP

SEQ ID NO: 187032 - protein, 339 aa, Zea mays
  Clone ID: MRT4577_102161C.1.pep
MLFWKDGGGTGGGNGRDLSGGPPCGQVRVLVVGDSGVGKSSLVHLLLKDSAVARPAQTIGCAVGVKHITYSSPGSSSNSVKGDAERNFFVELWDVSGHERYKECRSLFYSQINGVIFVYDLSQRKTKTNLNKWAVEVSESGTFSAPLGSGGPGGLPVPYLVIANKVDIAPRDGRRVSSGNLVDVARQWVEKQGLLPSSEVLPLADNFPGNSGLLTAAKEARYDKEALIKFFRMLIRRRYFSNELPAPSPWSLTPREDTILPVETVNDDDMFQRKSYGGQSYKYNGVTPLPAQRNLTPPPTLYPQQPMSSSSENYRYHRFSSSSIPDSSGGSKSRANLNI

SEQ ID NO: 187033 - protein, 192 aa, Zea mays
  Clone ID: MRT4577_102162C.1.pep
LRFAASPTSTQVGTSLSCRHVKARLYPHRARRWPGAAAQLPSVSLLPCRRCGPEQPSIPIIFSQVAAVVHGKLSPTSTEGPPHAPLPRPSPVTVWPRLPATGRSSAPTSCPLFSLCLSFLPPIPLCLGGSNGKKSKQNGRTKQSVQTTKKNGSGGGVHSQQGSRQEKKRSKRRWLGGQKREQKICPFFLFTV

SEQ ID NO: 187034 - protein, 68 aa, Zea mays
  Clone ID: MRT4577_102163C.1.pep
YCYPSHRVARLWESHPPVNAQVVISSTAHESCLWGQGRFALHQLAGVFCVYMWRGRLLKQALAIFPVQ

SEQ ID NO: 187035 - protein, 183 aa, Zea mays
  unsure (1)..(183): unsure at all Xaa locations
  Clone ID: MRT4577_102164C.1.pep
MPIDFYYTPGSPPCRSVXLLTAKALGLELNLKTLDLHHGEHMKPEFIKINPQHCVPTLVDGDLALWESRAIIVYLAQAYGKDDSLFPKDPKKQALVNQRLQFDVSTLYPAFADQYYPWIFAGVPKSDDKEKKIHDALAFLEIFLGSSAWAAGDSVTVADIALVASISTIEAVGVDLSKYANIS

SEQ ID NO: 187036 - protein, 50 aa, Zea mays
  Clone ID: MRT4577_102165C.1.pep
VSVHVHLHITCNHIHHNLCDPHSNHSHNPSHNRQICVILCPTIIKVCIPL

SEQ ID NO: 187037 - protein, 61 aa, Zea mays
  Clone ID: MRT4577_102166C.1.pep
QFRDHNVHEDLEPEHKSKHHIDGESRRLGLQRQLQKLSVVAAVHRHYADSRRTPWVWYACA

SEQ ID NO: 187038 - protein, 78 aa, Zea mays
  Clone ID: MRT4577_102167C.1.pep
MASRVKEDERHEKIIRGLLKLPANKRCINCNNLVSMLLNVDRFVGHGARGQVGAVFSLVGFIRHNALLPRMTHTCHIR

SEQ ID NO: 187039 - protein, 87 aa, Zea mays
  Clone ID: MRT4577_102168C.1.pep
LGSTRSQLHGLSLWKISVALGVAPGKDLLSLLCDQRYWFDLGIKLAAVFFFPSPLSLSPCLMAIFRFQFHDGIRKGTCPEKKKKKSG

SEQ ID NO: 187040 - protein, 81 aa, Zea mays
  Clone ID: MRT4577_102169C.1.pep
PSLPIISLVCSMFAVRSSPPLSWVSVASVVVPELLALASELAQLVHLPLRQAAGPASARAPPASSPCPSTAYVARPLLYLV

SEQ ID NO: 187041 - protein, 126 aa, Zea mays
  unsure (1)..(126): unsure at all Xaa locations
  Clone ID: MRT4577_10216C.1.pep
QKKFREPSPKKGVLVPXFSPLGAMAPGWGPTPPMEKGPLENFPPRKAKPFPRGGLGGLPHQGVFFLARTFTKEGFNQNMDLFFWELSVHPKEKFLGFPQRKPSRPKFFLSPNGPYKPLGELWAGEI

SEQ ID NO: 187042 - protein, 50 aa, Zea mays
  Clone ID: MRT4577_102170C.1.pep
CLGAFIQMYFFLILENKFFPPPYRVFFFNFTFDFENKHAQNWTGPVYVPP

SEQ ID NO: 187043 - protein, 382 aa, Zea mays
  Clone ID: MRT4577_102171C.1.pep
MGGSSAMLAVLAVVVLAAVGGADAAAESSEASAKGRYHALFNFGDSLADAGNLIQNGTPDILATARLPYGQTYFGRATGRCSDGRLVIDHLAQEFGLPLLPPSKATNASFAYGANFAITGATALDTPYFEAKGLGAVIWNSGALMTQIQWFRDLKPFFCNTTQACKKFFAKALFVVGEFGGNDYNAPLFAGMGIPEVYKFMPDVIQGISDGIEALIAEGAVEMIVPGVMPTGCFPVYLNMLDEPKEGYGSRSGCVRRYNTFSWVHNAHLKAMLKKLRAKHPNVRIIYGDYYTPVVQFMLQPEKFGFAKQLPRACCGAPSTPEKAAYNFNVTAKCGEPGATACADPTTHWSWDGIHLTEAAYRHIAKGWLYGPFADQPIIQSS

SEQ ID NO: 187044 - protein, 70 aa, Zea mays
  unsure (1)..(70): unsure at all Xaa locations
  Clone ID: MRT4577_102172C.1.pep
AVACPSCGDAFPSEVAVSEHLDGCLASAGGARACASAYLAADPPPPAASVEVVKRLLGNLXAGGPRNDKV

SEQ ID NO: 187045 - protein, 378 aa, Zea mays
  Clone ID: MRT4577_102173C.1.pep
MGGRGAMLAVVLVVLAAVGAAAESMEAAAKGRYHALFNFGDSLADAGNLIQNGTPEILATARLPYGQTYFGKPTGRCSDGRLVIDHLAQEFGLPLLPPSKAKNASFAHGANFAITGATALDTPYFEAKGLGAVIWNSGALMTQIQWFRDLKPFFCNTTEACKKFFAKALFVVGEFGGNDYNAPLFAGMGIPEAYKFMPDVIQGISDGIEALIAEGAVEMIVPGVMPTGCFPVYLNMLDEPKEGYGPHSGCVRRYNTFSWVHNAHLKAMLEKLRAKHPNVRIIYGDYYTPVVQFMLQPEKFGFARQLPRACCGAPSTPERAAYNFNVTAKCGEPGATACADPTTHWSWDGIHLTEAAYRHIAKGWLYGPFADQPIIQSS

SEQ ID NO: 187046 - protein, 65 aa, Zea mays
  unsure (1)..(65): unsure at all Xaa locations
  Clone ID: MRT4577_102174C.1.pep
TDSWRSILLPLSSIPFFHASGPFLRDQVLXPPHPHGCFFFPLPPSNASRAPARVFPRTTSSTDEV

SEQ ID NO: 187047 - protein, 45 aa, Zea mays
  Clone ID: MRT4577_102175C.1.pep
HQINHNKFNGNPATRKEIPVQIQAQLMGLPCLNHTTIHDNRLQKQ

SEQ ID NO: 187048 - protein, 71 aa, Zea mays
  Clone ID: MRT4577_102176C.1.pep
MDMDGNSPRPPRRPEREGSYGYDIESMDGSGAGGPPPWSAHHNGSSEALLRYDDCGADRGSTQQPLLRNAP

SEQ ID NO: 187049 - protein, 73 aa, Zea mays
  unsure (1)..(73): unsure at all Xaa locations
  Clone ID: MRT4577_102177C.1.pep
QRLPFSVIDGVRPESLLXTPTVXPFYQRVAPHAGTLFXMQQWVPYKPLVLTPTAVFYLQPIVGGALFYISYER

SEQ ID NO: 187050 - protein, 52 aa, Zea mays
  Clone ID: MRT4577_102178C.1.pep
AGALPVDVYITGTGAAEGLYSSHLCYACECYCLSCVMRGTYNDSTASPTTTT

SEQ ID NO: 187051 - protein, 209 aa, Zea mays
  Clone ID: MRT4577_102179C.1.pep
GCASSGPAIMEAVAEFQLANWTPVDYASIDIPGGACGLQAYDYDVQLQHHLAEYYSAASQHNSNIVAKAAKISSNDDSDDASTSRSEVRKVVDRFKADMEMMKEKMHRYPACLGAVDKSYTVPRIVAIGPYHCGMEHLKKAEEVKQVAAWQCTGTGKLLKEMYEELIPVADAAYDLYDKDAIQGVAEDDFRHMMFFDACFLVQFMLSRA

SEQ ID NO: 187052 - protein, 69 aa, Zea mays
  Clone ID: MRT4577_10217C.1.pep
NSVGGLKHMYKLMAATQPDGKDKLTLMGTTTPAQIIDTTITYHERVPQKPTKSCENILQCVLTNKPYNR

SEQ ID NO: 187053 - protein, 117 aa, Zea mays
  unsure (1)..(117): unsure at all Xaa locations
  Clone ID: MRT4577_102180C.1.pep
AAPIEXXAEXXLEGXAPESIGXXGQXXXRXAVARSQARANRXRSRHGGAXRPXXRSXPRKSRXXXVEXXXXGSXHAXXGWPPFDPLGTRHKASIRAWSTREHSGXSGEEWRTAWVXP

SEQ ID NO: 187054 - protein, 82 aa, Zea mays
  Clone ID: MRT4577_102181C.1.pep
CCSFILSFKCSRLCTHVRWGTNYVYTIKRRIEYCCEPHIIRSEFQPQETNMPGGRLRPRYTEEPVDMGLFISESADAMQSSV

SEQ ID NO: 187055 - protein, 54 aa, Zea mays
  unsure (1)..(54): unsure at all Xaa locations
  Clone ID: MRT4577_102182C.1.pep
MVALRPSCKLLICISGARGFIGSHIARSLKNEVHYIIASDWKKNEFIIXDLFLH

SEQ ID NO: 187056 - protein, 65 aa, Zea mays
  Clone ID: MRT4577_102183C.1.pep
MAKSKNSSQHNQSRKAHRNGIKKPKTSRYPSLKGTDPKFRRNHRHALHGNMKALKEAKEGKREVV

SEQ ID NO: 187057 - protein, 74 aa, Zea mays
  Clone ID: MRT4577_102184C.1.pep
ASSVLHDIFLFTHWDPHNSYFLLFSKFYNSFWILNSTFDFNIFLATFIILFCHHVHTKENPSMMQNFNGIYSFY

SEQ ID NO: 187058 - protein, 53 aa, Zea mays
  Clone ID: MRT4577_102185C.1.pep
VRTISSPASLFFLLYNVVVLTILFYIISLSIYILQCCVGLILSKYGRVLSILS

SEQ ID NO: 187059 - protein, 61 aa, Zea mays
  Clone ID: MRT4577_102186C.1.pep
ARILYSGRPLFFRFYFYLFFCLYVFLSSFTKAQFNDHYLFQRLVHSRNKYPDKIFSRIFPV

SEQ ID NO: 187060 - protein, 56 aa, Zea mays
  Clone ID: MRT4577_102187C.1.pep
MRPLALLVLAHLAALAAAAEAKGGVAGAGLGDDVLGLIVFKADVSDPDGRLATWSE

SEQ ID NO: 187061 - protein, 207 aa, Zea mays
  unsure (1)..(207): unsure at all Xaa locations
  Clone ID: MRT4577_102188C.1.pep
VXMRQVERTVHHLLRRGMSMTEPSCPYHASIYGAFQERATFVSHARTARRAALHGDACLAKLCGVIAGDEKRHEVAYTRVVARSFEADPDGVVRALAAVMRAKVTMPGERMTDGRDDSLFDHFSAVAQRAGVYTAADYGDMVEHFVRTWRVAGLQGLSGEGRRAQDYVCGLPRKIRRMEELAHDRAAQKEAQSVSISWVFDRPVRLH

SEQ ID NO: 187062 - protein, 105 aa, Zea mays
  Clone ID: MRT4577_102189C.1.pep
SKEAHVPGGFRGGSSPQNPKKALAKETAPLKIPPHTFATTRLTGSWVLSPPPKGIPRPGRTPKQASLTSFTKIQDPPPPQGGPKKKKPNPGNRKSSTFCSSGKTD

SEQ ID NO: 187063 - protein, 37 aa, Zea mays
  unsure (1)..(37): unsure at all Xaa locations
  Clone ID: MRT4577_10218C.1.pep
AESNAXSDLFRHSFPVPCMCLYSSFLNPQSQCLPHNI

SEQ ID NO: 187064 - protein, 309 aa, Zea mays
  unsure (1)..(309): unsure at all Xaa locations
  Clone ID: MRT4577_102190C.1.pep
MGMGPLENAASAAESAALPEAGAASAAGSYAVLQCGEDSEYVRQKYGGYFAVFRALLEEDGESWRVYRAVGGELPTDAEAAGFDGFVISGSCSDAHGDEPWILDLVGLIRRLHAAGKRILGVCFGHQXVYCTQILCRALGGRTGRSTKGWDIGVGCIHPTAAAARLFAPLKLPVHMPVIEFHHDEVWELPAGAEVLARSDQTRVEMFRLGDRAMGVQGHPEYSKDILMSIADRLFRHNHILXVVSQSQSYITSVQRVLEFKVSSCFGVXDCQVDVAKASFDVRQPXKELWKKVCRGFLKGRLQSHSQFH

SEQ ID NO: 187065 - protein, 57 aa, Zea mays
  Clone ID: MRT4577_102191C.1.pep
RQYPLECAASASVVSLRLHANLTKYLPSGPVKKKKRRVLEKVQLRGVGGLPPKKGPP

SEQ ID NO: 187066 - protein, 276 aa, Zea mays
  Clone ID: MRT4577_102192C.1.pep
MGMGPLENAASAAAESAALPEAGAASAAGSYAVLQCGEDSEYVRQKYGGYFAVFRALLEEDGESWRVYGAVRGELPTDAEAAGFDGFVISGSCSDAHGDEPWILDLVGLIRRLHAAGKRILGVCFGHQILCRALGGRTGRSTKGWDIGVSCIHPTAAAARLIAPLKLTVHMPVIEFHQDEVWELPPGAEALARSDKTRVEMFRLGARAMGVQGHPEYSKDVLMSIADRLLRHNHILDCQVEVAKTSFDVRQPDKELWSKVCRGFLKGRLQSQQQFH

SEQ ID NO: 187067 - protein, 68 aa, Zea mays
  unsure (1)..(68): unsure at all Xaa locations
  Clone ID: MRT4577_102193C.1.pep
LVDATATFAPVHNPAGWPIRHRLMLLCSLRLPGRAEEPPPLHGTMLAVPQTARRRHRHLXGTKVTCRY

SEQ ID NO: 187068 - protein, 40 aa, Zea mays
  Clone ID: MRT4577_102194C.1.pep
WCSCAGSSDCADCELNTSETTKLKMYCYRSITSFASPRLV

SEQ ID NO: 187069 - protein, 171 aa, Zea mays
  Clone ID: MRT4577_102195C.1.pep
LFFEFLHFLKTQMGVLSNYLWGSKTPEYTHTEAYLLTSKTLTFFRLFSLFASVGIYFWCMGLHLPTIQFLTIWGVTLVPIYFVCVCACYFIYKESKIKSETSYALWKLTIILCEVAFSLQVLIPPYYWYFLHPEGLGPEKGAEFWNTFCSHFVVAALNLGGGSLEQNQILS

SEQ ID NO: 187070 - protein, 67 aa, Zea mays
  Clone ID: MRT4577_102196C.1.pep
SPTTLSCSSNLQLRPPSLPSELTYPPATHLPFIAFLYPAPFSSSSLLFFYLSFFFFFSFFFFFFFFF

SEQ ID NO: 187071 - protein, 113 aa, Zea mays
  Clone ID: MRT4577_102197C.1.pep
TLLRHPTRIENELPSVPSLSLPEAQVPFISGAANDRDAGYAHATLKAPMVMKEIFIGLTLDLIAGGMWKTHHCNEQKKTRSFYNMLDKDQISGSVQEYLPRAYSEIFFFQECI

SEQ ID NO: 187072 - protein, 124 aa, Zea mays
  Clone ID: MRT4577_102198C.1.pep
SPVLLVKKKDQTWRFCIDYRYLNALTVKSKYPVPVFDQLIDELSNSKWFSKLDVKAGYHQILLRPGEEYKTAFQTHVGHFDFRVMAFGLTGAPNTFLSAMNDTLQPVLRKSAIVFFDDILVYSL

SEQ ID NO: 187073 - protein, 171 aa, Zea mays
  unsure (1)..(171): unsure at all Xaa locations
  Clone ID: MRT4577_102199C.1.pep
GEHDDDYKRCLHAMRYMNRELQRCDPWNHCDAGPLKTCFFYTTXREELFLDLPTGIDPPALYRMLXHYINFNQXMPLIHVKXLYAYQVCRGFTYFHTVPGVCHKDXVEPQNXLLDDPLTHQVKISDYGTCQKVGQKSEANISYICXSPYYRAXPANILGQLGYTTSIDILA

SEQ ID NO: 187074 - protein, 129 aa, Zea mays
  unsure (1)..(129): unsure at all Xaa locations
  Clone ID: MRT4577_10219C.1.pep
KHRFTCFSCIQHQIFGGGGKGPNSSLDEVPMGQQQPKGSTSPNLLREKQYDNLVGHIGSRCKKRMIPFRAENGSLQDRVYLSINKPQFGKLEGGLFVVIKKSLLMPRIFFDKRGGKQGXLKRGFCHLGS

SEQ ID NO: 187075 - protein, 161 aa, Zea mays
  unsure (1)..(161): unsure at all Xaa locations
  Clone ID: MRT4577_1021C.1.pep
KTPGVFTADFPAHPPVQFDYTAQNVSQALWQPVPATKLYPLRFGSVVQLVLQDTSIVTPENHPXHIHGYDFFILAEGFGNFEPEKDVDKFNYVDPPQRNTVAVPVNGWAVIQFVADNPGVWLMHCHLDVHITWGLAMAFLVEDGYGELQSLEPPPVDLPMC

SEQ ID NO: 187076 - protein, 76 aa, Zea mays
  Clone ID: MRT4577_102200C.1.pep
MATTAPLGLLLPLVLLLLQEEGSSPKDHKEETKVIPLCDPIAGSRNNNGVHTLRKANHPAYCRNMLNQEATARYSN

SEQ ID NO: 187077 - protein, 172 aa, Zea mays
  Clone ID: MRT4577_102201C.1.pep
MANPRVFFDMTVGGAPAGRIVMELYANEVPKTAENFRALCTGEKGVGKSGKPLHYKGSTFHRVIPEFMCQGGDFTRGNGTGGESIYGEKFPDEKFVRKHTAPGVLSMANAGPNTNGSQFFICTVATPWLDGKHVVFGQVVEGMDVVKAIEKVGTRNGSTSKVVKVADCGQLS

SEQ ID NO: 187078 - protein, 45 aa, Zea mays
  Clone ID: MRT4577_102202C.1.pep
YCLLIHITTQVILNIPNLHHRSEPISTIITYQLPFRNHLKTILTL

SEQ ID NO: 187079 - protein, 134 aa, Zea mays
  unsure (1)..(134): unsure at all Xaa locations
  Clone ID: MRT4577_102203C.1.pep
QRAPTFHRVIPEFMCQGGXFTRGNGTGGESIYGEKFPDEXFVRKHNRXXGVLSXMANAGPNTNGSQFFICTVATPWLDGXHVVFGQVVRHGTSSRHREGGTRLRTALLDLSDLGLFGRPPSVIVDSPCVRSFGS

SEQ ID NO: 187080 - protein, 137 aa, Zea mays
  Clone ID: MRT4577_102204C.1.pep
MANPRVFFDMTVGGAPAGRIVMELYANEVPKTAENFRALCTGEKGVGKSGKPLHYKGSTFHRVIPEFMCQGGDFTRGNGTGGESIYGEKFPDEKFVRKHTAPGVLSMANAGPNTNSSPSSSTPPASVPLDLNKMVVI

SEQ ID NO: 187081 - protein, 32 aa, Zea mays
  Clone ID: MRT4577_102205C.1.pep
KYALRINPKRSIGKNCVMLDINLKIIIIYVVL

SEQ ID NO: 187082 - protein, 158 aa, Zea mays
  Clone ID: MRT4577_102206C.1.pep
MANPRVFFDMTVGGAPAGRIVMELYTNEVPKTAENFRALCTGEKGVGKSGKPLHYKGSTFHRVIPEFMCQGGDFTRGNGTGGESIYGEKFPDEKFVRKHTNGSQFFICTVATPWLDGKHVVFGQVVRGMDVVKAIEKVGTRNGSTSKVVKAADCGQLS

SEQ ID NO: 187083 - protein, 93 aa, Zea mays
  Clone ID: MRT4577_102207C.1.pep
NFALWVTTLVYWITLCIVQILHIARLQIAQVGDGLLGQARNNLLLLVLPPKIVFPTNHRLVRHSDEDTRSKHRPRLLERRFARGIWYKTYYVR

SEQ ID NO: 187084 - protein, 45 aa, Zea mays
  Clone ID: MRT4577_102208C.1.pep
RVSTVADGNVKCSLGLDARKKRTRFCNSQLGLGVRHVNRWGFASY

SEQ ID NO: 187085 - protein, 172 aa, Zea mays
  Clone ID: MRT4577_102209C.1.pep
MANPRVFFDMTVGGAAAGRIVMELYANEVPKTAENFRALCTGEKGVGKSGKPLHYKGSTFHRVIPQFMCQGGDFTRGNGTGGESIYGDKFPDEKFVRNHTAPGVLSMANAGPNTNGSQFFICTVDTPWLDGKHVVFGQVVEGMDVVKAIEKVGSRSGSTSKEVKIADCGQLS

SEQ ID NO: 187086 - protein, 437 aa, Zea mays
  unsure (1)..(437): unsure at all Xaa locations
  Clone ID: MRT4577_10220C.1.pep
MEGNDVPLGNMLQGVPYESLDLRGSSMQNYAPNSGKHIFSSSQMPGTFTMSMTRATEPDDFPGFQFKEQGKSDDHHHQHHSHHSKNCKSDGEEHVVAEDATDTPSGKGKKGSAWHRMKWTDSMVKLLITAVSYTGDDHGADSGGGRRNFTIMQKKGKWKAISKVMGERGCHVSPQQCEDKFNDLNKRYKRLTDILGRGTACNVVANPALLDSMTHLSDKMKDDAKKILSSKHLFYEEMCSYHNNNRVNLPEDHALQHSLLLALRCKEEHDPQRDPSGDADEYDQSADSDYEENDDDQHPVHINMREPSMHKRKRHSDVALXSHQVLMKAVRGLIPMLSQXDINKAFTDATNMVLLQQDLASQAIEIQKRRLQIEAKELELTKQRLKWERFRKKKDREIERIALENEHMMIENKRLELELRHKELELELKLKDKGNHP

SEQ ID NO: 187087 - protein, 131 aa, Zea mays
  unsure (1)..(131): unsure at all Xaa locations
  Clone ID: MRT4577_102210C.1.pep
VQCLSVHIRQAGIQDGNSCWELYCLQHGILPDDQVPAHNTARHHDDAFSTXYFSQTGAEXDPRAIFXDLQPTVIDDVRTRTYRQLFHPDQLISGKHDAANNFPRDHYSIGXEIDDLCHDRIRKIADNCTVL

SEQ ID NO: 187088 - protein, 70 aa, Zea mays
  Clone ID: MRT4577_102211C.1.pep
MTEGGRPNRPDQRDLGELSAVSDLDHLGGGAVAGAHLVEGMDVVKAIEKVGPRKGSPSKVVKVADCGQLP

SEQ ID NO: 187089 - protein, 144 aa, Zea mays
  unsure (1)..(144): unsure at all Xaa locations
  Clone ID: MRT4577_102212C.1.pep
ISSSVCSFIEVLSVWSDLMVVSMYVFAQSVSSCFELLWRSLLDVEXRRGTSPCVGQFIGSPYTGRDGWTRRLVDGEHCQAAGRRLHSLRSARWEASQPSQMGAWHPRGDSVGNRSPTGQRTRASKQHAAMLAPCWLASKGQMGV

SEQ ID NO: 187090 - protein, 60 aa, Zea mays
  Clone ID: MRT4577_102213C.1.pep
QEPGLFNNVIEETASRLVAEARKSKVKALVGAFETVISLQETSKAAAAAAAPTMAAGVVP

SEQ ID NO: 187091 - protein, 171 aa, Zea mays
  Clone ID: MRT4577_102214C.1.pep
MANPRVFFDMTVGGAPAGRIVMELYANEVPKTAENFRALCTGEKGVGKSGKPLHYKGSTFHRVIPQFMCQGGDFTRGNGTGGESIYGEKFPDEKFVRKHTGPGVLSMANAGPNTNGSQFFICTVETPWLDGKHVVFGQVVEGMEVVKAIEKVGSRSGATSKEVKVADCGQL

SEQ ID NO: 187092 - protein, 131 aa, Zea mays
  Clone ID: MRT4577_102215C.1.pep
PGGPPRVPHPNVRVFPPPSPHGPLGTGPLMGWVLLPAPPIWFRNGGGGVALKSAALNHMYFFPGRGCFPLNKLGASRFLGAQGGALLLGVPPWGGAHFLNPWDGPPLLRAPGWAPPYICFYTRLNLGFFFP

SEQ ID NO: 187093 - protein, 172 aa, Zea mays; identical to SEQ ID NO: 187077
  Clone ID: MRT4577_102216C.1.pep

SEQ ID NO: 187094 - protein, 98 aa, Zea mays
  Clone ID: MRT4577_102217C.1.pep
GGKTILQKNPGPPFGIRVWVGPPIAPFRGGHFFMGQTFWSFGRPKKGAYGHINKPLRFSKPGVTLGFGIWESPPISFRLAGTVLLHGGGSPFIGAFKG

SEQ ID NO: 187095 - protein, 173 aa, Zea mays
  unsure (1)..(173): unsure at all Xaa locations
  Clone ID: MRT4577_102218C.1.pep
MANPRVFFDMTVGGAPAGRIVMELYANEVPKTAENFRALCTGEKGVGKSGKPLHYKGSTFHRVIPEFMCQGGDFTRGNGTGGESIYGEKFPDEKFVRKHTAPXGVLSMANAGPNTNGSQFFICTVATPWLDGKHVVFGQVVEGMDVVKAIEKVGTRNGSTSKVVKVADCGQLS

SEQ ID NO: 187096 - protein, 135 aa, Zea mays
  unsure (1)..(135): unsure at all Xaa locations
  Clone ID: MRT4577_102219C.1.pep
QSSLTKVDHLRPVTHGHNHILKVVDCKMGGQIGREGGGPHGIQMRIAECLIADGTGIMXFTARYDQLXRIMPATTVELMNAXIDMFKASMRLAEDKWXIAKAAESSSDWTGKEDNNLPLIXHELVTDDGLKTAIA

SEQ ID NO: 187097 - protein, 234 aa, Zea mays
  unsure (1)..(234): unsure at all Xaa locations
  Clone ID: MRT4577_10221C.1.pep
MAATTNPLHGTPRSSQRPVSSHTFTIAGILVDVHGLDEIPASASSAACLWLLNPRLQTKETMEPIANRVITEWNKRIQEGRAGKNPKGLIAAAFDQRNHGSRKVDELHNQAWREGNERHAQDMFGCYHGTATDTSQLINHLESYIFTAPDAPKITHHYALGISLGGHATWHCLLGDPRITAGVVGIGCPDYTRLMTDRARLSKRESYXRTTPXGAAFXGSPDFPQALQDAIAQY

SEQ ID NO: 187098 - protein, 48 aa, Zea mays
  Clone ID: MRT4577_102220C.1.pep
LLYFLPKYVHFYQVNHQNREKYLGPIELITNIRTIGFILSVGRLPTEK

SEQ ID NO: 187099 - protein, 153 aa, Zea mays
  Clone ID: MRT4577_102221C.1.pep
KETFYTSQKDVPMNPKDPWDLEMDFDDSLTPEVPIVLVPDVDAMETESVGAAPSAVAPVKDKQIESTSSTSGAVADDEEANTDYELLTVLLRNPELVFALTSNNGENMPNEQTIALLDTLKQTRLSLSELVNRLGNGAGLPKEPEPEPEPIPA

SEQ ID NO: 187100 - protein, 36 aa, Zea mays
  unsure (1)..(36): unsure at all Xaa locations
  Clone ID: MRT4577_102222C.1.pep
DISPPVAHLAVESQPSDGMASFXSYPKDAQEGLLLL

SEQ ID NO: 187101 - protein, 52 aa, Zea mays
  Clone ID: MRT4577_102223C.1.pep
CCICCLPAYYYRYGPPGNLAQARQTRDTQTTCQTACVPTNRPPNEAIPRTSP

SEQ ID NO: 187102 - protein, 44 aa, Zea mays
  Clone ID: MRT4577_102224C.1.pep
VIRLECASTSPLSLRVQPGATRSALDPRRRFYPDKAYTSIIINQ

SEQ ID NO: 187103 - protein, 72 aa, Zea mays
  Clone ID: MRT4577_102225C.1.pep
MVMNANSYGKAFIADKKYGSEVPYTSDKEHEPPLLIADKKDGVTEASSATYNDVYQPRRASSAQTASKCVIL

SEQ ID NO: 187104 - protein, 70 aa, Zea mays
  unsure (1)..(70): unsure at all Xaa locations
  Clone ID: MRT4577_102226C.1.pep
LTRVRSGVWTDFFARFXVMYRFLCVYLSHSPXXFSXXXXYXRXXXXXLVFYVVWKWMRKAQALQLQIGXV

SEQ ID NO: 187105 - protein, 71 aa, Zea mays
  unsure (1)..(71): unsure at all Xaa locations
  Clone ID: MRT4577_102227C.1.pep
LSLLYSLSFLSPKSSVEGFASWSDMMTVASPGGIRTAAASGKQNLAPECTNPSPFPTAQHRGCSNXPYASR

SEQ ID NO: 187106 - protein, 31 aa, Zea mays
  Clone ID: MRT4577_102228C.1.pep
IKQGVGNSVNNKTLLHNITAINVSLHLNRIN

SEQ ID NO: 187107 - protein, 193 aa, Zea mays
  unsure (1)..(193): unsure at all Xaa locations
  Clone ID: MRT4577_102229C.1.pep
LFSGLRALAPLLARRPSPTAPGRSSLLSSSCAAPSSLLSSSVCARPYPLLLRVATSLPSSPASPWHGRLRPPSPPSPAGAHRPRPRVVGPLQRRSSLTEPWSLYLCSTTTSPQPLWGLVISRVLLWAHASLLEHQSEFGSSAAVLLSFLLHMFGPSMSTYSVVASRASTCPSHRRRPAWPLLCPCGAXARRRL

SEQ ID NO: 187108 - protein, 54 aa, Zea mays
  Clone ID: MRT4577_10222C.1.pep
FFYMSLHYRAGSTHCHAMITSIIPINTTLSTSKFHLSSTTTNLLTHFKINVLQQ

SEQ ID NO: 187109 - protein, 38 aa, Zea mays
  Clone ID: MRT4577_102230C.1.pep
DTGFPRLSQSIIHYETITSRFDSCNGPHCEPESIPGGL

SEQ ID NO: 187110 - protein, 134 aa, Zea mays
  Clone ID: MRT4577_102231C.1.pep
MTGGKSGGKASGSKSSAQSRSSKAGLAFPVGRVHRLLRKGNYAQRVGAGAPVYLAAVLEYLAAEILELAGNAARDNKKTRIIPRHLQLAIRNDEELNKLLGHVTIAQGGVLPNIHQNLLPKKTAKPGKGPSQEL

SEQ ID NO: 187111 - protein, 70 aa, Zea mays
  Clone ID: MRT4577_102232C.1.pep
TSVPFGGRACSSVARDGAAWMSLSISSMSVSSDDWWSAFCASVVVRHDRGASVKRASRASAYGSCILMCL

SEQ ID NO: 187112 - protein, 167 aa, Zea mays
  Clone ID: MRT4577_102233C.1.pep
LHALQLFAFTWAARLVLSGVATCLLLTRLLSQLTRLFSHLFNITSFANSNSSRSSKAGLAFPVGRVHRLLRKGNYAQRVGAGAPVYLAAVLEYLAAEILELAGNAARDNKKTRIIPRHLQLAIRNDEELNKLLGHVTIAQGGVLPNIHQNLLPKKTAKPGKGPSQEL

SEQ ID NO: 187113 - protein, 220 aa, Zea mays
  unsure (1)..(220): unsure at all Xaa locations
  Clone ID: MRT4577_102234C.1.pep
MAFRRILSTAVRRRSAVAAAAAGNAREASTAVAAAPGVLAPDATAVRAPVMPYDRIAEAVNARLRRLEHPDPRFLRYASPVPSHADHMAILAAPETRVTTLPNGLRIATESSLAARTATVGVWIDAGSRYENEEAVGVAHFVEHMLFKGTGKRSAAQLELEIEDMGGHLNAYTSREQTTYYAKVLDKDVPRAMEVLSDILQNSNLDQARIXREREVILPE

SEQ ID NO: 187114 - protein, 52 aa, Zea mays
  Clone ID: MRT4577_102235C.1.pep
YSIPSHLISVHIQISSHTLTGKGNHGHSHSVVLTPSPVFPFDDFDFERTASD

SEQ ID NO: 187115 - protein, 598 aa, Zea mays
  Clone ID: MRT4577_102236C.1.pep
MHSEDDRGKILYAHGAPSASPSVLGNQAQASFHRYSSCPISSRSIRAQTLVQPDLHRRRREHGIRSAAMAFRRILSTAVRRRSAIAAAASGNAREASTAVAAAPGVLAPDATPVRAPVMPYDRIAEAVNARLRRLEHPDPRFLRYASPVPSHADHTAILAAPETRVTTLPNGLRVATESSLAARTATVGVWIDAGSRYENEEAAGVAHFVEHMLFKGTGKRSAAQLEQEIEDMGGHLNAYTSREQTTYYAKVLDKDVPRAMEVLADILQNSNLDQARIEREREVILREMEEVEGQSEEVIFDHLHATAFQYTSLGRPILGSADNVKSITKEDLENYIATHYTASRMVITAAGNVKHEDIVEQAKKLFSKLSTDPTTTNMLVSKQPASFTGSEVRIIDDDMPLAQFAVAFNGASWVDPDSVALMVMQTMLGSWNKSAGGGKHMGSELVQRAAINDIAESVMGFNTNYKDTGLFGVYAVAKADCLDDLAFAIMHEMSKLSYRVTEEDVIRARNQLKSSIQLHLDGSTAVVEDIGRQLLTYGRRIPTPELFARIDAVDASTVKRVANRFIFDQDVAIAAMGPIQGLPDYNWFRRRTYMLRY

SEQ ID NO: 187116 - protein, 214 aa, Zea mays
  Clone ID: MRT4577_102237C.1.pep
MAFRRILSTAVRRRSAVAAAAAGNAREASTAVAAAPGVLAPDATAVRAPVMPYDRIAEAVNARLRRLEHPDPRFLRYASPVPSHADHMAILAAPETRVTTLPNGLRIATESSLAARTATVGVWIDAGSRYENEEAVGVAHFVEHMLFKGTGKRSAAQLELEIEDMGGHLNAYTSREQTTYYAKVLDKDVPRAMEALSDILQNSNLDQARIERER

SEQ ID NO: 187117 - protein, 267 aa, Zea mays
  Clone ID: MRT4577_102238C.1.pep
RPTLRFMRYWGKRRGVYSNVMGFLGGINWAILVARICQLYPNASPSMLISRFFRVYSQWKWPNPVTLCHIEEGPLGLPVWDPRRNFRDRGHQMPIITPAYPCMNSSYNVSTSTRYVMVQEFTRGYEICQAIDENRATWDDLFEPYPFFELYKNYLEVGITARNEDDLRNWKGWVESRLRTLVLKFERYTHEMLLAHPHPRDFSDGSRPLHSFYFMGLWRKQTAQPQEAEQFDIRGIVNEFKSAVLAYAHRREGMDIEVSHVKRKDIP

SEQ ID NO: 187118 - protein, 82 aa, Zea mays
  Clone ID: MRT4577_102239C.1.pep
NLLCPQGFIPPYDIPPFCLLAKNWDMSPPEAYKWNSVGKMSVGCSISLLRYWLEIKVIQAPPMFVSKKKKKKKKKKKKKPPP

SEQ ID NO: 187119 - protein, 37 aa, Zea mays
  Clone ID: MRT4577_10223C.1.pep
IRLELIRTGRSLTVRLRQLSVFLDARSSLWRQEQTTA

SEQ ID NO: 187120 - protein, 136 aa, Zea mays
  Clone ID: MRT4577_102240C.1.pep
WFNARRPTNLGDFTAPVELLQIFPLQSSVRGNDVGPQMGPYNSKFSPGMHALIDLLSAVEDSVSYAPNILGLSTRALSRLILADDSLRTAANELRASKGTGAVLRAPDVARQSAHGLLRQPLGRCSSRIQQPSWRV

SEQ ID NO: 187121 - protein, 143 aa, Zea mays
  Clone ID: MRT4577_102241C.1.pep
DDIKNPLREHFSSCEEIKNVSVPIDRDTGNSKGIAYLEFSEGKEKALELNGSDMGGGFYLVVDEPRPRGDSSGGGGFGRGNGRFGSGGGRGRDGGRGRFGSGGGRGRDGGRGRFGSGGGRGSDRGRGRPSFTPQGKKTTFGDE

SEQ ID NO: 187122 - protein, 93 aa, Zea mays
  Clone ID: MRT4577_102242C.1.pep
NHLPSKTSELAPIDESSTLNISVSSKRTLTSDSSTPTRTHLDDQRHELRLDHIRKHGHHCTDLYHFIVFNCCFGPTCTTRASLLLHSRGSDYL

SEQ ID NO: 187123 - protein, 586 aa, Zea mays
  Clone ID: MRT4577_102243C.1.pep
VCDKVNEQHGRHLPIMNGIKEDIKTLLTLELGSPLFHEVLVNLLVRLKALQQITYHENDEGDHSPCYQRRKSIPSVFKWKSLSLFVLGDGFVSFGLPAGGFKVLSLADRVFRFTVSSKDVGFHIYNSRCIVRPEFKAFFNLWNSGGPNWNYEFRLFLQEEKANWWGRLTSWTSGPGSALPPGSLTGGTPPTFACFGEFARAVLLKIYEQAPETSLELSLGVTSPKPQTAPLLLALRRPSENLSMAYQRVDPEPFLPPGFSASVVQHRGIMVRSVSQRLPPMHEDWAVINIHPLPEHEVLFPAVRDVVREYLVEHRRVGVRAIQRSHLGQVIVQFRSVLERDNLVLLGPQQYLDATFTAAEGFAGDSWTVQCEIIQQLMLGGQAQDEDPIPPAPEDGHQLPLVFFGLGQPLPPAGLDLNFPPEPAGGELPAQQDDFGQGDWDQWIVNDQPNQQVPQPILPEEQPIQQEELQLGNQHSGLSSDSSIGAGQLVPLPNGHFVENGHVLLGDGFDINAVPFIGPQEVDGPVPQVDHVHDMEDLPHQAHVGEPNNNHLQNLEMNFMLSQEWQPDPVFQMFEERKRSAQFSRL

SEQ ID NO: 187124 - protein, 95 aa, Zea mays
  unsure (1)..(95): unsure at all Xaa locations
  Clone ID: MRT4577_102244C.1.pep
QSLPPNPVPIQTPCPFVPVRLARPNQPARNSIAGKPPRNHLPTKRGPNVARDTGRLKNXHRFRPGTVSLREIRKYQKSTELLIRKLPFQRLVREI

SEQ ID NO: 187125 - protein, 294 aa, Zea mays
  unsure (1)..(294): unsure at all Xaa locations
  Clone ID: MRT4577_102245C.1.pep
MEVAGAREPGSGGGGGGGGGGPAPFLLKTYEMVDDPSSDAVVSWSDASDGSFVVWNQPEFAARMLPTYFKHNNFSSFIRQLNTYGFRKIDPERWEFANEYFVKGQKHLLKNIHRRKPIHSHSHQPGALPDNERALFEDEIDRLSREKAALQADLWKFNQQQSGAVNQLEDLERRVLDMEQRQTKMLSFLQQARKNPQFVRKLVKMAEESPIFADAFHKKRRLPGLECITDATGTATSFFDDHSSSSRQEMGNLLNQHFSDKLKLGLCPAXGGNNLITLSTQSSHEDNGSPLGKH

SEQ ID NO: 187126 - protein, 34 aa, Zea mays
  Clone ID: MRT4577_102246C.1.pep
IPRVIASFAPYPLASAPLRPSHNASTVPRRISRV

SEQ ID NO: 187127 - protein, 88 aa, Zea mays
  Clone ID: MRT4577_102247C.1.pep
YAHLGLTRPTPLLTILSTARSGTRCRWRLGAAGRKTAMETSKKIKEQACHGEARGQQSTGRENDAGKREIARRLEIRERRTLLGERSA

SEQ ID NO: 187128 - protein, 133 aa, Zea mays
  Clone ID: MRT4577_102248C.1.pep
AIGILEAGRDECELSLSLSIYDPSAVSRDSPLLSSDERPEIVLRSSLFLLALFLHCAPLAPPGRQNQSHRRRPEEKRSMDYFCSYWMNLRMNMDWKGCYESSKISLLSMLELYETPASQGKRPATKSDQPSAT

SEQ ID NO: 187129 - protein, 79 aa, Zea mays
  unsure (1)..(79): unsure at all Xaa locations
  Clone ID: MRT4577_102249C.1.pep
FNKQMQAKKTRDFSGGWRMKIAFARTLFMNTTILLVDEPTNHLELXSGGWWEKTLKKFCRVLVWISHSQDFFHGGCTNI

SEQ ID NO: 187130 - protein, 40 aa, Zea mays
  Clone ID: MRT4577_10224C.1.pep
RVLLPLRDAGPIDRFIERPKLARARCCCSWYESGTVWCTY

SEQ ID NO: 187131 - protein, 107 aa, Zea mays
  Clone ID: MRT4577_102250C.1.pep
NPIFGGSPKLKGHAFQKNSKGETPPFTIMASSRNIPFKAQPLKKAPPPQYGPPKKTKFFFEPKYPFTPPFVIYPPINIVIKLKKSTAPETFPQKLCPPKQKKGPPKN

SEQ ID NO: 187132 - protein, 72 aa, Zea mays
  Clone ID: MRT4577_102251C.1.pep
SARALLGHRFDLRDRVTIDVLDDLKLGAILPHTNGLDSTHDRSTVLYRLQRQVYGVRPAISSYTHLGTGGQV

SEQ ID NO: 187133 - protein, 181 aa, Zea mays
  unsure (1)..(181): unsure at all Xaa locations
  Clone ID: MRT4577_102252C.1.pep
TSVRFGCVLLSEANVQKLKKKKKKKKKKKKKKKKKKKKKKKKKKKKKGFLSKRKKKERXKKKKKKRGPKPKVLVPLKKGKCPPGRKKGEKVTRGKNGKRKKIQKKKKPETKKGKPGGPKKGAKPKKMGWAKGPFLKWKNRWGQMNKKRAKPRGKGVLKMGNFSVTRLRKSMAKGFDLGRGF

SEQ ID NO: 187134 - protein, 44 aa, Zea mays
  unsure (1)..(44): unsure at all Xaa locations
  Clone ID: MRT4577_102253C.1.pep
TPYYSEIALYNLAXLQKKNEDGLTSLFYLQKIYPYEWKNFSYLY

SEQ ID NO: 187135 - protein, 187 aa, Zea mays
  unsure (1)..(187): unsure at all Xaa locations
  Clone ID: MRT4577_102254C.1.pep
MSAAAGGSSSSSTSAPRLEGKVALVTGGASGIGEAIVRLFRQHGAKVCIADVQDEAGQQLRDSLGGDPDVLFVHRDVTVEEDISRAVDATAEKFGTLDIMVNNAGITGDKVTDIRNLDFADVKKVFDINVHGMLLGMKHAARVMIPSKKGSIVSLASVASVIGGMXPHAYTASKHAVVGLTKSVALE

SEQ ID NO: 187136 - protein, 77 aa, Zea mays
  unsure (1)..(77): unsure at all Xaa locations
  Clone ID: MRT4577_102255C.1.pep
CVTFYVNYYFSFFYIYLWVRXGEYLSNHHYVVWGGGTPHALGGYLFTWYLPGRPLLWVISAHXHGTGGRSGVRLGGP

SEQ ID NO: 187137 - protein, 98 aa, Zea mays
  Clone ID: MRT4577_102256C.1.pep
ILFGGFEGPPPPHVTVPVLCKGNLLFSIIITPLWALCKTCFPPVWGGPTGSFWGLKKGGRFSPPPHCKVALGGLALRFVRKREGKIYRFCFGHVLWFA

SEQ ID NO: 187138 - protein, 58 aa, Zea mays
  unsure (1)..(58): unsure at all Xaa locations
  Clone ID: MRT4577_102257C.1.pep
RLSAGLQASDLPASAXLPAKADLLLSTQPGREEGSPLKLERLKLEPHEGLLLRFPYAA

SEQ ID NO: 187139 - protein, 46 aa, Zea mays
  Clone ID: MRT4577_102258C.1.pep
GESRSHASHALSRRRSPAAAAGSRPCRADENMMELVSSQEPTEKVL

SEQ ID NO: 187140 - protein, 53 aa, Zea mays
  Clone ID: MRT4577_102259C.1.pep
RSGCPSHPPLLDKLRGPQPPSRARHRRYWHARTSTTPHAWWSLARAASSRPAT

SEQ ID NO: 187141 - protein, 85 aa, Zea mays
  Clone ID: MRT4577_10225C.1.pep
LGTSRPAGSNMDASSSINHRHTETDEGREQANCMLHPHRHHPPSSRCLPHLPLQLPALSLTTAHLPRLSPRYYLRDLRYHQALPR

SEQ ID NO: 187142 - protein, 87 aa, Zea mays
  unsure (1)..(87): unsure at all Xaa locations
  Clone ID: MRT4577_102260C.1.pep
PPCXAXLGGTRIFNDLREILAIXXXXRNSTNXPXXXNXDACXXXQIYXXAINSXWTPPXQYPKXTCCPKVQXECQATPPDPFIIGXX

SEQ ID NO: 187143 - protein, 76 aa, Zea mays
  Clone ID: MRT4577_102261C.1.pep
PRVRKKTIADYCSPEEFLWHVDYLLGRHAYCGKTDSEGRFETGAVATANVLESSTPVIDGKQYYAMYELTRTADCY

SEQ ID NO: 187144 - protein, 71 aa, Zea mays
  unsure (1)..(71): unsure at all Xaa locations
  Clone ID: MRT4577_102262C.1.pep
TTPVHLPATPCHYPTQPPRAQAYPQPHPCPCQQADPSPCHLQGTCGVGSTPGLGHCVXFLRRKCSPTGTPY

SEQ ID NO: 187145 - protein, 220 aa, Zea mays
  unsure (1)..(220): unsure at all Xaa locations
  Clone ID: MRT4577_102263C.1.pep
MPPRAVLRRLLPTNPHHSAARHAPRQAPPPPSAIDEGPLPDPYALLVHDPIDLLSSLWRRAFAHPLPSPFPNLSGYASRLDLWLLSYQRACAHATGTFPPRHAVPLPTLHSLLRLRASALRRHPAFPWGASTHLLLRSPADKPSTVPISRRKLEARFADAPPPFQDRVVQELLLXLLEPVLEPRFSPKSHAFRPGRGPHSAIRSVRSRFAAYLWFVSADL

SEQ ID NO: 187146 - protein, 56 aa, Zea mays
  Clone ID: MRT4577_102264C.1.pep
LASRQSFCQGRYNVIICRPCNQIENVRPIVRIHGKNQRHHSSQRKPLLCYSTVPSP

SEQ ID NO: 187147 - protein, 123 aa, Zea mays
  unsure (1)..(123): unsure at all Xaa locations
  Clone ID: MRT4577_102265C.1.pep
MAPTTATKDYSGYGDERRGVLQAFNDTNLWVKGMVDYGVKFIPFIFHHPSDALSDIISPAPVAPSPPFGDGMHVVDLSXDSERGXLVEHVRHADGTVGCFLLVNHRLSDELMDGMLRGVRLFN

SEQ ID NO: 187148 - protein, 206 aa, Zea mays
  Clone ID: MRT4577_102266C.1.pep
MAAQSFLLAATAAARSPAVFAAPYSSARPFHSVHFVAGPWGAAAARALVVADATKKAVAVLKGASEVEGVVTLTQDDDGPTTVNVRITGLTPGLHGFHLHEFGDTTNGCISTGPHFNPNNLTHGAPEDEVRHAGDLGNIVANAEGIAEATIVDTQIPLTGPNSVVGRAFVVHELEDDLGKGGHELSLSTGNAGGRLACGVVGLTPL

SEQ ID NO: 187149 - protein, 85 aa, Zea mays
  unsure (1)..(85): unsure at all Xaa locations
  Clone ID: MRT4577_102267C.1.pep
DNASIGKTLNEGEHSSVQCFSHTXVNLIVSEAISSQRIVQSLSSLARKICERVHRSPKAKEKLAKLQREYALPQHHLXIQDVPSK

SEQ ID NO: 187150 - protein, 594 aa, Zea mays
  Clone ID: MRT4577_102268C.1.pep
RSGSRTLRSDPCSLPRTIAIINALITEEYAKRDHYRNMISNPSSSHAFSLNGLVSMIATRYMKDHTKENIDKLIKVRDQLLEFQGTGMQFQDPSELMEIGALNTVIHQGMDATAACIGLQGRWNASLIQRDLLIAGGVFIGGILMMWSLFTKWSSTEVSHQGKNKRSRQKLRFKEARDNKYAYDVTGSEECLGENFGTAYTKKEGKGTKVGLGVKQHKFHMMYGFDPQEYNLIRFVDPLTGATLDEQIHADIRLIQEHFDVIREEAVANDTIERQHIYGNPGLQAFFIQNGSANALRVDLTPHSPLRAVTNNNIAGFPEYEGTLRQTGTAITIPVGQVPIANEAGVAHESKSMMNGLGDYTPISQQLCLVQNDSDGVKRNVFSIGYGSYLISPAHLFKYNNGEITIRSSRGLYKIRNSVELKLHPIAHRDMVIIQLPKDFPPFPMRLKFTQPSREMRVCLVGVNFQQNYSTCIVSESSVTAPKGNGDFWKHWISTVDGQCGLPLVDVKSKHIVGIHSLASTSGNTNFFVAMPENFNEYISGLVQANKWEKGWHYRAFVVHELEDDLGKGGHELSLSTGNAGGRLACGVVGLTPL

SEQ ID NO: 187151 - protein, 81 aa, Zea mays
  unsure (1)..(81): unsure at all Xaa locations
  Clone ID: MRT4577_102269C.1.pep
TLFKKLTIPLPSXPSPPMPHSFGFPPPPKKKFSAPFPPPYLGLSPPVAPPSPPPPSPPSPPFSPPPVDLPPSPLPPPPPPS

SEQ ID NO: 187152 - protein, 100 aa, Zea mays
  Clone ID: MRT4577_10226C.1.pep
DPICGGAYRPLTAPLCHVWTSFIHGCGRHLCSHLWHLLPACRGHHCLYLYHVDRVAWHMLTGLSSTSRLLLPRAPSSGIPSGRILGVPSKTWSITYRSSR

SEQ ID NO: 187153 - protein, 122 aa, Zea mays
  unsure (1)..(122): unsure at all Xaa locations
  Clone ID: MRT4577_102270C.1.pep
THXPHGTTFKKWGAASTHXXSLMPSILSDPILSDPSVHHVGDFYSACVGQKDRAHSLPGYPVSIRCHAVLSDSVAVPYRASSSSLSPCVQHLYIPSLDSSQSHAPLLTTPLLLLYLSSPLPI

SEQ ID NO: 187154 - protein, 85 aa, Zea mays
  Clone ID: MRT4577_102271C.1.pep
ELHVHRTLPQLPVRKGPCPGRRPDQKESNRVNYESVSVFRVDAIFDAATKVSSHILSFLNNVFLCPVYGIPYNNTTILVKSFQYS

SEQ ID NO: 187155 - protein, 76 aa, Zea mays
  unsure (1)..(76): unsure at all Xaa locations
  Clone ID: MRT4577_102272C.1.pep
PRGRPXNTFKTEDDDLCLSFLSATSSSLSYDALHPLLIICNHEPTAALMVPSPILPAPLIRLSPISHQAYGGDAEL

SEQ ID NO: 187156 - protein, 60 aa, Zea mays
  Clone ID: MRT4577_102273C.1.pep
KGRVGSQTCPISVNKRGQGSLDAREPQCQASRREPFLKLWTTIPGHGCYFGARQWACNRP

SEQ ID NO: 187157 - protein, 68 aa, Zea mays
  Clone ID: MRT4577_102274C.1.pep
AHASDHAIPFLYFITSSGFQQTRLNTNGDLREHAHTLTEIKYFKKVMTFIEPHLVPTTLQLITNYILS

SEQ ID NO: 187158 - protein, 260 aa, Zea mays
  unsure (1)..(260): unsure at all Xaa locations
  Clone ID: MRT4577_102275C.1.pep
MAYVQHGHGHDHEDGVVLQAKSPPAVVALVLSALLVCPLLVLLVVRXGAALEPKXLLSKLPSPPSRLPIIGHLHLVGPLPHVSLRDLSSKHGRDGLMLLHLGAVPTLIVSSPSAAQAVLRTQDHVFASRAYSPVTDILFYGSTDIAFSPYGEHWRQVKKIATTHLLTNRKVRCYRHARENEVRLVMSKIREAATAGAAFDLSEQLNSFANDIVCHAVSGKFFREEGRNKLFRELVEANSSLIGGFNLEDYFPGAGEAGHG

SEQ ID NO: 187159 - protein, 88 aa, Zea mays
  unsure (1)..(88): unsure at all Xaa locations
  Clone ID: MRT4577_102276C.1.pep
CGSITQRHDGLRIDEQNEKVRPPFIEDASRQTGRGSTVTDLTSSGIFRGSSEVAVGENQTNTGRTGDXTIKAGLVKRGCRDLSFLNKA

SEQ ID NO: 187160 - protein, 218 aa, Zea mays
  Clone ID: MRT4577_102277C.1.pep
SEGKVSTSQLSAKPKKKVAADNALQLKAFSSAVAQFVWPSTEKKLMEVPRDRCGWCLACRSSASGNKKACFLNMTTSNAAKSSARVLSTMRVIKISDSHFPSIAAYLANMEESLRGLLVGSLQDMQQRERWREQLEEASNCRTVIPLLLELESNIRGVAFSASWFKPIDDWPAESPCPSTGASRPAQHQKRGAGGRRGRRRLLVSEPGTVTDDDNSWT

SEQ ID NO: 187161 - protein, 77 aa, Zea mays
  Clone ID: MRT4577_102278C.1.pep
MRTMCAEKSSLHGAVIINDIVHPYLDIVLVMELDIGMLTHINMHCTHDCVDPDWDQKHVPVQPGSIYYAGTASDPSN

SEQ ID NO: 187162 - protein, 71 aa, Zea mays
  unsure (1)..(71): unsure at all Xaa locations
  Clone ID: MRT4577_102279C.1.pep
MSLASSSSVXLLLLLAADFAIMSANTTTFTITNNCWFTAWSAATPLGAGTQLNPGATCTENTPYVTSYCPV

SEQ ID NO: 187163 - protein, 84 aa, Zea mays
  unsure (1)..(84): unsure at all Xaa locations
  Clone ID: MRT4577_10227C.1.pep
RGHSCLCCCGLPEXLACDAPSCTLDGDRSXLLLQXAXHLMKTCXSELCSGYEPGGTTAYMARVGQLMQYHCDVEKAARMVKPNV

SEQ ID NO: 187164 - protein, 158 aa, Zea mays
  unsure (1)..(158): unsure at all Xaa locations
  Clone ID: MRT4577_102280C.1.pep
MPALVKSASRTAKSDASPNTKSVAAXSKASTAGASHPPYFYMVWEVISMLMERTASXDXAIAEDVMDIDATILPPDFNKMLSIHIRGSVCXGKLEKVKASYKLSDTANIASPXNKGNSAKDDAAKTTATXPDNAVDVKSKNAATGKTMNDGAAETNRK

SEQ ID NO: 187165 - protein, 55 aa, Zea mays
  unsure (1)..(55): unsure at all Xaa locations
  Clone ID: MRT4577_102281C.1.pep
VNLLSKKRPPTKFSPFLFFFFFIFKHFTFYIVHPFFFFFFFFSDAWSTGIXDGTA

SEQ ID NO: 187166 - protein, 141 aa, Zea mays
  unsure (1)..(141): unsure at all Xaa locations
  Clone ID: MRT4577_102282C.1.pep
MEGLQGGRKKGQEKAGKKSTARGKEKKKRSGKKKKKNHSHKKKKGKQRKRKGGPKRKKEGKSPGGXPGKKTKSQGGGRTGQIKQGKAAGKGVNGNXPTGKGGVGPGKRAKTGFTLAPGNGGNKTAPPPWGKIKKKRTAGGD

SEQ ID NO: 187167 - protein, 73 aa, Zea mays
  Clone ID: MRT4577_102283C.1.pep
VPRVSKKSQESGEDKASSAIFPKRSTNCLNRKITTDLADSCQLWKRYVNQSRDAEDDPSRPQARANPQDDADE

SEQ ID NO: 187168 - protein, 226 aa, Zea mays
  Clone ID: MRT4577_102284C.1.pep
METLVPGVLADLVCRAISFTVDRCCHQRRKRCAEDTTQRLHHVLLRVQTVVEEADRRCVTNRAMLRQLQLMREGVYRGYYLLSAFKRQDVVKDTAQDRDLGRHGHSSLALSQLNPAKRLCTISAWTTTRTNMALQDTAREGEAELQEVLTVLERMASDMKELVVFLSCYPPTRREPHSGHLRLKNRMFGRESEQERIIGFLLEPEPARAEYLGVLPVIGRARIGKS

SEQ ID NO: 187169 - protein, 250 aa, Zea mays
  unsure (1)..(250): unsure at all Xaa locations
  Clone ID: MRT4577_102285C.1.pep
LHLGGNFFSGEIPPEYGRXPRLQYLAXSGNELSGKIPPELGNLTSLRELYIGYYNSYTGGLPPELGNLTELVRLDAANCGLSGEIPPELGRLQNLDTLFLQVNGLTGSIPSELGYLRSLSSLDLSNNALTGEIPASFSELKNLTLLNLFRNKLRGDIPGFVGDLPSLEVLQLWENNFTGGVPRRLGRNGRLQLLDLSSNKLTGTLPPELCAGGKLQTLIALGNFLFGAIPDSLGQCKSLSRVRLGENYLY

SEQ ID NO: 187170 - protein, 113 aa, Zea mays
  Clone ID: MRT4577_102286C.1.pep
EFGTRLHLPFRRTAAGDMSRLAAAALRCVVTASRDTSSSRFAVSAPVSARLFSADASGEAAATALFSQDDSFFKASREGSSVILVLLYFPLHVPVRVPPIACQFVLALGGFRV

SEQ ID NO: 187171 - protein, 84 aa, Zea mays
  unsure (1)..(84): unsure at all Xaa locations
  Clone ID: MRT4577_102287C.1.pep
ELQSALEEAEASLEHEEGKILRAQLEFNQIKAEIERKLXEKDEEMEQAKRNHLRVVDSLQTSPSAETRSRNEALRVKKKMEGDL

SEQ ID NO: 187172 - protein, 54 aa, Zea mays
  unsure (1)..(54): unsure at all Xaa locations
  Clone ID: MRT4577_102288C.1.pep
MIVEVIFLHTVNRISVTFVNKDGSEKTICVPVGMSMLEAAHXNDIELEGTDIKE

SEQ ID NO: 187173 - protein, 915 aa, Zea mays
  Clone ID: MRT4577_102289C.1.pep
SSSIEHLMLSMNNFTGEIPEGLSRCRALTQLGLANNSLSGVIPAALGELGNLTDLVLNNNSLSGELPPELFNLTELQTLALYHNKLSGRLPDAIGRLVNLEELYLYENQFTGEIPESIGDCASLQMIDFFGNRFNGSIPASMGNLSQLIFLDFRQNELSGVIAPELGECQQLKILDLADNALSGSIPETFGKLRSLEQFMLYNNSLSGAIPDGMFECRNITRVNIAHNRLSGSLLPLCGTARLLSFDATNNSFDGAIPAQFGRSSGLQRVRLGSNMLSGPIPPSLGGITALTLLDVSSNALTGGFPATLAQCTNLSLVVLSHNRLSGAIPDWLGSLPQLGELTLSNNEFTGAIPVQLSNCSNLLKLSLDNNQINGTVPPELGSLASLNVLNLAHNQLSGQIPTTVAKLSSLYELNLSQNYLSGPIPPDISKLQELQSLLDLSSNNFSGHIPASLGSLSKLEDLNLSHNALVGAVPSQLAGMSSLVQLDLSSNQLEGRLGIEFGRWPQAAFANNAGLCGSPLRGCSSRNSRSAFHAASVALVTAVVTLLIVLVIIVLALMAVRRQAPGSEEMNCSAFSSSSSGSANRQLVIKGSARREFRWEAIMEATANLSDQFAIGSGGSGTVYRAELSTGETVAVKRIADMDSGMLLHDKSFTREVKTLGRVRHRHLVKLLGFVTSRECGGGGGMLVYEYMENGSLYDWLHGGSDGRKKQTLSWDARLKVAAGLAQGVEYLHHDCVPRIVHRDIKSSNVLLDGDMEAHLGDFGLAKAVRENRQAAFGKDCTESGSCFAGSYGYIAPECAYSLKATERSDVYSMGIVLMELVTGLLPTDKTFGGDMDMVRWVQSRMDAPLPAREQVFDPALKPLAPREESSMTEVLEVALRCTRAAPGERPTARQVSDLLLHVSLDYYRACEKR

SEQ ID NO: 187174 - protein, 69 aa, Zea mays
  Clone ID: MRT4577_10228C.1.pep
PIHMTEYNRTAATDLFIGNKLSSTTPFLKTKKGKKRGSLDAVQLGGVELRGLDHVGQGGLDLQGLAVLE

SEQ ID NO: 187175 - protein, 152 aa, Zea mays
  unsure (1)..(152): unsure at all Xaa locations
  Clone ID: MRT4577_102290C.1.pep
SGVKPPKKIPPKKFPALAGNXFKGDHEAPGPGEKPPLSPAKLKKMPGSDFFGEGGAPSRDYLGGIPNPPGGENSFALVYQQGQPPRWTKHAPPPTSLVFSLIPGPRSPILRSCFFIKGVFFFRSIGGTDRIGTPGLVFPVSPCLSSGFRWFP

SEQ ID NO: 187176 - protein, 94 aa, Zea mays
  unsure (1)..(94): unsure at all Xaa locations
  Clone ID: MRT4577_102291C.1.pep
MAVGKNKRLTRGGKKGAKKKVVDPFSKKDWYDVKAPAMFNIRNIGNSLVTRTQGTKIASDGLKGRVFEVSLADLQNDEVAFRKXKLITEDVQGK

SEQ ID NO: 187177 - protein, 68 aa, Zea mays
  Clone ID: MRT4577_102292C.1.pep
HEDPASPYGTTRPLKCFPNVSPIFLCVPLRSHVRCADCEIRWRNCGSEARSAAETRRGKRGEILTPRF

SEQ ID NO: 187178 - protein, 83 aa, Zea mays
  Clone ID: MRT4577_102293C.1.pep
GGAGGLFKNQKKPWGKLGLQKKGGDRVFSKKGLYLKSHKGVVCQGACLKNTGAVLGQNNAGRRGPKNRPLPRGKKKKYFNQAP

SEQ ID NO: 187179 - protein, 193 aa, Zea mays
  unsure (1)..(193): unsure at all Xaa locations
  Clone ID: MRT4577_102294C.1.pep
EASFYLDTVILLGRFQLPNLFKLSYMTHFYLEDNLLFGGSPRVIRTRALYLTAISXLCNSQLTGGLPXGHQKLLMDQKAVTGPVCFYMGRIDEYRKADLSGXAYLSVFTXNAEGPXLGNCTLLTXLYLRRYNLSCEIPEYLSXLALTHXTNLYSYLQPGQIPTTIGARHSLTTCLFXYNNLLGLVPTTVPYTY

SEQ ID NO: 187180 - protein, 233 aa, Zea mays
  Clone ID: MRT4577_102295C.1.pep
MRFTSLAPLAALLGTATTATALVLPWNNENANAADEIPTLSISDWQKVRSMGFDQVRTAGKLADDFVKTIVNDLEDVSSEWRGETRDQDDQLTIWQLLNQDKDRYSKLLKAIEIEGGNAKKILDDRDASITFFAPENSGIPDPHHKDHDDHFASFDRAIENLQSSPTLDNLLRVHDLHSQRLFERDEDHHHRGPHKGHEGDDDEKKKRIFKFIFGRDLEVPRFTPGFECYRVG

SEQ ID NO: 187181 - protein, 45 aa, Zea mays
  Clone ID: MRT4577_102296C.1.pep
GRDAITIHRSAVALLSHDATTSPHALLPQLLTKYFRLLQQRVPVT

SEQ ID NO: 187182 - protein, 77 aa, Zea mays
  Clone ID: MRT4577_102297C.1.pep
PMRTARFPRPTRRGCLLRHAPPPAPTGVRYPGSDSGAIPLHLFHRVSSPNPRPLSAVGSRRGSSAALGAAAAAACGR

SEQ ID NO: 187183 - protein, 119 aa, Zea mays
  Clone ID: MRT4577_102298C.1.pep
THTSRSARTSGIFHPSNLITSCMFLLSMVLLNEKTPTDRLEMAYITSEGCTDMPSQSRGHCKTHLFLTWSLSLSASDPGKTRRLRLQSATIYFHAYATTDAHTMDAHSSFLTDSAAAAF

SEQ ID NO: 187184 - protein, 90 aa, Zea mays
  Clone ID: MRT4577_102299C.1.pep
HKSYRLFRRPSTLFLNGLNIHNQLYPDLIKKDATPSLTTRCTPCPLAPLSYGAAALYIYAPTTTDVNHRATTAPPAHRTTVGLDLTTSHF

SEQ ID NO: 187185 - protein, 113 aa, Zea mays
  Clone ID: MRT4577_10229C.1.pep
YSESDIRKLGKGTTGTTDTSSTGAQLGVNYPISPPLRGPSLPTSANESTNRKRGSQTRTRHGQWRRTPRSSAPRASSSMIYLLICIACVASEGERCYNTRNPTVAIMLPLYLT

SEQ ID NO: 187186 - protein, 64 aa, Zea mays
  Clone ID: MRT4577_1022C.1.pep
TTLSFFLLFLGGFYGGLGGYHPRAGKGDQQQVIQPATRGENQRPNRPMGRDATSRTKTLQSNEK

SEQ ID NO: 187187 - protein, 535 aa, Zea mays
  Clone ID: MRT4577_102300C.1.pep
YLEAGRDFPFSSIILFENRGIENISCKESCVQEKIKDGEETPPNLREFLSLVGNLQHEYAGSDSVLLDGPEVGQELISLLRYLKQCMYFSRKPYNVFLEYGGYGQNDVLIKKSKARILKPAFTIVCDRSSQCFLLFIRGAISVKERLTAATGAEVPFHHVVVQEGQVSNLVLGYAHCGMVVAARWIAKQAIPCLSKAIEQFPEYEVKIIGHSMGAGIATILTYILRENEKLASSTCIAFGPAACMTWDLAESGKDFVTSIVNRNDLVPSLGLVSAAKLRAEVMSSSWAHDLRKQIQQTRFLGFVNRSVSFIRSHVPFVSDPRSKVVDVDMMQSQSPEAGSKPSADTHAVVKKRPALACWSCVAAPKQSMESSIQIEGTKVQTDTGVQTEKTTEAATAALVSIHLGELNLQEPDNREEKGSALTETDEDAMELLESLTDEKQLPSSSSSGQEPHQLYPPGKILHMVGLPAAEEATTSQQGAQEEVIALYETPRHLYSKIRLARSMIGEHYMPKYIKTMEQLIDKLAEDIDDQLDSL

SEQ ID NO: 187188 - protein, 220 aa, Zea mays
  unsure (1)..(220): unsure at all Xaa locations
  Clone ID: MRT4577_102301C.1.pep
NSARGQHEYAGSDSVLLDGPEVRQELISLLRYLKQCMYFSKKPYNVFLEYGGYGQNDVLIKKSKARVRKYQLTLCCQLCVETEHTKLLTINQEXWTISCSVIQILKPAFTIVCDRSSQCFLLFIRGAISVKERLTAATGAEVPFHHVVVQEGRVSNLVLGYAHCGMVVAARWIAKQAIPCLSKAVEQFPEYEVKVISLSSCRVSPGDLWMLLSKTHGIIY

SEQ ID NO: 187189 - protein, 114 aa, Zea mays
  unsure (1)..(114): unsure at all Xaa locations
  Clone ID: MRT4577_102302C.1.pep
HAKRDRGRTNRTAASLETLRWATYEKYLDDAVGMYGEVVESNIIXDRQTQRSRGYGFVALSTEDAMRSAIEGMNGKELDGRNITVNEAQYRAARLGGVGPYRGARRDVCDYGAG

SEQ ID NO: 187190 - protein, 44 aa, Zea mays
  Clone ID: MRT4577_102303C.1.pep
RPKEAGSAAYVTRHRPISNLPPSPRWLNTLAYYACRCAPIRKSS

SEQ ID NO: 187191 - protein, 65 aa, Zea mays
  unsure (1)..(65): unsure at all Xaa locations
  Clone ID: MRT4577_102304C.1.pep
KFYRIYFRIHTEFYIYHLRKYTMYLRINFYESLQAQCYKQEYMYSALYILXIRXQRKTTXKLITE

SEQ ID NO: 187192 - protein, 75 aa, Zea mays
  unsure (1)..(75): unsure at all Xaa locations
  Clone ID: MRT4577_102305C.1.pep
PGIPSASAGTYLPHFAAGGWSRAGAAASSPLLPPPPXESNRSKGSLGSCVGSLRRERMERLKTNRSDSNPTLSDI

SEQ ID NO: 187193 - protein, 99 aa, Zea mays
  Clone ID: MRT4577_102306C.1.pep
TCLNLSLTGTVGLDRHDTVTPRQKKMLLLCDGGKRHSQYQQWTGTVDMIRKRLYLAVDEQSLTPLTRASCLRRIPSLLKATVATASPEHIDAVGAGSSR

SEQ ID NO: 187194 - protein, 442 aa, Zea mays
  unsure (1)..(442): unsure at all Xaa locations
  Clone ID: MRT4577_102307C.1.pep
RRALPSVLRDSVFAHCAKAKPFHMVPRLRVKLARSQLFCLLFLQSPGGKTTTISCVVXITPITGGDAFIYGHSVRSTVGMSNIRRMIGVCPQFDILWDALTAKEHMELFASIKGLHPAAITLVAEESLAKVKLSQVTNARAGSYSGGMKRRLSVAIALIGDPKLVFLDEPTTGMDPITRRHVWDIIEEAKKGRAIVLTTHSMEEADILGDRIAIMAKGKLRCIGTSIRLKSKFGTGYIANVNFSGNGHMQSPNINSNTEAPVNPNIEAVKWFFKERLDVNPKEESRTFLTFVIPHHKEPLLTRFFGELQDREGEFGISDIQLGLTTLEEVFLNIAKQAELETSTAEGTLVTLNLSSGTTIQIPKGARFVGIPGTETEEHPRGIMVEVYWDQDENGSLCISGHSDEMPVPVHAELRRPPSLSRRASMDRGRPVGYMIDLNQVP

SEQ ID NO: 187195 - protein, 57 aa, Zea mays
  Clone ID: MRT4577_102308C.1.pep
NIGILAVLRMDHALSCGCGGETPGGRVLIYTNFFMSDKMQINLPPSGNRGWVVPKLI

SEQ ID NO: 187196 - protein, 127 aa, Zea mays
  unsure (1)..(127): unsure at all Xaa locations
  Clone ID: MRT4577_102309C.1.pep
EESLAKVKLRQGTNACAGGYSGGMKRRLSVAIALIGDPKLVFLDEPVXEIEKFSLFCSLDSLVALSHVNLXMYMLXTTGMDPITRRHVWDIIEEAKKGRAIVLTTHSMEEADILGDRIAIMAKGKLR

SEQ ID NO: 187197 - protein, 50 aa, Zea mays
  Clone ID: MRT4577_10230C.1.pep
PTNQLHQNITLHDLHILYHTNKLHPSQYIYNTHNTYQILQYTIHINSQLK

SEQ ID NO: 187198 - protein, 119 aa, Zea mays
  Clone ID: MRT4577_102310C.1.pep
GRVARRVGAEWHKLQEVEVHLGRCTDARKIGDWKSALREADAAIAAGADSSQLLLALRSEALLRLHKLEEAESTLASLLKLDSALPSSLTAAKLSGMLAESYIHIVQAQVDMAFGRFDT

SEQ ID NO: 187199 - protein, 69 aa, Zea mays
  Clone ID: MRT4577_102311C.1.pep
SRPAGIALFSSFCLLWREGQREARSSSTEASYEVLILRCWRLFCGHVSEVPAHLMRAGRRTPSPKTTAS

SEQ ID NO: 187200 - protein, 330 aa, Zea mays
  Clone ID: MRT4577_102312C.1.pep
MDPKFPTPLALNKTEPTTATTTTTSTAQHHQLDPKDYQQQTAQHQEQQQHHHHPHLQIQIHQPPPPPQDGGGGVKEQQQLLQVVAQPGDRRQQALAPKRSSNKDRHTKVDGRGRRIRMPALCAARIFQLTRELGHKSDGETVQWLLQQAEPAIVAATGTGTIPASALASVAPSLPSPTSGLARPHHHHPHHMWAPSAGFSSPSFLNSAGAGDGTGIGGIMQRMGVPAGLELPGASAAGATLGAGGHIGFAPMFAGHAAAMPGLELGLSQDGHIGVLAAQSISQFYHQVGAAAGGGGQMHHAHGHHHHHHQQQEDGEDDREDGESDDESGQ

SEQ ID NO: 187201 - protein, 57 aa, Zea mays
  unsure (1)..(57): unsure at all Xaa locations
  Clone ID: MRT4577_102313C.1.pep
PFMEGRHISYSLYLIYVLICSSSMISFCGCDSGPQHHSVLFSPPFISEPYNSISKXK

SEQ ID NO: 187202 - protein, 46 aa, Zea mays
  Clone ID: MRT4577_102314C.1.pep
LALIHLYRQYVFRHSPSMESPLEFQFGVVLNFKHGVKLQSIKRHKC

SEQ ID NO: 187203 - protein, 58 aa, Zea mays
  Clone ID: MRT4577_102315C.1.pep
SYKGNRTVYSVRYKSFCALRPFHVILLYSVYLSGAGLSACLIMQVTASEIKYYIAIYV

SEQ ID NO: 187204 - protein, 85 aa, Zea mays
  Clone ID: MRT4577_102316C.1.pep
IRDGSLSVTERITNAPPPPPPPMKQTTQNPLRFLPKLAPDHAAKPATTAAATKPATTRRPAEPRGDAAAPGTDDVTTRTRHTTSD

SEQ ID NO: 187205 - protein, 75 aa, Zea mays
  Clone ID: MRT4577_102317C.1.pep
PKILHQILLKWDAWGKKIARTKSFLEPSTTNPLLCIQSIANLSVITLVGQCVGVCASCSFSRRSCLVVVPACSTG

SEQ ID NO: 187206 - protein, 343 aa, Zea mays
  unsure (1)..(343): unsure at all Xaa locations
  Clone ID: MRT4577_102319C.1.pep
MASLGRRAGSICSELCGTTLNQRRYSTSRVDWKQLRPMILKRIKNRTKEYPIKSMIPVAEEVVTAEYPINGMIPRLHEGFXLGRLSMRGPPESSRFGFKRMIKVGMNETLXKLDQLKTCYSGNPLKKYRPHEWEPGNLNDILVPVQAFHQKNMFEHEIKHDQRFDFTRVPAVLELCHHAGADIPDEILYRSGQMSTTLKTNNQQSAPILPDELRYIGQKTLDAWENLRLGATKLLLVYPSKVCKHCSEVHIGQSGHKARMCGVFKFEGWKGMHKWNKAGVDDLVPQNIVWHRRPHDPPVLVDGGRDYYGHAPAVVELCMQVGAIVPPKYHCMMKTHGLAPPVG

SEQ ID NO: 187207 - protein, 46 aa, Zea mays
  Clone ID: MRT4577_10231C.1.pep
SKEHHSYQYAFPVRPLFYISLMCRLFVVYLTVCFLWHNSQGPFMFC

SEQ ID NO: 187208 - protein, 105 aa, Zea mays
  unsure (1)..(105): unsure at all Xaa locations
  Clone ID: MRT4577_102320C.1.pep
PPHPPPPPHPTHXPPPPPPHPTHTTPTTXQQKHPTPPASPPPPXPPPTHTPSDPPSPRASPPNGQLEHKNRRGEQKYLGKTPPPHILCSQPNNQPLEPPSFRHLV

SEQ ID NO: 187209 - protein, 91 aa, Zea mays
  Clone ID: MRT4577_102321C.1.pep
PLTFFSQFFAPASSSVLHFPFLNIFYLLRIHYFCLFSFEYFSSHYYFTHIFVPILNIIIFSSLPTGTNNIFVLSYLLPFLQADSFYTRFIY

SEQ ID NO: 187210 - protein, 114 aa, Zea mays
  Clone ID: MRT4577_102322C.1.pep
DDIARLAVAPAGPSLLLFRRVAVWVAARRPGEYRDTYARIHHHAIQHVLLLQCSSSRLYIYIYVIELPCMVRNHCALAIKKYICVLAITLLSCTPLNSILQAILAFLTHMHSFC

SEQ ID NO: 187211 - protein, 99 aa, Zea mays
  unsure (1)..(99): unsure at all Xaa locations
  Clone ID: MRT4577_102323C.1.pep
HAIACDSLLTIKQVSSYYLFKKKKKKKKKKKKKIFFFFXXNFWGGGKKKKKKKKSCALGRSHLKGDFCEFPSPWGAFDLPFGGPIWPLGGWLYNLLAGV

SEQ ID NO: 187212 - protein, 113 aa, Zea mays
  unsure (1)..(113): unsure at all Xaa locations
  Clone ID: MRT4577_102324C.1.pep
TTTPRGRTTTGCRGCTLQVRGFQQQTHGGRWPSLRHELETRXEWRSERQGEMYGQLAKMSTCGTEAKAELEGAGLQKDKAPDQDVATASDERWQPRTRQQEIFRWPWRRALCK

SEQ ID NO: 187213 - protein, 62 aa, Zea mays
  Clone ID: MRT4577_102325C.1.pep
YLQRRNEFMRYTPYFKITISDVLLMSWMQTILESVQQAKLSQVWTLEHAASAFCLVYATKQT

SEQ ID NO: 187214 - protein, 83 aa, Zea mays
  unsure (1)..(83): unsure at all Xaa locations
  Clone ID: MRT4577_102326C.1.pep
LIYYFFMQFNCFHNILSLGFXSXGTXAHXLXSCSXXLRTRXHCXPXSFFFFSVGRLLXTDLQXGXGLQQICSTSSYTTEREXA

SEQ ID NO: 187215 - protein, 70 aa, Zea mays
  Clone ID: MRT4577_102327C.1.pep
ATAYDSSLGVRGVVAGRTYGTCMFNGALHVCHRSCLIVLRQWRGFHHGATDSHSQMCAVAACADRESGRD

SEQ ID NO: 187216 - protein, 58 aa, Zea mays
  Clone ID: MRT4577_102328C.1.pep
LMRPLTRGRGPRSLTGSGLRKRTTHERMSTINSSLHCATPAGRSDLSHILIFKLKRAR

SEQ ID NO: 187217 - protein, 66 aa, Zea mays
  Clone ID: MRT4577_102329C.1.pep
MAHSWLMALVPEGMGCVLLLLHIGAKPKSWTILGCLLSILRCSLRPKPRFWSLPLISALPWILNVG

SEQ ID NO: 187218 - protein, 68 aa, Zea mays
  Clone ID: MRT4577_10232C.1.pep
LSSYGPCSAPDLKSCRLTRQVSGPSPETSHLLLFSSDWPIPRWHRLSRRPAADWRRREKYQTTRILRL

SEQ ID NO: 187219 - protein, 148 aa, Zea mays
  unsure (1)..(148): unsure at all Xaa locations
  Clone ID: MRT4577_102330C.1.pep
FGGLFPKIYRRFAKKFXKKPKFFKNGNAGMVKMVPPKPMVVEPFFENPPLGRFAGRKKRQTGAVGVIKRVEKKDPTGAKVTKVAPKKKKSVWRVLGLLEGTLVETKKISFCSRHCLKNAPNVCLVNLKLLFLLKPKCFLKFNRTFGEP

SEQ ID NO: 187220 - protein, 134 aa, Zea mays
  unsure (1)..(134): unsure at all Xaa locations
  Clone ID: MRT4577_102331C.1.pep
TLTPSPAPCPWGPFPRPGPPPXAGPSPGPGVPPQWGPPFPQPGPFPKMVSSPNEPRIPTKSPPGPTRGAKWENLGPPKGGVSPPNSQPPNPGFQPXPPGPPTLENPPPXGPAPFPFSPGYSFGAIGFWEPKPRN

SEQ ID NO: 187221 - protein, 82 aa, Zea mays
  Clone ID: MRT4577_102332C.1.pep
AVVFSYLFFFSKRPGHLIRQHPPIVNKNIAFTLGIYPKGSGEKGKKRRCPSLIKTPSGNPKLCLVGKFDCFINNEGYPGLME

SEQ ID NO: 187222 - protein, 100 aa, Zea mays
  Clone ID: MRT4577_102333C.1.pep
SVGRQIKHARVGLHIVLRIKPEFLIIVIGTLYIVKVVVRSGLWIKCMPHYSQDRWTSVHYHYIACCTSHGKRYTVIELCQLLDRHITECYDLTFPCNTDL

SEQ ID NO: 187223 - protein, 53 aa, Zea mays
  Clone ID: MRT4577_102334C.1.pep
WERYYCLERERPFCVYNLWPVVGFALQWWVVRRFFPLLLVKSWGKVETEHFVK

SEQ ID NO: 187224 - protein, 56 aa, Zea mays
  Clone ID: MRT4577_102335C.1.pep
LHPTQRVKLFFPTYVQPVVPPIRVTSVGQSFLCRSCFLPLVVFVITKTPCSDMRLV

SEQ ID NO: 187225 - protein, 77 aa, Zea mays
  Clone ID: MRT4577_102336C.1.pep
FIFIFLFFFFHFLLPRQRKISFFPKLIRGGQHFQNWKKNNVPGDYGCLTGTPKTTLVDSWRIPKFFKVPNKKPVWWE

SEQ ID NO: 187226 - protein, 82 aa, Zea mays
  Clone ID: MRT4577_102337C.1.pep
MFLSHHVEWFFNDSEQTTSRRLADRKISRFEKNITKRGSVPETAKKANDYPVGPILLGFFVFVVVGSSLFQIIKTASNAGLF

SEQ ID NO: 187227 - protein, 72 aa, Zea mays
  Clone ID: MRT4577_102338C.1.pep
AQIHGKTTSAFRAGLFARVFETRYSRYMVGGETRGLHVLDPWNLKWLFGDHKEEEGCQSCHEYCLASRQSIP

SEQ ID NO: 187228 - protein, 161 aa, Zea mays
  Clone ID: MRT4577_102339C.1.pep
MTGSHESVLSSGSGQQTIGALEAGRETRAGPGNSRTSRAHRHRTQAHSAITVSPRSRTRSLAHTRPAVRILFRCRHPLRRPPRPAAATRPVSIAMTTSRRLADRKISRFEKNITKRGSVPETAKKANDYPVGPILLGFFVFVVVGSSLFQIIKTASNAGLF

SEQ ID NO: 187229 - protein, 79 aa, Zea mays
  Clone ID: MRT4577_10233C.1.pep
AGGFCSRTQKPGTIGWRGPKTTKALSSLFVRPLSPESIGACFLPLSGGGSRTAFARQRVVSWNQQNKTKCKPLPLFPPG

SEQ ID NO: 187230 - protein, 159 aa, Zea mays
  unsure (1)..(159): unsure at all Xaa locations
  Clone ID: MRT4577_102340C.1.pep
PKTDRKKSGKTVSFPQFNGGHLPPRGMGPKVYPXGGFPPPGGXISPQKKNLKPPTGXPRQDAPPPRGGGQSGPPRGRXEKGNLTKGPXAPPRAGGYPPIPQKKPPPGTSDPGPKQARRGAPLPSIGGEGGPLEDPGGPGVGENVGGLDPGKAGPLGEPG

SEQ ID NO: 187231 - protein, 74 aa, Zea mays
  Clone ID: MRT4577_102341C.1.pep
TGTEENNRWGPSGQVILFATVLFTLVQSVYLRSSRVCCCPSVFLIKGRSVSVVSAVFIHGSSRPMHQPAWTADR

SEQ ID NO: 187232 - protein, 82 aa, Zea mays
  Clone ID: MRT4577_102342C.1.pep
QLHPHALVVDSPDSQGSNLKSHVRLLWNPEVAGHPGRHISRSGSTRAHSANGGRCTWTWVSRFFRPRQALNDEEQIRVHHTC

SEQ ID NO: 187233 - protein, 55 aa, Zea mays
  Clone ID: MRT4577_102343C.1.pep
SLLNLFNIDQSKLDYLANCTFNHLIASNICIYIQFNQLICIQMNLINKYYTLYTS

SEQ ID NO: 187234 - protein, 162 aa, Zea mays
  Clone ID: MRT4577_102344C.1.pep
MLTARGLCRLAAVVCFARRSASAVAALPGAGAARFHDYDAAITECVGRRALLEGRQVHARMVTAGYRPALYLATRLVIMYARCGALEDAHNVLDGMPERNVVSWTAMISGYSQNERPAEAWDLFIMMLRAGCEPNEFTLASVLTSCTGSQGIHQHQIKQVHA

SEQ ID NO: 187235 - protein, 99 aa, Zea mays
  Clone ID: MRT4577_102345C.1.pep
PISTVFCGPRRRRRRLPVWGARRQSRPKRPPIPPIRHRLPVWSDLLPTSTLKPVSGDAKAVNGSNVLVCVCALLQVALCYLKWKKKCLFQKKKKNTPPH

SEQ ID NO: 187236 - protein, 132 aa, Zea mays
  unsure (1)..(132): unsure at all Xaa locations
  Clone ID: MRT4577_102346C.1.pep
GSQRVAAWWTPXLLERALRVQCLKGTIYGLFTFDXRETXXXNRXALKKPLPLFIHYITLRLQPIHHISINEYGKLSFTCFCPTPTFMIPDPXFIKKVLFNNFVHFGXXXXNFIFSVLFXGLFNYYLKKFLYH

SEQ ID NO: 187237 - protein, 96 aa, Zea mays
  Clone ID: MRT4577_102347C.1.pep
LVRTLHCSSLVLLTSWDPLWLHFIYSMSVFSYNDAMFGLIIPLSRSMFLNLYFGYLYFVASLLMHDIALCSLSISKFVTTCFSIAHVLKKKKKKGA

SEQ ID NO: 187238 - protein, 136 aa, Zea mays
  unsure (1)..(136): unsure at all Xaa locations
  Clone ID: MRT4577_102348C.1.pep
NAFALISRSQGINLVNLFQKEMMGMVNRETXSFPSQCPAQEIMSKIEDACGPXLGFNVRDQNYKIKLKHDKFVMKGQLSVLAEVFEVXSSVQMVKFIEAKFVTLQFLIFYERFLSELKDIVCKTEFRAEYIHWLNK

SEQ ID NO: 187239 - protein, 502 aa, Zea mays
  unsure (1)..(502): unsure at all Xaa locations
  Clone ID: MRT4577_102349C.1.pep
MAASSLLRSFTRRSCAGPSAFAYRHHQRQQPWSPFSTTAAAVTQDKAAKRFPGLGPTAKGEKARVVVLGTGWAGSRLMKDLDTQGYDVVCVAPRNHMVFTPLLASTCVGTLEFRSVAEPVARIQPAVSKSPGSYFLLARCTGVDPDGHTIDCETVTDGEKDSLEPWKFKVAYDKLVFACGAEASTFGIRGVTDHAIFLREVHHAQEIRRRLLLNLMLSDLPGISEEEKCRLLHCVXVVGGGPTGVGFSGELSDFIIRDVKQRYSHVKDYIHVTLIEANEILSSFDVRLRQYATKQLIKSGVRLVQGIVKDVQPNKIILDNGEEVPYGLLVWSTGVGASPFVKSLPFPKSPGGRIGVNEWLRVPSVHDVYAIGDCSGFLESTGKEVLPALAQVAERQGKYLASLLNHVMKAGGGHANSETEADLGRPPFVYKHLGSMATVGRYKALVDLRQSKESRGISLAGFVSWFIWRSAYLTRVVSWRNRFYVAINWLTTLLFGRDISRI

SEQ ID NO: 187240 - protein, 191 aa, Zea mays
  unsure (1)..(191): unsure at all Xaa locations
  Clone ID: MRT4577_10234C.1.pep
YTLXVRPTTSFIGARLVHPXPSSLSHDSRSHTRLRXELIRERAPVFAAPXAPTGTGDGGEVSEHTREIERXRKGGDPPAASDERGGERGQRRGREQEXSEQLPLPSENKGRASEGEVVQRYPHLVTPSEAERLXQAPRPRSRGSSKGMDPSDERXNSVLRNFQSEVYANKTELIEHLKAGQTRRYMXMACS

SEQ ID NO: 187241 - protein, 154 aa, Zea mays
  unsure (1)..(154): unsure at all Xaa locations
  Clone ID: MRT4577_102350C.1.pep
MRTSIDLTTMGTKILALLALLALEVSATYALIISQCSLAPSAIIAQMLPPGTXMGYRHREEPCYRLQLTLAXASALQQPIGQLLKQSLAHLTLQTIAAQRQQHFLTSLNHLVGVNPGGYSEQELLASXPLALKNVGWITQPLQQLQQVDASSSE

SEQ ID NO: 187242 - protein, 60 aa, Zea mays
  Clone ID: MRT4577_102351C.1.pep
PRCSRAGVPMLSFHMCLFFFGVGSAPPCFPKNPPTREGGGRRVTASSPGYFRRGGCRRGS

SEQ ID NO: 187243 - protein, 281 aa, Zea mays
  Clone ID: MRT4577_102352C.1.pep
MAMAVAHLLPQLSAEGNGASRNRMAILLILQLFLLTVLCSITDSALGVDGAASFIFTNACKHAVWVGALHGASSPPLARSGFYLAPSATSSMDAPSSGTWSGTLWARTGCVADPATGRFSCATADCGTGDVACQGRGPAPPVSLVEVTLAAPGSGRPDFYDVSLVDGFNVPVRVAPSGGGGDCRPAACAGDVNAVCPGDLRVVASSGGGVVACKSACIAYGSARYCCTGQYGTPAMCGPTNYSQVFKSACPSAYSYAYDDATSTFTCSGPSSYSVTFCPAN

SEQ ID NO: 187244 - protein, 811 aa, Zea mays
  unsure (1)..(811): unsure at all Xaa locations
  Clone ID: MRT4577_102353C.1.pep
MEIQNRPSSPLPPPPPLLRFCSPAHRQCSALPAHHSLTPPPGAHCRCLPPPYINPRHPLRCCHATSLPHPAPSLQIDSALPTTEHQTPRRLLTRVMRTQRSLLPLLLLSAAALLADAQDRKNYVVHLEPRDGGSTASLEEWHRSFLPEATLDSAADDGPRIIHSYSHVLTGFAARLTDAEAETLRRKEGCLRLYPEEFLPLATTHSPGFLGLHMGKDGFWSRSGFGRGVVIGLLDTGILPSHPSFGDAGLPPPPKKWKGACQFRSIAGGGCSNKVIGARAFGSAAINDTAPPVDDAGHGTHTASTAAGNFVQNADVRGNAHGTASGMAPHAHLAIYKVCTRSRCSIMDIVAGLDAAVKDGVDVLSFSISATDGAQFNYDLIAIATFKAMEHGIFVSAAAGNDGPAAGSITNGAPWMLTVAAGTMDRAIRTTAXGDPEARDCSTLVEAEVRGKVVLCESRTITEHVEQGQMVSAYGGAGMILMNKAAEGFTTFADAHVLPASHVSYAAGSKIAAYIKSTPRPTATITFRGTVMGSSPAPSVAFFSSRGPNKASPGILKPDITGPGMNILAAWAPSEMHPEFADDVSLPFFMESGTSMSTPHLSGIAAIIKSLHPSWSPAAIKSAIMTSSGTADHAGVPIKDEQYRRASFYSMGAGYVNPSRAVDPGLVYDLGAGEYIAYLCGLGIGDDGVKEITGRRVACAKLKAITEAELNYPSLVVKLLSHPITVRRTVTNVGKANSVYKAVVDMPRAVSVVVRPPVLRFARANEKQSFTVTVRWNGPPAVAGAEGNLKWVSSEHVVRSPIVIPPAKAVA

SEQ ID NO: 187245 - protein, 108 aa, Zea mays
  Clone ID: MRT4577_102354C.1.pep
GGTIIVLSVATPVAWRKLSTTMLGTRTDTVDHYVRPDSQHKLRGRERGRRQLHRKPDLHEQHAEDGRAHPRCAPCSPIRMTTILRNCTTEIATQNDLDEGENALHDKS

SEQ ID NO: 187246 - protein, 95 aa, Zea mays
  unsure (1)..(95): unsure at all Xaa locations
  Clone ID: MRT4577_102355C.1.pep
EKEDPKGIPEYTLTVFSXVDLLSDMVQEHNEPILKHLKDIKVKFSDAGQPMSFVLEFHFEPNEYFTNEVLTKTYRMRSEPDDSDPFSFDGPEIMG

SEQ ID NO: 187247 - protein, 285 aa, Zea mays
  Clone ID: MRT4577_102356C.1.pep
MRTQRSLLPLLLLSAAALLADAQDRKNYVVHLEPRDGGSTASLEEWHRSFLPEATLDSAADDGPRIIHSYSHVLTGFAARLTDAEAETLRRKEGCLRLYPEEFLPLATTHSPGFLGLHMGKDGFWSRSGFGRGVVIGLLDTGILPSHPSFGDAGLPPPPKKWKGACQFRSIAGGGCSNKVIGARAFGSAAINDSAPPVDDAGHGTHTASTAAGNFVQNADVRGNAHGTASGMAPHAHLAIYKVCTRSRCSIMDIVAGLDAAVKDGVDVLSFSSPWPSSRRAGRER

SEQ ID NO: 187248 - protein, 73 aa, Zea mays
  Clone ID: MRT4577_102357C.1.pep
FSSCLQLSIAFCDHFEESQYYKDLAVGDLVRLGFAKILWGISDTVDWVSMLKSWSRAISHFSLCHVLGNFVAA

SEQ ID NO: 187249 - protein, 57 aa, Zea mays
  Clone ID: MRT4577_102358C.1.pep
YIFFLFYSIGAGSIVYSKGDISRLPKSMRQTYVYKQEKEEVKYVKPTHASSMQSTQA

SEQ ID NO: 187250 - protein, 100 aa, Zea mays
  Clone ID: MRT4577_102359C.1.pep
FGGVFPLAFQMLFFSVCLVPPPSFWFARPALFVVRLPRFLGSVCTPLRCGFVALPDSVTVAARAGWRFLFRLWSAPGSRFLSSCVLSVGGARAVTSLSSN

SEQ ID NO: 187251 - protein, 69 aa, Zea mays
  Clone ID: MRT4577_10235C.1.pep
KNQRVKKPRGELFLPKKGGSKSLLVFKKDAPKVVDFVLIKAIEGGPELKTFFGGGFFFRGGANPPKRGF

SEQ ID NO: 187252 - protein, 68 aa, Zea mays
  Clone ID: MRT4577_102360C.1.pep
PPRPQLTPLVLKHHQYTPNLTAQKPTHIKFHNSMVRGTLQFTPRIAFRSVLHRCDTRHTRSRESCRPR

SEQ ID NO: 187253 - protein, 125 aa, Zea mays
  unsure (1)..(125): unsure at all Xaa locations
  Clone ID: MRT4577_102361C.1.pep
MGPLPNFQPFTLRGVPNKNGPSKEPRAPKKKKKSGPGTQFFPKGKLFLNPGETNLENFFFPGAPXSRPQNSKGFKGGPGXLFPLGHKTPKWGGGLGPPPGRGGVPNPPXWGPFCPKGWGPCTRPP

SEQ ID NO: 187254 - protein, 31 aa, Zea mays
  Clone ID: MRT4577_102362C.1.pep
TLIDSTVHGLAARWDHSQTWTGRYCCKMTTT

SEQ ID NO: 187255 - protein, 123 aa, Zea mays
  unsure (1)..(123): unsure at all Xaa locations
  Clone ID: MRT4577_102363C.1.pep
KKKTNPGAPSPSGFSQCLGQFINQVAPPDFPPGNRPVNSTQLLSVGPPVWPPRLTALYFGRKCCGKLFPHSNFPQQSAIPILTPPSKGTPDRQTGSAPRFRAGVTSANXAPKNNTEKKKKKKR

SEQ ID NO: 187256 - protein, 259 aa, Zea mays
  Clone ID: MRT4577_102364C.1.pep
MAARNILRGAACGHRFLVPVPSGALAGSGSRSIGAVAQGLRHYAADEAVGNLELHAPKAKRRSYIPTKNGTAMMLPLHIHYEDVLRQDLLLKQNHANIMQVPGLFEVKLAPKAGSDLKIPIGKMAMEVLSGQRFKEAKIDPFAKARKSSRTNPFIGADKDGSTAFAQPTVLRGHAMYNFLVRMLTVMSMLNSRADIRENTVKFFMETEFCEFSPELEDHFEIFEHIRGFNVTIVTSANTKDETSLLWSGFMLNDEGETK

SEQ ID NO: 187257 - protein, 66 aa, Zea mays
  Clone ID: MRT4577_102365C.1.pep
MSLQSGCCNSHPIFSCQHSLAFPGIFFHPGSLVKGGGVSLANPGGGAYPKNSIVRGGMKCSIRRIF

SEQ ID NO: 187258 - protein, 316 aa, Zea mays
  Clone ID: MRT4577_102366C.1.pep
RPAGAPFRTPVRSARVKLQPRIVVVVGCGGGRATSLSYKESFIVRCYEVGINKTATVETIANLLQEVGCNHAQSVGFSTDGFATTTTMRKLGLIWVTNRMHIEIYKYPAWGDVVEIETWCQEDGKIGTRRDWILKDLCTGEVTGRATSKWVMMNQNTRRLQRVSDDVRDEVFIHCPKTPRLAFPEENNGSLKKIPNLSDPAQYSRLGLVPRRADLDMNQHVNNVTYIGWVLESIPQDIIDTHELQTITLDYRRECQPDVLVDSLTYVEEGEERSMNGSASSVPHTEQRRQFLHCLRFAANGDEINRGRTAWRKLAR

SEQ ID NO: 187259 - protein, 317 aa, Zea mays
  Clone ID: MRT4577_102367C.1.pep
CGARGVRRRCPGSRRLRRATRLSQRLRLGNLLEDGLSYKESFIVRCYEVGINKTATVETIANLLQEVGCNHAQSVGFSTDGFATTTTMRKLGLIWVTNRMHIEIYKYPAWGDVVEIETWCQEDGRIGTRRDWILKDLANGEVIGRATSKWVMMNQNTRRLQRVSDDVRDEVFMHCPKAPRLAFPEENNGSLKKIPNLSDPAEYSRLGLVPRRADLDMNQHVNNVTYIGWVLESIPQDIIDTHELQTITLDYRRECQQDDIVDSLTCIEEGEEKSMNGSASAAAPHKEERQQFLHCLRFAANGHEINRGRTVWRKLAR

SEQ ID NO: 187260 - protein, 366 aa, Zea mays
  Clone ID: MRT4577_102368C.1.pep
MLRCHTPPQCARAPLRHHGRWESPPAAAPAVVVRCARGAPQVSGIEAASPGHAAVTAALAKAEGGDARPSLAERLRLGNLLEDGLSYKESFIVRCYEVGINKTATVETIANLLQEVGCNHAQSVGFSTDGFATTTTMRKLGLIWVTNRMHIEIYKYPAWGDVVEIETWCQEDGRIGTRRDWILKDLANGEVIGRATSKWVMMNQNTRRLQRVSDDVRDEVFMHCPKAPRLAFPEENNGSLKKIPNLSDPAEYSRLGLVPRRADLDMNQHVNNVTYIGWVLESIPQDIIDTHELQTITLDYRRECQQDDIVDSLTCIEEGEEKSMNGSASAAAPHKEERQQFLHCLRFAANGHEINRGRTVWRKLAR

SEQ ID NO: 187261 - protein, 211 aa, Zea mays
  unsure (1)..(211): unsure at all Xaa locations
  Clone ID: MRT4577_102369C.1.pep
MLRCHAPPQCGRAPLRHHGRWESSPAXGWWCGARGVRXVSGIEAASPDHAAATAVAAKAEGGDARPSLAERLRLGSLLEDGLSYKESFIVRCYEVGINKTATVETIANLLQEVGCNHAQSVGFSTDGFATTTTMRKLGLIWVTNRMHIEIYKYPAWGDVVEIETWCQEDGKIGTRRDWILKDLCTGEGTGRATSKWVMMNQNTRRLQRVSD

SEQ ID NO: 187262 - protein, 270 aa, Zea mays
  Clone ID: MRT4577_10236C.1.pep
MGRSFGFPTLEDGLSVLSKDELVDSLAYNSIKGLILSNALRAQKNIEDEGCTMALNNLRSEVIELRNEGLEKDKILISLVNKIKEDEASSKVQAEAQKNEIEDLRKQLAEAKLKCAVAEAYRDATEYWKNYFEKTIAELRASKERCFEKSVECVEKIKTSFANVGAYSNEDNFIRGDPEGVIEWISSEAKAFEEILSDRGDVCAFSGARGVAAVLEKAAELSPPPEPFDPLADPETKKAIEIINMAEAIVDEVVTKLLTEAAEKVLKEEE

SEQ ID NO: 187263 - protein, 133 aa, Zea mays
  Clone ID: MRT4577_102370C.1.pep
GKKKNRFFFLGLQATAFLGQFTKISGGNYNPKRPFWSHPNPNGGSFLGRDGPIPHVTPIMPGMNPPLSCPAREQKNRLAPARSRTPHPPINPPIKELVGLTPGNPPPGGEGQGPPGGGRAPFARGGGPPGRAP

SEQ ID NO: 187264 - protein, 55 aa, Zea mays
  unsure (1)..(55): unsure at all Xaa locations
  Clone ID: MRT4577_102371C.1.pep
ERGDVDVLGRVEHWRVRRRLXHAGGARDPLHLLQRRFRRFRLAQLADRASAGSSR

SEQ ID NO: 187265 - protein, 101 aa, Zea mays
  Clone ID: MRT4577_102372C.1.pep
DMNQHVNNVTYIGWVLESIPQDIIDTHELQTITLDYRRECQHDDIVDSLTYVEEGEERSMNGSASSVPHTEQRRQFLHCLRFAANGDEINRGRTVWRKLAR

SEQ ID NO: 187266 - protein, 156 aa, Zea mays
  Clone ID: MRT4577_102373C.1.pep
MRTMVDLGKQRDHSYDHMQIITTPTSVDCSREFRHRRTLRSLIECMIPYCCTYQQQPYQNDTLSVSSTSSSSSSSDHSSSSQSSSTVSGTFFGHRRGRVSFCLQDAAVGSSPLLLLELAVPTAALAKEMDEEGVLRIALECDRRRSSNSPSSSIFD

SEQ ID NO: 187267 - protein, 110 aa, Zea mays
  Clone ID: MRT4577_102374C.1.pep
LLGPSSIVCVRIFTRWISVYWPQILAILYLVLIPACVWRAKPRTLKSGVRFSFFLHATYCVCLCIVQIVDSLAMLEMYDNSGGFKIGRRGVRHGLPLLQRWSVCWVDKAD

SEQ ID NO: 187268 - protein, 102 aa, Zea mays
  unsure (1)..(102): unsure at all Xaa locations
  Clone ID: MRT4577_102375C.1.pep
GRXTARFLFPPCLVSFVPGPFFSSHTGRLGLPPFFFWWWVAWRLPPSPRGCASVSLSPPGGPSVGGVLFLAYRFALFSGAVWWGSGSSLFLLLVGFTGGGVV

SEQ ID NO: 187269 - protein, 139 aa, Zea mays
  unsure (1)..(139): unsure at all Xaa locations
  Clone ID: MRT4577_102376C.1.pep
ELQCDLRTRRVPCNARGIDPSSRSSHQQCLAVFARFLYSAQGAGYQHSPPSFAIIAFLRPSPSVAIAADWKIXVSTLEMCRRRKRQRMETREGGGGDNRPGSENVRTGERRNARGYASLASPRPRRGDEGKPGRPRGSQ

SEQ ID NO: 187270 - protein, 55 aa, Zea mays
  unsure (1)..(55): unsure at all Xaa locations
  Clone ID: MRT4577_102377C.1.pep
TIIINIPCSQSRPKPHNPFSRGFLYLQYNTKQGVPLGGIFSQXTQXLLREKNLTD

SEQ ID NO: 187271 - protein, 58 aa, Zea mays
  unsure (1)..(58): unsure at all Xaa locations
  Clone ID: MRT4577_102378C.1.pep
SVTHSVXHSVKRGVVIVSSVLFFRTLISPINALGTGVALAGVFLYSQFKKSKPKATAA

SEQ ID NO: 187272 - protein, 412 aa, Zea mays
  Clone ID: MRT4577_102379C.1.pep
MLQLLRAMMALTERQPQLEKKPTRGRAPLSGKAVAALCVTSFVVGLLLSGNVSLMSASASPSSSSTDSEKSIRVSGCDNERKLGENHPKDLLNEVSRTHQAIQSLDKAVSTLEMEMAVERARGGGGGGGAASMASSRTPQKAFVVVGINTAFTSKKRRDSLRDTWVPRGDKLRKLEREKGIVVRFVIGHSGTPGGGALDRALDAEEAETRDFMRLDHAEGYHELSSKTRTYFTTAVATWDADFYVKVDDDIHLNLGMLASRLAKHRTRPRVYVGCMKSGPVLSQKGVKYHEPEYWKFGDEGNKYFRHATGQIYAISKDLAAYISINQPILHRFANEDVSLGAWLIGLEVEHVDDRSMCCATPPDCEWKKRAGNVCVASFDWSCSGVCKSVDRMRHIHKACGEGEGAVWNAAT

SEQ ID NO: 187273 - protein, 165 aa, Zea mays
  Clone ID: MRT4577_10237C.1.pep
GRKLISSTSAVIETAFLIMTLRNALFKALLASVTVSHGLALPAPQMGNYGENKGPVGGVDPPTPTVTSTSGSLYGDSSLLGGNAPPPDPDKSDSAVVKDPKLVKGQKADAKLGVYLDFDDVDVPQPMRGGLGATDPGPRTYEYEKLNPDLYAPPGTDTGDGPNAM

SEQ ID NO: 187274 - protein, 808 aa, Zea mays
  unsure (1)..(808): unsure at all Xaa locations
  Clone ID: MRT4577_102380C.1.pep
MSDRCDLMYEGFKKGGCHTSEWFAKTQMFLDHAAALSQIDNIRCPCNKCRNMTSHTKRQVTLHLCSHGFVPGYKVWYLHGESRLERAAEVEVDDGEDVDKMDQMHEDLQPELAPDHHDSLTPEVQKFFDLLKASQEPLHGHTDVTVLEFVTQLMSIKSKFAFSINCYKELVDLISEVLPTGHKMPKDMYQSKKLLEGLGMEYEKIDEHDREQKCLKCGKSRYVELVNEEGEKVVTKVPHKQLRYMPLTPRVKHLFLSRKTAMHMRWHKDXVRTDXGLMVHPSGGDAWKALDNFDPEFASDARNVRIGVATDGFTPFNMTAASYSCWPVIAIPYNLPPALCMKYEFMFLCLVIPRPEHPGVCLNVMLQPLIEELKKLWQGVEAYDCFKKQKFNLCVVYLFSVHDFMAYGIFSGWSVHGRLTCPYCAKDTYCFCLSAGGKICYFDCHRCFLPFNHPFRRQRKEFRKGTIITKGLPKRRSGIEITEEHRKLILDESGKKYQGFGEEHNWTHICGLRELPYAKSLILMHNIDVMHQESNFYQALINTCMDFPDKTKDNDKSQIDVMKGRYFCDISIVRARGDSSAPVPEADIVVVYRSFMKAGLRFPLNRFLIEVLKTFEVYLHQLTPESIIRMGIFVWAVRSQGLEPNAKSFCNIHELLYETKPWGKEQYHNNFGCYSFGARSGSSCPVPTFRKRWPDDWMTEWFYVKNDLKSREDIKGIIMRPIWQRFGLRRPKVEMNKAAEECQRAFGVVCSFIGTRDLVQEHIAFRVWPLVEKWEMPKETIKETDEGRRYCIICGLREPEKEETKQSF

SEQ ID NO: 187275 - protein, 70 aa, Zea mays
  Clone ID: MRT4577_102381C.1.pep
TLVSYSLLARVSPVTHSVANSLKRVVVIVSSVLFFRTLISPINALGTGVALAGVFLYSQFKKSKPKATAA

SEQ ID NO: 187276 - protein, 64 aa, Zea mays
  Clone ID: MRT4577_102382C.1.pep
TLSFGSSCFTLAGYPAFWAVSSHPLVDAPRGAAGPGRSGLSPPGVLFQRLGPGPCCDLLRLRSG

SEQ ID NO: 187277 - protein, 382 aa, Zea mays
  unsure (1)..(382): unsure at all Xaa locations
  Clone ID: MRT4577_102383C.1.pep
MTVFLRACTHAFGAQALAERQPQLEKKPPRGGRAPLSGKAVAALCVTSFVVGLLLSGNVSLMSASAAAAASSSYSSRDSVSGCDNKRCAYSLARTSSLASNPTMNNLWXKLGENQHPKDILNEVSRTHQAIQSLDKAVSTLEMEMAVERARSAAXVASGRSPPQKAFVVVGINTAFTSRKRRDSLRDTWVPRGHKLRKLEREKGVVIRFVIGHSGTPGGGALDRALDAEEAESRDFLRLDHAEGYHELSSKTRSYFTTAVATWDADFYVKVDDDIHLNLGAQTGSCVIVKSNVVTGWVYYYTPFANEDVSLGAWLIVLEVEHVDDRSMCCATPPDCEWKKRAGNVCVASFDGSCSGVCKSADRMMRHIHCGEGDGAVWNAAT

SEQ ID NO: 187278 - protein, 1630 aa, Zea mays
  Clone ID: MRT4577_102384C.1.pep
MGDRRDWMYEGFKKGGCHTSEWFAKTQIFLDHAAALSQIDNIRCPCNKCRNMTSHTKRQVTLHLCSHGFVPGYKVWYLHGEDAERATEVEVDDGEDDVDRMDQMLDDLQPELAPDHHDSPTPEVQKFFDLLKASEEPLHGQTDVTVLEFVTRLMSIKSKFAFSINCYKELVDLISEVLPMGHKMPKDMYQSKKLLEGLGMEYEKIDVCQDNCMLFWKEHGREQKCLKCGKSRYVELVNEDGEKVVTKVAHKQLRYMPLTPRVKRLFLSRKTAMHMRWHKDCMDRQDGLMVHPSDGDAWKALDKFDPDFASDARNVRIGLATDGFTPFNMTAASYSCWPVIAIPYNLPPALCMKYEFMFLCLVIPGPEHPGVRLNVMLQPLIEELKKLWQGVEAYDCFKKQKFNLRVAYLFSVHDFMAYGIFPGWSVHGRLTCPYCAKDTDCFRLSAGGKICYFDCHRCFLPFNHPFRRQRKEFRKGTIVTKGPPKRRSGIEITEEHMKLVLDESGKRYQGFGEEHNWTHICGLWELPYAKSLILMHNIDVMHQESNFCQALINTCMDFPDKTKDNDKARMDLAVICDRPTQVLRENGGKPKADYCLKSKQRREVMKWMKDIKFPDGYAAGFRRSVNLKTMKMNGLKSHDFHIIMERLMPVMFRGYISEAVWKTLAEVSYFYRQLCGKEIRRDVMEQLEKEAPVLLCKLEKIFPPGFFNPMQHLFIHLPYEAKVGGPVQYRWMFHIERALKKLRAMVGNKARVEGCIAEQFKLKEVAHFTSCYFAEEHNVFARKKRYHDDEREMPPCSDLSIFQTNGKAVGPPKAYHLSMEERKSALLYMFTNMPEVEEYFVEFDEQNMRCLGRPTARDIDKLRRDGMHGRPNFIMWLRDCFGEEMNLNDDLRQLSIGSVTAKSYGRYDVNGYRFRSSIFESSHPMAATQNSGVVTRATDMEGHEACYYGKIKNIIEITFAGNKPLALVFFECKWMPPKSKKSVKGLFKGLGLFQGSSSSSSRRRELLSAVHGDEDEQHTEEQHIEEEQHNEAEQHNEEVEHNEEVEHVTWDQAAQHHQPWDQWDHQREQQQAWDQWGQQGEPADNPMDDGSGGSSATRTRRSRKSHSVKPRHAIEREADRTLIMPHGDRNWEDLSFDGKGHHTQVNLTLGSLCRLHYPGIVKVSNGDTEDAVLVSTWDEYKFKKERNHTDRQGLVRNDFWLRYRLPDGEDYMGHAERVFQNNAKKLVKDAIYYARIQDTNLYFQKHPEEAGPLTKKEGSSKIYLTEDQYREVMVPWMAPVPDAYYAWCRYWASEGFQKASAHHRQCRGTNPNHKFGGDDMIRKAKRMEATSGQKPSDIEVYQEGHKGPDPNNPDQLCSQTTTDRLAAYGEEMVRRHGPDFDWRHEPVDPSVVYASGGGKAHGRYTLFDGFIDSSSVRSQRTGSSSRSSCSRRPNEQELEIMRMHEEMRQQREFMEACNAHNQAIYQLMQQQGMTPNIPPPPQWSQFTSTPALGLGTQQFNTPPTHIPAPGDRRAETRAEGSVTYSSQSDGKVVQVVVVGAMVCALNGHVPCGLRLKPGSGLSCSFETGSDEARQKRRFHGEGTSREMRISLSTSLVREKPRTRRGFEWPSSGVSGESCSHSLDLRVWFRW

SEQ ID NO: 187279 - protein, 285 aa, Zea mays
  Clone ID: MRT4577_102385C.1.pep
PRPKLVLKAIPFPYTITTFHFASGTFFITLMWLLNLHPKPRLSLKQYAKLLPLALIHMLGNVFTNMSLGKVSVSFTHTIKAMEPFFSVLLSILFLGETPSLPVLGSLVPIVGGVVLASMTEVSFNWIGFWSAMTSNLMNQSRNVYSKKILADKEDSLDDINLFSIITVMAFLLSAPLMLCVEGIKFSPSYLQNAGVNVKELFIRAALAGTSFYFYQQVSYSLLARVSPVTHSVANSLKRVVVIVSSVLFFRTLISPINALGTGVALAGVFLYSQFKKSKPKATAA

SEQ ID NO: 187280 - protein, 53 aa, Zea mays
  Clone ID: MRT4577_102386C.1.pep
RAMYLNIKRNARGEYAHLYRYTLHFLITSYIGYISLLFTHFPWISSRKCKTLA

SEQ ID NO: 187281 - protein, 1555 aa, Zea mays
  unsure (1)..(1555): unsure at all Xaa locations
  Clone ID: MRT4577_102387C.1.pep
MGDRRDWMYEGFKKGGCHTSEWFAKTQIFLDHAAALSQIDNIRCPCNKCRNMTSHTKRQVTLHLCSHGFVPGYKVWYLHGEDVERATEVEVDDGEDDVDRMDQMLEDLQPELAPDHHDSPTPEVQKFFDLLKASEEPLHGHTDVTVLEFVTRLMSIKSKFAFSINCYKQLVDLISEVLPTGHKMPKDMYQSKKLLEGLGMEYEKIDVCQDKCMLFWKEHGREQKCLKCGKSRYVELVNEDGEKVVTKVAHKQLRYMPLTPRVKRLFLSRKTAMHMRWHKDXVRTDXGLMVHPSDGDAWKALDKFDPDFASDARNVRIGLATDGFTPFNMTAASYSCWPVIAIPYNLPPALCMKYEFMFLCLVIPGPEHPGVRLNVMLQPLIEELKKLWQGVEAYDCFKKQKFNLRVAYLFSVHDFMAYGIFSGWSVHGRLTCPYCAKDTDCFRLSAGGKICYFDCHRCFLPFNHPFRRQRKEFRKGTIVTKGPPKRRSGIEITEEHMKLVLDESGKRYQGFGEEHNWTHICGLWELPYANSMILMHNIDVMHQESNFCQALINTCMDFPDKTKDNDKARMDLAVICDCPTLVLRENGGKPKADYCLKSKQRKEVMKWMKDIKFPDGYAAGFRRSVNLKTMKMNGLKSHDFHIIMERLMPVMFRGYISEAVWKTLAEVSYFYRQLCAKEIRRDVMEQLEKEAPVLLCKLEKIFPPGFFNPMQHLFIHLPYEAKVGGPVQYRWMFHIERALKKLRAMVGNKARVEGCIAEQFKLKEVAHFTSCYFAEEHNVFARKKRYHDDEREMPPCSDLSIFQTNGKAVGPPKAYHLSMEERKSALLYMFTNMPEVEKYFVEFDEQNMRCLGRPTARDIDKLRRDGMHGRPNFIMWLRDRFGEEMNLNDDLRQLSIGSVTAKSYGRYDVNGYRFRSSIFESSHPMAATQNSGVVTRATDMEGHEACYYGKIKNIIEITFAGNKPLALVFFECKWMPPKSKKSVKGLFKGLGLFQGSSSSSSRRRELLSAVHGDEDEQHTEEQHIEEEEHNEAEQHNEEVEHNEEVDHVTWDQAAQHHQPWDQWDHQREQQQAWDQWGQQGEPADNPMDDGSGGSSGTRTRRSRKSHSVKPRHAIEREADRTLIMPHGDRNWEDLSFDGKGHHTQVNLTLGSLCRLHYPGIVKVSNGDTEDEVLVSTWDEYKFKKERNHTDRQGLVRNDFWLRYRLPDGEDYMGHAERVLQNNAKKLVKDAIYYARIQATNLYFQKHPEEAGPLNKKEGSSKIYLTEDQYREVMVPWMAPVPDAYYAWCRYWASEGFQKASAHHRQCRGTNPNHKFGGDDMIRKAKRMEATSGQKPSDIEVYQEGHKGPDPNNPDQLCSQTATDRLAAYGEEMVRRHGPDYDWRHEPVDPSVVYASGGGKAHGRYALFDGFIDSSSVRSQRTGSSSRSSCSRRPNEQELEIMRMREEMRQQREFMEACNAHNQAMYQLMQQQGMTSNFPPPPQWSQFANTPVPPPQFTTPPTHIPAHGDRVTPEAGGSGSDPAAGTGFVDSLFAFPPPGGEGGSGQSSNHPSGGYL

SEQ ID NO: 187282 - protein, 77 aa, Zea mays
  Clone ID: MRT4577_102388C.1.pep
PKVPFKVFRVPKGGPFSPVVKYPPGEFKVPPQTRAFFPKDGIGIPPPQRAGNVFFKHGLEVGFIPPEKVGAGVMFSG

SEQ ID NO: 187283 - protein, 96 aa, Zea mays
  unsure (1)..(96): unsure at all Xaa locations
  Clone ID: MRT4577_102389C.1.pep
MECGGALQLPPGFRFHPTDDELVMYYLCRKCGGLPLAAPVIAEVDLYKFNPWDLPERAMGGEKEWXXFSXXDREYPNGQXANRAXGTGXWKXTGAD

SEQ ID NO: 187284 - protein, 57 aa, Zea mays
  Clone ID: MRT4577_10238C.1.pep
PPPRKSGISKDMAIPRLSDTRASVMFGPGSGRRYARSAELELPPGINRAEAVATVSG

SEQ ID NO: 187285 - protein, 80 aa, Zea mays
  Clone ID: MRT4577_102390C.1.pep
QVFGCCVCWGCCRAQIPIPARMDGFVYGGKPPPAWGETVVVEAFLDPVCPDSRDAWPALKKVVDHYSNRVSVVAHLFPLP

SEQ ID NO: 187286 - protein, 50 aa, Zea mays
  Clone ID: MRT4577_102391C.1.pep
VPASPPGSGSPFGCLRGAPWSVFCALVARALVARGFGGLTAPLLKNPPVN

SEQ ID NO: 187287 - protein, 48 aa, Zea mays
  Clone ID: MRT4577_102392C.1.pep
IGVLLIQVASCIMKQVGLNMHALVYTIQICMPYTSGSYTHVQYRQSLI

SEQ ID NO: 187288 - protein, 56 aa, Zea mays
  Clone ID: MRT4577_102393C.1.pep
FGSRTGLFGWLDVPLDALARRRAKGGTVYGTIVDQPSDDPYTLELFKVMMLAEQEG

SEQ ID NO: 187289 - protein, 74 aa, Zea mays
  Clone ID: MRT4577_102394C.1.pep
AQFSSLRLSAGSRLLLQRGHRRGEGLGTGGCGMQGCRALGWSDTVAVAAAKFVASAVRTRRRETRRARSLSGVG

SEQ ID NO: 187290 - protein, 170 aa, Zea mays
  Clone ID: MRT4577_102395C.1.pep
SSVMSRAHHKLSYKYFGPYPVEARVGKVAYRLKLPDSSRIHPVVHVSQLKLAAGFKGAAHSTLPVSLPDHSVPVQVLQTRGITKGHRQVQQVLVAWSGLPQELATWEDREALQQCFPAAPAWGQAATQGEGNVSTEGVEDVVASVAPTDGLRPTRARRPNTRVCGPNWRK

SEQ ID NO: 187291 - protein, 34 aa, Zea mays
  Clone ID: MRT4577_102396C.1.pep
SWGADWGENGYFKMEMGKNMCAVATCASYPIVAA

SEQ ID NO: 187292 - protein, 63 aa, Zea mays
  Clone ID: MRT4577_102397C.1.pep
TVFYYSKNRFFFLISLFTPPLLNWISLPEIWKSDLLFPSPHWQESLRHSNAARQDTSCKGFPF

SEQ ID NO: 187293 - protein, 110 aa, Zea mays
  Clone ID: MRT4577_102398C.1.pep
HYFITLRHACIPRPDAHRTPHLINRVAVNVGADLVRQGDAALAGQRGGAADVGAAPVGASVASFGAAMPLPRSRSAGLTYDMMAGQGSAAQQAEIDAYGFADSGVFRPGR

SEQ ID NO: 187294 - protein, 90 aa, Zea mays
  Clone ID: MRT4577_102399C.1.pep
MAAPKLATLALAVLLAATAVAPPAAVRAAMSCSTVYSTLMPCLPFVQMGGAMPPQPCCGGIRSLLQQANNTPDRRAAALPSTNVNCNTIN

SEQ ID NO: 187295 - protein, 116 aa, Zea mays
  unsure (1)..(116): unsure at all Xaa locations
  Clone ID: MRT4577_10239C.1.pep
TKKGFSKKKGGKTPPLGEKPRSFLNPFLAPLAFFFSGDFSVAKGAVSFARCPSPXFYSPLLLEPPLPGPFFXDPNLARQPPPSPGKIXQHRPLREPPPPIFLPAVSPPPPPNAFYF

SEQ ID NO: 187296 - protein, 125 aa, Zea mays
  Clone ID: MRT4577_1023C.1.pep
ARNSARGTSDSRYFLHGKGGHSGAKLEGELACDPHPAAGVVSPGSSQVKDVLQVISKRASDKGWVELTPKDELVGTGRADAGDEWQATSQKGKGDPTGGGFTEGDPGGEDTGHHLEGGEGAVLQD

SEQ ID NO: 187297 - protein, 87 aa, Zea mays
  Clone ID: MRT4577_102400C.1.pep
YLKKRYLSALHGVETALLRLPWCSSCGKDSAASSKSEDFYELELNIKGFNNLEESLDDYFSEEGLVGENQYFCESCQKRVDATRCIK

SEQ ID NO: 187298 - protein, 101 aa, Zea mays
  Clone ID: MRT4577_102401C.1.pep
MAAPKLAMSCSTVYSTLMPCLPFVQMGGAMPPQPCCGGIRSLLQQANNTPDRRTICGCLKNVANGANGSGTYISCAAALPSKCGVALPYKISTNVNCNTIN

SEQ ID NO: 187299 - protein, 261 aa, Zea mays
  Clone ID: MRT4577_102402C.1.pep
PLCTKGSRILIAGTMSRPNTRNKNKRPRADESNSPSVAVFKKIHSTGDISKSDICQLYMVWKPLCHGCHGNSKDSPNCFCGLIPIGNGVRKSGLWQKTQEIIRGLGPNPSSDLRDSSETPAGLTNLGATCYANSILQCLYMNTSFRSGIFSLDLDVLKKHPVLDQLVRLFAQLQSSKMAFIDSTPFIKALELDNGVQQDSHEFLTLFLSLLEQSLSHSKVPGTREIVQHLFRGSVSHVTRCSSCGKDSAASSKSEDFWKPA

SEQ ID NO: 187300 - protein, 55 aa, Zea mays
  Clone ID: MRT4577_102403C.1.pep
ELHIFFIIRSKVQRSKVDRHKQNKLAHCGQKRRLKKKDGFISKTRQTTDLISRRG

SEQ ID NO: 187301 - protein, 123 aa, Zea mays
  Clone ID: MRT4577_102404C.1.pep
MAAPKLATLALAVLLAATAVAPPAAVRAAMSCSTVYSTLMPCLPFVQMGGAMPPQPCCGGIRSLLQQANNTPDRRTICGCLKNVANGANGSGTYISRAAALPSKCGVALPYKISTNVNCNTIN

SEQ ID NO: 187302 - protein, 147 aa, Zea mays
  Clone ID: MRT4577_102405C.1.pep
MSSNSSNTDLINQLLSLPVDFTMDPLVIPTTTNVVRPKKSRVTLEDKDQKTKERILRNRAAAQESRDKKRRYVSDLESSNKRLEEENGQMKKKMKHLEEENMSLACQLESISKQFAALQAQIKFNTNSTFLFNDFCSARIVKEIICG

SEQ ID NO: 187303 - protein, 101 aa, Zea mays
  Clone ID: MRT4577_102406C.1.pep
TTPQSANRRAYLSLLHCTALPCHHIMGGAMPPQPCCGGIRSLLQQANNTPGRRTICGCLKNVANGANGSGTYISRAAALPSKCGVALPYKISTNVNCNTIN

SEQ ID NO: 187304 - protein, 95 aa, Zea mays
  Clone ID: MRT4577_102407C.1.pep
CSYLLSGIPIPPLHRYNKSNLFLPNIVYWHVHSLFGSITIHKLLCTCCNFYWIRYDIPEKNVPCFVILLANAPNYSTFCIYILLALRIKYLVRKI

SEQ ID NO: 187305 - protein, 123 aa, Zea mays
  Clone ID: MRT4577_102408C.1.pep
MAAPKLATLALAVLLAATVVAPPAAVRAAMSCSTVYSTLMPCLPFVQMGGAMPPQPCCGGIRSLLQQANNTPDRRTICGCLKNVANGANGSGTYISRAAALPSKCGVALPYKISTNVNCNTYG

SEQ ID NO: 187306 - protein, 150 aa, Zea mays
  unsure (1)..(150): unsure at all Xaa locations
  Clone ID: MRT4577_102409C.1.pep
LIHSWKADSCLESFFAVPRARTKQTAGKSTGGKAPRKQLATKVARRSAPATGGVKKPHRFRPGTVALREIRKYQKSTELLIRKLPFQGLVREIAQDLKTDLRFQSSAVAGLKEAAEAYLGGLFEDTNLCAIHAKRVTIMPKDIQFARXIR

SEQ ID NO: 187307 - protein, 101 aa, Zea mays
  Clone ID: MRT4577_10240C.1.pep
TTSSSSTNLISRRKRKDCSQQRIFMDEITLPENQSTKLCCFQTETHQEFLQLYARCLVILLAFDPGVLFLLAFSTKMCTGLSRDQLDVYTFGGQEVIRHDK

SEQ ID NO: 187308 - protein, 67 aa, Zea mays
  Clone ID: MRT4577_102410C.1.pep
GPVTDSMFCEHCIPQYLSIPYLFILKDAYEHILILYILNYGFVITTVFFGLRKLWFGRRCSIFYLLH

SEQ ID NO: 187309 - protein, 123 aa, Zea mays
  Clone ID: MRT4577_102411C.1.pep
MAAPKLATLALAVLLAATVVAPPAAVRAAMSCSTVYSTLMPCLPFVQMGGAMPPQPCCGGIRSLLQQANNTPDRRTICGCLKNVANGANGSGTYISRAAALPSKCGVALPYKISTNVNCNTIN

SEQ ID NO: 187310 - protein, 123 aa, Zea mays; identical to SEQ ID NO: 187309
  Clone ID: MRT4577_102412C.1.pep

SEQ ID NO: 187311 - protein, 172 aa, Zea mays
  unsure (1)..(172): unsure at all Xaa locations
  Clone ID: MRT4577_102413C.1.pep
LVPGFFRGFPLILWKPAFPPLGELNPLPPPERPGPRGHLPGKGXPPKPNPPPPGGGPXLKQGAPPXPPWKPGSGPPPINLGGPPPXPPGLSPXPPAPFLGGLVGGYHFPPGNTFAPVSPQLGPPAGPPRPAPPWVGIPPFPRPPGPVKKKKKKKKKKKKKKKKKKKKKKNKK

SEQ ID NO: 187312 - protein, 82 aa, Zea mays
  Clone ID: MRT4577_102414C.1.pep
PSHFIKTSKAKTINRDNNTVGRTFNYLPPPGPAPTTRACSKMVYLGGGHGDTNGLVLLLPLGGAVLGAHHVFSCPDNGCHCP

SEQ ID NO: 187313 - protein, 67 aa, Zea mays
  Clone ID: MRT4577_102415C.1.pep
PYSGCYFRYLSLPLYFSCKSVTITRYFVFSRTIACSTLSDYKPSLFENIHLKWPTAEYLKLRPGSSR

SEQ ID NO: 187314 - protein, 74 aa, Zea mays
  unsure (1)..(74): unsure at all Xaa locations
  Clone ID: MRT4577_102416C.1.pep
LFPAPPASLGAXLLGXLRSLVLLXWGRXXPXLSLXPLACXXFVAXXLLPPGSXRLVSPPLLRLXSVXXLPLGRF

SEQ ID NO: 187315 - protein, 54 aa, Zea mays
  Clone ID: MRT4577_102417C.1.pep
GFSCPVMAYCTTHFCPSLSTTTRTTFEQAQLLTIATNIFVGSILSLRHLLCWAL

SEQ ID NO: 187316 - protein, 80 aa, Zea mays
  Clone ID: MRT4577_102418C.1.pep
GWGKTTHFDVYALENHDPPAPLKGKIPKMIMGRALGAVTFLNNTFPPWWSGSTHNFKKIRSFYKLPPPRPGNPLLAALGM

SEQ ID NO: 187317 - protein, 53 aa, Zea mays
  unsure (1)..(53): unsure at all Xaa locations
  Clone ID: MRT4577_102419C.1.pep
LGGFLLTIIFYMLLTTIRDGHGLNIMVFILHXXRLNRPNCIFFWXXIITFFFF

SEQ ID NO: 187318 - protein, 66 aa, Zea mays
  Clone ID: MRT4577_10241C.1.pep
LLGAKSDHLIARSRLEARLRRMVTTGVYIATKRKTTNVADDRVAARFAALMLLDTVDDHRAHYYSE

SEQ ID NO: 187319 - protein, 62 aa, Zea mays
  unsure (1)..(62): unsure at all Xaa locations
  Clone ID: MRT4577_102420C.1.pep
GFTHAFFNHCXXPSNSXNLETPWXVHLRQCVSQXTTLMSCKXPNNVCVCALGLVALRPYSRC

SEQ ID NO: 187320 - protein, 82 aa, Zea mays
  Clone ID: MRT4577_102421C.1.pep
APTQYEALKPEPPSPDETGRSGAALDARDLEVLSELYTKKTQWYHFSSFEVCCMGLFIDPYDLYCISLETKVLYQIYYTVEG

SEQ ID NO: 187321 - protein, 81 aa, Zea mays
  unsure (1)..(81): unsure at all Xaa locations
  Clone ID: MRT4577_102422C.1.pep
IDLLNPPAELLKLKHKKKRLVQSHNSXFCMDDKCQGGFSITTVVKHSQTGCGCPGXQTVLCQPTGGKAGVMGGWSFRRKGD

SEQ ID NO: 187322 - protein, 180 aa, Zea mays
  unsure (1)..(180): unsure at all Xaa locations
  Clone ID: MRT4577_102423C.1.pep
GSRFMLYVHSKMFIVGGXSMVIRSAGLPHRSMEGPRDSEVAMGLYQRFRLKTRQPGRARILGVRLSLGHEGLVFLKGVFQRRDTLECVMKVDKVPXNVWNRWCLENRGQDVPFSLGGYPFGVAGDPNVAVLTGLEIFADPFFLGPRDLAVFLAVFPQGVESTIQGAAIFAFFSGHPLVSL

SEQ ID NO: 187323 - protein, 45 aa, Zea mays
  Clone ID: MRT4577_102424C.1.pep
PFPKKKKKKKKKKKKKKKKKKKKKKKKKKKKKKKKKKKNTHHNHK

SEQ ID NO: 187324 - protein, 49 aa, Zea mays
  Clone ID: MRT4577_102425C.1.pep
GLPPKGTSRKPPRRGSSFWSQEVRSPRRVSKVWELRFLRIRFNSKGSIF

SEQ ID NO: 187325 - protein, 57 aa, Zea mays
  Clone ID: MRT4577_102426C.1.pep
VTTESTHSFTPILSPTPAMGSRYDEEVTVGSDRDLNERQLAQRRPTALRRGVDRIRQ

SEQ ID NO: 187326 - protein, 100 aa, Zea mays
  Clone ID: MRT4577_102427C.1.pep
FLPDPTESRRRWRRRPTPMWRWSILTSMTTTSWTRTPGLIQLPTPVFRLRSTIAVDYAPRMTNGRGFRVVPNSSATCDSLFVVVLLSYSLLCLPSLVPIQ

SEQ ID NO: 187327 - protein, 141 aa, Zea mays
  Clone ID: MRT4577_102428C.1.pep
CAACRPSSEPRPASARAASPNTRSSSSRRRHLQPAVPPCCWERGVHYASSWHCRATTTSVTTARWPICCSSREAGAEAGLEEATITAARGALPGPGTAVAAPWRTPGRRARAGTTPPHAGSGRSPTPTPTSSGSAAAGGRE

SEQ ID NO: 187328 - protein, 90 aa, Zea mays
  Clone ID: MRT4577_102429C.1.pep
FGPLCSWATPQKPWGGWKNFWCFPKTIRFNFFGKFPMEKVWFFFKLFLLKVFFWTPFHNFFFVCSYFKVFNPFFFFSSNFFFLAFIKGFF

SEQ ID NO: 187329 - protein, 99 aa, Zea mays
  Clone ID: MRT4577_10242C.1.pep
LGPPKPQPALRGIGAGPLGSFFVPLGGQAPPFCWGNPARDPHQGQGGPPGFPPGKIHVLPPRRCFWCSNRGSPSLFGSPLYISLMGFSPGFLTRGFRFL

SEQ ID NO: 187330 - protein, 58 aa, Zea mays
  Clone ID: MRT4577_102430C.1.pep
YTKTALWSGRGFQPIKNLVGHESKVTSLDINGEGQKNGTVSLDCPIKIWLCRSSPQDN

SEQ ID NO: 187331 - protein, 77 aa, Zea mays
  Clone ID: MRT4577_102431C.1.pep
QTVRQSYLTLPDTSTTTTRNTTPTNRRTLATTRVNTIIYSRTYPGGSLAMLLTFPYLYRVNKRGRRRGRSSNQLRPT

SEQ ID NO: 187332 - protein, 377 aa, Zea mays
  Clone ID: MRT4577_102432C.1.pep
MATRYWIVSLPVQSPGATASSLWSRLQDSISRHSFDTPLYRFNVPDLRVGTLDSLLALSDDLVKSNVFVEGVSHKIRRQIEDLERAGGVESGTLTVDGVPVDTYLTRFVWDEGKYPTMSPLKEIVGSIQSQVAKIEDDMKVRAAEYNNVRSQLSAINRKQSGSLAVRDLSNLVKPEDMITSEHLVTLLAIVPKYSQKDWLSSYETLDTFVVPRSSKKLYEDNEYALYTVTLFAKVVDNFKVRAREKGFQIRDFEYSPEAQESRMQEMEKLLRDQEAMRTTLLQWCYASYSEVFSSWMHFCAVRVFVESILRYGLPPSFLSAVLAPSTKSEKKVRSILDELSGDAHSLYWKSEDDVGVAGLGGETEAHPYVSFTINFV

SEQ ID NO: 187333 - protein, 127 aa, Zea mays
  unsure (1)..(127): unsure at all Xaa locations
  Clone ID: MRT4577_102433C.1.pep
MSPRPGPMSPPALTSPACGSGRCRRRGPPSKVWIYFEEMTMMEQGKEVSIFAIYHHSKETLSAKSSSDTRHLLQPFDHCRAKKEKERSVXFSXLKYNTNGSVMRWEYSVVFPRTELCHLIARLDLSL

SEQ ID NO: 187334 - protein, 401 aa, Zea mays
  unsure (1)..(401): unsure at all Xaa locations
  Clone ID: MRT4577_102434C.1.pep
MATRYLIVSLPVQSPGATASSLWSRLQDSISRHSFDTPLYRVSDPLRPVSFTRRDLISRSLTVRXFNVPDLRVGTLDSLLALSDDLVKSNVFVEGVSHKIRRQIEDLVRAGGVETGTLTVDGVPVDTYLTRFVWDEGKYPTMSPLKEIVGSIQSQVAKIEDDMKVRASEYNNVRSQLSAINRKQSGSLAVRDLSNLVKPEDMITSEHLVTLLAIVPKYSQKDWLSSYEKIDTFVVPRSSKKLYEDNEYALYTVTLFAKVVDNFKVRAREKGFQVRDFEYSPEAQESRKQEMEKLLQDQEAMRTTLLQWCYASYSEVFSSWMHFCAVRVFVESILRYGLPPSFLSAVLAPSTKSEKKVRSILEELCGNAHSIYWKSEDDVGVAGLGGETEAHPYVSFTINFV

SEQ ID NO: 187335 - protein, 192 aa, Zea mays
  Clone ID: MRT4577_102435C.1.pep
KFGTRFLSKLLSLSCSASASAANYALLLLSSHPAPTAFTYNVTIRLFASSRPDTSLRLFLSMLRAEVRVRPDAYTLPFLLLAAARCPAPALARSAHALLEKIGLGDHDHTVHSLITMYSCLDDHLAARRVFDGISHRDVVSWNSMVKAYERAGMVAEVKGCCGRWSPGRSGTNGVLLPVVLTACRDAAIWSW

SEQ ID NO: 187336 - protein, 70 aa, Zea mays
  Clone ID: MRT4577_102436C.1.pep
KKNINQNKEKKNIPCLKYTYPKLAPTNKRLSLLFSVNKKHFNCLFYTASFIRQPLLFSSYLSSITLFCSA

SEQ ID NO: 187337 - protein, 76 aa, Zea mays
  Clone ID: MRT4577_102437C.1.pep
MAQAMACMTGLSQGVLSSRRAANRARTADVDRAYGEAQAQAQAGRRAMLGLVATGIVGGALSHAVHAETVKTIKIG

SEQ ID NO: 187338 - protein, 195 aa, Zea mays
  unsure (1)..(195): unsure at all Xaa locations
  Clone ID: MRT4577_102438C.1.pep
LGSSRPAGAIAYDNAPFSQTPVKWNLPKLWGMSVLLGVVLAVGTWIALTTMLANSEDGGIVQNFGKIDEVLFLEISLTENWLIFITRANGPFWSSIPSWQLSGAILIVDILATLFCIFGWFVGGQTSIVAVVRIWIFSFGVFCVMGGLYYFMQGSTGFDNLMHGKSPKQNQKQRSLEXDFVVSLQRVSTQHEKSQ

SEQ ID NO: 187339 - protein, 54 aa, Zea mays
  Clone ID: MRT4577_102439C.1.pep
KVFFSPLVKLFFWLSIKGFPCGWGFFTLGATQIFWGTPYPLKDFLGFGNNLEIF

SEQ ID NO: 187340 - protein, 119 aa, Zea mays
  Clone ID: MRT4577_10243C.1.pep
PTSGYQPINCGASSKRDLGLSIRCFFFAPRRTLTCAFTATTQTLKTTRLHNLSSLWERECLLRGLLYVRNLQLTEEAGTLAHLCWPTKEGGWHLKAGYGVPGAGEPGGGCAAPVLVNEL

SEQ ID NO: 187341 - protein, 69 aa, Zea mays
  Clone ID: MRT4577_102440C.1.pep
YRREPFPLRACPYTGGANQPGYAESAVYNNEIYKQTIQRGLLYIITILPPSLTTECSRTMPSVHSPVLI

SEQ ID NO: 187342 - protein, 99 aa, Zea mays
  unsure (1)..(99): unsure at all Xaa locations
  Clone ID: MRT4577_102441C.1.pep
LIIVERLEVSDEGIIVQLKSEPVEYVSLNNFYVTIYEPKAGEILISGSYVVIIFCEVKLGKAFIIHPSMDWIWWLDGFXLIIPWKYVFPGIKCGPTMYY

SEQ ID NO: 187343 - protein, 110 aa, Zea mays
  Clone ID: MRT4577_102442C.1.pep
TQTYHRSRSYLLLKSKGEEEIVQLRKRLADYSMKESQILDDKYKLRIIFGLQAAATLSIPILIPRKALVATRRKGIANWHAKKLAKQHRVDLAKVTSTGTYDRITLTAEV

SEQ ID NO: 187344 - protein, 109 aa, Zea mays
  Clone ID: MRT4577_102443C.1.pep
TARKLILKPKILSHIVYHTYFLQDRNTHEHHPGAGLDFGWILTAASIPVGVIRSYVPVLVTLARSTLCCLASFLVPVGNALPPRGHRCFSWNQNGDGEGSCSLEPKNNP

SEQ ID NO: 187345 - protein, 119 aa, Zea mays
  unsure (1)..(119): unsure at all Xaa locations
  Clone ID: MRT4577_102444C.1.pep
AATVLEPTVILPTDIDTSGXVEETKXEGTQDVAVADEVMDSVNHVNNAVARSETENGNRKSEEGEKTFSIXXLRGRRNRXKQTLXRMPISLLNRPYDSQPFKLGYSRVIRDSEGPKSVA

SEQ ID NO: 187346 - protein, 49 aa, Zea mays
  Clone ID: MRT4577_102445C.1.pep
STHSSPDPLDDLDLTHDETWDENNAADNQCRRLLRLFSNEIKWYNLLPY

SEQ ID NO: 187347 - protein, 56 aa, Zea mays
  Clone ID: MRT4577_102446C.1.pep
FFTEAHTQGNTPFTTGAHSLVNISTKKKEWLLLCEECLPGPVLYCYDHQRNKLVSI

SEQ ID NO: 187348 - protein, 76 aa, Zea mays
  Clone ID: MRT4577_102447C.1.pep
VSAFDKQPPSGSAPDSPCVWEKRPQLIGIYEGQVSPIRKPIDGVWFVMARSIFITPPLKGQWTGWKQKEGNVCSSR

SEQ ID NO: 187349 - protein, 76 aa, Zea mays
  Clone ID: MRT4577_102448C.1.pep
KIGAHERADYSVTVMTITSSQNTLHQTVKDEHKLAALQFLSRGTRPKNKIHDNVTQEHWIESAGSCTPGTDPSVIE

SEQ ID NO: 187350 - protein, 45 aa, Zea mays
  Clone ID: MRT4577_102449C.1.pep
SRIISRKKSCSPAYLLPIFPDLSLHFLPLLLFLIQPILSLTHTMY

SEQ ID NO: 187351 - protein, 110 aa, Zea mays
  Clone ID: MRT4577_10244C.1.pep
MSDEARRGPAGAAQVVLRASSEDRKPVGSGSPPPAATATAVAHKIQLKSADMKEEMRQEAFEIARIAFEKHSMEKDIAEYIKKEFDKNHGPTWHCIVGRNFGRVRHMLTI

SEQ ID NO: 187352 - protein, 48 aa, Zea mays
  Clone ID: MRT4577_102450C.1.pep
PSHSKVFIFWAESNGVGASSLKKGNFYYEDQTIGTGERISNGNQLTHL

SEQ ID NO: 187353 - protein, 68 aa, Zea mays
  Clone ID: MRT4577_102451C.1.pep
LNSSPDARPDITQVWFRINELLPLELQKDLPDGSPSGSAFESHTATDEVSMRPQQMSGSSSREIQILL

SEQ ID NO: 187354 - protein, 74 aa, Zea mays
  unsure (1)..(74): unsure at all Xaa locations
  Clone ID: MRT4577_102452C.1.pep
LATNNGLKIKEHGGDDXFTLKEGPAGTWTLDTKAPLKYPLCIRFATKSGGYRIADDVIPADFKAGTTYKTTLSI

SEQ ID NO: 187355 - protein, 67 aa, Zea mays
  Clone ID: MRT4577_102453C.1.pep
IDICDCVSEYQQCQHAAPKDSHEPRGGVLVALIHRHVCGCRTCGVVLSLLLFIWCLACHSDAAASLW

SEQ ID NO: 187356 - protein, 94 aa, Zea mays
  unsure (1)..(94): unsure at all Xaa locations
  Clone ID: MRT4577_102454C.1.pep
CRXRPPQAKANLRTPSSLNTVRPGRVLRLAIEWNLWSAGYAAPGDSASCLKPAASSKYSYIAAYHVLMVRLLELDCTFNEHWLPVARQKDAYVV

SEQ ID NO: 187357 - protein, 120 aa, Zea mays
  Clone ID: MRT4577_102455C.1.pep
MASRYSILLATTALAMLFAFGSCTTPLTFQVGKGSKPGHLVLTPNIATISDVEIKEHGGDDFSFTLKEGPAGTWTLDTKAPLKYPLCIRFATKSGGYRIADDVIPADFKAGTTYKTTLSI

SEQ ID NO: 187358 - protein, 44 aa, Zea mays
  Clone ID: MRT4577_102456C.1.pep
VISLPLALSAPVSMVKEGILRVKKNKGTPPLASNFIPGFGVYLF

SEQ ID NO: 187359 - protein, 120 aa, Zea mays; identical to SEQ ID NO: 187357
  Clone ID: MRT4577_102457C.1.pep

SEQ ID NO: 187360 - protein, 121 aa, Zea mays
  unsure (1)..(121): unsure at all Xaa locations
  Clone ID: MRT4577_102458C.1.pep
MASRYSILLATTALAMLFAFGSCTTPLTFQVGKGSKPGHLVLTPNIATISDVEIKEHGGDDFSFTLKEGPAGTWTLDTKAPLKYPLCIRFATKSGGYXRIADDVIPADFKAGTTYKTTLSI

SEQ ID NO: 187361 - protein, 126 aa, Zea mays
  unsure (1)..(126): unsure at all Xaa locations
  Clone ID: MRT4577_102459C.1.pep
LGGETPMHPWGTANNANKTLLRYPGATXIHDGMRAPMQSRAXATMSAPRDNXEDGSAATWGSRPSYHPGTRQAGPYEAPTPGSGCANTARGSLNDAPTTRDNYAYARSPYVPSTPVGEPMTPNSGS

SEQ ID NO: 187362 - protein, 87 aa, Zea mays
  Clone ID: MRT4577_10245C.1.pep
QRRVRGLKLSCYSSLGDWRSRGNQPCMRTFHCSHVCTAPFPQGRLQPSWKPIILMSLHVDVYQQRIILRMPTSVRSDCILLMSDISS

SEQ ID NO: 187363 - protein, 121 aa, Zea mays
  unsure (1)..(121): unsure at all Xaa locations
  Clone ID: MRT4577_102460C.1.pep
MTYRAVTKMLQGPHTGAATSLHPSNVNYIHRVNCTKCSLKDRAINKITDKNISKQAPILHDQXIADNEDYDRHKLHSMVHHXKKAAIHAHIAPVRAPXKHRDRKPSERYRHREDLPESGQG

SEQ ID NO: 187364 - protein, 87 aa, Zea mays
  Clone ID: MRT4577_102461C.1.pep
WLTPACSSPLTRGSVPSTAELRLSAEQVIPGSASPSRVFPPSKGRGDGLPLPPQITRRLRPCSSERDLFDCVVSHPRSFQLINVYIH

SEQ ID NO: 187365 - protein, 87 aa, Zea mays
  Clone ID: MRT4577_102462C.1.pep
CRLCPLLRCSALSFSHVLVSPCRLLPRGVAAASAVGCVGLAFWRIPSWRCWGCPGLPSFLLWAGPVGGGGGVGGGRRRMQETLASLY

SEQ ID NO: 187366 - protein, 81 aa, Zea mays
  unsure (1)..(81): unsure at all Xaa locations
  Clone ID: MRT4577_102463C.1.pep
SCFSRSPPLSVRGRWGTDWATAAAAAAIRQSSGAQVFTPRHQYPLHTLLVFDSRXHALPVGGGGNFFFLLRRHIEMDEHTY

SEQ ID NO: 187367 - protein, 47 aa, Zea mays
  unsure (1)..(47): unsure at all Xaa locations
  Clone ID: MRT4577_102464C.1.pep
CLHXGPCPLLVQSWVRPWVMSTPTSTLWLLVMFSLSSLPPHDTFSTI

SEQ ID NO: 187368 - protein, 61 aa, Zea mays
  Clone ID: MRT4577_102465C.1.pep
FPWDEKSGYYYDSASGFYYDGPTGLYYDSNSGVCDSYDQQTQQCTPCTDQSNTNAWQTDVQ

SEQ ID NO: 187369 - protein, 380 aa, Zea mays
  Clone ID: MRT4577_102466C.1.pep
MRRNRKDSGYPTAALGEEDEAEELTEEGDEEEEEQTEEGCGEEDEVEAETPAQEAVEPPKLAEGYFEIEAIRRRRLRKGQLQYLVKWRGWPESANTWEPLENLKACSDIVDAFNKRSRSPRSCGKRKRKTPTTPTSDPNASRGKRGRPPRSEARSMHSIHASEVKKLPCRTSSRRANNNSNKTSPGGLGAAVNLLGQRIVQEGSSGVVSAGFPSQEAPLSVSLTDQQDVQHPANGSLKMDNEIRAITPQGGQVTGAKKRKSGCVRRFKQDEVTQEQGDIRDRTSDKPGNETVDSTEGDPGDKNKGEDSGNQIHMPKIIKIIKPVRYFATVMDGVQQVAITFKALRSDGEMVFVDDKQLKAKEPLVLIDYYEQHLRYNPTS

SEQ ID NO: 187370 - protein, 632 aa, Zea mays
  Clone ID: MRT4577_102467C.1.pep
TGRKPTQTDPNSESRLTLTDGDVYVPRDERFGHIKNSDFYGYTIKAFVDGLVPILEGYLLGIEFNSFKDILQLYEGGIKLPDIPALEEFRKQFPLQMVKDLMPAGGDYVLKLPMPKIIKEDKKAWMSDEEFARETLAGVNPLIIRRLTEFPPKSTLDPSKYGDQTSTITEAHIAGSLEGLTVQQALDSNRLYILDHHDHYMPFLIEVNSLNDNFIYATRTLLFLRGDGTLAPVAIEMSLPELRDGITAAKSTVYTPVPPTAGAEAWVWRLAKAYVNVNDYCWHQGISHWLNTHAVMEPFVIATNRQLSVTHPVHRLLLPHYRDTMNINALARQKLINAGGIFEMTVFPRKYAIEISSKVYGSWNFTEQALPDDLIKRGMAVPDPSSPYKVRLLIEDYPYASDGLAVWHAIEQWVTEYLAIYYPNDGVLQADVELQAWWKEAREVGHADLKDEHWWPKMQTVPELVKACTTIIWIASALHAAVNFGQYPYCGYHPNRPSVSRRPMPVPGSDAYKELEKNPEKFFVRSITAQFQAVVGISLLEILSSHSSDEVYLGQRDTKEWTSDAKAQEAFKRFGARLTEIEKRVEAMNKDPRFKNRYSAAQFPYTLLFPNTSDKGDNTGVTAKGIPNSISI

SEQ ID NO: 187371 - protein, 56 aa, Zea mays
  Clone ID: MRT4577_102468C.1.pep
WVCQERKLLSATAGIHLSRSCEFMFSGINLGATRVLSFSSQECACSSGLDIAFPFC

SEQ ID NO: 187372 - protein, 151 aa, Zea mays
  unsure (1)..(151): unsure at all Xaa locations
  Clone ID: MRT4577_102469C.1.pep
MSSSVVSSEEMAAVKTSSNGVWQGDDPLHFAFPLLILQALLILVLSRMLAFLLRPLRQPKVIAEIVAGILLGPSALGRNKAYLRALFPPWSAPVLESVASLGLLFFLILVGLELDLRSVRRSGRRAFAIAADGISLPIXCGENMCFVLRAA

SEQ ID NO: 187373 - protein, 128 aa, Zea mays
  Clone ID: MRT4577_10246C.1.pep
MSDEARRGPAGAAQVVLRASSEDRKPVGSGSPPPAATATAVAHKIQLKSADMKEEMRQEAFEIARIAFEKHSMEKDIAEYIKKEFDKNHGPTWHCIVGRNFGSYVTHETNYFVYFYIDSKAVLLFKSG

SEQ ID NO: 187374 - protein, 77 aa, Zea mays
  Clone ID: MRT4577_102470C.1.pep
PYEPRSMLRAHKSRPCVCARPANRGYGVLVARGGFSDTRHRRNRQLPVVEDVFARQFQRVEGCHGRGGAPSISAILR

SEQ ID NO: 187375 - protein, 442 aa, Zea mays
  Clone ID: MRT4577_102471C.1.pep
RRHRPWRAATPRPRRRWTPGRVGGRVGGRVGGRVGGDGTLAPVAIEMSLPELRDGITAAKSTVYTPVPPTAGAEAWVWRLAKAYVNVNDYCWHQGISHWLNTHAVMEPFVIATNRQLSVTHPVHRLLLPHYRDTMNINALARQKLINAGGIFEMTVFPRKYAIEISSKVYGSWNFTEQALPDDLIKRGMAVPDPSSPYKVRLLIEDYPYASDGLAVWHAIEQWVTEYLAIYYPNDGVLQADVELQAWWKEAREVGHADLKDEHWWPKMQTVPELVKACTTIIWIASALHAAVNFGQYPYCGYHPNRPSVSRRPMPVPGSDAYKELEKNPEKFFVRSITAQFQAVVGISLLEILSSHSSDEVYLGQRDTKEWTSDAKAQEAFKRFGARLTEIEKRVEAMNKDPRFKNRYSAAQFPYTLLFPNTSDKGDNTGVTAKGIPNSISI

SEQ ID NO: 187376 - protein, 143 aa, Zea mays
  unsure (1)..(143): unsure at all Xaa locations
  Clone ID: MRT4577_102472C.1.pep
GNSXQKNMVTALFSFDPNQNTGMVVXKCRIGATSHLQPVRKNFPTYLGRPWKEYSRTVVMQSTISDVIQPAGWHEWSGSFALKTLFYAEYQNTGAGASTSARVKWGGYKVITSASESHAFTPGRFIAGGSWLSSTSFPFAFGL

SEQ ID NO: 187377 - protein, 85 aa, Zea mays
  Clone ID: MRT4577_102473C.1.pep
QGLSWLPRASVRVLSMTVRPLLVASASRVVVLMKLRSLYMRAWLMGCYGWRCGKVLSITSLVLCGRSNKAPCSKFAGTRCRRRMW

SEQ ID NO: 187378 - protein, 77 aa, Zea mays
  Clone ID: MRT4577_102474C.1.pep
PTARLGFRKWAPPFDFILTPQGFVSVDKKAPFNQGLISNLMFDPVHGAIKVWAQLGPPVDISVTVNANFGGPKFCQF

SEQ ID NO: 187379 - protein, 69 aa, Zea mays
  Clone ID: MRT4577_102475C.1.pep
SETALHLTCLSNTGFPQNKTKKIGSLYHQISKISHWPTHFLDQPLVKQLASRKEKIIKQFVTPDINQLL

SEQ ID NO: 187380 - protein, 194 aa, Zea mays
  unsure (1)..(194): unsure at all Xaa locations
  Clone ID: MRT4577_102476C.1.pep
DVCLQLSLDKCSQELQPTFQHRFDGAVTINRHAVAGALAGTAVSVSLHPIDTVKTIIQANSYGQSSVYHTLRRTLIERXGVLGLYGGLASKLACSAPISAIYTLTYETVKGALLPVFPKEYHSIAHCAAGGCSSIATSFVFTPSECIKQQMQXNALVGCLKKGGIASLYTGWGAVLCRNIPHSIVKDIIPFLNL

SEQ ID NO: 187381 - protein, 119 aa, Zea mays
  Clone ID: MRT4577_102477C.1.pep
GDLDKSSGSGHELVGINQQSDRGRQLPCGVQRQHIGWCVSEGNITEKIVVSKRCREEQQTARRWAAACGCLNNQWTLGRSIWINGRSMLCSSSAPRCSLLLVNLCKKLFLVIVGRSSYA

SEQ ID NO: 187382 - protein, 266 aa, Zea mays
  unsure (1)..(266): unsure at all Xaa locations
  Clone ID: MRT4577_102478C.1.pep
MGIALLALLLVLPASHAWVCPPCGSTAVPYPLSTGDGCGDPAYKVRCAAATNSSTSSPTLMFDALNGTSYRITSISAATQRLVVAPAPLVAQGSRCVSEGRGGGVQLNASLPFNVSSSNTIMLLNCTSALLLSPLNCSSNSLCHVYANATGSTAAACAPLPLCCTFXRGGSSTSYSIRVSPQFCSAYRSFVGLDPAAQPPATWGRRLGLELQWATPREPLCRTQADCEDGANATCADDPLTPAARRCFCVPGLSWSPLAGACQLST

SEQ ID NO: 187383 - protein, 64 aa, Zea mays
  Clone ID: MRT4577_102479C.1.pep
MGMDAGGGKLPYSYAGQQDGGKLVKSVSRVEPRRFGLGLVAGFLLVTCAYFSTGKFDAIQIGMT

SEQ ID NO: 187384 - protein, 194 aa, Zea mays
  Clone ID: MRT4577_10247C.1.pep
MAAAASSLLAAAASSSSRAAISVRRPRAASAAAAAAASIPSSSRTSFTPLRASPARALRSRVVASAAPAMEPPAVSRVSTVVDVDLGDRSYPIYIGPGLLDEPDLLQRHVIGKRVLVVTNTTVAPLYLEKVAWALTHQNPNVSVESVILPDGEKYKDMDTLMKVLDKAVESRLDRRCTLVALGGGVIADMCGFA

SEQ ID NO: 187385 - protein, 117 aa, Zea mays
  Clone ID: MRT4577_102480C.1.pep
RGRWAPPFFFWLAPPLGPPGFSFFAPALFFGGYFQGIPFSPGKRFCPCLPHFWGRAGFPFFRPPLCGISPLGGGRPGSFFFFLKKKKKKKNKKKKKKKKKKKKKKKKKKKKKKKKKL

SEQ ID NO: 187386 - protein, 80 aa, Zea mays
  Clone ID: MRT4577_102481C.1.pep
DLLPFTLFYFKRVSSCQSTFSTYLWIISRHQTRSPGQQRIRWHNFSKKIAKVMILFMNFHRDCDVKYLRRNAWKTSILIE

SEQ ID NO: 187387 - protein, 36 aa, Zea mays
  Clone ID: MRT4577_102482C.1.pep
FGAICFLISFLIAKGSCYLTVFFALPTTKGTKGLFS

SEQ ID NO: 187388 - protein, 69 aa, Zea mays
  unsure (1)..(69): unsure at all Xaa locations
  Clone ID: MRT4577_102483C.1.pep
AFINTPSYSFSTTSQQWLENKKLVALITLYXSATNTFIIPQCLLSPKSIITQFLPPITLITFKHLSHQT

SEQ ID NO: 187389 - protein, 85 aa, Zea mays
  Clone ID: MRT4577_102484C.1.pep
WYFYSLPFLLWKTRYQTPLRIILFLVVECCWNVYPSTAYSSLLLLFVHLCILFGIWFSPAEYPYIISKGAKRTYQEVAKLDFPAK

SEQ ID NO: 187390 - protein, 173 aa, Zea mays
  Clone ID: MRT4577_102485C.1.pep
MAFLLAVAVSVAAPASWPSPVATVAPPRLALRRGLPPTWRAVRALPRSRGAVVVCQAQGGQDTAIQVPDVSKSTWQSLVVESELPVLVEFWASWCGPCKMIDPIVGKLSKEYEGKLKCYKLNTDENPDIATQFGIRSIPTMMIFKNGEKKDSVIGAVPESTLVTCIDKYVGGR

SEQ ID NO: 187391 - protein, 82 aa, Zea mays
  Clone ID: MRT4577_102486C.1.pep
MLPLAIQDIDESDEHIEDTTAPADSPCEVEERSPVDPVPVRPENECASSDIRTLTVKASKKHEQPLLGTKSEGHIEYDERQV

SEQ ID NO: 187392 - protein, 173 aa, Zea mays
  Clone ID: MRT4577_102487C.1.pep
MASRLAVAVAVAAPASSPSPVATVAPPRVALRRGLPPTWHALRALPRSRGAAVVCQAQGGQDTAIQVPDVSKSTWQSLVVESELPVLVQFWASWCGPCKMIDPIVGKLSKEYEGKLKCYKLNTDENPDIATQFGIRSIPTMMIFKNGEKKDAVIGAVPESTLVTCIDKYVGGR

SEQ ID NO: 187393 - protein, 88 aa, Zea mays
  Clone ID: MRT4577_102488C.1.pep
RPTLSPLPIHPQIIPTSRSSSASAARHGLPYLGLHLTPLPAGLLIQEPCPALPPPWAFSAQPVRSRIRAAVGGQPPGSLLVVRAVRGK

SEQ ID NO: 187394 - protein, 80 aa, Zea mays
  Clone ID: MRT4577_102489C.1.pep
GNLKYACDVLSFVFMFNLFIVFIIFMYGVGRDVVVAELVGVIVVVGVGLGVYVVEFSEDVGAGDMCEFRVWGSVLLVFWL

SEQ ID NO: 187395 - protein, 462 aa, Zea mays
  unsure (1)..(462): unsure at all Xaa locations
  Clone ID: MRT4577_10248C.1.pep
RRPAVRMEHVVGGKFKLGKKIGSGSFGELYLAVNVQNGEEVAVKLESVTSRHPQLHYESKLYMRGRTRGRTRGRTXGGIPHLKWFGVEGQYNVMVIDLLGPSLEDLFNYCSRKFSLKTVLMLADQMISRVEYMHTRGFLHRDIKPDNFLMGLGRKANQVFVIDYGLAKKYRDLQTHKHIPYRENKNLTGTARYASVNTHLGVEQSRRDDLESLGYVLMYFLRGSLPWQGLKAGTKKQKYDRISEKKMLTPVEVLCKSYPSEFTAYFHYCRSLRFEDKPDYSYLKRLFRDLFIREGYQLDYVFDWTIMKYPQFRDKSKIQSSGKMSGLAGPSAERTDRTAAEALFRRTGSGSGHNREHTKHRSLLESLMPSKAVDSDKARPQSSSRNGSTSRRAVISSSKPSSSGDLSDPNRLGGRLAPSSSSRPPTAQREIRSSSLSKIGRSSHDDAIRNLELLSLGADKRK

SEQ ID NO: 187396 - protein, 67 aa, Zea mays
  unsure (1)..(67): unsure at all Xaa locations
  Clone ID: MRT4577_102490C.1.pep
AHASDHKPILSIVQVIFRVTHXFRFWRLLQKEEKHQQILDACRALEVVAMXVFAMHGWRSNAKIEDG

SEQ ID NO: 187397 - protein, 128 aa, Zea mays
  Clone ID: MRT4577_102491C.1.pep
MASEWRAQPLSIATGATLDSIYSDDQITSPSFGALSDPQTPGRKRGALGEVVDKVVERRQKRMIKNRESAARSRARKQAYTNELENKVFRLEEENKRLKKQQELDEILSSAPPPEPKYQLRRTGSAAF

SEQ ID NO: 187398 - protein, 38 aa, Zea mays
  Clone ID: MRT4577_102492C.1.pep
LCRTQPVQQLYARVLCVHTHVAKSSTNIKYGPISSRPL

SEQ ID NO: 187399 - protein, 68 aa, Zea mays
  Clone ID: MRT4577_102493C.1.pep
FQTNTTGKRGYRPLDFGVELEVQKSTKGNWLGQPSVIATFFLTFDAALLYCEEIHKCGLSPPIGRSWV

SEQ ID NO: 187400 - protein, 96 aa, Zea mays
  Clone ID: MRT4577_102494C.1.pep
HGSATPPPPLHLPLPPPGALHGLQGNSSFSSRRSKLCRGGRRQATKSRKPRGTGEGVRSRCAPSLLHCNIEPPASSCVPLPLKPQRGYLRQPDRQV

SEQ ID NO: 187401 - protein, 50 aa, Zea mays
  Clone ID: MRT4577_102495C.1.pep
DFFMSAVQDLYNGSDRRASYCMCGRLAFHSSRPGLWSRVKVKQRLLVHVY

SEQ ID NO: 187402 - protein, 35 aa, Zea mays
  Clone ID: MRT4577_102496C.1.pep
PSWCGECQREKRERQSQCVKATKMAFLRGSGGATI

SEQ ID NO: 187403 - protein, 80 aa, Zea mays
  Clone ID: MRT4577_102497C.1.pep
GIIRDMVIASRLEFWIMPALQSAIFSLSISIKACSLGLVAGHEHEEPEDRFFTYLAHSISDVILSSHFSYCLCNQHSTPL

SEQ ID NO: 187404 - protein, 58 aa, Zea mays
  Clone ID: MRT4577_102498C.1.pep
WYCPKCRGEYEKTMDKALEKSKFERAYNMQFVDRRLVLGGQNKPCIYYIAAFVEVQGV

SEQ ID NO: 187405 - protein, 123 aa, Zea mays
  Clone ID: MRT4577_102499C.1.pep
GGALWWGEKFFFFLWGGGAPFFSPGWAPGVFFWWGIRGGHFFPRGPFLPTFLGVFWFRFAGGRDRPGGGGFKKPLGGAAGAPFLFFPRFPPLPSFEISAGRRSKRFRRAEPRNPPNFIPASFR

SEQ ID NO: 187406 - protein, 126 aa, Zea mays
  Clone ID: MRT4577_10249C.1.pep
MSDEARRGPAGAAQAMLRASSEDRKPVGAGSPPPAAAAVAHKIQLKSADMKEEMRQDAFEIARIAFDKHSMEKDIAEYIKKEFDKNHGPTWHCIVGRNFGSYVTHETNYFVYFYIDSKAVLLFKSG

SEQ ID NO: 187407 - protein, 186 aa, Zea mays
  Clone ID: MRT4577_1024C.1.pep
MEKRSTSNQVNDTSYNEKKRNLKSFEDSEKSSAPTGGGSFKIGECIRRAASQLTGSSSIMKAQNEPTVYNNAAEGENGEFDVSSDDAGDELTVEKRAKRRRLHINHAADPRELLSQLCLVATEPMNGYSFSAMIIGYFNDYRNYIVSTTTEANIVDKGTSRRGRKRKEVIPSPEVETTDHMQDSYW

SEQ ID NO: 187408 - protein, 222 aa, Zea mays
  unsure (1)..(222): unsure at all Xaa locations
  Clone ID: MRT4577_102500C.1.pep
RLLHCFLFIIAAGGGGGDLVKQRLERXKLRMKRQADKGRSEREFASGDWVFLKLQPYVQSCGGGGAHXKLAFKFFGPFQVLRRVGAVAYXIXLPSSSXIHPVFHVSQLKRALGTGLVCSPVLPNEQFQFSVPVKILQRRTVARGGQSSEQILVQWSHMPVELATWEFAQDLQQQFPHAAVWGQPADLAGGMSAKRRKQSSVRQMTKKVWLQQQEMGRVGPKG

SEQ ID NO: 187409 - protein, 51 aa, Zea mays
  Clone ID: MRT4577_102501C.1.pep
VPDGPHDCPRDVQGIPGAGGGSQLAPCCPPFPAAPVSVQGTQGLGPKNVLH

SEQ ID NO: 187410 - protein, 181 aa, Zea mays
  Clone ID: MRT4577_102502C.1.pep
MIRPPPPTAASLHRLIPTPALPATWPAPSTTAGRLSVPARRCSLPARTTSRRRPRPPARRCSLPARTTTRRRPRPPARRCSMLPTTTTRRPRSPARRCSLPARKTRPSSSSRARQRSLPARRRATTLMSSSSLAQGCSMTATTTMPGPMLACATATPPSPSSPARRSMPAMTRRADPRIAA

SEQ ID NO: 187411 - protein, 58 aa, Zea mays
  Clone ID: MRT4577_102503C.1.pep
IIVCAPQDWEASNLCTGQSFLLSLSALVVFALGTCSLLNARCDLAALLLRSTIVLVSP

SEQ ID NO: 187412 - protein, 96 aa, Zea mays
  Clone ID: MRT4577_102504C.1.pep
SLHNIANMQIILKLTRCRGRNFRGGLHKWAPGTGMPKNKIGAANMEKKGAGGKGTIPHDKLPGVTIFLIPNRREPPLNIGELVCLHHRINLGNGGP

SEQ ID NO: 187413 - protein, 194 aa, Zea mays
  unsure (1)..(194): unsure at all Xaa locations
  Clone ID: MRT4577_102505C.1.pep
KGRERNAQKTTRRKGTRPGGEERRDKGGKREGGKRGKERKRKGKGGEKRGGEEKGGEGGGTGEKKKGGGGQQNKGQRXPAGTGRKRGXGGGQGKARGRLGNEGVRRGKDRSGGTGGETTRGGXLGRGGDNARDVGGPGGTRGGRKQGRGGRARVRAGGKGGTRARGGGGKXNGGEGRKTEGRGEKGKKGTRGGG

SEQ ID NO: 187414 - protein, 55 aa, Zea mays
  Clone ID: MRT4577_102506C.1.pep
EAIAGWNARPERSAGRLGDVPLPLWSATVVVRPNGGHAHWKPGEAQGFKEKKPRG

SEQ ID NO: 187415 - protein, 473 aa, Zea mays
  Clone ID: MRT4577_102507C.1.pep
MLNNDVANLSTQLKTCKNDCEKLKFARDAYTIGRHPSIKDGLGFQKGAKNLTSQRTSNLNKEKGKAPMPSSSYSSHDQKNLPIFMLMLRMFLVYASGGTSWIIDSGCTNHMTGEKRMFTSYVKNKDSHDTIIFGDGNQGKVEGLGPLLILASEEDKYETQGTLKRFLRRPQNEFELKARLVAKGYAQVIGLDFEETFAPVARLESIRILLAYAAHHSFKLFQMDVKSAFLNGPIKEEIYVEQPPDFEDDRYPDHVYRLSKALYGLKQAPRAWYECLRDFLISNAFKKFDMSMMGELNYFLGFQVKQLKEGTFISQMKYTQDLLKRFGMKDAKPAKTPMGMDVHLDLNKGALRKTSVALSTMEAKYVSAGQCCAQLLWMRQTLPDFGYNLSKVPLLCDNESAIRLADNPVEHSRTKHIDIWHHFLRDHQQMGDIDIYHISTKNQLADIFTKPLDEKMFCRLRSELNVFDSRSLD

SEQ ID NO: 187416 - protein, 201 aa, Zea mays
  Clone ID: MRT4577_102508C.1.pep
LEPAGSRPTAAAACPWFPPSLAQPLRCCLPGARAAAVVLPARRSALTQPSRSPSRPTCRPAAASKLSSRRLAAAPPSRSLSCARICTSSQAATTPLSKVKIVRESMNRMIEAWREIFYLDEEVCSFDVPPSSQSTSSLTDTADSLGPTSTPSITRRNSWPTNRQPPPDASHNVTNRKGSTPSIIGKKILPPSRRSTDQAKN

SEQ ID NO: 187417 - protein, 533 aa, Zea mays
  Clone ID: MRT4577_102509C.1.pep
MLNNDVANLSTQLKTCKNDCEKLKFARDAYTIGRHPSIKDGLGFQKGAKNLTSQRTSNLNKEKGKAPMPSSSYSSHDQKNLPIFMLMLRMFLVYASGGTSWIIDSGCTNHMTGEKRMFTSYVKNKDSHDTIIFGDGNQGKVEGLGPLLILASEEDKYETQGTLKRFLRRPQNEFELKVMCDHRNNKIKINHLPQHWCIPQLKMRNMYLKMKAWIKGEHMENMIRRKKHNKLLQLKNKARLVAKGYAQVIGLDFEETFAPVARLESIRILLAYAAHHSFKLFQMDVKSAFLNGPIKEEIYVEQPPDFEDDRYPDHVYRLSKALYGLKQAPRAWYECLRDFLISNAFKKFDMSMMGELNYFLGFQVKQLKEGTFISQMKYTQDLLKRFGMKDAKPAKTPMGMDVHLDLNKGALRKTSVALSTMEAKYVSAGQCCAQLLWMRQTLPDFGYNLSKVPLLCDNESAIRLADNPVEHSRTKHIDIWHHFLRDHQQMGDIDIYHISTKNQLADIFTKPLDEKMFCRLRSELNVFDSRSLD

SEQ ID NO: 187418 - protein, 62 aa, Zea mays
  Clone ID: MRT4577_10250C.1.pep
HKCSCGYQWIYTSYKTYFRAVNMMLVLRTGLHSEDHTLVCIVIEYTCKELLDICIVYVCYKM

SEQ ID NO: 187419 - protein, 263 aa, Zea mays
  Clone ID: MRT4577_102510C.1.pep
MYLQLEGDESTSVTQKRMPNQREQYGDFSDSNTRGVTNKNKINILPLHWCIHQLKMRNMYLKMKAWIKREHMENMIRRKKHHKLFQLKSGRQYKGIIQWIRFWVISGREYPDHVYSLSKALYGLKQAPRAWYECLRDFLISNAFKVGKADPTLFTKTCNGDLFVCQIYVDDIIFGSTNQKSCEELRRVMMQKIEMSMMNELNYFHGFHVKQLKEGTFISQTKYTQDLPKRFGMKDAKPAKIPMGTNEHLDLNKGGKSVDQKAY

SEQ ID NO: 187420 - protein, 49 aa, Zea mays
  Clone ID: MRT4577_102511C.1.pep
RNLGIRKLKCYYNLIHFCWNNCTMFWIFPQRFCRHVYVVTSLVFYSYVL

SEQ ID NO: 187421 - protein, 112 aa, Zea mays
  Clone ID: MRT4577_102512C.1.pep
CELDGPYEQMQTIHAVKNLERDMREQETVQARTRGQNKENATNRHQKLVQETEKKDLRGTGCALKVIGLYTCKQGPDIIPPATQEAECRRQGRLAVYEQRKEALGQSTKSPR

SEQ ID NO: 187422 - protein, 138 aa, Zea mays
  Clone ID: MRT4577_102513C.1.pep
ALLSAAASLDDKRVLHAIAMEDERSVCVINQYDDLGCLDLRSGAGGVRWSSRSKLMNRKVPGEESCYPKLATHGGQLFSSMNDSISVFSGPEYVLTSTLRRSHGGAICDFSIGGDRLFALHNEENVFDVWETPPPPII

SEQ ID NO: 187423 - protein, 81 aa, Zea mays
  unsure (1)..(81): unsure at all Xaa locations
  Clone ID: MRT4577_102514C.1.pep
KSTLQSRIITTPISTTPNSNGDLGLLTYLHASVYVYHPPILFPIRPTLFQQIXSPPPPHFSSHSFSSRSPLPNVQPAPLKH

SEQ ID NO: 187424 - protein, 68 aa, Zea mays
  unsure (1)..(68): unsure at all Xaa locations
  Clone ID: MRT4577_102515C.1.pep
GGREPGRGGLSISSGWCINGNXGRCYDFWLEFSECMSRCRQPFDCGLLREDYLECLHHSXEFQRWYRI

SEQ ID NO: 187425 - protein, 62 aa, Zea mays
  Clone ID: MRT4577_102516C.1.pep
WQRGLFSPVPLGPAPGGRGLLKKKKNPKKKKKKKKKKKKKKKKKKKKKKKKKNKKKKKKKKK

SEQ ID NO: 187426 - protein, 70 aa, Zea mays
  Clone ID: MRT4577_102517C.1.pep
DPTVISGASSSSDIQGPRCRVHGMCVAVGSSRELGAIGIGNGHAEAYAGVVIIQDLVVLNWVLRFAFRGP

SEQ ID NO: 187427 - protein, 87 aa, Zea mays
  unsure (1)..(87): unsure at all Xaa locations
  Clone ID: MRT4577_102518C.1.pep
NGMKRMLMVQPAIFCLDLETVIAPKVKFLIDIGVRTDAIGNVHAKFPXVLTYSLYKKIRPVVIFLLTKGGVKQDDIGKVIALDPQLL

SEQ ID NO: 187428 - protein, 193 aa, Zea mays
  Clone ID: MRT4577_102519C.1.pep
MPERHLASWNAMALALANHGRGKDSLDLFNRMTRVENVVPNAITFVAGFSACNHGGLAMAAMGATASPLPSLFPTGQRHTLLKHRLHPQPRGPRRRGRQGHRRAELWVHVGDDDSDHYCWQQHVDMTTSRRASEVDADHPGSEVAAVMAAATAVFHWTVDAHYAHLLIHHAQQLFDFAHTLPGRYDAALQVLG

SEQ ID NO: 187429 - protein, 44 aa, Zea mays
  Clone ID: MRT4577_10251C.1.pep
RPRVRSRVRKHMIAIRPLKHTPFYRAIDSHSGIRLSDRRDAYLT

SEQ ID NO: 187430 - protein, 151 aa, Zea mays
  Clone ID: MRT4577_102520C.1.pep
AGSRRRSGTSTICRGTTPTTRRSLRSGSSSARRWRIRAGPPSCTAPCATPGLTPIAAAAASHPPSRARADERWGESPCAFVTLKDGAAADGSDEAALANDIMRFCRERMPGYWVPKSVIFGPLPKTATGKIKKHELRARAKELGPVKKSRM

SEQ ID NO: 187431 - protein, 174 aa, Zea mays
  unsure (1)..(174): unsure at all Xaa locations
  Clone ID: MRT4577_102521C.1.pep
MGSTSTGPVSGFAAPERDIDDLPRNDANYTALTPLWFLERAALAHPGRASVVHGPVRYTWADTYRRCRRLASALARLSVGHGSTVAVIAPNVPAVYEAHFGVPMSGAVVNCVNIRLNAETIAFLLEHSVAEVVMVDQKFCTLAEESXLKIIGKKKTSAFRRPPILIVLGDPTCD

SEQ ID NO: 187432 - protein, 63 aa, Zea mays
  unsure (1)..(63): unsure at all Xaa locations
  Clone ID: MRT4577_102522C.1.pep
IDGRMDAQNLKKMKRNSRNGKEIVADSKKGGTNPSSTQLXGILENAGVLDVPRETWERNMKRA

SEQ ID NO: 187433 - protein, 63 aa, Zea mays
  Clone ID: MRT4577_102523C.1.pep
VTHGRTRGRTRGRHLLLRRRLPWATMATGGGKCRGTRTPGTGEQGQSPIFQQFKLMAQIHPTG

SEQ ID NO: 187434 - protein, 402 aa, Zea mays
  Clone ID: MRT4577_102524C.1.pep
MAAVRRCCLLAAVLLWSALASAATAAPAPVVAGPVSRVEDATMFRIYYGQSFKVIKNSGDGKSYLLMQNTSKMASKTKYCTGRIKSFVIPLASFSVDTTTSPVSFFELLGVLESLKGITSNQVASQCVLQSYTSGNAQLVNRTDVQTLSQFTAHFISDTDEDRGCNFAAYVPLEEGTPLQMAEWIKYLGTFTNSENRANAVYDAVKTNYLCLSKVAANLGTRFKPVVAWIEFTQGMWTFVKESYILQYVTDAGAEIVDATITDKRFNSSDPEDMDNFHAILCTVDVVIDQTYALEPAEYKLSTFLENINVSHDSCYSFVSNRSIWRFDKRIGASGTLDWSDGAISQPQLVLGDLIEIFFPTGNYITIYFRNLAKDEGVTEIGPEMCTRSISTPMDPIILSCE

SEQ ID NO: 187435 - protein, 583 aa, Zea mays
  unsure (1)..(583): unsure at all Xaa locations
  Clone ID: MRT4577_102525C.1.pep
MGSTSTGPVSGFAAPERDIDDLPRNDANYTALTPLWFLERAALAHPGRASVVHGPVRYTWADTYRRCRRLASALARLSVGHGSTVAVIAPNVPAVYEAHFGVPMSGAVVNCVNIRLNAETIAFLLEHSVAEVVMVDQEFFTLAEESLKIIGKKKTSAFRRPPILIVIGDPTCDPKSLQHALGKGAIEYEEFLKTGDPEFSWKPPKDEWQSIALGYTSGTTSSPKGVVLHHRGAYLMALSVAIVWGMPEGAVYLWTLPMFHCNGWCYTWALAAFCGTSICLRQVSTKAIYEGITKQGVTHFCAAPVVLNNLINAPASETFLPLPRVVSVNVAGAAPTPSLLGALSIRGFRVTHTYGLSETYGPSTVCAWKPEWDELPLEERSRLHCRQGVRYIAMEGLDVVDPKTMAPVPADGKSYGEIVLRGNAVMKGYLKNPRANAEAFAGXGWYHSGDLGVKHPDGYVEVRDRMKDVIISGGENISSLEVEKVLCAHPAVLEVSVVARADERWGESPCAFVTLKDGAAADGSDEAALANDIMRFCRERMPGYWVPKSVIFGPLPKTATGKIKKHELRARAKELGPVKKSRM

SEQ ID NO: 187436 - protein, 45 aa, Zea mays
  Clone ID: MRT4577_102526C.1.pep
RMAGRQKARLRATKIGWARLGNHVPGYWQKAEECPSHQLSRTEGL

SEQ ID NO: 187437 - protein, 407 aa, Zea mays
  unsure (1)..(407): unsure at all Xaa locations
  Clone ID: MRT4577_102527C.1.pep
MAAVRRCCLLAAVLLWSALASAATAAPAPVVAGPVSRVEDATMFRIYYGQSFKVIKNSGDGKSYLLMQNTSKMASKTKYCTGRIKSFVIPLASFSVDTTTSPVSFFEVSNAXTLQCSPIGNGSFCKGKKKNSEKCLNIQFLIYSELKAKENCTQDSVTNNKYAYTLKQEQQKKQRSQSXEYALSLWQTXVHLTYMQLLGVLESLKGITSNQVASQCVLQSYTSGNAQLVNRTDVQTLSQFTAHFISDTDEDRGCNFAAYVPLEEGTPLQMAEWIKYLGTFTNSENRANAVYDAVKTNYLCLSKVAANLGTRFKPVVAWIEFTQGMWTFVKESYILQYVTDAGAEIVDATITDKRFNSSDPEDMDNFHAILCVSINHSECNITTVMLVDELTVACECVTYKRHILFWP

SEQ ID NO: 187438 - protein, 90 aa, Zea mays
  Clone ID: MRT4577_102528C.1.pep
EESGQRALENILMRLQVMRDTPTGMNDRSPKVAEPDGCLATTYRGTMLPNKLCYTTGDMSNTVRMSTHPRFAPATIVHPLYATSLFTPDA

SEQ ID NO: 187439 - protein, 116 aa, Zea mays
  unsure (1)..(116): unsure at all Xaa locations
  Clone ID: MRT4577_102529C.1.pep
KPNFGPRKECLEGKKEWDFFPSPVNWXKGRFDYVFEFAQGFVLLGEYNNRAAPXGPEKSWKTVPPQNVRSSGFGLAPXHLGPFWGARKNNHTFILWFWEKKKKKKPKKQSHPPAXS

SEQ ID NO: 187440 - protein, 93 aa, Zea mays
  Clone ID: MRT4577_10252C.1.pep
PSFCTNKWHSYIPDRLVSAAEALLRRTGSGSGHNREHTKHRSLMESLMPSKTVVSDKARPQSSSRNGSTSRRAVISSSKPSSSGDLSDPNRLG

SEQ ID NO: 187441 - protein, 71 aa, Zea mays
  unsure (1)..(71): unsure at all Xaa locations
  Clone ID: MRT4577_102530C.1.pep
SRSCTDQTTSMMLQILFQQYPIFWKVSMMEAKQFLLCEVVEXDGQSMVAMQAHKGFKISPESAMDISYAKK

SEQ ID NO: 187442 - protein, 92 aa, Zea mays
  Clone ID: MRT4577_102531C.1.pep
ARSLLGANAQSWASELQIRRDHLMIQIFGSTLAVKTVTLLVDSDGAIVGVMVKIHARGRHPCRHTWLSVVGEYMSETGAPCVDYNKLNGSTL

SEQ ID NO: 187443 - protein, 62 aa, Zea mays
  Clone ID: MRT4577_102532C.1.pep
TGRQRAGTRPRRGRGRAPRLRVLGPVCFRAKRTAFSLPMASPLPARTCAANHGHGSHSVSPV

SEQ ID NO: 187444 - protein, 153 aa, Zea mays
  Clone ID: MRT4577_102533C.1.pep
SGEGAVAVPEYDGRRQRRGVSRQMDDVVGPCRLRPLSVDARRSSLPLVPSVMCAVLDGVFVLHGHSPAGARVSRAAVVLVLVVDLGPLELGIRRLRGAQPGGSCELARSRGRRAGSGSRTSGALSSEPAPAGNLAVGCQYRLEDVTSRIPSLR

SEQ ID NO: 187445 - protein, 77 aa, Zea mays
  Clone ID: MRT4577_102534C.1.pep
HAVRASPRTPSSSLRERGGGGRRQPRPIRGPARTPLILLPPPGRGAPYTEESPGSSHSEISKTRAHEDKTNGGYICA

SEQ ID NO: 187446 - protein, 205 aa, Zea mays
  unsure (1)..(205): unsure at all Xaa locations
  Clone ID: MRT4577_102535C.1.pep
AGLTLLYRRGRLPXHTCLDYAITCLVADVLIALTLGHLGDSRRAMPNLFTQLXQYNWPSELLXLAGGLVLTGSELSTQDAWSYAGLSVTEVIRYSMAVVICTTXMNYFLDNRVDKAKILVPGEASLLWRVILVHAVQXLHAADNEHKLVDSTNAFDPEKSVTVEPSRQAGEIYAHKHLDESGASGSRQPRRAEACTCMSILLSLK

SEQ ID NO: 187447 - protein, 66 aa, Zea mays
  Clone ID: MRT4577_102536C.1.pep
MRPVHPGLYMHGWAFPPLLCCCASIVITASSTPQLRLDRPPLYALILDHRRSSSASRSSLFKSLHA

SEQ ID NO: 187448 - protein, 113 aa, Zea mays
  Clone ID: MRT4577_102537C.1.pep
TRRARGTHAEALAALPSTDASSANWRKWSIDSSPALRGTAPASVCMSMHVHASTASGTQKLEVAYVVHEGVERPARRHQHGDIEGWVEHAAKDRPRSFYLSPTPTTTPIYIGP

SEQ ID NO: 187449 - protein, 79 aa, Zea mays
  Clone ID: MRT4577_102538C.1.pep
CELFPCKHKWNLIGAVNGFTVWENKIFYWTRKLFFGGGSEISLPHSLKRATCYMFFDGIGKRMIRLFQHDLLKTGPMGM

SEQ ID NO: 187450 - protein, 151 aa, Zea mays
  unsure (1)..(151): unsure at all Xaa locations
  Clone ID: MRT4577_102539C.1.pep
TQPSIKAHVDIFTCPLDVAQTETKRTVVMHNANDMRDCTKGEEKHMEQMLQGIADACVNVVVSGNDVGELALHYLNRFGIMVVKVLSKFDLRRLCRVTGATALARVGAPMAEEMGFGDIVESVEHGGDRVTVFRHDDEISXTATIVSRCAT

SEQ ID NO: 187451 - protein, 141 aa, Zea mays
  Clone ID: MRT4577_10253C.1.pep
MEHVVGGKFKLGKKIGSGSFGELYLAVNVQNGEEVAVKLESVTSRHPQLHYESKLYMLLQGGTGIPHLKWFGVEGQYNVMVIDLLGPSLEDLFNYCSRKFSLKTVLMLADQMISRVEYMHTRGFLHRDIKPDNFLMGLGRK

SEQ ID NO: 187452 - protein, 65 aa, Zea mays
  Clone ID: MRT4577_102540C.1.pep
GGQQGVPHIQPKTAGKAKEPWPGEKKKKKGKKGRKNPPSQGAPGTPSKTQPQKPPMGLATNSPRS

SEQ ID NO: 187453 - protein, 77 aa, Zea mays
  unsure (1)..(77): unsure at all Xaa locations
  Clone ID: MRT4577_102541C.1.pep
SRVRAHAVAECCWLRHSLXDLQVSLASATVVFCDNVSAVYMAANPVHHRRTMHIEIDIQFVREKVALGLVRVVHVPS

SEQ ID NO: 187454 - protein, 86 aa, Zea mays
  unsure (1)..(86): unsure at all Xaa locations
  Clone ID: MRT4577_102542C.1.pep
STKEEPTDIFSHKIHIXCAPKTFFCLSHSXTFQASQTPSLLLRLISSTATPRPMYHPTVIITTTTTSKTTTTPFTVPTTPPHSPQP

SEQ ID NO: 187455 - protein, 123 aa, Zea mays
  Clone ID: MRT4577_102543C.1.pep
NIIATENNDPVLDILRLWVLVLQFLGQGFCWVISEEQLCVWSAGTLCCCSYFAYCCFHAQKEAVVLCAAGIDGLVFCIFWHCTLVHFGLFSSLNLMMRSSHARPRQIMTQYGKWKKCTLYLSL

SEQ ID NO: 187456 - protein, 47 aa, Zea mays
  Clone ID: MRT4577_102544C.1.pep
MFFLSLTARLARAGVKGVPKMELPREKAKRLRGSPKTIWENCQLLGL

SEQ ID NO: 187457 - protein, 151 aa, Zea mays
  Clone ID: MRT4577_102545C.1.pep
MPQLGTCSLPGAAIYGTSTRRFGGLEFQQHKVNHISFGRKASVKATLKTVRCNATQTQSVQKKSSSATIQRDKKGNVQGPKLDDGSGGFPPFRFGKGGGGGGGGGGGSNYFGGFLLFSCVLLLDYLKEFEKYLLAQRHRAGDDGGNGLLQA

SEQ ID NO: 187458 - protein, 89 aa, Zea mays
  Clone ID: MRT4577_102546C.1.pep
LNHMILPPIWVSSARRPTNIRGIAYRKRSGFSQHFSCSQRFTSPKEICRGSNKPAHTIPSLDYRAYQTTSQNKKGLGSLLKPGAALEQG

SEQ ID NO: 187459 - protein, 109 aa, Zea mays
  Clone ID: MRT4577_102547C.1.pep
MPLKHKASKRNLQVQLFSVIRKVQIQSSHTTFRNVQGPKLDDGSGGFPPFRFGKGGGGGGGGGGGSNYFGGFLLFSCVLLLDYLKEFEKYLLAQRHRAGDDGGNGLLQA

SEQ ID NO: 187460 - protein, 151 aa, Zea mays
  Clone ID: MRT4577_102548C.1.pep
MSQLGTCSLPGAAIYGTSTRKFGGLEFQQHKVNHISFGRKASVKATLKTVRCNATQTQSVQKKSSSATIQRDKKGNVQGPKLDDGSGGFPPFRFGKGGGGGGGGGGGSNYFGGFLLFSCVLLLDYLKEFEKYLLAQRHRAGDDGGNGLLQA

SEQ ID NO: 187461 - protein, 90 aa, Zea mays
  unsure (1)..(90): unsure at all Xaa locations
  Clone ID: MRT4577_102549C.1.pep
GQRVSLTFRDAGDQGIHPGFGLXGPKPIRQWFSXGINFTPVIHSGYGPFDKYRLFPRSIRTQGNGTFFYCPAQQQXTSSREIILQPFKKK

SEQ ID NO: 187462 - protein, 133 aa, Zea mays
  Clone ID: MRT4577_10254C.1.pep
PPGPPPLGGFKSAPSPPFWGGNKRPGAQFFSPPRTPPGVFPRSSPPPGSGFSRGPPVFSGLCRARLSSYMVLGLALPRGRPPPWAFCGGVLESKNFFFVWFFGPGFPNFFCPVLCKNKGGLVFILLWACSALF

SEQ ID NO: 187463 - protein, 53 aa, Zea mays
  Clone ID: MRT4577_102550C.1.pep
LFVEPVDDSVLSENRIFPYRWSSITAVCSTMVFALSTSAFRLSTFRFFFTIHA

SEQ ID NO: 187464 - protein, 60 aa, Zea mays
  Clone ID: MRT4577_102551C.1.pep
LCFHRRCRWQPLEQGPSCSRSNHTAASEPIQPLLSDQSHHCHRNVRRRGTHFRLQMCSPA

SEQ ID NO: 187465 - protein, 77 aa, Zea mays
  Clone ID: MRT4577_102552C.1.pep
YQSSIPLPYIIEGTAYILFYYMRTSNSTAQILNERTSGGGLHPFFTNLQDILPRTHAKFQTILRITCIWVRATRGNL

SEQ ID NO: 187466 - protein, 90 aa, Zea mays
  Clone ID: MRT4577_102553C.1.pep
DVLSPVSMELRCAALRPYALPSASPVAARVASRRGPGTVTCVSSGGFPEDGHLMYYEAAPRLNAVVAVATDLGKLQAMGLVPRDPVKENV

SEQ ID NO: 187467 - protein, 70 aa, Zea mays
  Clone ID: MRT4577_102554C.1.pep
GAKRFFFKGRATGDKVSPKSPGVKWKHPPPPKGGRRKTLPRCRACKARPFGQSRVLLFVSIAGIWLYAVR

SEQ ID NO: 187468 - protein, 85 aa, Zea mays
  unsure (1)..(85): unsure at all Xaa locations
  Clone ID: MRT4577_102555C.1.pep
SFXPPPTHSSSLPPSPSLSLTQTPRLQTRQGTRVPGLAHHPMGSGSPCCIMRNRQRLLPLILLPRLPLPQGRPAGHQYCPRATNA

SEQ ID NO: 187469 - protein, 98 aa, Zea mays
  Clone ID: MRT4577_102556C.1.pep
VGHPGLQVQDVEAPHLQWHHVIRSIGTGASVVVQHVVNLWWGSGLYMPFCVSWSWDGLSSHSACRDCWSCFLCRPFSKCIVCHALFLEYEPTPRLDNS

SEQ ID NO: 187470 - protein, 114 aa, Zea mays
  Clone ID: MRT4577_102557C.1.pep
LQLEKGNIGKKKSGASKENTRWRKGYIRKKIKIGQPKVFKNPQKKKIKAPQKKKKRPKKKIRAFKKKVKRVLIKKKKHKFFLKYNFFFIFKFFFFFFFFFFFFFFFFFFFFFFF

SEQ ID NO: 187471 - protein, 687 aa, Zea mays
  unsure (1)..(687): unsure at all Xaa locations
  Clone ID: MRT4577_102558C.1.pep
MASQGNQALAPSATKLVLPITGGSSSEPANKKQKKEAQRRVQHVGVQGPFIKSKWSHVPITFSQEDLQLKDYPHNDAMVISYVIKGFLVHNVLVDTGSATDIIFAKAFRQMQEQDDKIHDATHPLCGFGGRQIVALGKITMPMTFGYVHNTRTEQVVFDIVDMEYPYDAIIGRGTFNAFEAVLHPAYLCMKIPSDQGPIAVHGSQEAARRAEGNWTDSKAIHNIDEAEAHQQYTHKRDKDVFAWSANELCGVNRDVIEHSLNVDPSIRPRKQKLRKMSDDKAEGARNKVKSLLSAGVIREVTYPEWLANTVMVKKANGKWRMCIDFTDLNKACPKDEFPLTRIDSLVDASATSELMSLLECYSCYHQIWMKKEDEPKTSFITPSGTYCYLWMPKGLKNAGGSFSRMTAKVLCSQIGRNVLTYVDDIIVNSTKQENHIADLQETFANFRKAGLKLNPEKCVFGVRKGKFLGCLVLTKGIEAHPNKIEAILWMEPPKSRKGARLASLNRFISRSTERKPFFEXSAALVREKQDGQAKTGXQDEERTKDNEASTVFCDGSWGTFGASAAAILISPSKMRTCYGARQEFNYTNNIVEYKALVLGLRKLEAMGIRRVTLKSDSQVITGHIDKSSKARDPKLEKYLDTVQRMEASFEGFSIKNIPRGENEHAELLAKSAAQGLPLPLEVFLKQ

SEQ ID NO: 187472 - protein, 54 aa, Zea mays
  Clone ID: MRT4577_102559C.1.pep
ASHHDDHNHPPSATQGSCAAGAFFHGALVSEQRSPCPWPKSILASVSPSPIHMT

SEQ ID NO: 187473 - protein, 42 aa, Zea mays
  Clone ID: MRT4577_10255C.1.pep
SSAMFLTPHQLLPLYQHAVPNAGTLLHVQQVVTFTQLAFTKQ

SEQ ID NO: 187474 - protein, 49 aa, Zea mays
  Clone ID: MRT4577_102560C.1.pep
MTSFVFFHTICNAKECRVFQPNNKKKNRFRYIFNILTFLRCGCSFKLDW

SEQ ID NO: 187475 - protein, 70 aa, Zea mays
  Clone ID: MRT4577_102561C.1.pep
APVRGYQGYVQVVQLWLEVQAVPANSKIHLMSRRTVHNGVLQKKALMAAKVIQVCILRRLLEGKLGSFRV

SEQ ID NO: 187476 - protein, 61 aa, Zea mays
  Clone ID: MRT4577_102562C.1.pep
GIQIVWVPGMVGQNRFWAKGVLVCHVRRVIASMKIRFFPNWGFYYEAHTKKNPLGGFFSFE

SEQ ID NO: 187477 - protein, 150 aa, Zea mays
  Clone ID: MRT4577_102563C.1.pep
TSLLSSPRLGVAAATSEVRGPRVRRHEVRARQGTGQRHGLQAPRRWSRGRHRCQRRGRLLLEARGGPGRGRDEGAWIRGRARLSIGDSREEGLCASSSCAPKALWLLSSLWRTCACSSVHAVSERAAGRTFKVVWRPSGYLDFPLDDVDT

SEQ ID NO: 187478 - protein, 47 aa, Zea mays
  Clone ID: MRT4577_102564C.1.pep
SLQSSALRRKLSCVILSGPFSFQVDFQERVTLHISTDLRIAPRLFKS

SEQ ID NO: 187479 - protein, 118 aa, Zea mays
  Clone ID: MRT4577_102565C.1.pep
MSGRAADPAALAAKGKLGELMWEHRVQAAVAVALVAAAAVSISVVGPRLSALVSFFWPLLLSTGFFLVAVAVLLRISPPPAGDDDESGKELVDFVAWCRPEHLVPDAAAVEAPLEPET

SEQ ID NO: 187480 - protein, 113 aa, Zea mays
  unsure (1)..(113): unsure at all Xaa locations
  Clone ID: MRT4577_102566C.1.pep
GAVLNLIARVLTPWELENPWLSQLNSLGRKSPFPQLGYYQKGPTHSPFQPFAHLNWQWTPPCTGXLNPGGGXVPPRGTVTFARPLAPVLLVFFLSFLASLAGFPRKALIRGLL

SEQ ID NO: 187481 - protein, 93 aa, Zea mays
  unsure (1)..(93): unsure at all Xaa locations
  Clone ID: MRT4577_102567C.1.pep
NPRGPRAQSSKNXSQGAARSTPCCSEVTHPPAPTAXXGPPPSEMLHSSKTCGFAITRHPSCRQSNRVXAPPPLAALPTXAIXTSPAXXPPPLR

SEQ ID NO: 187482 - protein, 183 aa, Zea mays
  unsure (1)..(183): unsure at all Xaa locations
  Clone ID: MRT4577_102568C.1.pep
MAPTFMELALEQAKFALDNLEVPVGCVIVEDGKVISSGSNKTNATRNATRHAEMEAIDVLLREWQSMGLDQPQVAEKFAGCDLYVTCEPCIMCATALSIIGIREVYFGCANDKFGGCGSMVTTQXRGASSSDELSGSQASTPKGFKCTGGIMAEEAVALFRCFYEQGNPNAPRPHRPVRMPQQ

SEQ ID NO: 187483 - protein, 61 aa, Zea mays
  Clone ID: MRT4577_102569C.1.pep
MASDPSTFSPIGVDAMGGGYFMAGSSSYGGGGIMSAEVPHFHHPGVLLDQGGFGLGGLGNA

SEQ ID NO: 187484 - protein, 47 aa, Zea mays
  Clone ID: MRT4577_10256C.1.pep
KHCVKIKSFLGGLRARKTQTKNLGWTCSPLDFSLLREGKKPKKVLPP

SEQ ID NO: 187485 - protein, 76 aa, Zea mays
  Clone ID: MRT4577_102570C.1.pep
SEAAALFGFFLGGGGNTRPLLDFGTKATGNQDSISRSGKFPFFPNFFGVPEAPKLWEKTPCQGIIVTYTERQIQHM

SEQ ID NO: 187486 - protein, 85 aa, Zea mays
  Clone ID: MRT4577_102571C.1.pep
ILNRTAPDCLHPAYSFSRSPVHALSLPRADDRATAAPRPAPPCLRPLAGNEQPPGIQELDPSTTIPWNISAKCSMSAGWHRLLWS

SEQ ID NO: 187487 - protein, 153 aa, Zea mays
  unsure (1)..(153): unsure at all Xaa locations
  Clone ID: MRT4577_102572C.1.pep
MAAAFMEQALEQAIVCAWILEVPVGCVIVEDGKVISSGSNKTNATRNATRHAEMEAIDVLLREWQSMGLDQPQVAEKFAGCDLYVTCEPCIMCATALSIIGIREVYFGCANDKFGGXGSIMSLHNGAASSSDELSGSQASTQKVSNALGGIMA

SEQ ID NO: 187488 - protein, 46 aa, Zea mays
  Clone ID: MRT4577_102573C.1.pep
GYPERLGIVYFARNDGCKRYIKGSAKWFKKFNASKKTAAKKIFTPA

SEQ ID NO: 187489 - protein, 41 aa, Zea mays
  Clone ID: MRT4577_102574C.1.pep
TMFLFVWTFCRFWPPKNGGKWRTLSFSGRFYKNCLSKTILN

SEQ ID NO: 187490 - protein, 507 aa, Zea mays
  Clone ID: MRT4577_102575C.1.pep
MYKEPKDQETITGPVAWSPQAVHADVDLDNHNEPINPPIDGTQSMFGEVPSTAFTGREKGKSKSVSFALSDVSGIASPIDTNSEMGNIGDSCSDKLTDENLSNSSRHIAEKHSITKDQYSNEQDHEREPLDHAVQQQPKSDVGERASSMKRRCRKKVQKVGTPNHTVDDYFGEDCVEPSLAEEDNDTGDHYTTGNKHKARKKSRGGVEESQQQKAQKNKSKVSSRGRKRTLKDESTEKPEKKLTHRIRQRIPKEVKALLETPREQIKPMKLCASHLRLLQEARERVDPKGIPSGPSSNTRNFQLDDMDDLGYRDEEARFFDNDITEEHVQNATKLNYHSYMNKPARGKWSKSDTDLFYEGLRQFGIDFAMIQQLFPDKTRHQVRQKFKSEERKNPLLVHDAIVHRSGDNLYFKKVIKQLNIEDVVLPDIKSTQKQDGASSERGPGNENVLDDLNEEENSSNWLNEEHDVQMADVEEEHGEQMDDVEEEHDLGNDGGDDDLGDVFDWY

SEQ ID NO: 187491 - protein, 236 aa, Zea mays
  Clone ID: MRT4577_102576C.1.pep
MEAYAGAAPAAGVFAGYGTAATRPFIIFLRRRGSPRSGAGRVRLVRAPPPPRAAEDLPPLDKWDIMELDFGRFLGEDPKLTLAKILLKKSDPDASSLDVEKLIAKNRDKLDDILRECVEANKKGQGFDTSESGPSLNTTRPTISKPTESKSSLNISKPSMGKPIQGGTPLTLLRPAGSKPKQDGPSLAQSRPVGSKASEDAPSFILSRPIGSNPKLRGTPVQDSWPSKESLAAATE

SEQ ID NO: 187492 - protein, 63 aa, Zea mays
  unsure (1)..(63): unsure at all Xaa locations
  Clone ID: MRT4577_102577C.1.pep
DPNAHIVXLQNADAKLKALRDIEEGEELCICYIYASMDADARQKILADGFGFECRCLRCLSGD

SEQ ID NO: 187493 - protein, 178 aa, Zea mays
  Clone ID: MRT4577_102578C.1.pep
QQARVPACKPSCQALAKWALCKCCHSIEEASASAPSLSMAGVAAGSGTGTSVVVARARSIGWPPSTGGVVGGTKVVHGLSMIGAAELSPRITSASSRGGSCSLSLWSAPACLRGRPRRLGFKDGAWISSLPATATDDIAATASVEGEPSFRGLPRPRLGLASTSTTEDPTDAGLHEPA

SEQ ID NO: 187494 - protein, 53 aa, Zea mays
  Clone ID: MRT4577_102579C.1.pep
HAYACSEFGSRPARSTLFSFRRHGQRRAATRRLVRFLAQRLATLRRSVAGSRV

SEQ ID NO: 187495 - protein, 194 aa, Zea mays
  Clone ID: MRT4577_10257C.1.pep
VGIVEESVGRVLKLDSITGDAWLGADVLVFNTWHWWTHTGRDQPWDYVQDGGQVMKDMDRLTAFSKGMSTWARWVDSSVDTSRTKVYFQGISPTHYNGADWGEGSRSCAQQTQPVPGPAYPAGPVPAQAAVRAALAAMSKPVYLLDVTLLSQLRRDAHPSAYSGGHPGNDCSHWCLAGVPDTWNQILYASLLLA

SEQ ID NO: 187496 - protein, 73 aa, Zea mays
  Clone ID: MRT4577_102580C.1.pep
VKLNGRLLFQCLLCCQQVERVLSRPDVYAIERAKELLIGQEQSLLDAIAKLDEASDHESGKLPWIARFHECSI

SEQ ID NO: 187497 - protein, 78 aa, Zea mays
  Clone ID: MRT4577_102581C.1.pep
QASCKSRKAATLGYVHIDATADYMAKEDEALLGGSVYTADEEEAQHKAVSPERHAHTRALKFLWTVKNINIALDQLAP

SEQ ID NO: 187498 - protein, 82 aa, Zea mays
  Clone ID: MRT4577_102582C.1.pep
KLKGPKLGSVVKNLSSFPRAKGSLCTPFFQKIQGTGFPQIISLGPPSCGNLFFFSPENTLADSVLVPKWRIFFTWALGLGWF

SEQ ID NO: 187499 - protein, 58 aa, Zea mays
  Clone ID: MRT4577_102584C.1.pep
ATEDNHMVQKSDSLAQANRKGVRLGIDSKTEMNNGKSLQDRPAELPSRGRYNCNGVGL

SEQ ID NO: 187500 - protein, 41 aa, Zea mays
  Clone ID: MRT4577_102585C.1.pep
GGKRGIRQGPENDKRIGGGLTGATSGRSRRRKLPTRGINSR

SEQ ID NO: 187501 - protein, 246 aa, Zea mays
  Clone ID: MRT4577_102586C.1.pep
MGGGSRALSLSSLCATTLAAAKPPQHPVPFAPAHRALPHRLAAAMSSSSSPTPAASGDAGAPAPSASNAIDFLTLCYRLKTTKRAGWVKRGVQAPESVADHMYRMGVMALVAADLPGVNRDRCVKMAIVHDIAEAIVGDITPSDNVPKEEKNRREKEALDHMCELLGGGSRAQEIRELWMEYEENASLEAKVVKDFDKVEMILQALEYEKEQGRDLEEFFQSTAGKFQTDLGKAWAAEIASRRKTK

SEQ ID NO: 187502 - protein, 69 aa, Zea mays
  Clone ID: MRT4577_102587C.1.pep
RYVKTFFVVVADWADYGVVGAFRASCLYREDSRGFTDVDQDECDTDGFLILVGPSRQAHNQALMQPKGP

SEQ ID NO: 187503 - protein, 131 aa, Zea mays
  Clone ID: MRT4577_102588C.1.pep
KKKPGLPPPKFGEPQKCVFFFFTTKRFGEGAFLFGLRPSAQKGLWTEKKGLFNWGGNKNFFPFSPGLTGINFSPAQVKEPPPLGFWLGAQKPGFKALLRGPLFGGGFFFFICPSWGDLKRGLVFFFIFFFP

SEQ ID NO: 187504 - protein, 39 aa, Zea mays
  Clone ID: MRT4577_102589C.1.pep
KAHRTPQRQAAESGLYLRSGRPESRPPLCLSPRTYSLSL

SEQ ID NO: 187505 - protein, 160 aa, Zea mays
  unsure (1)..(160): unsure at all Xaa locations
  Clone ID: MRT4577_10258C.1.pep
IVVQLDDWVLCRLYNKKNEWEKMQXEDRRRRRRXTKEEAMDMATSHTHSHSQSHSHSHSWGETRTPESEIVDNDPFPELDSFPAFQDPAMMMTVPKEEQVDGCSAKSGNLFVDLSYDDIQGMYSGLDMLPPPGEDFYSSLFASPRVKGNQPAGAAGLGQF

SEQ ID NO: 187506 - protein, 60 aa, Zea mays
  unsure (1)..(60): unsure at all Xaa locations
  Clone ID: MRT4577_102591C.1.pep
QFNKLLYMLLVLGNLAIEDKHIHQNMHMSVNLLVSLLKKNXQNVRCMYIKSTMNNPYSVF

SEQ ID NO: 187507 - protein, 66 aa, Zea mays
  Clone ID: MRT4577_102592C.1.pep
HGPWARIIRIRDRNLLPNSQLVVIVIQSMYLAFRCPSRMLQAHRHLGQHTNILPHRFLYITVTFVV

SEQ ID NO: 187508 - protein, 54 aa, Zea mays
  unsure (1)..(54): unsure at all Xaa locations
  Clone ID: MRT4577_102593C.1.pep
LGCTTFYDRESLLASDGALTLGYSNISFGLRAAXRFGSRINYCLVEHFLPXNAT

SEQ ID NO: 187509 - protein, 799 aa, Zea mays
  Clone ID: MRT4577_102594C.1.pep
MKMEAPRSQKKVQRLTGCMAALSRFISRLGEKGLPFYKLLKKVDKFQWTLEAQEALDTLKKFLTTPPVLKPPRRATPTQPAEDLLLYISCTTHVVSTALVVERVEEGHAHPVQHPVYFISEVLGPSKKKYPQVQKLLYAVLLTARKLRHYFDDHKVIVVTGFPIGDILHNKEAIGRIAKWACELGPHDIEFRPRTAIKTQALVDFVSEWTEQQVPDNPETAEVWRMYFDGSLKLQGAGARILFTAPGGEHLKYALQLLFPASNNAAEYEALIHGLNIAISLGVKRLMVYGDSLVVISQINKEWDCSSDSMGKYCATVRKLEDKFEGLEFHHVERDRNTAADVLSKLGSSRNQVPPGVFVQEILQPSISMDQTEECNIIDQPESDLDDWRRPIIKYIKNEEEPDDKNSADRIARQSAHYTLIEEVLYRRGASGILMKCVLPSTGKQLLEEVHAGQCGIHAASRTLVGKVFRSGFYWPTAKNDATELVQRCEACQYLSKQQHMPAQQLQTIPVTWPFACWGLDMIGPFKEAQGGYTHVLVAIDKFTKWIEFKPIASLTSAKAVEFIQDIIFRFGTPNSIITDLGSNFTSSEFFDFCEQKSIQIKYASVAHPRANGQVERANGMILEALRKRVFNKNEKFAGKWIRELPYVVWSLRTQPSRALHGNTPFFMVYGSEAVLPTDLKFGAPRLIFESIAEAEATRLEDVDVLEEERLNAVIQSARYQQTLRRYHDKAVRQQFFSVGDLVLRRILTGEGRHKLSPLWEGPFIVAEVTRPGSYRLTQMDGTEVGNSWNIEHLRKFYP

SEQ ID NO: 187510 - protein, 61 aa, Zea mays
  Clone ID: MRT4577_102595C.1.pep
QRMSLKPPDRRRWSSKDARATHASCDRHLQRRCASRDRRSDPRTSWPPPPLPAPTAPRTNV

SEQ ID NO: 187511 - protein, 210 aa, Zea mays
  Clone ID: MRT4577_102596C.1.pep
FFDFCEQKSIQIRYASVAHPRANGQVERANRMILEALRKRVFDKNEKFTGKWIRELPYVVWSLRTQPSRALHGNTPFFMVYGSEAVLPADLKFGAPRLIFESIAEAEATRLEDIDILEEERLNAVIQSARYQQTLRRYHDKAVRQRFFSIGDLVLRRILTGEGRHKLSPLWEGPFIVAEVTRPGSYRLTQMDGTEVGNSWNIEHLRKFYP

SEQ ID NO: 187512 - protein, 137 aa, Zea mays
  unsure (1)..(137): unsure at all Xaa locations
  Clone ID: MRT4577_102597C.1.pep
IGYLEAGRATVKALAAAHSMAPLGSKLAQLQSXVAKHGCSYHKTLMEKNKHYVVDPPTIDKCKDLSKQLFYTRLASLPGRYESFWKEVDGAKLLWKNGSRLKIEDASVAAMFGIELYAWFCLGEIVGRGFTVTGYHV

SEQ ID NO: 187513 - protein, 92 aa, Zea mays
  Clone ID: MRT4577_102598C.1.pep
STIAGPCWAFNMVTALASCHHLKAHKCCRQWHPYKHYTDRAHPHARKTLLSDESKILPTSRSINIIGHYQHVMCLKDFLEVSAKFAGSHPMH

SEQ ID NO: 187514 - protein, 299 aa, Zea mays
  Clone ID: MRT4577_102599C.1.pep
MPAQQLQTIPVTWPFACWGLDMIGPFKKAQGGYTHVLVAIDKFTKWIEFQPIASLTSAKAVEFIQSIIFRFGIPNSIITDLGSNFTSSEFFDFCEQKGIQIKYASVAHPRANGQVERANGMILEALRKRVFDKNEKLAGKWIRELPYVVWSLRTQPSRALHGNTPFFMVYGSEAVLPADLKFGAPRLIFESIAEAEATRLEDIDVLEEERLNAVIQSARYQQTLRRYHDKAVRQRLFSVGDLVLRRILTGEGRHKLSPLWEGPFIVAEVTRPGSYRLTQTDGTEVGNSWNIEHLRKFYP

SEQ ID NO: 187515 - protein, 147 aa, Zea mays
  Clone ID: MRT4577_10259C.1.pep
WVPRGRPVYNMKNEWEKMQLGKAAGATKEEAMDMATSHTHSQSHSHSWGETRTPDSEIVDNDPFPELDSFPAFQDPAMMTVPKKEQVDEGSGKSGNLFVDLSYDDIQGMYSGLDMLPPPGEDFYSSLFASPRVKGNQPAGAAGLGQF

SEQ ID NO: 187516 - protein, 469 aa, Zea mays
  Clone ID: MRT4577_1025C.1.pep
ATAAAARHVVAVPYPGRGHVNPMLVVCRLLAAADAALSVTVVVTEEWHALLAAAGVPGTLPDRVRLATIPNVIPSERVRGADFAGFVEAVHIKMVAPVERLLDRLSLERKPDAIVADTFLAWGVGVGSARGIPVCSLWTQPATFFLALWHLDRWPPVDGHQGEEGLSCRSLDQYLPFPALAPVKCSDMKTLRSMVLPMKRLAQVFSNLRKAQCVLFTSFYELETGAIDGTSQVVPCPIYAVGPSIPYMPLEGDSGEFHHEEDYFGWLDAQPRSSVLYVSFGTHVSMPSSQLEEVALGLHESTVRFFWVARDRASTATLEQISAGGKGLVVPWCDQLKVLCHPSVGGFLSHCGWNSTLEAVFAGVPMLAFPVAWDQLVIGHLVADEWKIGVDLRERRREDGVVGRAAICDTVTKLMDLTDDDSLEMRRRAAELREASRRAVQEGGSSRCSLNSFVRDVIEGRLNVAETSR

SEQ ID NO: 187517 - protein, 125 aa, Zea mays
  Clone ID: MRT4577_102600C.1.pep
MAPLGSKLAQLQSKACEATRIVAKHGCSYHKTLMEKNKHYVVDPPTIDKCKDLSKQLFYTRLASLPGRYESFWKEVDGAKLLWKNRSSLKGEDAGVAAMFGIELYAWFCLGEIVGRGFTVTGYHV

SEQ ID NO: 187518 - protein, 853 aa, Zea mays
  Clone ID: MRT4577_102601C.1.pep
MPFGLKNAGATYQRAIQTCLADHWGKRVEAYVDDVVIKTENPENFIEDLQLVFNSLRRYRWKLNPEKCVFGVPAGKLLGFIVSHQGIEANPDKIEAIMKMEAPRSQKKVQRLTGCMAALSRFISRLGEKGLPFYKLLKKVDKFQWTSEAQEALDALKKFLTTPPVLKPPRRATPTQPAEDLLLYISCTTHVVSTALVVERVEEGHAYPVQHPVYFISEVLGPSKKKYPQVQKLLYAVLLTARKLRHYFDDHKVIVVTGFPIGDILHNKEAIGRIAKWACELGSHDIEFRPRTAIKTQALVDFVSEWTEQQVPDNPETAEVWRMYFDGSLKLQGAGAGILFTAPGGEHLKYALQLLFPASNNAAEYEALIHGLNIAISLGVKRLMVYGDSLVVISQINKEWDCSNDSMGKYCATAPPGVFVQEILQPSISMDQTEECNIIGQPESDSDDWRRPIIKYDDKNSAERIARQSAHYTLIGETLYRRGASGVLMKCVLPSTGKQLLEEVHAGQCGIHAASRTLVGKVFRSGFYWPTAKNDAAELVQRCEACQYLSKQQHVPAQQLQTIPVTWPFACWGLDMIGPFKKAQGGCTHVLVAIDKFTKWIEFQPIASLTSAKAVEFIQSIIFRFGIPNSIITDLGSNFTSSEFFDFCEQKSIQIKYASVAHPRANEQVERANGMILEALRKRVFDKNEKFAGKWIRELPYVVWSLRTQPSRALHGNTPFFMVYGSEAVLPADLKFGAPRLIFDSIAEAETTRLEDIDVLEEERLNAVIQSARYQQTLRRYHNKAVRQRFFSIGDLVLRRILTGEGRHKLSPLWEGPFIVAEVTRPGSYRLTQMDGTEVGNSWNIEHLRKFYP

SEQ ID NO: 187519 - protein, 92 aa, Zea mays
  Clone ID: MRT4577_102602C.1.pep
TVNLTIQEVSGFAPEIQIRNARLPEGVGGLPPFNFFAWPERLRCFLRTPPFSFVPTQSAGHFRRYLGCTKHASLLAREKLITKSLNMEFFDY

SEQ ID NO: 187520 - protein, 800 aa, Zea mays
  Clone ID: MRT4577_102603C.1.pep
MPFGLKNAGATYQRAIQTCLADHWGKRVEAYVDDVVIKTENSENFIEDLQLVFNSLRRYRWKLNPEKCVFGVPAGKLLGFIVSHRGIEANPDKIEAIMKMEAPRSQKKVQRLTGCMAALSRFISRLGEKGLLFYKLLKKVDKFQWTSEAQEALEALKKFLATPLVLKPPQRATSTQPAEDLLLYISCTTHVVSTALVVERAEEGHAYPVQHHVYFISEVLGPSKKKYPQVQKLLYAVLLTARKLRHYFDDHKVIVVTGFPIGDILHNKEAIGRIAKWASLVDFVSEWTEQQVPDNPETAEVWRMYFDGSLKLQGVGAGILFTAPGGEHLKYALQLLFPASNNAAEYEALIHGLNIAISLGIKRLMVYGDSLVVINQINKEWDCSSDSMGKYCTAARKLEDKFEESDSDDWRRPIIRYIKNEEEPDDKNAAERIARQSAHYTLIGETLYRRGASGVLMKCILSSTGKRLLEEVHAGQCGIHAASRTLVGNVFRSGFYWPTAKSDAAELVQRCEACQYLSKQQHLPAQQLQTIPVTWPFACWGLDMIGPFKKAQGGYTHVLVAIDKFTKWIEFKPIASLTSAKAVEFIQDIIFRFRIPSSIITDLGSNFTSSEFFNFCEQKSIQIKYASVAHPRANGQVERANGMIPEALKKKVFDKNEKFTGKWIRELPYVVWSLRTQPSRALHGNTPFFMVYGSEAVLPADLKFGAPRLIFESIAEVEATRLEDIDVLEEERLNAVIQSTRYQQTLRRYHDKAVRQRSFSVGDLVLRRILTGEGRHKLSPLWEGPFVVAEVTRPGSYRLT

SEQ ID NO: 187521 - protein, 104 aa, Zea mays
  Clone ID: MRT4577_102604C.1.pep
TCSPAQPHASRRDDCLRTDAMYRGAQTPRKQLDGHAGANQVARNVSSPSSPDERSHGGAPNEFSQIKAGCTTIARIDNSDLVQIQDLAVRGLQQEKADHSQTQL

SEQ ID NO: 187522 - protein, 88 aa, Zea mays
  unsure (1)..(88): unsure at all Xaa locations
  Clone ID: MRT4577_102605C.1.pep
HVCTVGLASCTALRPVGGNTEMEGTHKGEIRCYPPLNNKDLFPKGTIHFPPHQTSPEFQTPRGFEPSRLINRGPHASXXKGRPPPGGG

SEQ ID NO: 187523 - protein, 588 aa, Zea mays
  Clone ID: MRT4577_102606C.1.pep
QQVPDIPETAEVWRMYFDGSLKLQGAGAGILFTAPGGEHLKYALQLLFPASNNAAEYEALIHGLNIAISLGVKRLMVYGDSLVVISQINKEWDCSSDSMGKYCAAVRKLEDKFEGLEFHHIERDRNTAADILSKLGSGRTQVPPGVFVQEILQPSISMDQTEECNIINQLQSDSDDWRRPIIKYIKNEEEPDDKNSAERIARQSAHYTLIGEELYRRGASGILMKCILPSTGKQLLEEVHAGQCGIHAASRTLVGKVFRSGFYWPTAKNDAAELVQRCEACQYLSKQQHMPAQQLQTIPVTWPFACWGLDMIGPFKKAQGGYTHVLVAIDKFTKWIEFKPIASLTSAKAVEFIQDIIFRFGIPNSIITDLGSNFTSSEFFDFCEQKSIQIKYASVAHPRANGQVERANGMILEALRKKVFDKNEKFAGKWIRELPYVVWSLRTQPSRALHGNTPFFMVYGSEAVLPADLKFGAPRLIFESIAEAEATRLEDIDVLEEERLNAIIQSARYQQTLRRYHDKAVRQRFFSIGDLVLRRILTGEGRHKLSPLWEGPFIVAEVTRPGSYRLTQMDGTEVGNSWNIEHLRKFYP

SEQ ID NO: 187524 - protein, 91 aa, Zea mays
  unsure (1)..(91): unsure at all Xaa locations
  Clone ID: MRT4577_102607C.1.pep
TGDIDVLALLDSGSSHTFLNTMVADQLTGVSTMKTPVNVYVANGSQITCCSELVDASWSIXGVSFRHTSCAALSTYDLIVXMDWLEAHSTM

SEQ ID NO: 187525 - protein, 879 aa, Zea mays
  Clone ID: MRT4577_102608C.1.pep
MAVTFHSKITMRPGSTFCFGTISSVADEEGILHRLADLSEQKSPPTNSENAGKTLPPVLQNKIVSGEAGARGSLTRKTPLSTSPTKEWTQVMRRKEIREKPVVLPVPPTSKENGKKVAAAETPFYPDVLFIGRAESPAVSDDEPTAPGEEPPQRATPTQPAEDLLLYISCTTHVVSTALVVERVEEGHAHPVQHPVYFISEVLGPSKKKYPQVQKLLYAVLLTARKLRHYFDDHKVIVVTGFPIGDILRNKEAIGRIAKWACELGSHDIEFRPRTAIKTQALVDFVSEWTEQQVPDNPETAEVWRMYFDGSLKLQGAGAGILFTAPGGEHLKYALQLLFPASNNAAEYEALIHGLNIAISLGVKRLMVYGDSLVVISQINKEWDCSSDSMGRYCAAVRKLEDKFEGLEFYHVERDRNTAADTLSKLGSGRTQVPPGVFVQEITRPSISIDQTEECNIVDQPESDSDDWRRPIIKYIKNEEEPDDKNSAERIARQSAHYTLIGEILYRRGASGVLMKCILPSTGKQLLEEVHAGQCGIHAASRTLVGKVFRSGFYWPTAKNDAAELVQRCEACQYLSKQQHIPAQQLQTIPITWPFACWGLDMIGPFKKAQGGYTHILVAIDKFTKWIEFKPIASLTSAKAVEFIQDIIFRFGIPNSIITDLGSNFTSSKFFDFCDQKSIQIKYASVAHPRANGQVERANGMILEALRKRVFDKNEKFAGKWIRELPYVVWSLRTQPSRALHGNTPFFMVYGSEAVLPADLKFGAPRLIFESIAEAETTRLEDIDILEEERLNAVIQSARYQQTLRRYHDKAVRQRFFSVGDLVLRRILTGEGRHKLSPLWEGPFIVAEVTRPGSYRLTQTDGTEVGNSWNIEHLRKFYP

SEQ ID NO: 187526 - protein, 186 aa, Zea mays
  Clone ID: MRT4577_102609C.1.pep
METPSPGATLSAVIAEDRRREARRRQGGFGQGGLLPYLVPACGRPAGQRGGRPLHSELMVKLHRWGATFLPKGGGAVARELEEPCRAPSPPPRPRPSFTPAASAAEPEVVPRHEAPAVSVVPTTGPSREREEPAAGSEAIAEADMSAGESAGSSDHQATPVVTVAGGSGGTWLRASPKTRARSPSL

SEQ ID NO: 187527 - protein, 132 aa, Zea mays
  unsure (1)..(132): unsure at all Xaa locations
  Clone ID: MRT4577_10260C.1.pep
VLCRLYNKKNEWEKMQXEDRRRRXGATKEEAMDRGSSHTHSHAQSHSHSWGETRTPESEIVDNDPFPELDSFPAFQDPAMMMTVPKEDHFFCCSAKSGNLFVDLSYDDIHGMYSGLDMPPPPREDFYPSLLR

SEQ ID NO: 187528 - protein, 1278 aa, Zea mays
  unsure (1)..(1278): unsure at all Xaa locations
  Clone ID: MRT4577_102610C.1.pep
MRSFLEKQAMRGPSGPLRRTVRDTRMTLGQNQCKNTSFHYGLSEGKAKTVRALARTVRPQARTVRSFRPIHPPLGDYQILVATTGPPAPYRWSEHPITFAREDQWLNFDHPGKYPLLVDPVIRESRVKKVLVDGGSSINVTFPWTLQGLGVHLKELHESDTPFFGIVPTEGEYLLGHIYMPVTFGTPENYRTEFLRFEVTNFDCGYNAIIGRPGLAKFMAIPHYTYMILKMPGPQGIIIVRADFQGAAECFRVAIQAALTTKPSTVPSTPANSKPEEDLAVPANEAQAATSMRPTEETKRINLGSFQFLQDNRDVFAWQPADMPGVPRELAEHKLKVYPQARPIRQKLRRFTPDKREVIRAELARLVAAGFIREVLHPEWLANPVLVLKKNKVDWRMCVDYTDLNKHCLKDPFGLPRIDQVVDSTAGCSVLSFLDCYSGYHQISLAKEDEEKTAFITPFGAFCYTSMSFGLKNAGATYQRAIRTCLVDHWGKRVEAYVDDVVIKTENPENFIEDLQLVFNSLRRYRWKLNPEKCVFGVPAGKLLGFIVSHRGIEANPDKIEAIMKMEAPRSQKKVQRLTGCMAALSRFISRLGEKGLPFYKLLKKVDKFQWTSEAQEALDALKKFLTTPPVLKPPRRATPTQPAEDLLLYISCTTHVKKYPQVQKLLYAVLLTARKLRHYFDDHKVIVVTGFPIGDILHNKEAIGRIAKWACELGSHDIEFRPRTAIKTQALVDFVSEWTEQQVPDNPETTEVWRMYFDGSLKLQGAGAGILFTAPGGEHLPYALQLLFPASNNAAEYEALIHGLNIAISLGIKRLMVYGDSLVVISQINKEWDCSNDSMGKGGAVXRKLEDKFEGLEFHHIERDQNTAADVLSKLGSGRTQVPPGVFVQEILQPSISTDQIEECNIIDQPKSDSDDWRQPIIKYIKNEEEPDDKNSAERIARQSAHYTLIGEVLYRRGASGVLMKCVLPSTGKQLLEEVHAGQCGVHAASRTLVEKGLDMIGHFKKAQGGYTHVLVAIDKFTKWIEFQPIASLTSAKAVEFIQSIIFRFGIPNSIITDLGSNFTSSEFFDFCEQKSIQIKYASVAHPRANGQVERANGMILEALRKRVFDKNEKFAGKWIRELPYVVWSLRTQPSRALHGNTPFFMVYGSEAVLPADLKFGAPRLIFESVAEAEATRLEDIDVLEEERLNAVIQSARYQQTLRRYHDKAVRQRFFSVGDLVLRRILTGEGRHKLSPLWEGPFMVAEVTRPGSYRLTQMDGTEVGNSWNIEHLRKFYP

SEQ ID NO: 187529 - protein, 1232 aa, Zea mays
  unsure (1)..(1232): unsure at all Xaa locations
  Clone ID: MRT4577_102611C.1.pep
ENPISITLKNQWLNINIRDQSHGRIHLFSVTLETVILAWALCTAMGMILRWTLQGLGVHLKELHESDTPFFGIVPMEGEYPLGHIYMPVTFGTPENYRTEFLRFEVANFDSGYNTIIGRPGLAKFMAIPHYTYMILKMPGPQGIITVRADFQGAAECFRVAIQAALTTKSSAVSSTLANSKPEEDLAVPANEAQAATSMRPTEETKRINLGALVQFLQDNRDVFAWRPADMPGVPRELAEHKLKVYPQARPIWQKLRRFTPDKREAIRAELARLVVARFIREVLHPEWLANPVLVLKKNKVDWRMCVDYTDLNKHCPKDPFGLPRIDQVVDSTTGCSVLSFLDCYSGYHQISLAKEDEEKTAFITPFGAFCYTSMLFGLKNAGATYQRAIQTCLADHWGKRVEAYVDDVVIKTENSENFIEDLQLVFNSLRXAGKLLGXIVSHRGIEANPDKIEAIMKMEVPQSQKKVQRLTGCMAALSRFISRLGGKGLPFYKLLKKEALDALKKFLTTPPVLKPPRRATSTQPAEDLLLYISCTTHVVSTALVVERVEEGHAYPVQHPVYFISEVLGLSKKKYPQVQKLLYAVLLTAHKLRHYFDDHKVIVVTSFPIGDILHNKEAIGRIAKWACELGYHDIEFRPRTAIKTQALVDFVSEWTEQQVPDNPETAKVWRMYFDGSLRLQGAGAGILFTAPGGEHLKYALQLLFPASNNAAEYEALIHGLNIAISLGIKRLMVYRDSLVVISQINKEWDCSSDSMGKYCAAVRKLEDKFEGLEFHHVERDRNTAADVLSKLGSSRTQVPPGVFVQEILQPSISMDQTEECHIIDQSESDSDDWRRPIIKYIKNEEEPDDKNSAERIARQSAHYTLIGETLYRRGASGVLMKCILPSTGKQLLEEVHAGQCGIHATSRTLVGKVFRSGFYWPTTKNDAAELVQRCEACQYLSKQQHLPAQQLQTIPVTWPFACWGLDMIGPFKKAQEGYTHVLVAIDKFTKWIEFKPIASLTSAKAVEFIQDIIFRFGIPNNIITDLGSNFTSSEFFDFCEQKSIQIKLSEPTGMILEALRKKVFDKNEKFVGKWIRELPYVVWSLRTQPSRALHGNTPFFMVYGSEAVLPADLKFGAPRLIFENIAEVEATMLEDIDILEEERLNAVIQSARYQQTLRRYHDKAVRQRSFSVGDLVLRRILTGEGRHKLSPLWEGPFMVAEVTRPGSYRLTQMDGTEVGNSWNIEHLRKFYP

SEQ ID NO: 187530 - protein, 98 aa, Zea mays
  unsure (1)..(98): unsure at all Xaa locations
  Clone ID: MRT4577_102612C.1.pep
RYVXGGFIIFFFCLIPVLLLFVGCPIHPTENFVIGLFLFTKSQLLPFPPLPGGMTGAFXPHPLXXLGGGGAAPRGGGLLPLRPGRPAAPAGVAGGGGG

SEQ ID NO: 187531 - protein, 896 aa, Zea mays
  Clone ID: MRT4577_102613C.1.pep
MPFGLKNAGATYQRAIQTCLADHWGKRVEAYVDDVVIKTENPENFIEDLQLVFNSLRRYRWKLNPEKCVFGVPAGKLLGFIVSHRGIEANPDKIEAIMKMEAPRSQKKVQRLTGCMAALSRFISRLGEKGLPFYKLLKKVDKFQWTSEAQEALDALKKFLTTPPVLKPPRRATPTQPAEDLLLYISCTTHVVSTALVVERVEEGHAYPVQHPVYFISEVLGPSKKKYPQVQKLLYAVLLTARKLRHYFDDHKVIVVTGFPIGDILHNKEAIGRIAKWACELGSHDIEFRPRTAIKTQALVDFVSEWTEQQVPDNPETAEVWRMYFDGSLKLQGAGAGILFTAPGGEHLKYALQLLFPASNNAAEYEALIHGLNIAISLGVKRLMVYGDSLVVISQINKEWDCSSDSMGKYCAAVRKLEDKFEGLEFHHIERDRNTAADVLSKLGSGRTQVPPGVFVQEILQPSISTDQIEECNIIDQPESDSDDWRQPIIKYIKNEEEPDDKNSAERIARQSAHYTLIGEVLYRRGASGVLMKCVLPSTGKQLLEEVHAGQCGVHAASRTLVGKVFRSGFYWPTAKNDAAELVQRCEACQYLSKQQHMPAHQLQTIPVTWPFACWGLDMIGPFKKAQGGYTHVLVAIDKFTKWIEFQPIASLTSAKAVEFIQGIIFRFGIPNSIITDLGSNFTSSEFFDFCEQRSIQIRYASVAHPRANGQVERANGMILEALRKRVFDKNEKFAGKWIRELPYVVWSLRTQPSRALHGNTPFFMVYGSEAVLPADLKFGAPRLIFESIAEAEATRLEDVDVLEEERLNAVIQSARYQQTLRRYHDKAVRQRFFSVGDLVLRRILTGEGRHKLSPLWEGPFIVAEVTRPGSYRLTQMDGTEVGNSWNIEHLRKFYP

SEQ ID NO: 187532 - protein, 53 aa, Zea mays
  Clone ID: MRT4577_102614C.1.pep
RQQLCHRRPFSPFISHNTGGAVSQPPFSIVADLARRSLRHSCSCEHKRNAGIR

SEQ ID NO: 187533 - protein, 107 aa, Zea mays
  unsure (1)..(107): unsure at all Xaa locations
  Clone ID: MRT4577_102615C.1.pep
AWSRPRSFFFFFFFXLFARXXXXGXXSPXXXSAXVXPXXXXXFPCPVGPFCXAAPPXGFAPXXXCXXXXXXXAVXXGLXSPGRXLPPLLLCLPXRPCPGGRSPAASA

SEQ ID NO: 187534 - protein, 253 aa, Zea mays
  unsure (1)..(253): unsure at all Xaa locations
  Clone ID: MRT4577_102616C.1.pep
MERYSCCRWVLACSILALCLGGQGARCQLTSDFYDSTCPQLYYVVQQHVFDAMRDEMRMGASLLRLHFHDCFVNGCDASILLDGDDGEKFALPNLNSVRGYXVIDAIKADLESACPEVVXCADVVALAASYGVLFSGGPYYDVLLGRLDGLVANQSGADDGXETAALDVSSPYVFDNDYYKNLLTERGLLSSDQGLFSTPEGVAASTKDLVEAYSSDGDQFFYDFVWSMIRMGNIPLAAGSDGEVRKNCRVVN

SEQ ID NO: 187535 - protein, 331 aa, Zea mays
  Clone ID: MRT4577_102617C.1.pep
MERYSCCRWVLACSILALCLGGQGARCQLTSDFYDSTCPQLYYVVQQHVFDAMREEMRMGASLLRLHFHDCFVNGCDASILLDGDDGEKFALPNLNSVRGYEVIDAIKADLESACPEVVSCADVVALAASYGVLFSGGPYYDVLLGRLDGRVANQSGADNGLPSPFEPVDSIIQKFAAVGLNTTDVVVLSGAHTIGRARCALFSNRLSNFSATDSADPTLEASLADSLQSLCAGGNGDGNETAALDVSSPYVFDNDYYKNLLTERGLLSSDLGLFSSPEDASASTKDLVEAYSSDGDQFFYDFVWSMIRMGNIPLAAGSDGEVRKNCRVVN

SEQ ID NO: 187536 - protein, 65 aa, Zea mays
  Clone ID: MRT4577_102618C.1.pep
AEHDGIANINGTDSQIPLTGPNSIIGISADVHADPDDLGKGGHDLMKITENAGGRVDCGIIGLHG

SEQ ID NO: 187537 - protein, 67 aa, Zea mays
  Clone ID: MRT4577_102619C.1.pep
SMDTINEVTRQLTAGNMKWLIATEDWTLEDFPFLWHDKTLLVLDLIYVSILSVFVNNTFIENISIFL

SEQ ID NO: 187538 - protein, 92 aa, Zea mays
  Clone ID: MRT4577_10261C.1.pep
ESFIVADEDLRGNVYSVLSAGPLSERGGVLVKFPPVWVFKFVNSVGRVMMSVGSFRRLRVDYRRVPLVSLVFVGVRSRFGRNVEIYASRPGN

SEQ ID NO: 187539 - protein, 228 aa, Zea mays
  Clone ID: MRT4577_102620C.1.pep
MASTRDLVIASLSAATGAVVAAAALRLLSSRRTSSVRPQNLPAAANGSASERPLAQSPFDPVKREGYISWDDYFMAIAFLSAERSKDPNRQVGACLVSQEGIILGIGYNGFPRGCSDDKLPWAKKSASGDPLETKFPYVVHAEVNAILNTNHASAAGQKLYVTMFPCNECAKIIIQSGVSEVIYFVEKKIDNSAHVYVASHKLLSMAGVKVRKHQPQMAQIPIKFQEP

SEQ ID NO: 187540 - protein, 138 aa, Zea mays
  Clone ID: MRT4577_102621C.1.pep
MLGRRGMPGMVLERTDMPGLRRRDRLTVAAEKSSGAAFNVVPGLAGAPGSVSLELASRPGCFLVGGGEKVQVGCAGGAQQKRGDGAWFRRSASFARGEPLRRYHPMSFAARGVRRSFLLEPLFTLRDEFYTVYFNLVA

SEQ ID NO: 187541 - protein, 136 aa, Zea mays
  Clone ID: MRT4577_102622C.1.pep
KNQKPPPNFFPASIANAIVVDAPLGGADHDEPSCRPAGKKKEKQKLRQRTSMEVVGYLIAKKKDFALEKDLKKEERCNKAFAFQEERMKLAKEKFAFQRQLEEDRIIGLALSPMNYKQRQYYEDRQNEILARRFNI

SEQ ID NO: 187542 - protein, 43 aa, Zea mays
  Clone ID: MRT4577_102623C.1.pep
PALNKNCFKMLLTIHYSKVHSGYTIGLWIATIIDKRSYIAKMT

SEQ ID NO: 187543 - protein, 83 aa, Zea mays
  Clone ID: MRT4577_102624C.1.pep
SSGRPGRLKKKKKKKKKKRKKKKKKKKKKKKKKKKKKKKKKKKKKKKKKKKKKKKKRFALCPEPLLGLFLKFSLTLGAVKLSF

SEQ ID NO: 187544 - protein, 124 aa, Zea mays
  unsure (1)..(124): unsure at all Xaa locations
  Clone ID: MRT4577_102625C.1.pep
TRPARLREGRVRVHGDLAAESNXLLHPLQDTLVDHPRRSIFHNWLFSSTSNFIILNWTKAQQNCIMITQMSMDKEQNSVTEQGGCSPXNMKLDPGFQNCRLVPDQKLFPDRFKIPSYLGRPWKE

SEQ ID NO: 187545 - protein, 132 aa, Zea mays
  Clone ID: MRT4577_102626C.1.pep
SFQFKSLNLVRGLHLPLSAVTVWTYQSVVDLAFVIRVVFCVHVITRVLVPVIKDMIRCNGVLLIQAAHVPYLLGKLCDSSGRILHPCRYDELGLVSSHSATPFYSLQCTLKVVVDFAGAIHVVEQYISTYRG

SEQ ID NO: 187546 - protein, 136 aa, Zea mays
  unsure (1)..(136): unsure at all Xaa locations
  Clone ID: MRT4577_102627C.1.pep
PQGSQALIGSLXPPSLSPRVFLVCENPIFPPPRVPQAIAGGFFPFSPLFLHQSSAFLQRFPLGHFWAQNLGAQQFQQFGLATLVAYFQQQRFFPFTQLGALNFGFFLEQQQLPFNQLVLANPAAFFQHPLMGGALF

SEQ ID NO: 187547 - protein, 144 aa, Zea mays
  unsure (1)..(144): unsure at all Xaa locations
  Clone ID: MRT4577_102628C.1.pep
MESIPLLTPYKMGQLNLAHRIVLAPLTRQRSYGNVPQPHAALYYSQRASAGGLLITEATGVSDTAQGYRDTPGVWTAEHVEAWKPIVDAVHAKGALIFCQIWHVGRVSTYEYQPGGAAPLSCTDKGVXPQMSYDGRLEEFSPTR

SEQ ID NO: 187548 - protein, 83 aa, Zea mays
  Clone ID: MRT4577_102629C.1.pep
LALKRREQRRVRGMMQANYAGQLVQEFKTMRADCLHWLWNYGLWHPLSIRAIRVRRRSPSWYNPTMPRYVDMAGSSKGCSLAQ

SEQ ID NO: 187549 - protein, 357 aa, Zea mays
  Clone ID: MRT4577_10262C.1.pep
MTAQNPPTGQDTQSRATPPTIGDQQPAAGASCLKTPSRSRTEDWQAQPKPPLLVLGFIASNPDHIMGLPVTRRRERDAEAELDLPPGFRFHPTDDELVEHYLCRKAAGQRLPVPIIAEVDLYRFDPWDLPERALFGAREWYFFTPRDRKYPNGSRPNRAAGDGYWKATGADKPVAPRGARTLGIKKALVFYAGKAPRGVKTDWIMHEYRLADAGRRAKKGSLRLDDWVLCRLYNKKNEWEKMRLGKEGAAKEEAMDMSTSHSWGETRTPESEIVDNDPPFPDPPAPAMMVPKKERVDAGGSARSSDLFVDLSYDDIQGMYSGLDMLPPPGEDFYSSLFASPRVRGNQPTGAAGLGPF

SEQ ID NO: 187550 - protein, 44 aa, Zea mays
  Clone ID: MRT4577_102630C.1.pep
NAGVSGINRVSTDPPFTMWGKSENAHTDGPSKHLANVNGYWDTP

SEQ ID NO: 187551 - protein, 59 aa, Zea mays
  Clone ID: MRT4577_102631C.1.pep
FKRPSNSLVCTRKNKLPVWEKKNKRGYPQVYCDTMVKIYGIKLGQFLLFDNVWGSFSLL

SEQ ID NO: 187552 - protein, 382 aa, Zea mays
  Clone ID: MRT4577_102633C.1.pep
MEAVLRHPSLSRTRPPNLNPPTTPSPSLHAPSLLRLRARRLIAAAVFQDQKPKEPASKGGDDEEEAYGEVDRIVSSRTVSSPVFAEDGSATAAVATEFLVEWKDGHEPSWVPAEAIAADVVAEYETPWWTAAKKADSEALAALLADETLRRDPDAEDAQGRTAAHFAAGLGSEECLRALGAAGADVGRRERAGGGLTPLHMAVGYGRACAVRALLELGADPEAPDGQGRTPLELVQEVLARAPKGNPATFQLRQGLEAAQKELEKAVYEWAEVEKVIDGRGEGKWREYLVEWRDGGEREWVKAAWVAEDLVSDFEAGLEYAVAEAVLDKRQAATATAEGEDSWEYLVKWVDIEEATWEPAENVDTELVQKFEQQQSGSAGGD

SEQ ID NO: 187553 - protein, 83 aa, Zea mays
  unsure (1)..(83): unsure at all Xaa locations
  Clone ID: MRT4577_102634C.1.pep
PSTSLIQIENXNSKEEVAWYCGKRMAYIYKAKVKKNGSHYRCIWGKVTRPHGNSGIVRAKFKSNLPPRSMGARVRVFMYPSNI

SEQ ID NO: 187554 - protein, 53 aa, Zea mays
  Clone ID: MRT4577_102635C.1.pep
MDGYSYASGGYYGRGYTRGEGVSFRLYSTYNHDGRTMLLMGVLNTEYCGNWII

SEQ ID NO: 187555 - protein, 45 aa, Zea mays
  Clone ID: MRT4577_102636C.1.pep
QKPAITRSVFINYSTQNQSPLMFIITPIPHTLTHHNHSSPLIFLT

SEQ ID NO: 187556 - protein, 74 aa, Zea mays
  Clone ID: MRT4577_102637C.1.pep
PQNIPPTTCIRQDIPPPPVPLQISANLSSIHTNELSFQFLTPHLIVEQYKTLATGYVPKFDIKSMPTFKASEIF

SEQ ID NO: 187557 - protein, 73 aa, Zea mays
  unsure (1)..(73): unsure at all Xaa locations
  Clone ID: MRT4577_102638C.1.pep
SGNPPPPAPRGXPPFPRPPEKEVGSPPPXQRPFRGRPRXQLPARAGPPPPGPPRRGAPIPPPRGITGGSPKPI

SEQ ID NO: 187558 - protein, 71 aa, Zea mays
  Clone ID: MRT4577_102639C.1.pep
MASRWVRPDVYPLFAATGVAVGICRFQLFRNTTGNPEVRVNKAGRAAGVLDNHEEGRRYAMHGLTRFVHDK

SEQ ID NO: 187559 - protein, 304 aa, Zea mays
  Clone ID: MRT4577_10263C.1.pep
MGQPVTRRRERDEEAELDLPPGFRFHPTDDELVEHYLCRKAAGQRLPVPIIAEVDLYRFDPWDLPERALFGAREWYFFTPRDRKYPNGSRPNRAAGDGYWKATGADKPVAPRAAAADARTLGIKKALVFYAGKAPRGVKTDWIMHEYRLADPGGRAKKGSLRLDDWVLCRLYNKKNEWEKMRLGKGAAAGVIGAAKEEEAMDVSISHSQTHSWGETRTPESEIVDNDPPPPAMMVPKKKRVDDGGSARTSDLFVDLSYDDIQGMYSGLDMLPPAGEDFYSSLFASPRVRGNQPTGAAGSWAPSE

SEQ ID NO: 187560 - protein, 85 aa, Zea mays
  Clone ID: MRT4577_102640C.1.pep
HIGYTEPHHHLPCPHDQHITTTTHSSRRRCSSSPAPSSPTLPLTSTPSRMLCSTSNGTRFERHHRIGEGHTSDSAFDDQLDICAR

SEQ ID NO: 187561 - protein, 111 aa, Zea mays
  Clone ID: MRT4577_102641C.1.pep
KVARFKKKLGGQRAPHQGGSSLAQKRGSGKLRPPFEAERGGSKKVPPSQTGFTGFKFLTEKGENPKGGWGAGDPFPVCGSLNQKKGFPLGPWGFWPVFPPGPGGKSMFFFP

SEQ ID NO: 187562 - protein, 89 aa, Zea mays
  Clone ID: MRT4577_102642C.1.pep
KGLFFRPIILGHTMVFSCTLFYAPSKFFFISRSPFLVSPPLSCPCQLGTPKKGPPFLFPVPKNLNFFWFNNWQRSALCINQVLPGYSWS

SEQ ID NO: 187563 - protein, 69 aa, Zea mays
  unsure (1)..(69): unsure at all Xaa locations
  Clone ID: MRT4577_102643C.1.pep
MTRLLLACLALLLARAGVAREYTAVFNFGDSLSDTGNLCVDRIPDYLATGHIADGMTXLGYPTGRVFDG

SEQ ID NO: 187564 - protein, 106 aa, Zea mays
  Clone ID: MRT4577_102644C.1.pep
VWEPEFFGEMVGFPELVVVCGLTLPFPGQGRIKKVEGTPVFFPPKNGIRPPGKKVVWSKQLNSKGKGGNLIIKRQASHAPNRVWKPGNGSKTNCFGDRKQIFFKEG

SEQ ID NO: 187565 - protein, 423 aa, Zea mays
  Clone ID: MRT4577_102645C.1.pep
METYTTDDALTLMGFGKFQALVLAYAGMGWVAEAMEVMLLSFLGPVVREEWNVSPQDESLLSSVVFAGMLIGACAWGFISDRYGRKTVLLLSTLLTSGLGLLSALSINYLCLLVLRFFVGIGVGSGHVFSSWFLEFVPAGNRGTWMVIFSFFWTIGTVLEASLAWAVLSALSWRWLLALSSLPCFLLLLFFRITPESPRYLCAQNRMTDARFVLERMAIANQAALPMGVLTYHQETKTECITHVSEDEHLIPVREKEHTDRNAISSKSGAVAVLHKLLSHNLLKSTLLLWFVYYASSFAYYGITLLTSQLSDVNRSCKSDLVFEVHQNNGNLYKDTFITSLAEIPGLILSALLVDRFGRKATMSCLMFACCAFLGPLVLHQNELLTTTLLFGARACGTGATTTLCLYAPEVRFNFLMATCILI

SEQ ID NO: 187566 - protein, 500 aa, Zea mays
  unsure (1)..(500): unsure at all Xaa locations
  Clone ID: MRT4577_102646C.1.pep
METYTTDDALTLMGFGKFQALVLAYAGMGWVAEAMEVKLLSFLGPVVREEWNVSPQDESLLSSVVFAGMLIGACAWGFISDRYGRKXKDLLQQTLYVSIYRPWLLKAGRNKIKSFRIHRKLISFLTSLKILDXHTYIQITNTXDSGRGTXLVLLCDLWLXQFTESIXNESFQLATSXVNQHGXAVLSALSWRWLLALSSLPCFLLLLFFRITPESPRYLCAQNRMTDARFVLERMAIANQAALPMGVLTYHQETKTECITHVSEDEHLIPVREKEHTDRNAISSKSGAVAVLHKLLSHNLLKSTLLLWFVYYASSFAYYGITLLTSQLSDVNRSCKSDLVFEVHQNNGNLYKDTFITSLAXDYKIPGLILSALLVDRFGRKATMSCLMFACCAFLGPLVLHQNELLTTTLLFGARACGTGATTTLCLYAPEVYPTYVRSTGVGIATAIGKIGGVICPLVAVGMLRSCHQMEAVLVFELVLFLAGVSCILFPVETKGREMD

SEQ ID NO: 187567 - protein, 56 aa, Zea mays
  Clone ID: MRT4577_102647C.1.pep
LQEKQAQRPWPKDRIWVFKSDPRYFGSPMMDAVLNNSPLDKEMVHWLKTRPNVFLG

SEQ ID NO: 187568 - protein, 135 aa, Zea mays
  unsure (1)..(135): unsure at all Xaa locations
  Clone ID: MRT4577_102648C.1.pep
PPSYHRYAHYTPPASSLFPGGGYGYDYDYGQSKELRDAAELRRRHFHVLGADLSLDKPLPEPDTGSDEKQPLRRFLDEWPRESGDMAADDATQLSISIPAASPSDLAAASAAAARFHNGEXGERNTPLSLVPCVR

SEQ ID NO: 187569 - protein, 155 aa, Zea mays
  unsure (1)..(155): unsure at all Xaa locations
  Clone ID: MRT4577_102649C.1.pep
MQVAPPRTGRIEQRRMVRTNETARKSTGGKAPRKQLATKAERKSASTTGSVKKPHSXWPETAALNEIPXYKKSTELLIRKLPFQRLWRKISQDFEKDLGLYTHGVLHVQKALEAYLDYLFEDCKLCDIDANIVAIMRWDLQLLRRVGGHRLYPSF

SEQ ID NO: 187570 - protein, 55 aa, Zea mays
  Clone ID: MRT4577_10264C.1.pep
MLAVAATTGTAAGSGLDVSTEIRYPIIFEDFNLHVQIWKKFFSIGYEYVYEDFNP

SEQ ID NO: 187571 - protein, 141 aa, Zea mays
  unsure (1)..(141): unsure at all Xaa locations
  Clone ID: MRT4577_102650C.1.pep
QQQLQQFLPGVSXLTMVNPAAYLQKQQMLLFSPXLVVGNAPKYLQQQFLQQIGPALTQLTVANPVAYLQQVVPFNQLVVLNFGGDLQQGQQFFYPLAGPNPLVPAFLQQQQLFPYSQFFFINPALLWQQPIVGGALFLISY

SEQ ID NO: 187572 - protein, 40 aa, Zea mays
  Clone ID: MRT4577_102651C.1.pep
LGHENHCSETNQVITADSRCTRSGHYVTFLCRLTWDRTHE

SEQ ID NO: 187573 - protein, 50 aa, Zea mays
  Clone ID: MRT4577_102652C.1.pep
FEVGWATTFIHSKKTHRMFLKLLPQHQDRFLSRNHAIFQNLRKQGTKLMK

SEQ ID NO: 187574 - protein, 87 aa, Zea mays
  Clone ID: MRT4577_102653C.1.pep
KQAHFLPPRFLDFFLPFLFCVLFVAVAVAVEQDVTSSSLAGSTASIPAVSGSSLSEHPLHSSAMCVGNWAAGALSFLLTDSFPEVFS

SEQ ID NO: 187575 - protein, 42 aa, Zea mays
  Clone ID: MRT4577_102654C.1.pep
GNSGWVPDNLNEGHLNDFFRFIVGISFMNLSVYVLCAGVSMT

SEQ ID NO: 187576 - protein, 128 aa, Zea mays
  Clone ID: MRT4577_102655C.1.pep
GSGQEFPGRPTRPPTRPPTRPPTRPPTRPLDEYGTNVTKLAQEGKLHPVVGRQPHSERVVHILGRRTKNRPCLIGEPDVGKTAIAEGLAQRISTGDVPDTVQGKKVITLDMGLLVAGTKYPGEFEERL

SEQ ID NO: 187577 - protein, 46 aa, Zea mays
  Clone ID: MRT4577_102656C.1.pep
GHQGNNLLGPRLARIGLRTTFKSFLTGVKTPQAARKGARYPPQTGN

SEQ ID NO: 187578 - protein, 106 aa, Zea mays
  Clone ID: MRT4577_102657C.1.pep
PAGHELGAGVVGRAQGFYVASSQDGTSKTIVLTAMFEGPEAPHGGDTLSFFGVHRMAAPESHIAVIGGTGKYENAKGFAAIQTLHPGDEHTTDGVETLLQFNVHLI

SEQ ID NO: 187579 - protein, 96 aa, Zea mays
  Clone ID: MRT4577_102658C.1.pep
YSIQMVIRGGTQLCGIVSFHCLHNKRLPGALKQTDTQHPCQSPSTTLHASQAPKNVVCQFYSCGCKCMRTLLIVGVLSRRPATRFSISCPRSFLKG

SEQ ID NO: 187580 - protein, 83 aa, Zea mays
  unsure (1)..(83): unsure at all Xaa locations
  Clone ID: MRT4577_102659C.1.pep
PRRATXNRKAKNQTRGPRREARSEARARQNAAPKTXQGRXENXEAAQKAXRXRAKANAGAQHXRXTXEGESXEAKKGXTQKGX

SEQ ID NO: 187581 - protein, 57 aa, Zea mays
  Clone ID: MRT4577_10265C.1.pep
ADPATQAHPRRWAVRKRTTLCGSALRTRHTLALHHAHTVIAIGLLTQTWWYVLLAHS

SEQ ID NO: 187582 - protein, 82 aa, Zea mays
  Clone ID: MRT4577_102660C.1.pep
ERARPSAGRRRHGDAAGRRLVGGLVEELGGGVHMRQERRRGTQRQSHSFASGSTANQQTGPQHNTNAQKLVLDEREREREGA

SEQ ID NO: 187583 - protein, 40 aa, Zea mays
  Clone ID: MRT4577_102661C.1.pep
CGKLLCGFSHTQITQINLFSQIKHPNHNKLVNYNSRKCIQ

SEQ ID NO: 187584 - protein, 82 aa, Zea mays
  Clone ID: MRT4577_102662C.1.pep
GLGGSPLTNREQAPERPIATRSSQAPFVISVRSTLPTCPAQARGGIIPHRLLSRVHCQMTTRLPSIYWHGKKLADSLPSSYN

SEQ ID NO: 187585 - protein, 75 aa, Zea mays
  Clone ID: MRT4577_102663C.1.pep
LAGWWFCTIPDIHRPKSPLHIKPADVTSRIHFPNRTASRNRALLYPLTAWRFSGQYISRRAHCSCHASRYQRGSS

SEQ ID NO: 187586 - protein, 114 aa, Zea mays
  unsure (1)..(114): unsure at all Xaa locations
  Clone ID: MRT4577_102664C.1.pep
ATSASHQPIEELQEHSLGQVTIQEIATHQLQQSRPALSQLAVKNHGVYWQQELIACNQLALANIVAYQQHQQSQQXLPALSQLAMVNPDVYLRQLQLXNVAPIGEGNAPTYLQQ

SEQ ID NO: 187587 - protein, 53 aa, Zea mays
  Clone ID: MRT4577_102665C.1.pep
SPWLTILRIKIVFTPQVLTWVYVITGLCVFDNYFFEVFFFLICSLVLDYFCSL

SEQ ID NO: 187588 - protein, 102 aa, Zea mays
  Clone ID: MRT4577_102666C.1.pep
IYICMNRSTYIYIYSSEISRSITVFLFHGERDACAKIRYTYTYIRASLSAFCSGGKETSKHLGHERGLLMGAPHRGALRRRLHARHIRHPGPGHLPVPLHVL

SEQ ID NO: 187589 - protein, 194 aa, Zea mays
  Clone ID: MRT4577_102667C.1.pep
TLQSMQALVRAQATVRARRAGAAALPHLHHLPGRPRYSMQERCADDARIEHGVAAHSSRRLSASVESSSYGYDRSPKIVEVDPGRPKSRSSSRRSSAPLLDAGSCCGEEWCASANPASSPLPCYLSAGPPTRIAVPTSRQFPDYDWCALEKARPATAQSTPRCLLQAHAPATPTKSVVAGHSPSLNGCPNYMSS

SEQ ID NO: 187590 - protein, 74 aa, Zea mays
  unsure (1)..(74): unsure at all Xaa locations
  Clone ID: MRT4577_102668C.1.pep
MAEVEQQQDTPKLFNRWTFDDVQVNDISLNDYLAVNATKHAMFLPHTGGRYFKKRFPKGQCPIVERLTNXLLIH

SEQ ID NO: 187591 - protein, 75 aa, Zea mays
  Clone ID: MRT4577_102669C.1.pep
TIGEKPCHSNLRRVELGPSENQSSEVVHIMPAPTRHVGGGVVGEGRDGVQGQGGCLGGGATVGAVSRASSGGVGG

SEQ ID NO: 187592 - protein, 328 aa, Zea mays
  unsure (1)..(328): unsure at all Xaa locations
  Clone ID: MRT4577_10266C.1.pep
MVAMAAVQQKQQQQRRDAEAELNLPPGFRFHPTDEELVAHYLCARAAGRRPPVSIIAEVDLYRFDPWDLPERALFGRREWYFFTPRDRKYPNGSRPNRAAGSGYWKATGADKPVEHGGRTAGIKKALVFYHGKPXRGQDGGDHARTLGIQKALVPYAGKAPRGVKTDWLMAEYRLADAGRRAKKGSLRLDDWVLCRLYNKKNEWEKMRLGKGAAAGAGRVGEAMDMSTSHSQITHSWGETRTPESEIVDNDLPFPDPAMMVPKKERVDDGGSARTSDLFVDLSYDDIQGMYSGLDMLPPAGEDLYSSLFASPRVRGNQPTGPAGLGPF

SEQ ID NO: 187593 - protein, 88 aa, Zea mays
  unsure (1)..(88): unsure at all Xaa locations
  Clone ID: MRT4577_102670C.1.pep
NFFILITXFSDXISFNKGFISFLSFINPITTFLFHILFIILVVFPYLILPTFFLYIFLIWILNFLYLPPYPSHINTNIFSYESLFILY

SEQ ID NO: 187594 - protein, 54 aa, Zea mays
  Clone ID: MRT4577_102671C.1.pep
NYIYFFSPPSFVFVFFLKNVRCLHRARDIFQASRLSLLKLKPKTISTIFSKSKC

SEQ ID NO: 187595 - protein, 250 aa, Zea mays
  Clone ID: MRT4577_102672C.1.pep
MEVASGDEDLESLLQNFHRVSQGYKDALMQVQVLRVNCSTEFKRREALESHITDLKKDNERLRRQYTETLFKVTNQVKFRAEAQSLKEELDKANSRLLSMEEEHKRETEQLKHSSEMNINALENKLSHALVQQARDEAAMKQLKLELSAHKSHIDMLGSRLEQVTNDVHSQYKNEIQDLRDVVSVEQEEKKDIHRKLQNVENELRITRMKQAEQQRDSVSVQHVETLKQKVMRLRKENESLKRRLASSEV

SEQ ID NO: 187596 - protein, 77 aa, Zea mays
  Clone ID: MRT4577_102673C.1.pep
LFGEMLGTKWPARMESWNIDRRGAAAATDVSLGQSGFDMMQINLMYTVFRTCTDCLVNYKIISVFWFGFRVHLCMKY

SEQ ID NO: 187597 - protein, 86 aa, Zea mays
  Clone ID: MRT4577_102674C.1.pep
GRPTNNSPERSHAPPDSLFFLTINKRVKKSTSSYVGGCPFLPRQAVSFYGRACYGALATNRFFIRLLAHGESRALTKEPSHLARRL

SEQ ID NO: 187598 - protein, 89 aa, Zea mays
  Clone ID: MRT4577_102675C.1.pep
KKAPLKKKPTHACMYACPGGTGGSTQALSEFKRRLSPAGPPSNTPFKRAGPKNGFPLIGPFLNQMFFFPKNPSEGPPKVNSPQRGFFLG

SEQ ID NO: 187599 - protein, 59 aa, Zea mays
  Clone ID: MRT4577_102676C.1.pep
PNHVHVPRKRITATCTYTTLASYSKTHAASWTLADQTSLYGRDTSYKASIHRWRSRHTT

SEQ ID NO: 187600 - protein, 160 aa, Zea mays
  Clone ID: MRT4577_102677C.1.pep
MATPDLLFNLRNLFYLGAYQSAINNSDVPGLDADAAAERDVIVFRSYIALGSYQLVISEIDSSAATSLQAVKLLALYLTGDKEGAIASLKEWLSDSAIGSNPVLRLIAGIIFMHEQDYNEALKHTHTGGTLDLHALNVQIFLKMHRSDYADKQLKIMQQT

SEQ ID NO: 187601 - protein, 448 aa, Zea mays
  Clone ID: MRT4577_102678C.1.pep
MVLQRFSWPYGGRSATFCGSFTGWRECPMGLVGAVFQVVFDLPPGVYQYRFLVDGVWRCDETKPFVRDEYGLISNEVLVENNVQPVVQPEPSIRGTNMDKGTILKTMPPEPSSQNPSMQIAVIRHVVSGILLHNTIYDVVPLSSKLTVLDTQLPVKQAFKIMHDEGLALVPLWDDRQGTITGMLTASDFVLILRKLQRNIQVIGNEEPISAWKEAKLQFYGGPDGAAMQRRPLIHVKDSDNLVDVALTIIRNEISSVPIFKCMADSSGVPFLNLATLQGILKFLCSKLQEEAEGCSLLHNQLLSIPIGTWSPHTGRSSSRQLRTLLLSSPLNTCLDILLQDRVSSIPIVDDNGSLRDVYSLSDIMALAKNDVYARIELEQVTVQNALDVQYQVHGRRQCHTCLQTSTLLEVLEGLSIPGVRRLVVIEQSTRFVEGIISLRDVFTFLLG

SEQ ID NO: 187602 - protein, 536 aa, Zea mays
  unsure (1)..(536): unsure at all Xaa locations
  Clone ID: MRT4577_102679C.1.pep
LARARVLRSHGDAALLVGGWREYPXLVGAEFQVVFDPPPGVYQYRFLVDGVWRCDETKPFVCDEYGLISNEVLVENNVQPVVQPEPSIRGTNLDEGTVLTTMPPESSSQNPGVQIAVFRHVVSGILLHNTIYEVVPLSSKVXLFLASQRFSLDYVNNRTSYEHFXAVLDTQLPVKQAFKIMHDEXVCCCTCKSCFKSFTFPLWCLFALISTLLCFYFHFEEFLKVCXIICLFKXSLICFPIMFCSLKTQQNRSXSRHFFHLHCIRGISLIIXNSFKPFVSXGLALVPLWDDRQGTITGMLTASDFVLILRKLQRNIQVIGNEEPISAWKEAKLQFYGGPDGAAMQRRPLIHVKDSDNLVDVALTIIRNEISSVPIFKCMADSSGVPFLNLATLQGILKFLCSKLQEEAEGCSLLHNQLLSIPIGTWSPHTGRSSSRQLRTLLLSSPLNTCLDILLQDRVSSIPIVDDNGSLRDVYSLSDIMALAKNDVYARIELEQVTVQNVIHFLLLFNFSRHCCFGIFFFAYTHITEKQQFLCF

SEQ ID NO: 187603 - protein, 224 aa, Zea mays
  Clone ID: MRT4577_10267C.1.pep
MAPATRRRTLEDSSQSSPSANRRRLMDPPPLSMVLSTGRQLMETTPPRDMPASLSGFPDASENQRSATASLGTPGETATDGSGTQGVGVVPVEDGSVDDDPVDKKQKKCTSGVWEYFDKYLVTVEVNGKQETQHWAKCKFKGCKNKTSKGRCESRFGTTAFWTHLRHYHSIVKGQQQLKTENDETKGVTIVKPFKYDQDESLQKFYKAMIVHEYPFNMVEHELF

SEQ ID NO: 187604 - protein, 54 aa, Zea mays
  Clone ID: MRT4577_102680C.1.pep
GPKQLVHAYLPADKRVAQAPIYLIDPTVTRAQKLEDALILLMKLARIHGLCETK

SEQ ID NO: 187605 - protein, 215 aa, Zea mays
  Clone ID: MRT4577_102681C.1.pep
MLLSTSTSWKGQNAGSASTRHPISTYRFLVDGVWRCDETKPFVRDEYGLISNEVLVENNVLPVVQPEPSIRGTNMDKGTILKTMPLEPSSQNPSMQIAVIRHVVSGILLHNTIYDVVPLSSKLSSKGLALVPFWDDRQGTITGMLTASDFVLILRKLQRNIQVIGNEEPISAWKEAKLQFYGGPDGAVMQRTPLIHTGNIDLRAKKEAQLGMLPV

SEQ ID NO: 187606 - protein, 274 aa, Zea mays
  unsure (1)..(274): unsure at all Xaa locations
  Clone ID: MRT4577_102682C.1.pep
TITGMLTAFTEFSLAMQLQRNIRVTGNEELEMHPISAWKEAKLQFYGGPDGAAMQRRPLIHVKDSDSLADVALTIIRNEISSVPIFKCMPDSSGVPFLNLATLQGILKFLCPKLQEQAGGCSLLHNQLLSIPIGTWSPHTGXSSSRHLRTLLLTGRVNTCLDFLLEDRVSSIPIVDDRGALHDVYSLSDIMALAKNDVYARIELEQVTVQNALDVQYQVHGRRQCYTCLQTNTLLEVLEGLSIPGVRRLVVIEQSTRFVEGIISLRDIFTFLLG

SEQ ID NO: 187607 - protein, 133 aa, Zea mays
  unsure (1)..(133): unsure at all Xaa locations
  Clone ID: MRT4577_102683C.1.pep
TRTGGKKVELDDVPVEGPVLKWEALIVXVASPNAYHPKNRKVKLNVTVNELGLSLHAFRQLRQVVRKRYNSPKDDLTIISELFXHREYNIKYSFKTLSTLIXYPMKADKLDQHSINSYDKXRLNANPQFMELF

SEQ ID NO: 187608 - protein, 187 aa, Zea mays
  Clone ID: MRT4577_102684C.1.pep
LHRATWMGGWVTLRQGRRRFRENTKESISWIVAPSPTADHQQFPPLLYLPPPAGSSLGLHPRIQTLAPQLSRWNQAIAGEGAVDPVCGHVGAMDPVCERWIRWNQNSMVLVPPPLCPLCPRWSTYFTSPSTRMRRWFHHSDSTTMGEGRGGGGGRGVGEAGVEVDSLVPGVGEERGGGGADCGLAAN

SEQ ID NO: 187609 - protein, 180 aa, Zea mays
  unsure (1)..(180): unsure at all Xaa locations
  Clone ID: MRT4577_102685C.1.pep
MTGAWALIIHLAAVVLPLAARAASAGGGAAEEPKICMKTPSPNLRTTTAXNQVNLYKVSDAVTLVQMRLHPVNKPVDAFRRLAEEEVTTAATPEVRRTLNLXDSTYLDVDRYLGACKSAIGFRDVVTINSTMSMMMQDTYNCNEEITKASSKNSMKDHNRSIIEMAEICCTLSSMIPYEH

SEQ ID NO: 187610 - protein, 298 aa, Zea mays
  unsure (1)..(298): unsure at all Xaa locations
  Clone ID: MRT4577_102686C.1.pep
YRFLVDGVWRCDETKPFVRDEYGLISNEVLVENNVLPVVQPEPSIRGTNMDKGTILKTVCLRSLTLYFLVLHIPDNXGLLFTVALXTKMPLEPSSQNPSMQIAVIRHVVSGILLHNTIYDVVPLSSKVXLFLASQHFSLDYVYNRISYEHFSXALDTQLPVKQAFKIMHDEXEPFVSXGLALVPLWDDRQGTITGMLTASDFVLILRKLQRNIQVIGNEEPISAWKEAKLQFYGGPDGAAMQRRPLIHVXPYLLILSFDSMXKDSDNLVDVALTIIRNEISSVPIFKCMADSSGVPFL

SEQ ID NO: 187611 - protein, 79 aa, Zea mays
  Clone ID: MRT4577_102687C.1.pep
MAASPTSSLAPPVVPMELHAGNRDRLVAALRGHISASARPLHGLVLLQGGEEKTRDCNDQLQLFRGERYSAYPLGCWKP

SEQ ID NO: 187612 - protein, 117 aa, Zea mays
  Clone ID: MRT4577_102688C.1.pep
THLPWRVTSIGVRQNGWYHHNMDPFLKMSKEVVADTIMSCVIVSPVGNTLRWYRRVLCFLGVCFCALSCAIEWLCQLLILKEKGELRIIVENKHVIVRSHQLCQLPSISLIRIYRCS

SEQ ID NO: 187613 - protein, 72 aa, Zea mays
  Clone ID: MRT4577_102689C.1.pep
LWHSLLQRTQLDQADTYRTRCLKAPPKLDALPHSQMSYDPCMISCSKHIRPCEPRSILEDVSLLRVRARKRT

SEQ ID NO: 187614 - protein, 313 aa, Zea mays
  unsure (1)..(313): unsure at all Xaa locations
  Clone ID: MRT4577_10268C.1.pep
MGLPMRRERDAEAELNLPPGFRFHPTDDELVEHYLCRKAAGQRLPVPIIAEVDLYRFDPWDLPERALFGAREWYFFTPRDRKYPNGSRPNRAAGNGYWKATGADKPVAPRGRTLGIKKALVFYAGKAPRGVKTDWIMHEYRLADAGRAAAAKKGSLRLDDWVLCRLYNKKNEWEKMQXEDRRRRRRXTKEEAMDMATSHTHSHSQSHSHSHSWGETRTPESEIVDNDPFPELDSFPAFQDPAMMMTVPKEEQVDGCSAKSGNLFVDLSYDDIQGMYSGLDMLPPPGEDFYSSLFASPRVKGNQPAGAAGLGQF

SEQ ID NO: 187615 - protein, 64 aa, Zea mays
  unsure (1)..(64): unsure at all Xaa locations
  Clone ID: MRT4577_102690C.1.pep
LFTNLLQHILGARVTYHDIEAIHPAYYKNLRGMLDNDISDXVLDLTFFLDADDENLILYKQDSY

SEQ ID NO: 187616 - protein, 107 aa, Zea mays
  unsure (1)..(107): unsure at all Xaa locations
  Clone ID: MRT4577_102691C.1.pep
QRGTPSPHSASSRRTGPVRAHRPERRPHKNGHRAGHPRTPGGVMATTALLAAPGPTALXLPAGKEGIMXRNTSSRGKMRAQATYNVKQITPDGEAELQAPNHVYILH

SEQ ID NO: 187617 - protein, 136 aa, Zea mays
  unsure (1)..(136): unsure at all Xaa locations
  Clone ID: MRT4577_102692C.1.pep
APGCSAGLLVHAEAVRXGLGADXSVFAVNALISFYCRILDYRLGRQRVLRGRRXVSWNCIVAGYVGCREMGLVQELFDEMPQRDAFSWESXIDGYGWKQGGAGVDRARELSDQMPKRNFVCWNLMIDGDAGQGRMH

SEQ ID NO: 187618 - protein, 215 aa, Zea mays
  unsure (1)..(215): unsure at all Xaa locations
  Clone ID: MRT4577_102693C.1.pep
MAHGRMMMMGCVFLACLLVAASVPSTASAFVFKAGGTGEWRVPAAAASGNVSAYNAWAQRNRFRVGDAIAFTYQPGKDSVLLVDERSYDACDTSSPTDTFADGSTVFTFNRSGPFYFISGSKGNCDRGEKLVVVVMAERAAIGTGGTGLARRPSSSSSPNGPFSAFSPPPPPFGIDISPSPTAAYXHQSAAPPKMAGLAGAAAFAIIGALFYALV

SEQ ID NO: 187619 - protein, 69 aa, Zea mays
  Clone ID: MRT4577_102694C.1.pep
GTKKTPNGVQLGSGCKTRNFVQFSTGGAGGFSRPMEIRGGARGLKRLAVSGCAGFFGEGGKKGCFGLPY

SEQ ID NO: 187620 - protein, 108 aa, Zea mays
  unsure (1)..(108): unsure at all Xaa locations
  Clone ID: MRT4577_102695C.1.pep
DAWADAWAHLKAMAAKALWKLAHNHLGVCKSITDSRAPLCFAVLLEKGDGDMGTNVQYFSAMAIMEIARVAEHSLVLRQSAFXPSSPAAKAVVDQLLRVVRTGEYDAL

SEQ ID NO: 187621 - protein, 113 aa, Zea mays
  unsure (1)..(113): unsure at all Xaa locations
  Clone ID: MRT4577_102696C.1.pep
PRVPPSRAGGGGVVANQQXRRFLQLLLSLRSFALGRPAVYVQHQQLVSSIPNAAGNALAWGRHQLLQQIVPAVTELAAAHPVACLQQVLPSNQMTLLYSAAYLQQRQLFLNSL

SEQ ID NO: 187622 - protein, 69 aa, Zea mays
  unsure (1)..(69): unsure at all Xaa locations
  Clone ID: MRT4577_102697C.1.pep
GSPLLFKNERIEIASYNVEYRCFFSSLACATDYHSLHNSFSTYSKVLXSKIILDRQTQKSHVFYFFTFF

SEQ ID NO: 187623 - protein, 260 aa, Zea mays
  Clone ID: MRT4577_102698C.1.pep
MGFLLLKTNDKSEKEMSFCAVCFGVTKSLEAALEESICYSERIESARATVDQVKVEGVDANLALMQELLFPLIQAGKIVYSLSQWEDPLKSLLFLAFMLYAIQRGLISYIAPFVFLTFAIIMLWHKYIGDGKLLEVLEVKPPPSKNAVEQILTLQEAISKLENFLQSANITLLKFRSVLFACVPKATEVVAAVLIVAAAFLVFLPSRPLIQMLVLEMYTREMPLRKQNTEKFRRRIREWWARIPAAPVQMIRPNESKKKR

SEQ ID NO: 187624 - protein, 294 aa, Zea mays
  Clone ID: MRT4577_102699C.1.pep
MAIPNAFDSPLAARSAVGAALAAVIAVRAVRRRSLDASGGVAGFVVMAVHIACGYRYGALLLAFFFSSSKVTKIGEDHKRRIEENFKEGGQRNWIQVLANSTIATVLVVIFALMTGGQDQCMDSNGSKLITGIIGGIIGHYCCCNGDTWSSEIGVLSNEQPRLITSLKPVRKGTNGGVTLQGLLAATGGGLIIGLTFVVVGLLTAECSSDMAIRQLLVLPISAAAGLLGSLIDSLLGATLEFSGYCSVRKKVVSKRGPTVTKISGMTILDNDAVNAVSILLTTVLTAYVCIYIF

SEQ ID NO: 187625 - protein, 131 aa, Zea mays
  unsure (1)..(131): unsure at all Xaa locations
  Clone ID: MRT4577_10269C.1.pep
GPFPPNGGPSQGGPALDQARGPPRNRRKPXGKSYSGKNXTQPPHPKKKGENPGSPKRGGTHNKGANPKNRRPGRKPGRPGGTKKGPNPQERAPPQRAPFRLGDPRPPSXQKKPAQRGGKLTPRGAPPSPPE

SEQ ID NO: 187626 - protein, 52 aa, Zea mays
  Clone ID: MRT4577_1026C.1.pep
HDDPVCSVKQETCVMAKCSPLSVSVKHPKRALAKPHWAFSGNTAADGMKSSA

SEQ ID NO: 187627 - protein, 114 aa, Zea mays
  Clone ID: MRT4577_102700C.1.pep
LIFCSVVSSSSYPSGSGSLGSRRSLLHWHSSSLIISFISHSVGFCTREGISVTIAMVVMQRFVIHHRTSLEASPVNFVDMHSAVRCGSPIDTWCCVREARQMMEITVSKWSGTV

SEQ ID NO: 187628 - protein, 60 aa, Zea mays
  unsure (1)..(60): unsure at all Xaa locations
  Clone ID: MRT4577_102701C.1.pep
MEAAMDLMPRMPTPSAETALNALVFLLPDHSLELLFQVDLPLQVCMDKDSLKEXILCQYN

SEQ ID NO: 187629 - protein, 62 aa, Zea mays
  Clone ID: MRT4577_102702C.1.pep
MDSAVLSLTCAGLGASQEDEDGAVIGYAKPDHCLDNLKDLQRFLRRDDPQRREVFKLVCKWK

SEQ ID NO: 187630 - protein, 691 aa, Zea mays
  Clone ID: MRT4577_102703C.1.pep
MDAAQRRVGTHLQRPPPPAGGYGLTVNPTAAEYVHAQGYSVLLPEKLQTGRWNVYRSARSPLRLISRFPDTPDIGTLHDNFTYAVETFTDCKYLGTRIRADGTIGDYKWMTYGEASTSRTAVGSGLIYHGVREGACIGLYFVNRPEWIIVDHACSAYSYVSVPLYDTLGPDAVQFIVNHAAVEVIFCVPQTLSTLLSFIAQMPCVRLIVVVGGDDANLPSTPVTTGVQIITYSRLLIQGKASPQPFCLPKPEDVATICYTSGTTGTPKGAVLSHGNLIANVAGSSLNIKFYPSDVYISYLPLAHIYERVNQIAALHCGVAIGFYQGDNLKLMDDLAALRPTIFASVPRLYNRIYTAITNAVKESGGLKEKLFHTAYNAKRQAILKGKNPSPVWDKLVFNKIKARLGGRVRLMSSGASPLSADVMEFLRICFGGEVLEGYGMTETSCIISAMDIGDRSIGHVGSPTASCEVKLVDVPEMNYTSDDQPYPRGEICVRGPIIFQGYYKDEVQTKEVIDEDGWLHTGDIGLWLPGGRLKIIDRKKNIFKLAQGEYIAPEKIENVYAKCKFIAQCFIYGDSFNSSLVGIVAVEPEVMKAWAASEGIQCEDLRQLCADPRARAAVLADMDSVGKEAQLRGFEFAKAVRLVAEPFTVDNGLLTPTFKVKRQQAKTYFAKEISDMYAELREAEAPRSKL

SEQ ID NO: 187631 - protein, 690 aa, Zea mays
  unsure (1)..(690): unsure at all Xaa locations
  Clone ID: MRT4577_102704C.1.pep
MDAAERRVGTPRPPPPAGGGLTVNPTAAEYVHAQGSVLLPEKLQTGRWNVYRSARSPLRLISRFPDTPDIGTLHDNFTYAVETFTDCKYLGTRIRADGTIGDYKWMTYGEASTSRTAVGSGLIYHGVREGACIGLYFVNRPEWIIVDHACSAYSYVSVPLYDTLGPDAVQFIVNHAAVEVIFCVPQTLSTLLSFIAQMPCVRLIVXGGDDANLPSTPVTTGVQIITYSRLLIQGKASPQPFCLPKPEDVATICYTSGTTGTPKGAVLSHGNLIANVAGSSLNIKFYPSDVYISYLPLAHIYERVNQIAALHCGVAIGFYQGDNLKLMDDLAALRPTIFASVPRLYNRIYTAITNAVKESGGLKEKLFHTAYNAKRQAILKGKNPSPVWDKLVFNKIKARLGGRVRLMSSGASPLSADVMEFLRXKLSPFELPWMILELGLVTFTVXFYRCFGGEVLEGYGMTETSCIISAMDIGDRSIGHVGSPTASCEVKLVDVPEMNYTSDDQPYPRGEICVRGPIIFQGYYKDEVQTKEVIDEDGWLHTGDIALWLPSSRLKIIDRKXRTFSIALCLNNGDSFNSSLVGIVAVEPEVMKAWAASEGIQCEDLRQLCADPRARAAVLADMDSVGKEAQLRGFEFAKAVRLADAWVTVDNGLLTPTFKVKRQQAKTYFAKEISDMYAELREAEAPRSKL

SEQ ID NO: 187632 - protein, 40 aa, Zea mays
  Clone ID: MRT4577_102705C.1.pep
IKKKKKIKKKKKKKKKKKTKKKKKKKKKKKKKKKKFFLKA

SEQ ID NO: 187633 - protein, 66 aa, Zea mays
  Clone ID: MRT4577_102706C.1.pep
KRIIFLEKFALSHFRQKVLSIFNNGPFYRFININNIAFITETLPRTPQCHQGIIIMFIYFYCLSFC

SEQ ID NO: 187634 - protein, 103 aa, Zea mays
  Clone ID: MRT4577_102707C.1.pep
PRVRKKNKKKGIPPTRKRKNLLPQPPFCSDLRGSLAGGLRPGAPPIQNAFVGAGMLLLLVPAPFPPRRRALVPLRLRAPPEALVLGCPIPPLVLLTLVPASPL

SEQ ID NO: 187635 - protein, 44 aa, Zea mays
  Clone ID: MRT4577_102708C.1.pep
VGNASAHAPDHACRFRTSALRSAGEPHRKKHFVQYTMAIDNQGA

SEQ ID NO: 187636 - protein, 154 aa, Zea mays
  Clone ID: MRT4577_102709C.1.pep
RAGELPRDVYARSHEIQHASGGFAIVKHIGAPAVVVQDRLLLATTSAAILTRLPKDMASIAMSLQISAAFWSNEVAKSGTWFVSLACTVAQRDDSRLLLFNIVWAVVKGHGVLGLVKVEWGCREGILNWLRLACVLLQSDCTLVVSSPPFKSHH

SEQ ID NO: 187637 - protein, 110 aa, Zea mays
  Clone ID: MRT4577_10270C.1.pep
LLPFFFTPKRGVLQSQQKTPRPPLKKKTRNPNQGLLPSGKNITTRHLLILPPQPNPKKPGLLPPPKKPTPRAKNKPFPQNFLLPSPGGRQNIPPQTLNPGKGFPPPNHFT

SEQ ID NO: 187638 - protein, 105 aa, Zea mays
  Clone ID: MRT4577_102710C.1.pep
PAQTSLFFSKPVNLFPRPTEIFLPGPVKLANWGGPKKVCPEQNIFFFFKVVLGPNWLCKWVTKGPTTQEPVGGGFKFLGPKGGADGFQRVNKRYSLKNRPTNWGS

SEQ ID NO: 187639 - protein, 76 aa, Zea mays
  unsure (1)..(76): unsure at all Xaa locations
  Clone ID: MRT4577_102711C.1.pep
PTISGKPKSESKDKEKKHTQHKDXERDNDKDHTKHEHRHKDRSKDKDKDKDKDKKKDQSGHHDSDSTKHHEKQRKH

SEQ ID NO: 187640 - protein, 51 aa, Zea mays
  Clone ID: MRT4577_102712C.1.pep
KKTILKKKKFTYAFRTPPNTGFGVPPFKRSTVSFKFMQWENFFLRPPKLNS

SEQ ID NO: 187641 - protein, 78 aa, Zea mays
  Clone ID: MRT4577_102713C.1.pep
LSAFMPRVSVRARVFFPFLLLATCTVPASGVRPVCDGGGRFLLLPSCVPALIPKKAPRFFGRPPSIINRRPTTFFPSR

SEQ ID NO: 187642 - protein, 73 aa, Zea mays
  Clone ID: MRT4577_102714C.1.pep
NLCVAKCLLAVHPLKPLRPRSFVRFCSRVRPVPRVGNSPPWFVRIRLEPLVLSRALVWSGFARKLCPLKEKKM

SEQ ID NO: 187643 - protein, 81 aa, Zea mays
  Clone ID: MRT4577_102715C.1.pep
GSSIKNRLLFAVARQYGQRVKHARELGQSLLRKRTAARPYAKQLVRQLAGEHVRAYLTRRLVTKPKLAQQAARRASQKAKK

SEQ ID NO: 187644 - protein, 94 aa, Zea mays
  Clone ID: MRT4577_102716C.1.pep
MRTSSDALEECNPGTRREYHTEKLVTSKGAEELRTGKEKVTSVSTTTTRRSCSKTVTKTVIGPDGHEEVTKEVVTSEDGSDYLEAIDLGTLSGI

SEQ ID NO: 187645 - protein, 93 aa, Zea mays
  Clone ID: MRT4577_102717C.1.pep
FNISAKKNANKSPNNIENIKRNININNAAREKDYLGLPDGRRQSGGYIDDIDYGEGGGEGDSKLGRPQDDGEGGGSLLVLSVPEGDQDQGRED

SEQ ID NO: 187646 - protein, 33 aa, Zea mays
  Clone ID: MRT4577_102718C.1.pep
TISNIITCYAMSTAKENQEHRKNVSASSSLIKI

SEQ ID NO: 187647 - protein, 183 aa, Zea mays
  unsure (1)..(183): unsure at all Xaa locations
  Clone ID: MRT4577_102719C.1.pep
MLRLSIAVLTSTLLPTSVPTVRPHPRRLLRLRLRSLAAAASLSPSARSLRLLEWGKVCDAVASFAGTAHGRDATTKQLWEVEDVSYEQSQMLLQETEAAVLLLDNAGGAMDFSGLDTVXAAMKLDEGSCSRLTTLTETKXLDAVINKSLVKSIQDIGDDDGSVKDTASPELRRYREQVQRLEN

SEQ ID NO: 187648 - protein, 58 aa, Zea mays
  Clone ID: MRT4577_10271C.1.pep
SFTGFLPCFFLFFEKSPTAYVYSFARPPSNLLLDTRPCLPMNEYVFTPRIYLFLYANI

SEQ ID NO: 187649 - protein, 154 aa, Zea mays
  Clone ID: MRT4577_102720C.1.pep
MGTLKDAAPKYLILSTIRDDGPDGVGRPEPPDDLELELYWLDQKVFCKDFDGIIQKYDGETPMQVNLTAYKDRSVESPVKPPLGSCLLKKGHGIQTGSTHPREAHVWYLTLRHVYEIAKMNHADRFCKCISLEALCYGINCTGKSTCIAIATDI

SEQ ID NO: 187650 - protein, 52 aa, Zea mays
  Clone ID: MRT4577_102721C.1.pep
QSQHKIFLPIKTGAKKHHLPAQQGPVNNALKSLNIFQNPCHSNKTLFYSVEK

SEQ ID NO: 187651 - protein, 411 aa, Zea mays
  Clone ID: MRT4577_102722C.1.pep
LSMAETVMQAPLRISIGPELSTEAQKIEERTLKQLTLRPITPPASKSSALSSLKIKGTRLGDHPTGPSKTSQLLKIQSANTSSRAPVKADVSKLSQPGSFQVLSREQNGTAHTAKDCPVKPVSPPTPLASLETQKKTVASQKLKFGTNESLLPLQGPSRDRKSNARDKVRFFEMLRTKSSNGSSTAFEPGSQPSPSSLVDVKQDSSLNLGNDFHVFCSEIKCTEHRRCFCEEANSSDGSQRHLSDTEEHIASLKLSVMGGMPQQPLVERREANSSSEPADTGDEGFQSFLSDSAEVSLSSTLADSDDGWNRSQSGNEEASSLSEDTESDDDFHPADISPEDKRFMMLLGWKEDEIVQVTPLDFDEIADTVKGCEELKKKLQSMQFNEEVKSILLHIELDEKQQQQHKSTGD

SEQ ID NO: 187652 - protein, 139 aa, Zea mays
  unsure (1)..(139): unsure at all Xaa locations
  Clone ID: MRT4577_102723C.1.pep
AASSARRPAGDGRTKVIISGSSGRPRAGGGDHRHRGRCGGRGGGEVRRVSPCGADCPXLXPXPPPPPPARXPPPPXXXXRXPPPAXPXPGXXXXGPPPPGAAPPXGXPPPGXGPPGPXXPGAPPAXAPGRAAPPAXPGA

SEQ ID NO: 187653 - protein, 78 aa, Zea mays
  unsure (1)..(78): unsure at all Xaa locations
  Clone ID: MRT4577_102724C.1.pep
MVEQTEKAFLMQPKVFLISXNSVLWWKPGMGGIRFWKSIGLGFRTPSEAFYGTYLGWICPFSALCSYSPSPLLLAPAS

SEQ ID NO: 187654 - protein, 99 aa, Zea mays
  unsure (1)..(99): unsure at all Xaa locations
  Clone ID: MRT4577_102725C.1.pep
FGSSARLPGFSAAVVTSLHLGGGLSSSASLEVATYTFVQQLCADSGPIGXSAQVCQQAEHSFAGNAPPXLDXFISLMGQKGHALLIDCRSLVDRLVPSR

SEQ ID NO: 187655 - protein, 96 aa, Zea mays
  Clone ID: MRT4577_102726C.1.pep
TMAIYVEWPGKAKRARQLRITDHVVPHPVRCSGLSRRDGSLSPCDIAAISFLVGFAGIALGALDGPTSRSCFRAVWCSKNLRRQTLPRNQIPGSPG

SEQ ID NO: 187656 - protein, 269 aa, Zea mays
  Clone ID: MRT4577_102727C.1.pep
MKFFKPLPILNKTEINPTKPLRKETQLLSPPASTQRIRGNRPPMGSLRGAAASSAAPRAGDLVTTQVSLGGFDATVKALDLADFLELNAGSVWRCRLKTSWTPPDAYPDFLLPTVTSAAAPPPQYDRVPPHAFVHFARPEGARAAADAAGRSELILSGKPLRAASAQDSSLRASRRRSVSPFRFPGSRLEVGDLPASDAFIAAWRGPASGLEFSVDPFDGSCHFIFARDTAFKVREFRESVVMRCDVKLQFPVRDVAEVRVFPLDCSLL

SEQ ID NO: 187657 - protein, 44 aa, Zea mays
  Clone ID: MRT4577_102728C.1.pep
FAPKPLRLICCWSPQNKKKPVFSSPPLKFYQLLVGPGGNVVCLN

SEQ ID NO: 187658 - protein, 83 aa, Zea mays
  unsure (1)..(83): unsure at all Xaa locations
  Clone ID: MRT4577_102729C.1.pep
LMRRGVNSLILYSNTPGLFFPYQVRFLIRIXLASYCIAVAKSCNVLGLLSVFRTVKLHAPTSSKMCAIHLYCILMFPLTLSLF

SEQ ID NO: 187659 - protein, 50 aa, Zea mays
  Clone ID: MRT4577_10272C.1.pep
FVLSTLRLEDTDLPLEYIPLPVEVQLQVVKTRHGTRARWLHLINSRAART

SEQ ID NO: 187660 - protein, 51 aa, Zea mays
  Clone ID: MRT4577_102730C.1.pep
LALKQNPQNKTSITYDAINTILPLPFSPQPVIQPFNSSPLPAIVPTFPIYI

SEQ ID NO: 187661 - protein, 96 aa, Zea mays
  unsure (1)..(96): unsure at all Xaa locations
  Clone ID: MRT4577_102731C.1.pep
CTRRTLKLPTVRQPLYRTVPPNRRNRANCAHPMLTEDSVHECINPLVADQYSASXADKLERITEHCLQHXRTLNADMDTVCRVIYYAVFLDHTRIV

SEQ ID NO: 187662 - protein, 138 aa, Zea mays
  unsure (1)..(138): unsure at all Xaa locations
  Clone ID: MRT4577_102732C.1.pep
RVRXWLXVFXVXLLXXPALXAWXLXLGXGXXXLLXXVXXXPXSLXFXXLXXXSLXXFXLPFRXXFPGPXXPLXXXXPPPPXVXXSXASXXCLPSVXXXXXPCXPVVLXSPXXGLXXPLPPGVGRRXRPVGRPVVAXRV

SEQ ID NO: 187663 - protein, 116 aa, Zea mays
  Clone ID: MRT4577_102733C.1.pep
LLPKSHRPPCSPLYYLESALRLRTLEPTLVFPWICWPMSPAITSGGGTGTGGPVGAPPAATLLATAGKRTGTGCSHCGATVAGGAGNGGPLCLLGAGPNAALTPSPAPAGLAAPPS

SEQ ID NO: 187664 - protein, 85 aa, Zea mays
  Clone ID: MRT4577_102734C.1.pep
PTGVIKSVEKRPPPGPKVSKPPPKNKRSHPWLSLNRLFQYMSCQPIRNFGMRSIPLMRPAKVGHGVPQCFGRAIIEPPAGVVPCG

SEQ ID NO: 187665 - protein, 140 aa, Zea mays
  Clone ID: MRT4577_102735C.1.pep
MQIRVQCACGESSCPEWAVVELQGVVQPQASFAGDIRGLHIGRLCSSPSPASASSKAGFTFTVGYHELAGTKVTLKKPLLVLRKKKVNAGAQEEEPPTAAEVELEVIGIIRHKILFKDRPKALISKPPTKEKKAVQPAAK

SEQ ID NO: 187666 - protein, 531 aa, Zea mays
  Clone ID: MRT4577_102736C.1.pep
MSSQCPYCRASGPARCATTQPPLSRAVSECSACARIVLERHLHTHPFFPLLPSLHPLPLVTPDLATAIDPAPSPSPGDEDDEDPFLPAGFVSAFSAFSLERHPVLARSASTFSGHLAELERALAVDSATAASNPDPAGPMVSVDSLRAYLQIVDVASILRLDRDIADHAFELFKDCSSATCLRNRSVEALATAALVQAIREAQQPRTLQEISTASNLPQKEIGKYIKILGESLKLSQPLNSNSIAVHMPRFCSLLQLNKSAQELAAHIGEVVVNKCFCTRRNPISISAAAIYLACQLEDKRKTQAEICKVTGLTEVTLRKVYKELLENWDDLLPPDYTPATPPEKAFPMTNIYSGRSASGKDMYQDKIFESIKQKCPEPAEPDHMVVVKEEEDKKTAALGRPPTKLDHPELGKVFRPPNAPFSTSPKSDRDKTETSLRGFNLNEVSCAMDSDRTDITVKPTFGDRLSNDPNANPSPNRQPLPWQLKQGAPATAPSYSRLREQQSGLDLVAALKGVGKRSPGDSDVRDKEGK

SEQ ID NO: 187667 - protein, 469 aa, Zea mays
  Clone ID: MRT4577_102737C.1.pep
DLATAIDPAPSPSPGDEDDEDPFLPAGFVSAFSAFSLERHPVLARSASTFSGHLAELERALAVDSATAASNPDPAGPMVSVDSLRAYLQIVDVASILRLDRDIADHAFELFKDCSSATCLRNRSVEALATAALVQAIREAQQPRTLQEISTASNLPQKEIGKYIKILGESLKLSQPLNSNSIAVHMPRFCSLLQLNKSAQELAAHIGEVVANKCFCTRRNPISISAAAIYLACQLEDKRKTQAEICKVTGLTEVTLRKVYKELLENWDDLLPPDYTPATPPEKAFPMTNIYSGRSASGKDMYQDKIFESIKQKCPEPAEPDHMVVVKEEGDKKTAALGRPPTKLDHPELGKVFRPPNAPFSTSPKSDRDKTETSLRGFNLNEVSCAMDSDRTDITVKPTFGDRLSNDPNANPSPNRQPLPWQLKQGAPATAPSYSRLREQQSGLDLVAALKGVGKRSPGDSDVRDKEGK

SEQ ID NO: 187668 - protein, 206 aa, Zea mays
  unsure (1)..(206): unsure at all Xaa locations
  Clone ID: MRT4577_102738C.1.pep
SSFFFFFFFFFFFFFFFFFFFVFFFFFFFFFFFLVLTWGITIPITLGIRGPGQKGARPREKTINPPAPPTNXGGGRGGGPDGTPEPRXRPGGTPSXQLTGGPPPTPPAPPSPHPPPXPRRPRGPRPQGGPPPPGPTXPPAREKKQVDPPKDPPGERAPQLTEGTPGRPPXGPPSRRPPRRPPTLGQGWAQGPPGGPDLGLGPRPPP

SEQ ID NO: 187669 - protein, 458 aa, Zea mays
  Clone ID: MRT4577_102739C.1.pep
MGPRRSKRVSWATGANLCKVRFFISEDSPSQAGLRPQDNLQAKGSWLMHAAGPSSDDSLPPGFESLQPTSCLKIDISQIHVIRWRCPPQVLHNPVWLVAAGEESEEVALQNDRIFGALEAIYPRPSNIPPNPFVTPDVKDSQYDDSRTQLVPLLPVEEDDASDQLEEPPVGLSSSYQQSDKYDSATFRVPQASDAPFTTAQQQQPNGSINTTRSGAPVEPDTVAAASAAYTAIIQSNRMGNMIDQDLLVEMLSDPAQLERLMKEYGALKHEQSTNSSVAPMVQGPPPQMTASVPVSFPDHTTTFHNINSTLPPPPVLNRLPPPAIPSAVTINPPASSSQAISFPTGRTSGLNYYQTLIHQHGGERQEPQPLQQHGMHFPMHHRTVASQSSATDIVSSGTMPARDTKQRPMKPCAYFNSARGCRNGVNCTFLHDVSAARKEQPKGSKRIKLDSRIAGRY

SEQ ID NO: 187670 - protein, 185 aa, Zea mays
  Clone ID: MRT4577_10273C.1.pep
MTEPFPPLNGGLPHNPAPQSAPRRRRKSSALGADVPGDVDVPSLATYRSVTPPLHSPVTMDSKSDKSGRRSKRKTTRRYLSKAKRMCIRHTWLLPLVLTLTIVSLYLVYPYSSNPLSACLFLSYPLARDDPLIPAHVRADPNAPLHYGKGGRDFAFVGLYTIVLSFTREFCMQRLIRPIALHFGI

SEQ ID NO: 187671 - protein, 92 aa, Zea mays
  Clone ID: MRT4577_102740C.1.pep
ACTDEMCLTMDGSASSYQLLGNFAAGQQLYRLELEAEEDGACSSILFSAPNNNKGDGASQGAQAHHPQRVKLPTLRATEQHLAALQCTYEYT

SEQ ID NO: 187672 - protein, 81 aa, Zea mays
  unsure (1)..(81): unsure at all Xaa locations
  Clone ID: MRT4577_102741C.1.pep
PTSILFRGIQXPHSCRGGGQLYFTFLYNQLTLMCCITRPTVQTYSQTHITALLPNTFHQGAVNMRKPNPSTLQALTQQLIT

SEQ ID NO: 187673 - protein, 57 aa, Zea mays
  Clone ID: MRT4577_102742C.1.pep
KRVWESCSKLALRKGYPAPCRLSLPPYLASGNAKKGFHLIRFHVMGHTVYQVPCMVA

SEQ ID NO: 187674 - protein, 40 aa, Zea mays
  Clone ID: MRT4577_102743C.1.pep
QDVLALLLQGGGVHLSGGVVGEAAVHEPASAAVLAVPAGV

SEQ ID NO: 187675 - protein, 45 aa, Zea mays
  Clone ID: MRT4577_102744C.1.pep
VRPLSQSLDRLLAADLLTLTGSGGQPARLALTITVQGASVLYLTT

SEQ ID NO: 187676 - protein, 170 aa, Zea mays
  unsure (1)..(170): unsure at all Xaa locations
  Clone ID: MRT4577_102745C.1.pep
QSLFMVGEIWGNDYNLYLPLISRVPIEKIRSFTPSVIAKVSSTITVNIYVISYVAAAADLTYYIDSNVTDWCLPELITLGAKTLVVPGNLPTRCXPKYMLIFKSDDREDYEPETDCLMWMNEFSEYYNKLLLEELDKLLKMNPAVTIIYADYYGAAMEIFHFFEPFGARC

SEQ ID NO: 187677 - protein, 131 aa, Zea mays
  Clone ID: MRT4577_102746C.1.pep
MAAAAEGKSRRFALACGVLSQYVKASTAAPLTIFYGGRVVVFDDFPAEKAAEVMRLAAGAERPAAPAPAPRDDLPIARKASLQRFLAKRKDRLVERAPYARPSPSEEAEKAKPASWLGLGGTDAERLNIAL

SEQ ID NO: 187678 - protein, 98 aa, Zea mays
  Clone ID: MRT4577_102747C.1.pep
KGRGTPLIMGGGKGRADSEEDHLGSPPPPGFLQPKKTLSLFTNNPFLGGPRYIGIGLIHPLKGWAPPFGGPWGPQAAPELVEQGRPRLLGGILPRPLG

SEQ ID NO: 187679 - protein, 208 aa, Zea mays
  Clone ID: MRT4577_102748C.1.pep
MAMAAAAEGKSRRFALACGVLSQYVKAEQAAARGQETAGSASTAAPLTIFYGGRVVVFDDFPAEKAAEVMRLAAGAERPAAPAPAPAPRDDLPIARKASLQRFLAKRKDRLVERAPYARPSPSEEAEKAKPASSGSGSAARTPSASTSRCDLDLACYPPGSTGGDLIGWVPGFLWVLLDWGWCGDRRRRIVETYSCFFSLSLTREFGC

SEQ ID NO: 187680 - protein, 75 aa, Zea mays
  Clone ID: MRT4577_102749C.1.pep
MGRDNQLMFVAYTLNSPFVFIREKETSKRALFTYNRTQKIPAKENSHKKGGAAVVIPRHKKHCGGAQSRLRGAIP

SEQ ID NO: 187681 - protein, 279 aa, Zea mays
  unsure (1)..(279): unsure at all Xaa locations
  Clone ID: MRT4577_10274C.1.pep
MARYRIFWVVIXLHAXFTFXAYFLQIXPLGERTRGIVQLHDLKYSWHDLVSRGNKNALTILSLWAPVLAIYLMDIHIWYTLLSALVGGVMGARDRLGEIRSIEMLHKRFESFPEAFAKNLSASRIPSRRIDRVNESEITTKTYASIFSPFWNEIIKSLREEDYISNREMDLLMMPSNSGNLMLVQWPLFLLTSKIMSANDLXSDCKDSQYELWDRISKDEYMAYAAKECYYSTEKILHSLVDADRHHWVVRLFRDLNDSITHGSLLVTINLRKLQIVQS

SEQ ID NO: 187682 - protein, 251 aa, Zea mays
  unsure (1)..(251): unsure at all Xaa locations
  Clone ID: MRT4577_102750C.1.pep
MGISKVTGIAATAFLVTSVGLYQLGMRIVVLPFLATSIVASVVTVASHDAINLPWILGKNSVGRFPLWSVILFGPFLTLARTYAMVKRYMRKESVYDKIVEGLYLGGWPFLLKHLPPGNPSVIDCTCELPRSSFVPADEYLCLATWDTRAPTPYQIEKAARWACGKRSEGKPVYVHCAXYINCHVYXVMDTLGHGRSACVVCAILVALGIAENWKEAENIIRERRKIKMNALHRKTLEEWSKQRDSQKKAK

SEQ ID NO: 187683 - protein, 128 aa, Zea mays
  Clone ID: MRT4577_102751C.1.pep
SELLTPTFFPHHSTTSSEDGGSTDQGSNSSATIQTSPYPSGGAVQSHRAGRIKASGGVAPRWLRSCAQSLSVPSRQGMRRAPSSPRGPFPPHTPSSTLSSPSTSTGCEPHAPPGPSLPSTTFDFFRLP

SEQ ID NO: 187684 - protein, 88 aa, Zea mays
  Clone ID: MRT4577_102753C.1.pep
KIFYQGGPFKNPSTPFWPFLLQTPLRALEGRIFMFRKGGEDFYEKLGALFPHGKSPVIFFFVWGNLLEFNPHPKPEIPWGVGVGSRSS

SEQ ID NO: 187685 - protein, 106 aa, Zea mays
  Clone ID: MRT4577_102754C.1.pep
IYINKVIQLEIVRTHQSSRNEPGLSRYYEVQLVTGVVVLLPASQQQRRREHHHHSADKKPSRAPTTVRLSSLGDPSHLRTMFSSVVASAFFARRRRRSSCAVRTTT

SEQ ID NO: 187686 - protein, 93 aa, Zea mays
  unsure (1)..(93): unsure at all Xaa locations
  Clone ID: MRT4577_102755C.1.pep
KXADLSSRQRRDRMELMSSPNNTRGFLEGRKPNGVAGPGKEPAPKLQENGNKPAGRKSRGVKKAEHKPRETKRKGEKHKPGGGGQKGRTVPGG

SEQ ID NO: 187687 - protein, 222 aa, Zea mays
  Clone ID: MRT4577_102756C.1.pep
RKNENGDLEAALALLDQMVRDGFKPHEYTCHLLMAEHCLAEWLGDVTALHKIAHGSLLEFLSRTNEDKLLAIIEESAKNGAAAAGNVCTTFLEELCRIQKVSLAEKVLRTFAEAGLVPTTEMYNIVIDGYCKTRDLQGAFLLCRQMESHDQLVPDEATYKSLLLAVRNDTTSIIYWEDVVELFEKNGISTDALNSGSPAAYGFKYRYSLVTRKFKELASKLF

SEQ ID NO: 187688 - protein, 130 aa, Zea mays
  Clone ID: MRT4577_102757C.1.pep
CSAHEYQSLVLDQINSTTKLTRKVENYPALSDNTSTERGGYSSRRKISEQVQRGSENVARLELELQKIQYVLLKLEEEPESRRLKVSDKRTRVLLRDYLYGRKDRGGGQKGKKKRVPFCGCVRSKSRTEP

SEQ ID NO: 187689 - protein, 279 aa, Zea mays
  Clone ID: MRT4577_102758C.1.pep
NPTWNATLRFAVPATGASSSLHILLRAERALGDRDVGEVHIPLSELLSGAPDGPVPAKFVAYQVRKISSGKPQGVLNLSYRLGEVTQTTGANGYAPAQAAYTQAAAYPPTSAYQPPSGKADTYPPPSGKADAYPPPAAYPPAAKADGYPPPGGAYPPAAGKPAKAGKPVTAYPAAGPSTAAPYAAPPSQYGGYGYPPPQAAAYGYPPPPQAGYGYQPPQTAGYGYQQQAKKKNNFGMGLGAGLLGGAVGGLLVGDMISDSSAYDAGYDAGFDDGGGFDF

SEQ ID NO: 187690 - protein, 60 aa, Zea mays
  Clone ID: MRT4577_102759C.1.pep
RSLSRQLSHGYAMQFMSFGRKGDEWILMCESMWSLFTLHDRQASIVGVTLREQFGKGWFL

SEQ ID NO: 187691 - protein, 92 aa, Zea mays
  Clone ID: MRT4577_10275C.1.pep
LLDISITKSPGRPCFLCEAIAQPTFASFSSLCHTRIQLIGVVGSHGLGRWPPLCAAPRWTLTAAQPACHIPKAPTCSKPLLDCLILLGKMKS

SEQ ID NO: 187692 - protein, 75 aa, Zea mays
  Clone ID: MRT4577_102760C.1.pep
HSVNYVLTSVKIRHSVKHSLPSACRGTLDNVFKKNKTIFVKCLSKGTRQRQLCRVSDRGHSAKYIFKLKNNFADC

SEQ ID NO: 187693 - protein, 256 aa, Zea mays
  unsure (1)..(256): unsure at all Xaa locations
  Clone ID: MRT4577_102761C.1.pep
NPTWDATLRFAVPATGAASSLHILLRAERALGDRDVGEVHIPLSELLSGAPDGPVPAKFVAYQVRKISSGKPQGVLNLSYRLGEVTQTXQAPTATPPXAAYTQAAAYPPASAYPPPSGKADAYPPPSGKADAYPPPAAYPPATKAHAYPPPGGAYPPPSGKADAYPPPAAYPPAAKADGYPPPGGAYPPAASKPAKAGEPVTAYPAAGPSTAAPYAAPPSQYGGYGYPPPQAAAYGYPPPPQAGYGYQPPQTAGYG

SEQ ID NO: 187694 - protein, 354 aa, Zea mays
  Clone ID: MRT4577_102762C.1.pep
MATRSLELTLISGKDLKDVNLMSRMEVYAVVSLSGDPRSRQRVQADRTGGRNPTWNATLRFAVPATGAGSLHVLLRAERALGDRDVGEVHIPLSELLSGAPDGPVPAKFVAYQVRKISSGKPQGVLNLSYKLGEVANGYAPASAAQSAYAHPPPTAAYPPPSGKADAYAPPAAYPPPSGKADAYAPPATAYPPAAKADAYPPPYGAYPPAGGKADAAYPPSSGYPPAAGKPAKGGEPVTAYPSAGPSTAAPYAAPPPQYGGYGYPPQQAAGYGYPPPQQAGYGYGYPPPQAAGYGYQQQAVRPQKKKNNFGMGLGAGLLGGAVGGLLIGDMISDSSAYDAGYDAGFDDGGGFDF

SEQ ID NO: 187695 - protein, 85 aa, Zea mays
  Clone ID: MRT4577_102763C.1.pep
YVFCHSGGVKMRASVMSLCVSVEEVRSCFRVNGSMYPVVRLARRTFLAVWRINFCVRKACMKLRHRDKWCQPGFMSRSLRLSAPP

SEQ ID NO: 187696 - protein, 55 aa, Zea mays
  unsure (1)..(55): unsure at all Xaa locations
  Clone ID: MRT4577_102764C.1.pep
ASYMDSCFYFXHTATPALSAFFSYSPACHQLPSFQVHIPSLPHKQLHPLLNTIMF

SEQ ID NO: 187697 - protein, 117 aa, Zea mays
  unsure (1)..(117): unsure at all Xaa locations
  Clone ID: MRT4577_102765C.1.pep
SSLNSALASSNFPCTMXYRTGHFMDLSEVTQHLKFFTFTSDRWTXFMVHKPEEVFLLSLLPTTLSPLRWLILKLSEVYYKRNIPIHKHGMAPDCTFSHGNLSSHLCILPEGFYNQFN

SEQ ID NO: 187698 - protein, 54 aa, Zea mays
  Clone ID: MRT4577_102766C.1.pep
APSASASSSSSRHRSRAPHAQVYTSRGSSWVIDSRCTNHMTCEKKMFSSYEKNQ

SEQ ID NO: 187699 - protein, 108 aa, Zea mays
  Clone ID: MRT4577_102767C.1.pep
VWCVLACVADARAGGVHRGAGARFGPRHDTEQARRRRAWSKPRRKLSLTAHRWSTCLQTSFVRSLICSRTTRSLPVATSLLALSGLKTKTARMAVSWEEEIPVFTQLT

SEQ ID NO: 187700 - protein, 64 aa, Zea mays
  Clone ID: MRT4577_102768C.1.pep
ASYSDRARCKLEDQSAQQSRHDRLFHGQCPFQSRITIPVLPWSRLQFRPCQVLDHRLSLCLGWI

SEQ ID NO: 187701 - protein, 331 aa, Zea mays
  Clone ID: MRT4577_102769C.1.pep
KKKKKKKKKKKKKKKKKKKKKKKKKKKKKKKKKKKKWQHLIWGFFCSPPPGGRFNRRPETLPAASPDAIPRGAFSDAVSAPPHSPTPSPLRRLLRRRHLPLDKNCIGAIDGTHIPITIAEHRAAPYRNRKGTLSHNVMVACDFDLNFTFVSCGWEGSASNAGVLRSAISKGFSVPEGKFYLVDGGYANTSSFIAPYRGVRYHLNEFRRRRSSQSGYANYRELFNHRHAILRNHIERAISVLKKRFPILKVGTFHPIENQIKIAAATVAFHNIIRGQNGDERWLDNQPDYISPSQYVDVPEGDINYLNDTESSDGSALRDQIALQMWAAYNS

SEQ ID NO: 187702 - protein, 70 aa, Zea mays
  Clone ID: MRT4577_10276C.1.pep
MAKLPPPDISFEEALVLFSKCTKEIRLPLVVPPQTFVIKIVPKAGARESPRRDLVGANAPPEPPPPVVSA

SEQ ID NO: 187703 - protein, 85 aa, Zea mays
  Clone ID: MRT4577_102770C.1.pep
CFVLQSKQAKSTSWRSLPARAAIDTDDSVVDPLREFAIDSIRLGKRCHKPDRMEFTKVSGRSVIGFVVMGFVDFFGRLMGIPINN

SEQ ID NO: 187704 - protein, 78 aa, Zea mays
  Clone ID: MRT4577_102771C.1.pep
WFFGGWVLSAGNHCFKVLSLQLPQIIFGVRVTSPLSLLCRFKALFLLCLLEGLMPNYLLFPPFALLKIYPFFPYVPSS

SEQ ID NO: 187705 - protein, 196 aa, Zea mays
  Clone ID: MRT4577_102772C.1.pep
VPPTRPAMVCNADLDSCSSEILELFNKAEDNIEKGIEMWEEMEEQRLKNRSKPSQENIVLEKMGLEEYIKDVSTDDAAEQASNLRSQINILWGMLLYERSVVEFKLGLPMWEDCLMAAIEKFKLGGASATDIAVLVKNHCANETAQDGLGFKIDEIVQAWNEMYDIKRWLRGVPSFRLEPLFRRRVPQLHTALEHI

SEQ ID NO: 187706 - protein, 97 aa, Zea mays
  unsure (1)..(97): unsure at all Xaa locations
  Clone ID: MRT4577_102773C.1.pep
FVFFFCVFSEVCSSLXSSSFLCFCPPLYICYLPTKKSLLLFXXXXAVEGGGGSFFXLXGPKGGGEEGRXXHELNTXRXLGLGAXPSLGXPACSEGYT

SEQ ID NO: 187707 - protein, 79 aa, Zea mays
  Clone ID: MRT4577_102774C.1.pep
YGAPRPFLAGCFFYRFFFFVFFFFFFDFSRINLRKETLFGLHTLLQAVYTADICTVKLPYLTFEECCTVQALLSSNQKN

SEQ ID NO: 187708 - protein, 55 aa, Zea mays
  Clone ID: MRT4577_102775C.1.pep
INQFEHRSRDQDLSKCLIVSSSIYLLSTYLIYEGSTRYSKWSGRRAMVFFFLKTS

SEQ ID NO: 187709 - protein, 84 aa, Zea mays
  Clone ID: MRT4577_102776C.1.pep
LVLSPIYYPHYIAATLVCLLSVSLHAFLTLLDCFISCVISCDHYFLCGMYACMFNGPPVFYVIYSLEWLWSLGDKHRQDEPPTH

SEQ ID NO: 187710 - protein, 106 aa, Zea mays
  Clone ID: MRT4577_102777C.1.pep
ITNCVRQILKKATSGCRDLCYCHHHINEIDHIFDPQVRTTLAQTEVIVIKLLLFFIMCGLSLMSKANKLFMEPTLIGGYVTFVCLLAMTRWDVDIGWISTWVHIAS

SEQ ID NO: 187711 - protein, 76 aa, Zea mays
  Clone ID: MRT4577_102778C.1.pep
RAPPGIRAFKRGQVHDFYYKGQTEKIIKTGISKLEPENWDTGHHQGSYSKQTWGQETFNKFRTKGKMVPTCYATIA

SEQ ID NO: 187712 - protein, 115 aa, Zea mays
  unsure (1)..(115): unsure at all Xaa locations
  Clone ID: MRT4577_102779C.1.pep
FGMYMSWIYLRYFKRXTLDQPKGDPSEEFSFSSFFPEFVRPFLDPIASVFHRLLCGRSDARGETLDTSPLPGSDSFEANRRRERGQRALEQRLAEKLAAVRSSEGGTSLDAADKV

SEQ ID NO: 187713 - protein, 79 aa, Zea mays
  Clone ID: MRT4577_10277C.1.pep
FIGKRPDYHYLWYCPLNKSARNLRSHGARSFTPFLPSAFSDPCAIWIMTSCSPSACFTCTSTKGPLSHMLCAHRSIANC

SEQ ID NO: 187714 - protein, 93 aa, Zea mays
  unsure (1)..(93): unsure at all Xaa locations
  Clone ID: MRT4577_102780C.1.pep
DPIKKMKPSSVRLGLVKVHETFASVQSFRKSHRNKLPGNHKLLRTARCSLHRRLKLCQRHPVMCRPLNSXXQPASQQIFAPVLVVSTEHRIVL

SEQ ID NO: 187715 - protein, 133 aa, Zea mays
  Clone ID: MRT4577_102781C.1.pep
NSARGESGGGIHSKPKKNISSLFPCLASPPPSPVLSSLLRLLQPLEIEATTTIELRAPRPPPRPFAAWIYRQDAHSRARGRRSVSGCEEKVPDEIVGGQGSEVSRTPPVELTNLVCWSVRIRAGPIASQLLGS

SEQ ID NO: 187716 - protein, 111 aa, Zea mays
  Clone ID: MRT4577_102782C.1.pep
VQCIMRATGLKENHFLSLLLAAAKVPYGKDTWSYTPPQSCRPDLEAPCSCLRPCMCVAAASAAEDQGLFKLLITFTHELSDSAVGFSRHCLFAYLITTVLWFLIHLSDVGC

SEQ ID NO: 187717 - protein, 213 aa, Zea mays
  unsure (1)..(213): unsure at all Xaa locations
  Clone ID: MRT4577_102783C.1.pep
MSRDRYFHRLLDLHLHANDDLFFPFPTPASSCPYISXPPPTTASSSTXPFYPTSCPLGXLPLPDRRHLRPRPPPPPPRRRLXPPCAAFDFDPFLLDTLGHRVSALERALALAPPRRKYTYAAEANGRKLKWTAEDRPAGGRNLKWEAELRTPHTDGFDRKWKWESKESATGSTKVKWAKEIKGKGCLEPWSNSYSVEETYGEDDHADDDREKK

SEQ ID NO: 187718 - protein, 100 aa, Zea mays
  Clone ID: MRT4577_102784C.1.pep
HASVGWDPPVRPPPFFFFVFLTREDDALIAGYISILYYARIEHCTHGRDIQSDQVQLIHATLSPETLPGTVKGTKTDTIPVFCIISDCASCSSPPGCTDQ

SEQ ID NO: 187719 - protein, 355 aa, Zea mays
  unsure (1)..(355): unsure at all Xaa locations
  Clone ID: MRT4577_102785C.1.pep
WDLEAAKNRPHRFLLDDHPFYPTSCPLGITSRSPIDDTFDFDPFLLDTLGHRISVLERALALAPPRRKYTYAAEANGRKLKWTAEDRPAGGRNLKWEAELRTPHTDGFDRKWKWESKESATGSTKVKWAKEIKGKGCLEPWSNSYSVEETYGEDDHADDDREKKKPTGVQKKVKGENKQQQKKQGNVEIVEIEDXNTAGCVAIRKAFEMXHCKGKRKELSPXQDAALLIQMNYRAHLAHRSQVLRCLRDLAVAKAKLKEIRSFFYNITYRRRIAYDNEELQRFAEKIIVLLLTVDALEGPDYMVRNARRSMLEELEGMLEIVEPQPPGKPRTLSRRRFDLPEGGAIEKETREAGK

SEQ ID NO: 187720 - protein, 133 aa, Zea mays
  Clone ID: MRT4577_102786C.1.pep
GGALPLIIEVLKNGSIEGQENSAATLFSLSMIDENKAAIGVLGGIAPLVDLLRDGTIRGKKDAATALFNLILNHPNKFRAIEAGIMAALLKILGDKKLDMIDEALSIFLLLASHPGCRSEVGTTSFVEILVQI

SEQ ID NO: 187721 - protein, 464 aa, Zea mays
  unsure (1)..(464): unsure at all Xaa locations
  Clone ID: MRT4577_102787C.1.pep
MGNSLSFPVPVAIYHFPRLRFGPNLRLRLRLHLHLLAAAAPLLSPQSEANSPSASTATMSRDRYFHRLLDLHLHANDDLFFPFPTPASSCPYITASSAHHRFLLDDHPFYPTSCPLXSPPAPRSTTPSTSTSSXPLPLHAAVSAPPCAAFDFDPFLLDTLGHRISVLERALALAPPRRKYTYAAEANGRKLKWTAEDRPAGGRNLKWEAELRTPHTDGFDRKWKWESKESATGSTKVKWAKEIKGKGCLEPWSNSYSVEETYGEDDHADDDREKKKPTGVQKKVKGENKQQQKKQGNVEIVEIEDNTAGCVAIRKAFEMNHCKGKRKELSPQDAALLIQMNYRAHLAHRSQVLRCLRDLAVAKAKLKEIRSFFYNITYRRRIAYDNEERQRFAEKIIVLLLTVDALEGPDYMVRNARRSMLEELEGMLEIVEPQPPGKPRTLSRRRFDLPEGGAIEKETREEGK

SEQ ID NO: 187722 - protein, 190 aa, Zea mays
  Clone ID: MRT4577_102788C.1.pep
MPPPSASASPSASRFAKHWIADVLAGEESVDFSLLKVLVGASSKPLAGAPEATRERVALRSIQEVSSVIAAGGDAAATAGVLSVDGARSCEDGLFRLIREVGSFGELEKDLLPPFSQDIQENICTKKFTLPGISFQLLERVEPWIASMAPQPQMEHNGTEQCVNDQSLRSSHGCVNIEKPVFHTDNAGVQ

SEQ ID NO: 187723 - protein, 79 aa, Zea mays
  unsure (1)..(79): unsure at all Xaa locations
  Clone ID: MRT4577_102789C.1.pep
RGSTGSGNLHGHGPRGWSKSSCSTNYDCHILPNLLLMDFANTGEVCGGTLLNCKXCHMNTYRSADMLVKDVTATAPGDS

SEQ ID NO: 187724 - protein, 96 aa, Zea mays
  unsure (1)..(96): unsure at all Xaa locations
  Clone ID: MRT4577_10278C.1.pep
ARRPTTTIDHGIALHKRITLITMGQGGEGYLNYMGKEFGHTERIDFSRGPHRLSSGKLIPRKNVCCDKCLRRFDLCDEDDGRYXGRQELDQPMNYK

SEQ ID NO: 187725 - protein, 118 aa, Zea mays
  unsure (1)..(118): unsure at all Xaa locations
  Clone ID: MRT4577_102790C.1.pep
MGSGCFLFISQCLNMPHCDKVLDQVTNTGLDAXTHXDPDSDVSCETCTKTNMAMVIEXITTKETVDYQKIVRDTWREIRFTSDDVELDDDRCXLLLNIEQESPDIEKAVXHDHFTKRS

SEQ ID NO: 187726 - protein, 52 aa, Zea mays
  Clone ID: MRT4577_102791C.1.pep
TQARTLSLVEIPVLASCPASAPPPPHHLLQHQPCVPACNLASCVRVYSGLVS

SEQ ID NO: 187727 - protein, 51 aa, Zea mays
  unsure (1)..(51): unsure at all Xaa locations
  Clone ID: MRT4577_102792C.1.pep
AVECGDREWERWRGSPPLLLVGVGGTRVWXAGMEGSSEMVREPGNDSPPRG

SEQ ID NO: 187728 - protein, 152 aa, Zea mays
  unsure (1)..(152): unsure at all Xaa locations
  Clone ID: MRT4577_102793C.1.pep
MYLVISHSAISITNDAPWMLTHAKNTMNRAIHTTVLISDRDVFDAEXSCSRSRNNTTRRPLTIVLPRRNGXDPKPATDTRRRXEVRAKAXLSDRLSITEHFEQALMVSAYIGTSLILMNKVSHXLTTFADTHILPRXHVSYPAWSKIAWHIK

SEQ ID NO: 187729 - protein, 47 aa, Zea mays
  Clone ID: MRT4577_102794C.1.pep
FPFLAWGPLFSKNAGPLVMFDGTPRKGNIRPFYGRTILKGWRGFTGG

SEQ ID NO: 187730 - protein, 89 aa, Zea mays
  Clone ID: MRT4577_102795C.1.pep
DLDAANDLVRQTQNVQIICHNAALSRSSNRWISERGHSIRGSVAHYEHRHRGHLRSLPFHTVMLTLCMRLMCWTTAVYARFPEALSVIR

SEQ ID NO: 187731 - protein, 103 aa, Zea mays
  Clone ID: MRT4577_102796C.1.pep
GQKGRPMVKAGGALPLRGRIPIGRGKERTATCSWSCGLDYSLLLLLLLPAQHSMALHRREIRSESRSRGKGSTNTTEPTKTKWKRALKSRPSPPMKRKTGRVN

SEQ ID NO: 187732 - protein, 237 aa, Zea mays
  Clone ID: MRT4577_102797C.1.pep
MAAAGLGVKATPFTYAAHALAAVAAALVLVWCVHFRGGLALEAQNKNLIFNVHPVLMLIGYIILGSEAIMIYKVFPNLNHDTAKLTHLILHAIATVLGAFGIYCAFKYHNDSGIANLYSLHSWLGIGTIALYAIQWVFGFVTFFLPGAAPGVRRGALPWHALFGLFVYVLALATAELGFLEKLTFLESGGLDKYGAEAFLVNFTALVVVLLGAFVVVSAVTPAHAEEPRGYAPIPVS

SEQ ID NO: 187733 - protein, 220 aa, Zea mays
  Clone ID: MRT4577_102798C.1.pep
MGTPETSREPCPDRILDDVGGAFGMGAVGGSAFHFIKGIYNSPNGMRMSGGAQAVRMNAPRVGGSFAVWGGLFSTFDCAMVYARQKEDPWNSIIAGAATGGFLSMRQGMGAAGRSALMGGVLLALIEGAGLMLNRVLANPPLPAEDPNLTAAMGDNPFPGLPQAPPVVAPPEVASSSGAGGWFGGLIGRKDEEKKSSAGKSEILESFDTPSSPIPSFEYK

SEQ ID NO: 187734 - protein, 222 aa, Zea mays
  Clone ID: MRT4577_102799C.1.pep
MGTPETSREPCPDRILDDVGGAFGMGAVGGSAYHFIKGIYNSPNGMRLSGGAQTVRMNAPRVGGSFAVWGGLFSTFDCAMVYARQKEDPWNSIVAGAATGGFLSMRQGMGAAGRSALMGGILLALIEGAGLMLNRVLANPPLPADDPNLTAAMGGNPFPGLPQAPPVVAPPEAATSSGVGGLFGGLFGRKEEEKKPSAGGGKSEILESFDTPSSPIPSFEYK

SEQ ID NO: 187735 - protein, 93 aa, Zea mays
  unsure (1)..(93): unsure at all Xaa locations
  Clone ID: MRT4577_10279C.1.pep
MAVEDHANQPTVXRKLGXGHVHLCSIISEGVRHRNICSSVSCYETRFATRNYMTQSLXGPPMAVSGGINVAVMRTPLCDIAPDEKGGKNSMID

SEQ ID NO: 187736 - protein, 30 aa, Zea mays
  Clone ID: MRT4577_1027C.1.pep
INLKATCFLSFKTVIYNPFAGYHAGLYTHL

SEQ ID NO: 187737 - protein, 350 aa, Zea mays
  unsure (1)..(350): unsure at all Xaa locations
  Clone ID: MRT4577_102800C.1.pep
MAEIRKYAMSNQPPDIPQILLEAQSRWLRPTEICQILSNYKKFSIAPEPPNRPQSGSLFLFDRKILRYFRKDGHNWRKKKDGKTVKEAHEKLKVGSVDVLHCYYAHGEENENFQRRTYWLLEEGFMNIVLVHYLEIKGAXNKVSIMLKKLKRLQDYLMPIVLHAQTLSLVRAXASRSMDAESPISGQISEYEDAETDNSRASSRYHPFTEMQQPVDGTVMGNFFGASSPSVSVNNLAAGYLGEMQPTGANFTSHFATRNDIASVFNDTGSELGGGPKTSIDSVLLGEPFPEYPGGFMESTLYSSVATLGNSLEDGLQTXFMSEALYTNNLTQKEVDALGAAGITSSKRMM

SEQ ID NO: 187738 - protein, 56 aa, Zea mays
  Clone ID: MRT4577_102801C.1.pep
SLNQKTNKASAQIFLYQFSFFTNLLRVNNTSLYHHNCSNKLIDSSLKGRTRRLATG

SEQ ID NO: 187739 - protein, 65 aa, Zea mays
  Clone ID: MRT4577_102802C.1.pep
RSANPGVGSAAGRVHRLEQLSHIAAVYCAPRRPLKIGRRELGIRRVVFTPASGVPVEQLLDHGAM

SEQ ID NO: 187740 - protein, 119 aa, Zea mays
  Clone ID: MRT4577_102803C.1.pep
KKKMNPIGIIESFVPMHRTNWFLSIQSLALMPLHRLSLIFVRALLGGCSATVTTIRPGHSPGASSSFSSILFSTLLFSSAICGTAWLSSSYWPSGECPTPIDPYHYTCAHGFHRTIISS

SEQ ID NO: 187741 - protein, 70 aa, Zea mays
  Clone ID: MRT4577_102804C.1.pep
LHVLDRERPPGGGFLILTRGRKPLGDSFFDCFTATKDARNNSTVCVSQRHYYCVLVLPTRVSIHQNITRS

SEQ ID NO: 187742 - protein, 63 aa, Zea mays
  Clone ID: MRT4577_102805C.1.pep
ILQNYTILGTNFAIHIFLMHNKTHFLELIQSSVLFSVHIVELHILLVFHIVNLHACLGLKINV

SEQ ID NO: 187743 - protein, 157 aa, Zea mays
  unsure (1)..(157): unsure at all Xaa locations
  Clone ID: MRT4577_102806C.1.pep
MVMAESSALXRSYSAVGVPXLLAPTSRSGSTXTPLCTNGTXSGRVTMSAEWIHGQARGDHLELSSDQDYGLYPLGLXTEPYNFXRMKESXVNHCRWAMLDAFYILXTEAMHLGNWTKXRTRTAXHDRQATYMDDLVPXETLPNILQIEFGVMDLDEH

SEQ ID NO: 187744 - protein, 121 aa, Zea mays
  unsure (1)..(121): unsure at all Xaa locations
  Clone ID: MRT4577_102807C.1.pep
IEHRRDRRLRTRLPPRLKPFPLLPIPSAGRRSIRTKTPLRECLSIQIGQAGIQVGNACWELDWLEHGIQADGQMPGDKNTXGGGEDAFNNFFNENGAGKHVPRAGFGDLEPTGICEGRTGT

SEQ ID NO: 187745 - protein, 72 aa, Zea mays
  Clone ID: MRT4577_102808C.1.pep
CWWWWLRCAGMFSIVRQDACLHLVIWFWSSDDFSSRVSCWVCSDVSWSPSASFVETSLAIMAWDACFCASSI

SEQ ID NO: 187746 - protein, 147 aa, Zea mays
  Clone ID: MRT4577_102809C.1.pep
SLIGLYILSEEEWAYHDEAPVKIDFWMRNLTSLKHSLDKLAIPLVVKRAACKAEVAGIVEAVVREMEISHVFWNAELMIDEQRRDAAVRKVLSRLSNVHVEECDDQCVVPPMDVKTKTGNPYTVFTPFHNSWVQTGGNRASLAPNCQ

SEQ ID NO: 187747 - protein, 55 aa, Zea mays
  Clone ID: MRT4577_10280C.1.pep
RRLVILPRAELMDLEPGTMEFITAGPFRGIYRPDNIVYRQLRAGNNWGNGLLHPG

SEQ ID NO: 187748 - protein, 76 aa, Zea mays
  Clone ID: MRT4577_102810C.1.pep
TGLSGENIRMLLNDLFIINKPHKLLSRYPPRTTHDAKHHVRHIGLLKLNRTSDALLHTIILRIRTLRVLMRVVCKY

SEQ ID NO: 187749 - protein, 141 aa, Zea mays
  Clone ID: MRT4577_102811C.1.pep
MAPGGSGMVQLEVENLDKRFGPLNPWQFGDVVALPGNKADIIPGVEGMGNINAEKLISKLGSWNNLLKPGDEVEDKRIKQALISNSEQAILCKNLATLRSDLPNNMDPFKTADLVFKRPQDDGEKSIKLLQAWEAYAEGSS

SEQ ID NO: 187750 - protein, 47 aa, Zea mays
  Clone ID: MRT4577_102812C.1.pep
NLPIAKIRFLISLSSITLELLVVLGTQDSSALPSHCTLTMLQEFVSS

SEQ ID NO: 187751 - protein, 103 aa, Zea mays
  unsure (1)..(103): unsure at all Xaa locations
  Clone ID: MRT4577_102813C.1.pep
PAHIPNFLLRRLHPAVYLYYPWLPNASPLTKPLALPXLGILGCLGCSVGLCMISGIKRFSKFQVDVRFHEVHCNKSFVHSIPWLHRKDEXRCQEKVDMSMCLS

SEQ ID NO: 187752 - protein, 514 aa, Zea mays
  unsure (1)..(514): unsure at all Xaa locations
  Clone ID: MRT4577_102814C.1.pep
MAAGGRSIACFAAVLLAAALLLSAPTTTEAYDSLDPNGNITIKWDIMQWTPDGYVAVVTMFNYQQFRHIGAPGWQLGWTWAKKEVIWSMVGAQTTEQGDCSKFKGNTPHCCKKDPTIVDLLPGTPYNMQIANCCKAGVINTFNQDPANAASSFQISVGLAGTTNKTVKVPKNFTLKTPGPGYTCGRAIVGRPTKFFTADGRRVTQALMTWNVTCTYSQFLAQKTPSCCVSLSSFYNDTIVNCPTCSCGCQNPSGSNCVNEDSPNLQAAIDGPGKWTGQPLVQCTSHMCPIRIHWHVKLNYKEYWRVKITITNFNFRMNYTQWNLVAQHPNFDNITQLFSFNYKPLTPYGGGINDTAMFWGVKFYNDLLMQAGKLGNVQSELLLRKDSRTFTFEKGWAFPRRVYFNGDNCVMPSPENYPWLPNASPLTKQPLTLPLLXILGCLGCSVGLCMMSGIKMFSKLQVDVGFHEVHCNGIFIHSIPXRHRRDEXRSQEKVDVCVCVCVCKLKGQNVFLVW

SEQ ID NO: 187753 - protein, 82 aa, Zea mays
  Clone ID: MRT4577_102815C.1.pep
GAPTNGAREEIKRAHPQDRTGKPPYFLRHQLWVNPVGENQVPPWMKGRATQFSGCGFPLTALADKKGLLGSTTPAELVINHA

SEQ ID NO: 187754 - protein, 128 aa, Zea mays
  Clone ID: MRT4577_102816C.1.pep
ASLIGHLYRGTTNRPWDTFFLQTRERGAQTEAQHSLDQTIYTSYKGLTTKKKRGGFFLARNHVEKQTLTDGGFFTCVTKKTWGTNQKAKFFLKLVNLFRLPKKSLQALDIPLLLWTGKSNHFSGDSWT

SEQ ID NO: 187755 - protein, 500 aa, Zea mays
  unsure (1)..(500): unsure at all Xaa locations
  Clone ID: MRT4577_102817C.1.pep
MAASGRSVACCAAALLAAALLLSAPTATEAYDSLDPNGNITIKWDIMQWTPDGYVAVVTMFNYQQFRHIGAPGWQLGWTWAKKEVIWSMVGAQTTEQGDCSKFKSSPPHCCKKDPTIVDLLPGTPYNMQIANCCKAGVVNTFNQDPANAASSFQISVGLAGTTNKTVKVPRNFTLKTPGPGYTCGRAIVGRPTKFFTADGRRATQALMTWNVTCTYSQFLAQKTPSCCVSLSSFYNDTIVNCPTCSCGCQNPSGSNCVNEDSPNLQAAIDGPGKWTGQPLVQCTSHMCPIRIHWHVKLNYKDYWRVKITITNFNFRMNYTQWNLVAQHPNFDNITQLFSFNYKPLTPYGGGINDTAMFWGVKFYNDLLMQAGKLGNVQSELLLRKDSRTFTFEKGWAFPRRVYFNGDNCVMPSPENYPWLPNASPLTKPLALPXLGILGCLGCSVGLCMISGIKRFSKFQVDVRFHEVHCNKSFVHSIPWLHRKDEXRCQEKVDMSMCLS

SEQ ID NO: 187756 - protein, 76 aa, Zea mays
  unsure (1)..(76): unsure at all Xaa locations
  Clone ID: MRT4577_102818C.1.pep
ARGLVLGNKLRSKYDIAXQFXRVFHNGEVQYLHXKEVVYPDNVNPGSXGLGHNLRSIVKKVNTIDVKFTXGKATFG

SEQ ID NO: 187757 - protein, 62 aa, Zea mays
  Clone ID: MRT4577_10281C.1.pep
PTRPAHNNTIHTMMFFLVSLTSPYSIFDAISTHTIFLIAPTATHYFSYTTASSSPNSTSPPT

SEQ ID NO: 187758 - protein, 50 aa, Zea mays
  unsure (1)..(50): unsure at all Xaa locations
  Clone ID: MRT4577_102821C.1.pep
KPRLDTPSXLPTGKVRNENAXDXQITGLQQLVAPFGKTDTASVLNETIEY

SEQ ID NO: 187759 - protein, 78 aa, Zea mays
  unsure (1)..(78): unsure at all Xaa locations
  Clone ID: MRT4577_102822C.1.pep
VDCYIPVPQRXTDLTILLAGEDVLFITGPGTDATGRIERVYGHIADTVDIVEIWDTTHCSVTGVEMFQKTMDDTMAVD

SEQ ID NO: 187760 - protein, 190 aa, Zea mays
  Clone ID: MRT4577_102823C.1.pep
HEPKLTSLVKCNDPTRDKIRELLAEAFAKVPRETSNDDRDEVRNILDEVDACDPFRVAVTVESALFERFGRSTGAHKAKYRSIMFNLRAENNTDFRRRVLIGQVTPERLPDISPDEMASDARKQENLQIKEKALFDCERGAAPKATTDQFKCGRCGQRKTTYYQLQTRSADEPMTTFVTCVNCNNHWKFC

SEQ ID NO: 187761 - protein, 162 aa, Zea mays
  unsure (1)..(162): unsure at all Xaa locations
  Clone ID: MRT4577_102824C.1.pep
MREISRTAIAIIRSLARCCEVMCQEHGHGRLAXYAADSDLQXLERVNVLLXNYGRGERFVARALAIMDVDAAXTCDSLYCVTHFGXIFRRDNFCFGQSGAXNNWRKAXHYAEGVELIDSVVYLHRQEAENCDCLQGISLASDLLHATASLALMNTLFSQPRT

SEQ ID NO: 187762 - protein, 127 aa, Zea mays
  Clone ID: MRT4577_102825C.1.pep
PAGLGSRNPSPLLLLSWMALFSDSPTPPISYLPSTALLTWISDIYECRCPRLTFSISARTSLATACGRTTEGRSPARPEKPNHSFGRGTASTRQRLDRRVRSKKLDKHGNPCRQRRVMPNPIIVPHA

SEQ ID NO: 187763 - protein, 56 aa, Zea mays
  Clone ID: MRT4577_102826C.1.pep
TRNRMPVINQSVTYVQSYKARDLNLRQKQLAIINIHPSGLYLSETDALPPIHHLLC

SEQ ID NO: 187764 - protein, 70 aa, Zea mays
  Clone ID: MRT4577_102827C.1.pep
DHAYWYHAAQLFFLFMNKHQSNKGEMGDIFHDGSPSHPQHGWHTHERLILNHYYQHRHCPYLTTASPSAL

SEQ ID NO: 187765 - protein, 65 aa, Zea mays
  Clone ID: MRT4577_102828C.1.pep
CASSVSSQVHVRVVRINTSKWLWQRQEVGIVRVYPVAGYERPRGLWGSRLGKMAASLVSSRIPSL

SEQ ID NO: 187766 - protein, 180 aa, Zea mays
  unsure (1)..(180): unsure at all Xaa locations
  Clone ID: MRT4577_102829C.1.pep
PTRPAGTHYHHIVATLATKILPCLCSTALTEXVANTTFVPQCSQAPISPLCPXPYILIASLCENRDLQPYXLQQAIVGGNIPLSPLGKQAPALXRCTELMXTIKTRELNXLVLPGINQVDLANLTLYFQQQQCVTFKQLTTLNRATYVRYQIXPLRQLTAAYSHQRRLFXFNQGGVTVPM

SEQ ID NO: 187767 - protein, 50 aa, Zea mays
  unsure (1)..(50): unsure at all Xaa locations
  Clone ID: MRT4577_10282C.1.pep
GRWSRVWPGWVFFTRRXCSCPPTQSGRPPPLGCSSRGLIPVRGGFRRRAS

SEQ ID NO: 187768 - protein, 83 aa, Zea mays
  Clone ID: MRT4577_102830C.1.pep
GESLEASAVKTKRLPERDNNTGIRDVEGSLTETAGLEEQRWDKTYYTGNGTGRRLALANGGKHVTPGALALGGKSPDITDSNV

SEQ ID NO: 187769 - protein, 253 aa, Zea mays
  Clone ID: MRT4577_102831C.1.pep
ALSNLRTLDVSFNQISGAIPPSVAALPSITNLILCHNQLTGGVPSFPDSSPLLRLDLKHNALSGGVPALPAGLQYLSLSANKLSGTVDQVLPRLARLNFLDLSVNQLEGPIPASVFALPLSVLQLQRNFFAGPVQPSGDVTIPVVDLSYNRFWGQLSPLLAGVGQLYLNNNRFSGEVPARLVQELVGSGGLQVLYLQHNFLTGIEISPSSSLPSTVSLCLMYNCMVPPVYAPCPIKARSQNTRPADQCPEWRG

SEQ ID NO: 187770 - protein, 189 aa, Zea mays
  unsure (1)..(189): unsure at all Xaa locations
  Clone ID: MRT4577_102832C.1.pep
MVLLHVLFEHAVGYALLALKEVEEISLLLPQVEECVLNLXKFHNVVRLVAFCPFSSSQVALENANAVSEGVVHEDLRLLLETYLPSKKKKVLLGVGDPKIGAAIQEELGYNCQTGGVIAEILRGVRLHFHNLVKGLTDLSACKAQLGLXHSYSRAKVKFNVNRVDNMIIQSISXLDQLXKDINTFSMRV

SEQ ID NO: 187771 - protein, 231 aa, Zea mays
  Clone ID: MRT4577_102833C.1.pep
MPGLLETDPFAEADQYLAFCRGGLDHFHFSVVTKRYLILLDLRQPLTPVLAWQHELKSPSNVAMFRLSELRPSKEHEWASNSGFAILVGSFKTGEFSVFCYGPKEQGCPDNSHLYAWDLPSRFSLTGHHCSCSSGRMKDVFSMPVSRDEYASKWSKNSIIGYYVLPNHLSVSETSFTGFALVCLTAMGKLEMQRYRASADSTNDIPCDESKHTARASNSAIFPDTPYDNFS

SEQ ID NO: 187772 - protein, 126 aa, Zea mays
  unsure (1)..(126): unsure at all Xaa locations
  Clone ID: MRT4577_102834C.1.pep
HISLLSSPQLAISSFLWSTIRLSPPTQDQPHGSSAGSIRSFLPPYNNDSHDIKRSKDETINEKCYLLPYPFNKXMVSYTPNINHSSNQLLKFHQSFQQTYQYIPGHKNHYFMPRTKNPSWKLPNQL

SEQ ID NO: 187773 - protein, 29 aa, Zea mays
  unsure (1)..(29): unsure at all Xaa locations
  Clone ID: MRT4577_102835C.1.pep
SNSEFQXNLLTKNNNPKCQCCPQKKKPLP

SEQ ID NO: 187774 - protein, 99 aa, Zea mays
  unsure (1)..(99): unsure at all Xaa locations
  Clone ID: MRT4577_102836C.1.pep
SNKAKKTVQFVYWGPPGFKCGINSPPPPVVPXGGLAKVQRAVCISSNNPPLGEVFFRFAPQFYFMYAQRAFVPWYVGERKEKREFLKAREDFSALEKDF

SEQ ID NO: 187775 - protein, 49 aa, Zea mays
  Clone ID: MRT4577_102837C.1.pep
VQCVGKSSGGGEQQGDEMTPLSAQINMSGSLMGPSKHPSKKAQPINQLN

SEQ ID NO: 187776 - protein, 67 aa, Zea mays
  unsure (1)..(67): unsure at all Xaa locations
  Clone ID: MRT4577_102838C.1.pep
QISLFGIYRGYYSVETVSLLVALKVRYRDRITILRGNHESRQITQVYGFYDECXRKYGNANVWKYFT

SEQ ID NO: 187777 - protein, 58 aa, Zea mays
  Clone ID: MRT4577_102839C.1.pep
LVMLPPPLGLLVRYLSPALLGLGGMQMGPCIGVNRAHTCSVLSWVRHWPDSPRPYPHS

SEQ ID NO: 187778 - protein, 92 aa, Zea mays
  Clone ID: MRT4577_10283C.1.pep
LFGQVHGVVPCKKLWGGIQIGYRPPSRALTWTPTQHIPSVSSSWPAATSPNNSRWWWVGWSAPWLRPSPPLDRGSDESTMVARSKSFRRSRP

SEQ ID NO: 187779 - protein, 64 aa, Zea mays
  Clone ID: MRT4577_102840C.1.pep
HAIINTSVQILICYYMNGALIVLTLQIIQLLIFLSIEACLAISFLGLNAAIYITRKWLWVYIDN

SEQ ID NO: 187780 - protein, 68 aa, Zea mays
  Clone ID: MRT4577_102841C.1.pep
PYVNKTQSNLYKTNQTYKHRHTKKINYNIHPPKIKFTNHKGPPLLNNPTSTTHPTQPPSLSFGSPKLN

SEQ ID NO: 187781 - protein, 38 aa, Zea mays
  Clone ID: MRT4577_102842C.1.pep
WTRDSLKNAYPPTCNHLIIRAAKFSTSPSERYMTSQCE

SEQ ID NO: 187782 - protein, 85 aa, Zea mays
  Clone ID: MRT4577_102843C.1.pep
KSRGGSPRLGTRKILTPGTSSWGIVPLPPAPFFSMFVATILFLGIPVPGAPLCSPPQKFPPLHLASFKIICMLAILCNPHLWGSP

SEQ ID NO: 187783 - protein, 144 aa, Zea mays
  Clone ID: MRT4577_102844C.1.pep
FWITVFPPFGEFKPLPPPERPSPPIFLARKRKRAQFPNPLSPGVGRFFYSAGPPGFPLGKGAVGPPPLIWVGPPLGPPRVFPFFFRLVFFVEFLGDTIFPRGTVFPFFSPSLVPGWVPLVTPPRVLEFPLLTGPPGGVPLFFHF

SEQ ID NO: 187784 - protein, 72 aa, Zea mays
  Clone ID: MRT4577_102845C.1.pep
PPCSSPRKEIFLPPHQGWSPMPFGRSPSLRLVYVENKFGRGPRTLGPPRVLAPVAFLGLTYPPPPCNNPPKF

SEQ ID NO: 187785 - protein, 95 aa, Zea mays
  unsure (1)..(95): unsure at all Xaa locations
  Clone ID: MRT4577_102846C.1.pep
RKLGIRLEDYLHNLFCRNTPSAPAGNFQIFGETLTGKTFTLXVLPSDTIDNIKAIIQDKEGIPPDHMEMKFVVKQLEDWRTLAYYNIQKESTLHY

SEQ ID NO: 187786 - protein, 40 aa, Zea mays
  Clone ID: MRT4577_102847C.1.pep
GGVCEALPYQIRRPSVMDKTEERQIHRSSTPESIAEGATA

SEQ ID NO: 187787 - protein, 159 aa, Zea mays
  Clone ID: MRT4577_102848C.1.pep
TLPFSSPTSFTLALVASQPLEPLLHTLQPVHSFTTFSIMVRRRNPSVIEFSSDSDEIQEESPIPSPPPRRSLSKRGRGSGRMDGEGSSMPSQPTRRRRQKVGASRPRRSTSSSGYAPRQEEDGAFDDFVDLLAPDALYVTGLHMHQANVSRDPHESPVP

SEQ ID NO: 187788 - protein, 118 aa, Zea mays
  unsure (1)..(118): unsure at all Xaa locations
  Clone ID: MRT4577_102849C.1.pep
ELRSLSDHYTFCLISLSPLDWRXYALVEELMPFISEFSLIRYRVLIEIKWLLKLSQIPEITEVPQFIKEAHSLLNAIIDXFTLDESKEVNKIXKVTNHEVKTLKYLLKQMVHFKFINC

SEQ ID NO: 187789 - protein, 113 aa, Zea mays
  Clone ID: MRT4577_10284C.1.pep
LGAQARQKRDHDKRRKPLQFEVGDHVYLNVSPTKGVQRFGIKGKLAPRYIGPYEIKEACGPVAYQLKLPPHMSAIHDVFHTRIGDRTRLVLSRAPRQLELEIEPDLSYQEHPV

SEQ ID NO: 187790 - protein, 134 aa, Zea mays
  Clone ID: MRT4577_102850C.1.pep
RPRAVLEVTALQPAAQGGLFPGSRHRHCRCPPPTTPAPSPTPLLLQSKRCFGSHCFVLEFGGQPACGTVNLKLAGLLFKELEMDRKNCPPSPSPRSTEKSGRELRSGEANVSTNTNSNLIAKVTRRKESMCKSF

SEQ ID NO: 187791 - protein, 333 aa, Zea mays
  unsure (1)..(333): unsure at all Xaa locations
  Clone ID: MRT4577_102851C.1.pep
MHPANVTRGPHEPPVDFSLKGIDTLQRLRFTNPTLTPRHPGVQDPRFWNLFQADFYNSVIPWNNEVVAQFYATLWIKEVDEXPMGRIXVMYFFIQGNWHKVSYRRFAHILGFSDADIQGSNMRVHNIRRPMREETEFIHVSNEREFWTTANMHRYYRYLNSLSRMTVLPKGGNQMNVLGESRVFLLLLAPNSLARINVFDMIWEEIVRASWSPLRGCPTGLIPPTQLLVRSGLPEGLEALPPPLRHLPSLPIIHLPLAPPLPRIPLLAADLPCHVLVVVVEVVAEGWVLAWSMGLRHFSPCATTFLLMSMRWHDVSGKLTTIFVVKLPPWVCH

SEQ ID NO: 187792 - protein, 54 aa, Zea mays
  Clone ID: MRT4577_102852C.1.pep
LCKTAGAFRAIKPWIYPGDSFSVENLGADKLGGRHHVVKAGLDLRALAGMETTA

SEQ ID NO: 187793 - protein, 107 aa, Zea mays
  Clone ID: MRT4577_102853C.1.pep
MKWEKRSGESSIYRQLSWSSGPVQPPPWASSAGSDQCGQRTRNSRGKMPKKIKFLTQDSEKVYCGDSMRLKKLEPSVCADETGRQKFPCCAGDTVTGHKSKRLRTRQ

SEQ ID NO: 187794 - protein, 162 aa, Zea mays
  Clone ID: MRT4577_102854C.1.pep
MKLRAKGIGLLLLLVLLALCSTIEVGEARRGKHWRSSRSSPGSSQLKKGKGKKSSSHRQYGANRPGPKPPVSSTPSSGAGKGNHQNPYQPSPSPSPNAPDIPPMPSPANGSRHSTPEPPAPSCGKGQQQPSQPPPATSQGAVFNVVDFGAKGDGVTDDTKAF

SEQ ID NO: 187795 - protein, 165 aa, Zea mays
  Clone ID: MRT4577_102855C.1.pep
MKLRAKGLGLLLLLVLLALCSTIEVGEARRAARHWRPSRTSSSQLLKKGKGKKTSSRRQYGSNRPSPKPPASSTPSSGAGGKGNQTPYQPSPNAPHVPRPSPPANGSAHSTPKPPTPPSCGKAHQQPSQSQPPPPATSSQHGAVFNVVDFGAKGDGVSDDTKAFA

SEQ ID NO: 187796 - protein, 200 aa, Zea mays
  Clone ID: MRT4577_102856C.1.pep
PCPVTSTRCARAEYFFFGRFLSARHFFYPVSRGVHAESFFWVCMQSSVTSPLLGAAQHFSLSFLLSPRTSHACVSGAPIFPVQSLPAAARKFFFWPTLLPCAQPFALVTSHCVTRAARELFFLSLPCSSVRDKGRAELFFCAVLFFFCRPVSSAQTLGSDFFWRMESPQYTFSESCARNFIFWHLPSAVSGSLTTLVRTT

SEQ ID NO: 187797 - protein, 200 aa, Zea mays
  Clone ID: MRT4577_102857C.1.pep
MEPNLKMAIEEQSKLLRDICDHLFAQETRWCTLETTVAWNTASPQHLEANIAIESLTSIHVELDAQVTAAIERLDEVEAAFVMRLGALVSAYAAFESWRPDVEASVDEIHTSVHLLRDEVSKWAAQAPPPQLDTAAGILGPYQSVAERSPAAAYNTDSPDGNCFDKNRWGHGFGHLLAQNHLPINGGDCGGIKNSGVQEI

SEQ ID NO: 187798 - protein, 198 aa, Zea mays
  Clone ID: MRT4577_102858C.1.pep
SHSFTHLNRFTVSPPFSIMVRRRNPSVIEFSSDSDEIQEESPVPSPPPRRSLFKRGRGSGRMDGEGSSMPSQPTRGRRQKVGASRPRRSTSSSGYAPCQEEDGAFDDFVDLPAPDALYVTGLHMHPANVSRGLHESPVDFTLKGIDTLQRLRFTNPTLTPRHPGVQDPRFWNLFQADFYNSVILSKKHPVVRHRFITP

SEQ ID NO: 187799 - protein, 125 aa, Zea mays
  Clone ID: MRT4577_102859C.1.pep
EDGRRYWSIMQNLGIKPSMENYGCMVDLLCRSGLLDDAYSFVIGMPVSPNSVIWRTLLVACKSSNRIDIAESATKRLLELEPHNPENYVLLSNLYASNSQWDRVSYLRRKMKGKNVTAIAGRSSI

SEQ ID NO: 187800 - protein, 90 aa, Zea mays
  Clone ID: MRT4577_10285C.1.pep
DLTPVHHVPFFLLGSSQRVLPDHSLLVTAPPFLSPESSLLTKTTVATVHCPHPTACIKKKPRFNKQPLKSSCPSLLPTHTPYLFHMRISF

SEQ ID NO: 187801 - protein, 541 aa, Zea mays
  Clone ID: MRT4577_102860C.1.pep
MKLRAKGIGLLLLLVLLALCSTIEVGEARRGKHWRSSRSSPGSSQLKKDKGKKSSSRRQYGANRPGPKPPVSSTPSSGAAKGNHQNPYQPSPSPSPNAPDIPPMPSPANGSRHSTPEPPAPSCGKGQQQPSQPPPATSQGAVFNVVDFGAKGDGVTDDTKAFEGAWAAACKKGACTVLVPPELEFLVGPISFSGPYCKSNIVFQLEGTILAPTSAKSWGSGLLQWLEFTKLNGMVIQGNGIINGRGQQWWTYSDPEDEDDDDTYHVEFQRMPQIKPTALRFYGSFNVVVSGITIVNSSQCHLKFDNCQGVMVHDVTISSPENSLNTDGIHLQNSKDVSIHHTTLACGDDCISIQTGCSNINIHNVNCGPGHGISIGGLGRDNTKACVSNVTVRDVNMFRTMNGVRIKTWQGGVGLVQDIRFSNIQVSEVQTPIIIDQFYCDRSTCRNQTSAVAVSGVQYENIRGTFTIKPVHFACSDSLPCSGISLTGVQLRPVQVPHYHLNNPFCWQAFGELYTPTVPPIACLQIGKPAGNNLQSYDDIC

SEQ ID NO: 187802 - protein, 98 aa, Zea mays
  Clone ID: MRT4577_102861C.1.pep
LGAPPFTRTPRGGSPVLASQRGGHHSWGCLFKSPLLFALEKVGQKGVHHFLNPHGGGGFKGGHKIFGAFNFPPKKNTLLGEVFLEGVFFFPTGRVFFG

SEQ ID NO: 187803 - protein, 44 aa, Zea mays
  Clone ID: MRT4577_102862C.1.pep
GPYTAYSFYVPRTFHQIPAQIDLALRVQSLLRSHLFSKKPNLII

SEQ ID NO: 187804 - protein, 563 aa, Zea mays
  Clone ID: MRT4577_102863C.1.pep
MARASSMPSQPTRGRRQKVGASRPRRSTSSSGYAPCQEEDGAFDDFVDLPAPDALYVTGLHMHPANVSRGPHESPVDFTQKGIDTLQRLRFTNPTLTPRHPGVQDPRFWNLFQADFYNSVILSKKHPVVRHRFIDWEGCENMGDADMSSALVNLERKGLRNIMTMEYPWNDEVVAQFYATLWIKKVDEEADGYDYPVMYFFIQGNWHKVSYRRFAHILGFSDADIQGSNMRVHGIRLPMREETEFIHVSTEREFWTTANMHRYYRYLNSLSRMTVLPKGGNQMNVLGESRVLLLLLAPNSLARINVFDMIWEEIVRASWSPHRGCLHAPFIMKMIEVVTQTHFEKPVKHSRYVPYWVDSSNPAARTKRVPSRSGGPASSSEPPRQPPHHPSSSPPAAASRPSPGRGSPMPRASGRGRGRGRGMGARLLHGLAAFFSACSNISADVHEVARRQRETDDNLRRQASSMGMPFVPRSPDVPLHPPPPEINEWHQQAYGVPFMSADDEDEEVYVDDREEFVPPPYHGDPGQSSSHPPPPYPGPGPIPGDPGPARPRVHPSPTSDHRT

SEQ ID NO: 187805 - protein, 209 aa, Zea mays
  Clone ID: MRT4577_102864C.1.pep
VLPRVGSEGEEAFCAPAAAGRLGGGGPSDETLAVEVLEYAGHAAHLALEVPRVVGQAGGGAAHPRGRHRLPVRACASASLPKLSLSAPDHQARDGVRSAGRSPALIRGPTTATDVARPAAEKLPRRRRSVSHPVRAEAELGGVQWRGEGEAVLPARAHGWYCGCVLVEVEAGADVCSVLESGASSQRNVIIAAPWACRLSSWGGREAGG

SEQ ID NO: 187806 - protein, 86 aa, Zea mays
  Clone ID: MRT4577_102865C.1.pep
MAARRPGLAMELLLPCRCWKCRANLKILQSLEESVTDPDVKYGYVPKLTPAIGKTYNFTEEELVKWDQLSLSAAMGPAAEELLASG

SEQ ID NO: 187807 - protein, 82 aa, Zea mays
  Clone ID: MRT4577_102866C.1.pep
PRIYAYAQRYTGRSRSLLANNLLMNDHLCGRLAMMYLARLSLIASVDNIESSALSESRPFATISLFRKCPVRMVTILYTHAL

SEQ ID NO: 187808 - protein, 346 aa, Zea mays
  unsure (1)..(346): unsure at all Xaa locations
  Clone ID: MRT4577_102867C.1.pep
LGTSRPAEAVSSGQQRTLVLPDRSYHPTRSLFASSSLSIPPWAQRRSAPSWLTQRTSFVGYVAVRENEREVRRMGRRDIAIVLRGTATCPEWAENLRAGLVPLTADDDASAPKVAKGFLSLYRTPGDHAPSLSTAIVEEVKRLMQVYRGEELSITLVGHSLGASLALLAADELSACLAAETXRHRXHQPPPIAVVSFGGPKTGNRAFAERLQRERGVNVLRVVNAGDVVTRVPAPIAREGYVHAGGAELRLHNSDSPCLRPDAGPACCHDLEAYLHLLDGFAGSGRPFRPDASRSVARLLTYQRPNVKLAYVERARMLGFEQASPRTATANGAAADGQYGYLASPT

SEQ ID NO: 187809 - protein, 52 aa, Zea mays
  Clone ID: MRT4577_102868C.1.pep
KKLLPWKAGVGNLGPLKRAPPINFYFFFFNFIFFLFFPPRTDFIWCLKWWTC

SEQ ID NO: 187810 - protein, 49 aa, Zea mays
  Clone ID: MRT4577_102869C.1.pep
TNQVRKLVARRRPDTVLVSTITDADQGSAGVTNRTPLAPYEKSKSLGSG

SEQ ID NO: 187811 - protein, 125 aa, Zea mays
  unsure (1)..(125): unsure at all Xaa locations
  Clone ID: MRT4577_10286C.1.pep
SRXXGXXRNGAGFHXXSSXXCXXKGXXHLGATXPTTXXTXPXXXXGSLLXEEXFHTPDTKXATPQXXPXXHTWFXXTTXPARFGFPXNPDQTPRNLPLGXXPXSARXTXXGSXFRAPTAXPQTVA

SEQ ID NO: 187812 - protein, 149 aa, Zea mays
  Clone ID: MRT4577_102870C.1.pep
GAVGPTQGPIGAAGDPKGWSPQPENAPGAPQAHAKVHQPHEKTGQGQHQEGPGPPAIENDPQRNSHQKIKNRKNTTNRRPGPGKETRSNNTPKTCIIPLKMNTTFKIKRKQSGVTKNPGAPEVSPTSPSPQPKKGLCFPRGATAPPPRI

SEQ ID NO: 187813 - protein, 92 aa, Zea mays
  Clone ID: MRT4577_102871C.1.pep
TGASDPFLFEVDPVFVTAFGSTVIVEGCDNSRSISWVHAWTVRDGTITQGREYFNTSFTVTRLGDSPPSACSSSTAEIAPVHCPYVWESSLF

SEQ ID NO: 187814 - protein, 87 aa, Zea mays
  unsure (1)..(87): unsure at all Xaa locations
  Clone ID: MRT4577_102872C.1.pep
MDGNARSTAASQKKSIVPDDDLVELLWHNGSVVAQPQGHHRPAPPSDRDCPGTSGLTGEETAXWVPDTLDDSLEKGPYTQLWYSTIA

SEQ ID NO: 187815 - protein, 46 aa, Zea mays
  Clone ID: MRT4577_102873C.1.pep
FPPPPPPPPLPPPSPPPPPPPPPPPPPPPPPPPPPPPPPPRDWWSC

SEQ ID NO: 187816 - protein, 112 aa, Zea mays
  Clone ID: MRT4577_102874C.1.pep
FIIRRDTVGAMGYEQTSGMPNPNVCTHICMCHTLLDRRNTHEPEPKKGLRSGMEGLHTDDLCYSVYYGPDPVRVPGIHIGRCFYGWTTTTRLMDSEPRVRGLQVRPSDGPVG

SEQ ID NO: 187817 - protein, 195 aa, Zea mays
  unsure (1)..(195): unsure at all Xaa locations
  Clone ID: MRT4577_102875C.1.pep
TCSFCWSVQTHTPDALPNLPAPHLRFQMHIFXETLTXTTISLKEELYDTIVFFNAQIYDHLPITPDLKWLIFSGLQHEYDRTLADYDLHKENXLPFELLIMQFMMIFSMTLISXTIDLXMDNSDAIDNVXMIIQDXKGIPPLSAXIIYSSDYIIDXYSLTEYAVQNDSTLHLEHYLWKRMQILVNTSDLHRLSTS

SEQ ID NO: 187818 - protein, 76 aa, Zea mays
  Clone ID: MRT4577_102876C.1.pep
IFFFRPGIIFPLGKKPPVFLFFRRTSWGPKAPFVFYFSPQFCPQKKKKKKKKKKKKKKKKKKKKKKKKKKKKKKKK

SEQ ID NO: 187819 - protein, 84 aa, Zea mays
  Clone ID: MRT4577_102877C.1.pep
INGVVEARFFPGWKARPLDKTCFFGGDWFGPSICIALHLCVGGKFPWAPSKRIKAKKGGLGIGVFLGDFPPQVLIKKKRRPPFF

SEQ ID NO: 187820 - protein, 243 aa, Zea mays
  Clone ID: MRT4577_102878C.1.pep
MREILHIQGGQCGNQIGSKFWEVVCDEHGIDPTGRYVGTSDLQLERVNVYYNEASCGRFVPRAVLMDLEPGTMDSVRTGPYGQIFRPDNFVFGQSGAGNNWAKGHYTEGAELIDSVLDVVRKEAENCDCLQGFQVCHSLGGGTGSGMGTLLISKIREEYPDRMMLTFSVFPSPKVSDTVVEPYNATLSVHQLVENADECMVLDNEALYDICFRTLKLTTPSFGDLNHLISATMSGVTCCLRFP

SEQ ID NO: 187821 - protein, 156 aa, Zea mays
  unsure (1)..(156): unsure at all Xaa locations
  Clone ID: MRT4577_102879C.1.pep
SDRDIEGTMTLQDERSDRLSTVQTMTHTGDVXAPYSLRXIFLGNRLHDRHTISEYNIQIERTLHLELRVREALQTFRKTLTGRTIXTLEEELSDTXIDSDKDKIQDKEGIPPDHKGLIFAGKQLEDGRTLADYNIQNESTLHLVLRLRGGMQILVK

SEQ ID NO: 187822 - protein, 85 aa, Zea mays
  Clone ID: MRT4577_10287C.1.pep
KAFPSFGGQNKNLGPIIQALNSIQRAWANKIHPRYNIGDGGSNSLLLRRTRPAAGIRKATGKDPGGKNRVNPSPKSKTIHNNYGF

SEQ ID NO: 187823 - protein, 86 aa, Zea mays
  Clone ID: MRT4577_102880C.1.pep
PGGGATLRPNPPAKALFWVRQPPLNPSGGGKPLLGWSPKKRAFFSKIFLGGSFYPLCPPRLKISGFFFCGLFFFFDLFLVILNVFV

SEQ ID NO: 187824 - protein, 48 aa, Zea mays
  unsure (1)..(48): unsure at all Xaa locations
  Clone ID: MRT4577_102881C.1.pep
HSIIQGPKGANLGGSTSIYKRSSSALTSTLPXNDKVQWTSRDVGDGEP

SEQ ID NO: 187825 - protein, 98 aa, Zea mays
  unsure (1)..(98): unsure at all Xaa locations
  Clone ID: MRT4577_102882C.1.pep
TTRFPASVKLINEELEKEEGNALEHLVSWGGKFASNYNVXGANSCCAYTVCXDKKLEHQHQFDDLKKTWLIKRCRTMNAKLSYLEHHLLRDTYTKDTV

SEQ ID NO: 187826 - protein, 51 aa, Zea mays
  Clone ID: MRT4577_102883C.1.pep
VPNDALNSTGNQSQYIIYNALMIIHRFRHVDSRVCINYCPPVDILTISIPS

SEQ ID NO: 187827 - protein, 98 aa, Zea mays
  Clone ID: MRT4577_102884C.1.pep
TMSGSTFQLAIARAVPPSCGSLSIICVRYTRASFRCLIRFVAVRWVQLVPLAARSVLCRPWCRGRESSCSVLQVRRLQVLGSTPGSDIEHPAAVELLE

SEQ ID NO: 187828 - protein, 422 aa, Zea mays
  unsure (1)..(422): unsure at all Xaa locations
  Clone ID: MRT4577_102885C.1.pep
MSKAAAASLPPPPPEVAHLVEQLQRHHLAPDASLLSSSAHSDLLQAREEVAAERALYLEALAVYAEAVAMVEEYHAAAGAGKKLNCSPQVYESLEHRLAVAEAAQRLRLPLLSQDGEVHEQEIEKLSTYSRSSFDSTLTSATPSSSSISTSYNNYSSSASAVTVAAPHWSGSSDAVEPGVGGVPDRFLGITSDYLYQVQQEQPAMSVDMVDYQRTLAREIEARLEAKCDALADLFAMDERDSSSLSQISSARLPERVKLIIEEIEKEEAHLLEDLASMDRKFAEHYNVXGANSCCAYTVCXDKKLEHQHQFDDLKKTWLIKRCRTMNAKLSYLEHHLLRDTYTKDTVPALHRIRKYLVEATKEASNSYNEAVSRLREYQGVDPRFDVIARQYHEIVKKLEGMQWTIHQVEMDLKPHHDHAAV

SEQ ID NO: 187829 - protein, 69 aa, Zea mays
  Clone ID: MRT4577_102886C.1.pep
FPVQRPYLYQWRGMFTMTRIALRLTRMLLEDRSAGPKDHCSVPKELTCWCILLESTTGWLLVTGRWRCP

SEQ ID NO: 187830 - protein, 63 aa, Zea mays
  Clone ID: MRT4577_102887C.1.pep
EPQLFNRPITNVLPFKLFGNQTTNHQPTSPTLNPPKSQTKLIYPQTSQFKRRPPNRPPPGTWP

SEQ ID NO: 187831 - protein, 122 aa, Zea mays
  Clone ID: MRT4577_102888C.1.pep
ELEIRASILEESGIAQQSNLDGDKMEPEIIVCKLEDVSEESGACTESNLHDNTEYVIDDAEMRQEITLCKREDASKETGIDQETLEDDSSTCGIVDDRNNLEINNCKSEDVFIESVGTHEAD

SEQ ID NO: 187832 - protein, 71 aa, Zea mays
  Clone ID: MRT4577_102889C.1.pep
EYANAIVMRHWTLEYGTRWNQCLFDASGSTIRPRISALHLVFEHCKNKIRPYSCEQAWLVNTTPVLIPWRH

SEQ ID NO: 187833 - protein, 183 aa, Zea mays
  Clone ID: MRT4577_10288C.1.pep
MKNVTHSFVFLAHWPFAGSFGLNTDILATNLINLTVVVGVLIFFGKGVLKDLLDNRKQRILSTIRNSEELRKGTLEQLEKARIRLQKVELEADEYRMNGYSEIEREKENLINATSISLEQLEKSKNETLYFEKQRAMNQVRQRVFQQAVQGALGTLNSCLNTELHFRTIRANIGILGAIEWKR

SEQ ID NO: 187834 - protein, 298 aa, Zea mays
  Clone ID: MRT4577_102890C.1.pep
MAAMARSVSLVVAPLLLLSLLVSAAASARTVGDTVQDACSKTQFPKICVDSLAAKPESQKATPRKLAELFVNIAAEKGSGMATFVHRKYSDKEDSDIVKCYDSCSDDVEEAVAHLNGLVREPTDAKFLELKSWLSSTLGGTSTCEDACKDLPKTSDKDDVVNFSLDFEKLQRVTLDLITEASGTMSAGIALPPSNAGAPSYGAAAPSGGSADAPAGASEGPASASGPSGDDAPASGAGASASAADAPAAAASSGPSSAPAPSSSSESSAAPGPSSDGTSSAPAPSSGDDSDSDDDGSA

SEQ ID NO: 187835 - protein, 212 aa, Zea mays
  Clone ID: MRT4577_102891C.1.pep
MKMMSTRALALGAAAVLAFAAATAQAQRCGEQGSNMECPNNLCCSQYGYCGMGGDYCGKGCQNGACWTSKRCGSQAGGATCTNNQCCSQYGYCGFGAEYCGAGCQGGPCRADIKCGSQAGGKLCPNNLCCSQWGFCGLGSEFCGGGCQSGACSTDKPCGKDAGGRVCTNNYCCSKWGSCGIGPGYCGAGCQSGGCDGVFAEAIATNSTLLAE

SEQ ID NO: 187836 - protein, 44 aa, Zea mays
  Clone ID: MRT4577_102892C.1.pep
NIYQVQLALFFLASKGPLKKYSGEKRPGKSLLLITPGQGRMGYV

SEQ ID NO: 187837 - protein, 99 aa, Zea mays
  Clone ID: MRT4577_102893C.1.pep
QGNLLPLSHLATSIHLRDFKKLVTRRAKVIKQHQGYFHNPTPHIVLTGPIFILVNRPTMLIRRLMAGPFTSPLLIPPVLGWIVNPTGGKSNWIAHTWIH

SEQ ID NO: 187838 - protein, 66 aa, Zea mays
  Clone ID: MRT4577_102895C.1.pep
TIMRVATKLSTNEGPKRNLSDKGPTLNLSDLAGAARTRTPSTTNYDVHSPTWGDGKPAHPPCAIGH

SEQ ID NO: 187839 - protein, 144 aa, Zea mays
  unsure (1)..(144): unsure at all Xaa locations
  Clone ID: MRT4577_102896C.1.pep
MPRANEMLRADSRMMVVFGALTSKPEQLTFEESLIFVKKVKARDYMLYLSLFDVLGRTELPQLDAYRELQQMFQNHPDLREELERFRPPPPPPVPTSKQAANNNIWPWVIVCAAVPLVAASLLPSLXNPVLWLAQHPVGQKMAV

SEQ ID NO: 187840 - protein, 144 aa, Zea mays
  unsure (1)..(144): unsure at all Xaa locations
  Clone ID: MRT4577_102897C.1.pep
MPRANEMLRADSRMMVVFGALSSKPEQLTFEESLIFVKKVKARDYMLYLSLFDVLGRTELPQLDAYRELQQMFQNHPDLREELERFRPPPPPPVPTSKQAANNNIWPWVIVCAAVPLVAASLLPSLXNPVLWLAQHPVGEKMAV

SEQ ID NO: 187841 - protein, 69 aa, Zea mays
  Clone ID: MRT4577_102898C.1.pep
EQPHGTQSATPPPKRGGSPLFPQPRGGHPTKPPTKYGEEHKIFQLLKEGPVKKAKSPQVWAAQYGGDPR

SEQ ID NO: 187842 - protein, 46 aa, Zea mays
  Clone ID: MRT4577_102899C.1.pep
DPRISYPTKDVVSFTPTALYSYATPSWFVCAYVRAYHVVRPKKKHQ

SEQ ID NO: 187843 - protein, 55 aa, Zea mays
  Clone ID: MRT4577_10289C.1.pep
ASTLVLHNMYIRSKKHRLFMYRLGQTVYPYEVVWFLPELIKMRSLSKKKNQRRPL

SEQ ID NO: 187844 - protein, 95 aa, Zea mays
  Clone ID: MRT4577_1028C.1.pep
SCRSGVAFRSSVIGVVYVPLSDLGRLSACQWSDSRSSYVRCRLMSEVFFHRAIGAQHLPRCVARAVEHCCLIWDGLSGNSSLGAVLIDGRLERRT

SEQ ID NO: 187845 - protein, 50 aa, Zea mays
  Clone ID: MRT4577_102900C.1.pep
WEVLIQSRPAQFPHTKLAHYRQQKWNQLAEEPEQADWKKTSSDNTNRNPT

SEQ ID NO: 187846 - protein, 75 aa, Zea mays
  Clone ID: MRT4577_102901C.1.pep
GQPTTSLAGDDAARGGDGWGTHDEAADVSRDLGVDCATAAAADAASPPPGAAGNRRSLHPIPRHELEAASGRPIE

SEQ ID NO: 187847 - protein, 123 aa, Zea mays
  Clone ID: MRT4577_102902C.1.pep
VIFCYFRRNIMAPAVIETPPTEYKSGVGAYKEFGLGGPKFFQKDLELKGTEKHSPAKYPHYLPVWDNEKGQKLPPWEPFTHVEHGKDADPTFPNLLKNATVHDITGNTGAEVHRVQLSQLTNA

SEQ ID NO: 187848 - protein, 59 aa, Zea mays
  Clone ID: MRT4577_102903C.1.pep
VASISAISCLDRCTVPSVLLCGLSVCPRPLKQRHIFESYQTRPSFKKTPQFVNACCVLN

SEQ ID NO: 187849 - protein, 92 aa, Zea mays
  Clone ID: MRT4577_102904C.1.pep
LSKPVPLLLLPQGSFQFPPVCQNRQPDTRLAGWVGRPLMPRGSDLRWASQPRVPSAATGYLRPRVSRVTALYTCRPPPAADCHYHGRTGPSG

SEQ ID NO: 187850 - protein, 291 aa, Zea mays
  Clone ID: MRT4577_102905C.1.pep
MGGDIQEIYDKLKDSSLPEGFFTEEQPWKDIYITELLNCIKEEHLKDFEQEYCLAEKIEGATEDTDIAVELYKLSISTLDLLKLASKEEQGDYVGAWYSMLLSCAQELKHGVALWQEFYHANVCDRVVSEGGHYFIALGEIYRVAQILYLSLQRFKPWVLADPGMLSKMLSCLDSCTYAWTSGLETALKMVIDSSHIDSSLAKALMESIKNITKLEVPNLQKNIPNNEMQCRLTLLPSSLLPGLNLVIWNGGHYFVKVANLWANRISPDPPLLPSNPTSSMNNAATHSQSC

SEQ ID NO: 187851 - protein, 58 aa, Zea mays
  Clone ID: MRT4577_102906C.1.pep
KFTQNHFFFFQPWGGIMAFTIKRKPQFPFLGLVPLRFLIPKITWVFPNFQKNGKTGFV

SEQ ID NO: 187852 - protein, 96 aa, Zea mays
  Clone ID: MRT4577_102907C.1.pep
QFPRSVFQFSALIIYTLYQTSTSKLVIPFRLAILSDIIRHYGKNVVNYNLYKRMTCKGTVTLDLYLPRTALNQHGACSVYVYKKDNLTNMFYTTCI

SEQ ID NO: 187853 - protein, 70 aa, Zea mays
  Clone ID: MRT4577_102908C.1.pep
MSGLTSVDMVSASDPKSAMALQRLVQAAVWFLGENANYAASEYAWESATPPGTALMMLDADKMAAAATTV

SEQ ID NO: 187854 - protein, 188 aa, Zea mays
  unsure (1)..(188): unsure at all Xaa locations
  Clone ID: MRT4577_102909C.1.pep
MGGDIQEIYDKLKDSSLPEGFFTEEQPWKDIYITELLNCIKEEHLKDFEQEYCLAEKIXGYVSYYYCLCHATEDTDIAVELYKLSISTLDLLKLASKEEQGDYVGAWYSMLLSCAQELKHGVALWQEFYHANVCDRVVSEGGHYFIALGEIYRVAQIXYLSLQRFKPXVLADPXMLSKMLSCLDSCTY

SEQ ID NO: 187855 - protein, 1151 aa, Zea mays
  Clone ID: MRT4577_10290C.1.pep
TRHGQPAFLCYIDLHVTIQSQDILHSVNIPLKSLILVQNDQYVESEQVIAEIRAGTSTLHFKEKVQKHIYSESDGEMHWSTDVYHAPEYQYGNLRRLPKTSHLWILSVSMCRSSIASFSLHKDQDQMNTYSFSVDGRYIFDFSMANDQVSHRLLDTFGKKDREILDYLTPDRIVFNGHWNCFYPSILQDNSDLLAKKRRNRLVVPLQYHQEQEKERISCLGISMEIPFMGVLRRNTIFAYFDDPRYRKDKRGSGIVKFRYRTLEEEYRTQEEEYRTREEEYRTREEDSEDEYESPENKYRTREGEGEYKILEDEYRTLEDEYETLEDEYGILEDEYRTLEKDSEEEYGSLENKYRTREGEGEYEILEEESEEEYGSSEDGSEKEYGTLEEDSEEDSEEDSEDEYGSPEEDSILKKEGFIEHRGTKEFSLKYQKEVDRFFFILQELHILPRSSSLKVLDNSIIGVDTQLTKNTRSRLGGLVRVKRKKSHTELKIFSGDIHFPEEADKILGGSLIPPEREKKDSKESKKRKNWVYVQRKKFLKSKEKYFVLVRPAVAYEMDEGINLATLFPQDLLQEEDNLQLRLVNFISHENSKLTQRIYHTNSQFVRTCLVVNWEQEEKEGARASLVEVKTNDLIRDFLRIELVKSTILYTRRRYDRTSVGLIPNNRLDRNNTNSFYSKAKIQSLSQHQEVIGTLLNRNKEYPSLMILLASNCSRIGLFKNSKYPNAVKESNPRIPIRDIFGLLGVIVPSISNFSSSYYLLTHNQILLKKYLFLDNLKQTLQVLQGLKYSLIDENKRISNFDSNIMLEPFHLNWHFLHHDSWEETLAIIHLGQFICENLCLFKLHIKKSGQIFIVNMDSFVLRAAKPYLATIGATVHGHYGKILYKGDRLVTFIYEKSRSSDITQGLPKVEQIFEARSIDSLSPNLERRIEDWNERIPRILGVPWGFLIGAELTIAQSRISLVNKIQKVYRSQGVQIHNRHIEIIIRQVTSKVRVSEDGMSNVFLPGELIGLLRAERAGRALDESIYYRAILLGITRASLNTQSFISEASFQETARVLAKAALRGRIDWLKGLKENVVLGGIIPVGTGFQKFVHRSPQDKNLYLEIQKKNLFASEMRDILFLHTELVSSDSDVTNNFYETSETPFTPIYTI

SEQ ID NO: 187856 - protein, 74 aa, Zea mays
  Clone ID: MRT4577_102910C.1.pep
YCIITLGLYTRWYIRRVRYVNTAIILVITRLTRTSQRSPLYSVHTDNDYGHTVAAAAALTRTRRTPPACLHFIM

SEQ ID NO: 187857 - protein, 77 aa, Zea mays
  Clone ID: MRT4577_102911C.1.pep
IMSYIPHILVTLCTVRLQAVYLSIHENACSKRSHGRPWALSWLQVHFVSTPIFTSHSSICSSEHSCGSGTSRSDQSR

SEQ ID NO: 187858 - protein, 273 aa, Zea mays
  unsure (1)..(273): unsure at all Xaa locations
  Clone ID: MRT4577_102913C.1.pep
EICYIEKCLCSRGRKCENLSRELNMCNDPFSCLRIENDDLIAKIEELNVCKPSTSSVEHVTICTTCRDVNINAIDDHLAMIKEQNDHIAQLNAKIAKHEHENEKFKXLLINGRRLGIKVGIGFQQGSQSNVKLNAPKNKLSNFVKVKAPMVQDREGYVLYPENYPEHKIRKIHVRKSYIISHHTYMYSNEASSSRHSTHVKMPQKKIVDASNEHNISFKTFDASLFLANKSDKVVAKYVGGKHKSLKTCVXVPKVLVSNVKGPKTVWVPKDKA

SEQ ID NO: 187859 - protein, 142 aa, Zea mays
  Clone ID: MRT4577_102914C.1.pep
YTFNMTVNRTTSPIPTVSCCARRNTRSAWLISPHLAYMSTNALTKNTSTSTPPSLLTACPCAWTPRSAPPPRHTPAPQPSSCTSQPAAAVPRTSWRTSAREPTRPRPRKRRGRRSRRRRSWRPFRRTGSRRPGTGRTRRRKP

SEQ ID NO: 187860 - protein, 158 aa, Zea mays
  unsure (1)..(158): unsure at all Xaa locations
  Clone ID: MRT4577_102915C.1.pep
MKRNPRVTSSRRKCRKAHFTAPSSVRRVLMSAALSTELRHKYNVRSIPIRKDDEVQVVRGTYKGREGKVVQVYRRRWVIHVERITREKVNGSTVNVGIHPSKVMVTKLKLDKDRKALLDRKARGRAADKAKGKFTXADDVAAAAGGAAATGASLQEID

SEQ ID NO: 187861 - protein, 290 aa, Zea mays
  Clone ID: MRT4577_102916C.1.pep
LPRTRGRTRGRTRGRAGVRAVEECDFILCNSFHDAEPATFARFPRIVPVGPLLTGERRRRGSGGKQAAAVVGHFWRPEDGACMAWLNAQAARSVVYVAFGSHTMFDARQFRELALGLELSGRPFLWVVRPDIVLGGGGIHGYPDGFLDRVSATGRGMVVAWSPQQRVLAHPAVACFVSHCGWNSTMEGVRNGVPFLAWPYFTDQFVNQAYICDVWKVGLPAEADESGVVTKEHIASRVEELMGDAGMRERVEDMKRAARGSVTRGGSSHRNFDMFVQAMKRRESIDSQNN

SEQ ID NO: 187862 - protein, 103 aa, Zea mays
  Clone ID: MRT4577_102917C.1.pep
MAGADGAQQHHPCSICMEPMAPSAAHRGGFACTHAFCGACLSGHVRAKLECGGGGAVVRCPDASCAATLDPELCRGALPSEVFERWCAKLCESLFLGARRTYC

SEQ ID NO: 187863 - protein, 375 aa, Zea mays
  Clone ID: MRT4577_102918C.1.pep
HRKALTRLVRHPAASALGSTVCGVIDRAPYTTGSPAPGPLPRPSTSRRANISASHNHAAFVTESGEVFTCGDNSSLCCGHGEVGRTIFRPMQVEALKGIPCKQVATGLSFTVILTRDGQVYTCGSNTHGQLGHGDTIDRATPKLIELFEGPTQVVQIAAGASYTFAVTDDGTVHSFGSCTNFCLGHGDQHDELLPRAIQSFKRRNIHVVRVSAGDEHAVALDALGHVYTWGRGYCGALGHGDENDKTSPELIGSLKGQVAVQVCARKRKTFVLTDEGSVVAFGWMGFGSLGFLDRGTSDKVMRPRVLESLQDHYVSQISTGLYHTVAVTNKGIVFGFGDNERAQLGQEYIRGCLKPTEIMFQKSIEDIPIAAPSG

SEQ ID NO: 187864 - protein, 70 aa, Zea mays
  Clone ID: MRT4577_102919C.1.pep
KTLHVKLQLVLASQIVNTCNIKMCNRSNDIKIVAILYIKWKIQSKSAFCLTATGLCCEGNTKPPLCICSC

SEQ ID NO: 187865 - protein, 90 aa, Zea mays
  unsure (1)..(90): unsure at all Xaa locations
  Clone ID: MRT4577_10291C.1.pep
SRQPVIRFVWSGTAPXRSGVPPLAPGDSSGCWGKAREDEIAARRRRRWGLRWWRRRCEVAAATAAMAARDRATREPVWGEVRRSDGDDGG

SEQ ID NO: 187866 - protein, 129 aa, Zea mays
  unsure (1)..(129): unsure at all Xaa locations
  Clone ID: MRT4577_102921C.1.pep
MHAFFCLXPLYGRRGVFFFLXSQAGGLARWIRSAVQLSMRPVLFWRCSTLNTLGNCCSTKPSLMRWGESSGFASALKPRHRGRPSQGLAAHVCLGCRAGVPWPLSCGSALGLGLLVGGPADLVEARLFA

SEQ ID NO: 187867 - protein, 75 aa, Zea mays
  unsure (1)..(75): unsure at all Xaa locations
  Clone ID: MRT4577_102922C.1.pep
YFIPFSRIEESYEKAPSPKFKWYIFVLTYKFLHSLVILSCCISHFXQIYNLQCVGSNSRANVDEVIRGGEGPNRL

SEQ ID NO: 187868 - protein, 78 aa, Zea mays
  Clone ID: MRT4577_102923C.1.pep
SCTSVGRTPLLTRHDRTFTWSGPAAQHMPAGRDCPGDPISYAYSCRRHSGSVTAMKQAQRCRLLSRSFLLALKNTNCM

SEQ ID NO: 187869 - protein, 994 aa, Zea mays
  Clone ID: MRT4577_102924C.1.pep
MAPKRASSKAAPSVDEAAKAALLAEKKVKTLADTTHQEACEDDLQRTATRTTPGFAPLEGEDAIEDDKIIGIPAEEQLQLRALRIKNRNLQKQKEILEAKRQRVSAQAKRRPFVPHATAFQGINYLDERSPLAPQLQVSPWPANFRAGTYPKYNGSTDPTQYIMSYHVAVASFGGDDATMAKSFIIALEGYHPDTDALAELSLCKQLEKETLREYYRKFLTLKSQLPLVDDQIAIHYTISGLRVGVLYSHCIKDPPKNLQELYQLFEKYARSEELHQRKVESQRKPKDPPQSSRTWTRPSQSDSGRDRRSQQQVHNIDNQHPAGETPRRQDYPPRAAAMALAIGAEDGRISRADFTACFTEDFADQPYRGVIHMITRGSSVDFDTKRQKRDHYRSINHVAVTGPVVQKKWSHVPLTFDARDVDLHSAPHIDAMVINCSVAGWDLHKVLVDNGSQADIIFLHAFDRMGISHSLLKPSDNPLYGFGGKGTFPVGKIELPLSFGVAPNARSEQVTFDIVDMVYTYNAIMGRGSINKFEAAIHGLYLCMKIPGPQGMIIVYGNQQTARNIERDFVPGQRNVHCLTTQREVPEATRPTANELQKAQLQSNDGTKTVPLDQAMPKQTVIIIEDPTLQDEEKLISCLSRNKDVFAWSALDLVGVSRTIIEHSLGIDPSVRLKKQRLRKMSDEKTEATKAKVHHLLEANFIEPVAYPTWLANVVMVQNKSVKWRMCIDFTSLNKACPKDNFPLPRIDKIVDSATGCEVMSLLDCFSGYHQIYMKEEDKTSTSFITPFGMYCFVRMPEGLKNAGSTFSRLTKTVLESQVGRNIFTYVDNIVVASKNKEDHLADLVETFANMRDTRLRLNPEKCVFRVCQGKILGYLVSHRGIEANPTKIQAIINMTPPQSARDVQRLTGRLATLNRFISKSIERSLPFLKTLRGTKDFAWGPEQAAAFASLKQHLLELATLTSPDPSLPLLLYVAASPHAVSAALVQEQDREG

SEQ ID NO: 187870 - protein, 60 aa, Zea mays
  Clone ID: MRT4577_102925C.1.pep
CSSYVLLSPLPLAPALVIRWRLAFLPTADVAGYSSSSLLTPNNKLMLHAYLSGGRDRERG

SEQ ID NO: 187871 - protein, 643 aa, Zea mays
  Clone ID: MRT4577_102926C.1.pep
MAPKRASSKAAPSIDEAAKAALLAEKKSKALADTTHQEACEDDVVSKRQRNDQPTPEGSLHTCSSGGQPQEPPPGFALLEGEDATEDGEVIGVSAEEQLQLRALRIKNRNLQKQKEILEAKRQRVSTQAMVRLMIRDEEQRAQELEQEIALMQREGQHDLQHGPPLQQHVPVGDLFIPQRGPVIPHAAAFQGVNYLDERSPLAPQLQKSLGQISAQLPRVRPDTDALAELSLCKKLEKETLREYYRRFLTLKSQLPSVDDQIAIHYAISGLQAGVLYSHCIRDPPKNLQELYQLFEKYARSEELHQRKVESQRKPKDPPQSSRTWTRPSQLDSGRDSRCQQQVHNIANQHPAGEASHRQDYPPQGHNNGTRGRGQGRAQQPHRFCCLFHGEDCAHPTRDYPETKATRDRMSRAQPADNQRVVAHTYQHHQEKRDHYRSINHVAVTGPVVQTKWSHVSLTFDARDVDLRSAPHIDAMVINCSVAGWDLHKVLVDNGSQADIIFLHAFDRMGINHRLLKPSDNPLYGFGSKGTFPVGKIELPLSFSVAPNARSEQVTFDIVDMVYPYNAIMGRGSINKFEAAIHRLYLCMKIPGPQGVITVYGNQQTARNIERDFVPGQRNVHCLTTQREIPEANRPTANEHEKA

SEQ ID NO: 187872 - protein, 1250 aa, Zea mays
  unsure (1)..(1250): unsure at all Xaa locations
  Clone ID: MRT4577_102927C.1.pep
MIRDEEQRAQELEQEIALMQREGQHDLQHGPPLQQRAPIGDLFIPQRGPVIPHAAAFQGVNYLDEWSPLAPQLQVSPWPANFRAGAYPKYNGSTDPAQYIMSYEVAVASDVGDDAMMAKSSMMELEGPAISCHCIRDSPMNLQELYQMIEKYGSSEKVGQSKGEFLWKHKVPPQYCRTWTRPSQSDSGRDSRSQQQTARTQQGTAQRRRPPGIGCLGRNQPTTQELSRTHINTTSHNHTTTAPLSIHLTMHTNTTRSVDFDTKRQKRDHYRSINHVAVIGPVVQTKWSHVSLTFDARDVDLCSAPHMDAMVINCSVAGWDLHKVLVDKGSQVDIIFLHAFDRMGISHSLLKPSDNPLYGFGSKGTFPVGKIELPLSFGVAPNARSEQVTFNIVDMVYPYNTIMGRGSINKFEAAIHRLYLCMKIPGPQGVITVYGNQQTACNIERDFVLGQRNVHCLTTQREVPNATRPTANEHEKAQLQSNDGTKIVPLNQATPMQTVIISEDLTSQDEEGLISCLSRNKDFFAWSALDLVGVSRTIIEHSLGIDPSMRPKKQRLRKMSDEKTEAAKAEVHRLLEANFIEPVAYPTWLANVVMVQKKSGKWRMCIDFTSLNKACPKDNFPLPRIDKIVDSEAGCEVMSLLDCFSGYHQIYMKEEDKASTSFITPFGTYCFVRMPEGLKKVGSTFSRLTKTVLESQVGRNIFTYVDDIVVASKNKEDHLADLAETFANMRDARLRLNPKKCVFGVRQGKILGYLVSHCGIEANPTKIQAIINMTPXQSARDVQRLTGRLAALNRFISNXSPHAISXALVQEQAREGTTRQCPVYYISEVLTTSKCNMIELEKIAYAVVMASRKLRHYFEAFKYLTVVRSLERQFKGFTLQHVDRGKNEEADALAKAAARGEALPSDVFYHVIGTPVXQPRGPTNXTTPKAXRIVNLIMTEDWRAPITLFLQGYYHPSDINEAKCLKHRSRDFALIEGQLYKKGVSQPMLKCVTETEGVQILREVHNETCGSHAGPRALAAKVIHQGFYWPAMICTANRVTRLCEACQKFSPRSGNPSQFTKLIAHTWLLQRWGLDIVGPLPTAQGNLKFTFVVVEYFTKWIEARAVSTITSKTTQKFFWQNIVCRFGVPSELTAHNGKQFDSQDFXDFCFSIGTKLAFASVYHPQSNGVVERANGKIFMAIKKMLLDDKKGPQQIPSSNKSMARPHSRPKRIQQRGPRTRPDYSDRVTGQAGAKVGGSLHRQDKGVSQRV

SEQ ID NO: 187873 - protein, 95 aa, Zea mays
  Clone ID: MRT4577_102928C.1.pep
RAFIKLTILVLMLGLMQATNLKRCLMLLHLMSSRDLIHIQPLESKLVHFLEQFVDKKMIWLVKPLIFTKLDKYPFYIPLSALFLIFNNNDFLYQT

SEQ ID NO: 187874 - protein, 1163 aa, Zea mays
  unsure (1)..(1163): unsure at all Xaa locations
  Clone ID: MRT4577_102929C.1.pep
MAKATFNFQGYRPDTDALAELSLCKQLEKETLREYYRKFLTLKSQLPSVDDQIAIHYAISGLRAGVLYSHCIRDPPKNLQELYQLFEKYARSEELHQRKVESQRKPKDPPQSSQTWTRPSQSDSGRDSRSQHQVHNIANQHPACVDFDTKRQKRDHYRSINHVAVTGPVVQTKWSHMPLTFDARDVDLRSAPHMDAMVINCSVAGWDLHKILVDNGSQADIIFLHAFDRMGISHNLLKPSDNPLYGFGGKGTFPVGKIELPLSFGVAPNARIPLDQAMPKQTVVISEDLTSHDEERLISCLSKNKDVFAWSALDLVGVSRTIIEHSLGINPSVRPKNQRLRKMSDEKTEAAKAEVHRLLEANFIEPVAYPTWLANVVMVQKKSGKWRMCIDFTSLNKACPKDNFPLPRIDKILDSAAGCEVMSLLDCFSGYHQIYMKEKDKTSTSFITPFGTYCFVRMPEGLKNAGSTFSRLTKRVLESQVGRNIFTVYSGVRQGKILGYLVSHRGIEANPTKIQAIINMTPPQSARDVQRLTGRLAALNRFISKSAERSLPFLKTLRDAKDFAWGPEQATAFASLKQHLSELAILTSPNPSLPLLLYVAASPHAVSTALVQEQTREGTTRQCPVYYVSEVLTTSKCNMTELEKIAYAVVMASRKLRHYFEALKVQVTSDRGLDELFRNPEASVRIAKWAAELSGYHITFEPRTAIKSQVLADFIVDWTGPITQPDGPAEKSDRCTNNVAEYEVVILGLRKLRALGVTTCIIKTDSKVVAGQVEKDYAAKDPALMQYLTAVRSLDRQFKGFTLQHVDRAKNEEADALAKAAARSEALPSDVFYHVIGTPAVRSPKGLQITNDTLGHHIVNLIMTEDWRAPITLFLQGYYHPSDINEAKRLKHRSRDFVLIEGQLYKKGRXAWTLSGHYPWPKGTSSSPSSSSSILPSGSRQGXSTITSKTAQKFFWQNIVCRFGVPSELTVDNGKQFDSQDFKDFCFSIGTKLAFASVYHPQSNGVVERANGKIFTAIKKMLLDDKKGKWAHLLPEAVWALNTIECRATGFTPFRLLYGSKAMTPQEIKHGSPRTSTSAVPDVDEPTSKDLIDEDRVFALQALNKYQFXTKAWRDHTVVPREFNEGDLVLVRTARTESRGKLEPKWEGPFIVKTKASPSAYRL

SEQ ID NO: 187875 - protein, 36 aa, Zea mays
  Clone ID: MRT4577_10292C.1.pep
IMLLHNFCDPYSNVQGVLLVLREFAASLNESFRIHT

SEQ ID NO: 187876 - protein, 122 aa, Zea mays
  unsure (1)..(122): unsure at all Xaa locations
  Clone ID: MRT4577_102930C.1.pep
SXXSLAXXXAXLPXXXAAXVVLXXXPFSXXXSPXVLXVWAXLXXXGRAXXSXXLSPXXXXXXLXXVXXSPPVPAXPVCSCWLLFXPLXPLRXSLVVRLAPVLFXRLXXVXXLPRLFXGPLCV

SEQ ID NO: 187877 - protein, 121 aa, Zea mays
  Clone ID: MRT4577_102931C.1.pep
MLSLLQAAEILSKEGISAEVINLRSIRPLDRAAINASVRKTNRLVTVEEGFPQHGIGAEICMSVVEESFEYLDAPVERIAGADVPMPYAANLERMAVPQVDDIVRAAKRACYRAVPMAAAA

SEQ ID NO: 187878 - protein, 257 aa, Zea mays
  unsure (1)..(257): unsure at all Xaa locations
  Clone ID: MRT4577_102932C.1.pep
MPEGLKNAGSTFSRLTKTVLESQVGRNIFTYVDDIVVANKNKVDHLADLAETFANMREARLRLNPEKCVFRVRQGKILGYLVSHHRIEANPTKIQAIINMMPPQSTRDVQRLTGRFISKSAERSLPFLKTLCGAKDFAWGQEQVAAFALLKQHLSELATLTSPDPSLPLLLYVAASPHAVSAALVQEQDREGTTWQCPVYYVSEVLMTSKCNMTELEKIAYAVVMASCKLXHYFEAFKVRVTTDRGLDELFRNPEAS

SEQ ID NO: 187879 - protein, 312 aa, Zea mays
  Clone ID: MRT4577_102933C.1.pep
QRKVYAARTLLFLDGEDSSMLRPLAIELSSPHPEKEQLGAVSTVYTPPDSGDDGITAGRFSTWELAKVYASANDAAENNFVTHWLNTHASMEPIVIAANRQLSVLHPIHRLLKPHFRKTLHINAVARQIIVGSGDQRKDGSVFRGIDEVTYFPSKYNMEMSSKAYKAWNFTDLALPNDLIKRGLAKGDPKKPETLELAIKDYPYAVDGLDMWAAIKKWVADYCAIYYADDGAVARDSELQGWWSEVRNVGHGDLADAPWWPAMDCVADLVETCATVVWLSSASGGRPRRWRSSGRGWRRSRATSTGGTRTLR

SEQ ID NO: 187880 - protein, 57 aa, Zea mays
  Clone ID: MRT4577_102934C.1.pep
GRRSHRRFSRGTATAAGPAHQEPQPPEAEGDPRGQAPTRLRAGQGAPDDTRRGAEGL

SEQ ID NO: 187881 - protein, 892 aa, Zea mays
  Clone ID: MRT4577_102935C.1.pep
MMQQLRHSQPSPCLCGLRAARPMLALGAAASRSRPAGKLQPSVCLGLGHVAPAAARGQPRPRAVADSALGASPTSVHVGGKLLLQNFAADSQQRLKLSIQLVSATVADPDGRGVKAEASVLDAVVGSGDSELDVDLIWDEALGAPGAVVVKNHSDFPVYLRLLSVPAGVGGADDEAAAVHFACNGWVYPVDKHPYRLFFTNDACVKEETPSALLKYREDELGALRGDGETTERPFQPWDRVYDYALYNDLGNPDLRQDLARPVLGGSQEYPYPRRTKTGRPAAKTDPRSESRAPLDEEIYVPCDERVGFASIPAPTLPPLGGHFRSLADVYRLFGLDDLGRLPEAKAVINSGAPFPVVPQVISVNPTHWRKDEEFARQMIAGANPVCIKRVTKFPLASELDRGVFGDQDSKITKDHVEKNMGGMTVQQAVEEGRLYVVDHHDWVMPYLKRINELPASEEKAEVSQRKVYAARTLLFLDGEDSSMLRPLAIELSSPHPEKEQLGAVSTVYTPPDSGDDGITAGRFSTWELAKVYASANDAAENNFVTHWLNTHASMEPIVIAANRQLSVLHPIHRLLKPHFRKTLHINAVARQIIVGSGDQRKDGSVFRGIDEVTYFPSKYNMEMSSKAYKAWNFTDLALPNDLIKRGLAKGDPKKPETVELAIKDYPYAVDGLDMWAAIKKWVADYCAIYYADDGAVARDSELQGWWSEVRNVGHGDLADAPWWPAMDCVADLVETCATVVWLSSAYHASISFGQYDYLGFVPNGPSITTRPVPGPDAGAEVTESDFLASVTPVTEALGFMSIASGPMGLKGTEVYLGQRPDTEQWTRERRAAEALAEFRARLEEVAGNIDRRNADPALKNRTGQVEVPYTLLKPTAQPGLVLRGIPNSITV

SEQ ID NO: 187882 - protein, 876 aa, Zea mays
  unsure (1)..(876): unsure at all Xaa locations
  Clone ID: MRT4577_102936C.1.pep
HTTRLETCITSVRCSLPLQACVKEETPSALLKYREDELGALRGDGETTERPFQPWDRVYDYALYNDLGNPDLRQDLARPVLGGSQEYPYPRRTKTGRPAAKTXVPVHDLRFPKTFRSSEPPQQGRISLARSLALSLXPRRASSDPRSESRAPLDEEIYVPCDERVGFASIPAPTLPPLGGHFRSLADVYRLFGLDDLGRLPEAKAVINSGAPFPVVPQVISXDSNNAWCDVLKGKERKKKRTVCLYLSVCLVQXNPTHWRKDEEFARQMIAGANPVCIKRVTKFPLASELDRGVFGDQDSKITKDHVEKNMGGMTVQQVCRTTGTFFKLLVPRRSFRQNDACWEICSSFSFFCLNSTRPWIDXQAVEEGRLYVVDHHDWVMPYLKRINELPASEEKAEVSQRKVYAARTLLFLDGEDSSMLRPLAIELSSPHPEKEQLGAVSTVYTPPDSGDDGITAGRFSTWELAKVYASANDAAENNFVTHWXYVHSFVRRDKTRSMCVSVCXLNTHASMEPIVIAANRQLSVLHPIHRLLKPHFRKTLHINAVARQIIVGSGDQRKDGSVFRGIDEVTYFPSKYNMEMSSKAYKAWNFTDLALPNDLIKXIPVLDTKRNDMYSFTYHSNSMLYMTNRGLAKGDPKKPETVELAIKDYPYAVDGLDMWAAIKKWVADYCAIYYADDGAVARDSELQGWWSEVRNVGHGDLADAPWWPAMDCVADLVETCATVVWLSSAYHASISFGQYDYLGFVPNGPSITTRPVPGPDAGAEVTESDFLASVTPVTEALGFMSIASGPMGLKGTEVYLGQRPDTEQWTRERRAAEALAEFRARLEEVAGNIDRRNADPALKNRTGQVEVPYTLLKPTAQPGLVLRGIPNSITV

SEQ ID NO: 187883 - protein, 35 aa, Zea mays
  Clone ID: MRT4577_102937C.1.pep
KGQFFGSKKKKKKKKKKKKKKKKKKKKKKKKKKKK

SEQ ID NO: 187884 - protein, 91 aa, Zea mays
  Clone ID: MRT4577_102938C.1.pep
GGTYLPGFLGGFSPGVVLCCPALNGPSAFFYVAPFNAGPPFGGAPPKWLSLFFCPKHFPFFFFPRQVGSCAPPAGGAPPMWLLRFFLLGVF

SEQ ID NO: 187885 - protein, 61 aa, Zea mays
  Clone ID: MRT4577_102939C.1.pep
LSAHALSQSNPVDVNYISYLGLSVFHDPSVMDQDHGLYIIYVIYRLKLPDVVISADIQGHV

SEQ ID NO: 187886 - protein, 69 aa, Zea mays
  Clone ID: MRT4577_10293C.1.pep
VECLRLPHQCRSLLLDQSTLLVLRSCNAGICASPAFVSLLPIVRPYLMGSELINAVRLVSLRCCLSSQC

SEQ ID NO: 187887 - protein, 88 aa, Zea mays
  Clone ID: MRT4577_102940C.1.pep
MWATSPSAPKVVPPPPPAAAAETAPPGSHAPVGGPAAAVPTPSGTVAVEGVPTTPTATAAPTTAMPSSTPSAAAEEAPTAPGPAVEYR

SEQ ID NO: 187888 - protein, 82 aa, Zea mays
  Clone ID: MRT4577_102941C.1.pep
NTPYSSWLCRYRSPDCIGCSIRSHCPWCGLCCRLCITSRKLIAHVPPSTGARPCGLNGSLLKQTPPRACAASPPLMSRRQLN

SEQ ID NO: 187889 - protein, 89 aa, Zea mays
  Clone ID: MRT4577_102942C.1.pep
SARGPSLCFVTGAAMLARPLLLPDLPVEDEVFTAEGREMSYMQGVLLTMMLNLLNGLPRPEPRWLMVLELAPTVTFCCPQGKSKNAGAF

SEQ ID NO: 187890 - protein, 58 aa, Zea mays
  Clone ID: MRT4577_102943C.1.pep
SPGVRPRPAPVFTDSVFGGCGELVFPGMHVVAPSGLSVYIFYGTLTSFCLGRGREFDL

SEQ ID NO: 187891 - protein, 132 aa, Zea mays
  unsure (1)..(132): unsure at all Xaa locations
  Clone ID: MRT4577_102944C.1.pep
GPGGLSPHAESLRHPQCSPLAAAPXYAGCGHPSPMFHPLRPQXSPPQMRMMXVQSVAQQLQMMMQLEGAXPPSSSLYDPPLMQQPQQLLAAQGLPPMPMMMAQHTRPMGGLSQSQVPRSRPTPCGVSGPIPP

SEQ ID NO: 187892 - protein, 73 aa, Zea mays
  unsure (1)..(73): unsure at all Xaa locations
  Clone ID: MRT4577_102945C.1.pep
CQRRGVVAGAHRHXNGRHLLVTVVVVVKSMAVDRQRATGRPPTAAGVSCACLTCVWCVDVXXSRDWRRRLRAA

SEQ ID NO: 187893 - protein, 45 aa, Zea mays
  Clone ID: MRT4577_102946C.1.pep
LWYQPADACLVRCGLEYRLHSIGRTSFSPCAKVGRQEAPVQASLS

SEQ ID NO: 187894 - protein, 57 aa, Zea mays
  unsure (1)..(57): unsure at all Xaa locations
  Clone ID: MRT4577_102947C.1.pep
RPGSPSEPKPSSAGPARSVHPPPLSLTXPGPLVSARPPMRAPSAADLILAVGFRSDG

SEQ ID NO: 187895 - protein, 53 aa, Zea mays
  Clone ID: MRT4577_102948C.1.pep
YVFHLGHSVRFVNIERNGVNYHQHLSTDKVLFTLKRWTVTFIDRHLMPRSCFT

SEQ ID NO: 187896 - protein, 243 aa, Zea mays
  Clone ID: MRT4577_102949C.1.pep
KPGKPCDKVPLSQIPDVSKEIAVDEAREQAVVHSLRVQESHTLSVQEKKHCEKDSGKMLAHLVRSKSSDADNLSQCSSAFQCERAGSSYSGDEGSSGNARRQYSQTVSASPLVGLPEFSHLGWGHWFTLRDLEHATNRFSKENVIGEGGYGVVYRGRLINGTDVAIKKLLNNMGQAEKEFRVEVEAIGHVRHKNLVRLLGYCVEGIHRMLVYEYVNNGNLEQWLHGAMRQHGVLTWEARMKII

SEQ ID NO: 187897 - protein, 68 aa, Zea mays
  unsure (1)..(68): unsure at all Xaa locations
  Clone ID: MRT4577_10294C.1.pep
QPGLCADLYLLVWSSSIFFSSPFRVCTETAERFAVFNLSIFVCYCXXKIKNKKTQKLWGGGRKKPNKG

SEQ ID NO: 187898 - protein, 68 aa, Zea mays
  Clone ID: MRT4577_102950C.1.pep
TCGEYIIIVRRPYPPLYQYKPTLVDVLLFILIRFHIHVPLLPEKGCDSSYQIKTPATKNYIFFIKKNK

SEQ ID NO: 187899 - protein, 110 aa, Zea mays
  unsure (1)..(110): unsure at all Xaa locations
  Clone ID: MRT4577_102952C.1.pep
ILEPWVTLFHLHLVVWAERETQSSSTIQPCACDEMSGMASVCVSSNIFFLTSQGFLRVRRRNLFLTPQNFLPIRRFGTFFYSTVFLQKKKVHSGQQQPSTFMHQPFXGLF

SEQ ID NO: 187900 - protein, 83 aa, Zea mays
  Clone ID: MRT4577_102953C.1.pep
HKLKGNLNFSISLSITLRFTLPTFRRRELKPYTTTISSDENDKPKESLSEPHNIKILSNNDILTAYYSLTVHNIDRDICILTK

SEQ ID NO: 187901 - protein, 56 aa, Zea mays
  Clone ID: MRT4577_102954C.1.pep
LKLLLAELITCVQALFREGFVSSSNTVIVIYSAENCSCPNKTTFYSTFQDLQEPRS

SEQ ID NO: 187902 - protein, 153 aa, Zea mays
  unsure (1)..(153): unsure at all Xaa locations
  Clone ID: MRT4577_102955C.1.pep
NGALLFFFLKNIFFYFPRKSNPPVRQHMRWHADTPDIAATATRFMMRRVAIGKREELLTRPERPPNGPLREWNLRSAKCHGAVRTGLDPGTEQSPLPYLSTGAGTGSSRADLRRLLALERVAEPDFRELGVPSSPXVNHPGGPDGRPGLISCP

SEQ ID NO: 187903 - protein, 89 aa, Zea mays
  Clone ID: MRT4577_102956C.1.pep
VYTVFSATDPKGNARESHVPVLGPLPIGFAVFMVHLAPIPVSEENAIIHRSTWVPVVGSGRLFFVSAAFALGGWVKIGLVLFPCNVIML

SEQ ID NO: 187904 - protein, 581 aa, Zea mays
  Clone ID: MRT4577_102957C.1.pep
RGKHYPSILGVREHVFTGSVSSLASFMSNQETSFVTLGQRVLANPLKVRMHYGHPDVFDRIFHITRGGISKASRSINISEDIYAGFNSTLRQGCITHHEYIQVGKGRDVGLNQIALFEGKVAGGNGEQVLSRDIYRLGQLFDFFRMLSFYVTTVGFYFCTMLTVLTVYIFLYGKMYLALSGVGESIQNRADILQNAALNAALNTQFLFQIGVFTAVPMILGFILESGVLTAFVQFITMQFQMCSVFFTFSLGTRTHYFGRAILHGGAKYRATGRGFVVRHIKFAENYRIYSRSHFVKGMEVALLLVIFLAYGFNNGGAVGYILLSISSWIMALSWLFAPYLFNPSGFEWQKIVEDFRDWTNWLFYRGGIGVKGEESWEAWWEEELQHIYSIRGRILETILSLRFFIFQFGVVYHMNASGGSTALLVYWISWAVLGGLFILLLVFGLNPKAMVHFQLFLRLVKSVALLMVLAALVLAILFTKLSVRDVFASILAFVPTGWGIISIAMAWKPVVKKLGLWKTVRALARLYDAGMGMVIFIPIAICSWFPFISTFQTRLLFNQAFSRGLEISLILAGNNPNAGI

SEQ ID NO: 187905 - protein, 31 aa, Zea mays
  Clone ID: MRT4577_102958C.1.pep
PHFAESRPTRGCLGLNRGWQDTETGSPPCYD

SEQ ID NO: 187906 - protein, 108 aa, Zea mays
  Clone ID: MRT4577_102959C.1.pep
MAPRSRRLHHILFLPCRERLIAARWLSMHALISTYACVGMLLRSIFRPTSFPESYSVERGLYECGVGLSPLESSAEVPMALAEEDRSRSGVGRIRLGASSFVYRLSYW

SEQ ID NO: 187907 - protein, 74 aa, Zea mays
  Clone ID: MRT4577_10295C.1.pep
FGSSRHQLLAFRRGGDRNIGPEHQHQCLEPAQPVEEIIVLITKDVQSYDDPALTGRSIMIRIHGQILLLIEANI

SEQ ID NO: 187908 - protein, 37 aa, Zea mays
  Clone ID: MRT4577_102960C.1.pep
IGSTASPNIMALTTSTATITSTRYMNESAKYFETVQR

SEQ ID NO: 187909 - protein, 49 aa, Zea mays
  Clone ID: MRT4577_102961C.1.pep
LRRSSNSLSGTFCDACSTNELPLPSSIKLERVCNPCHKHLMKQYSTSPS

SEQ ID NO: 187910 - protein, 74 aa, Zea mays
  Clone ID: MRT4577_102962C.1.pep
SARGFFPLPFLSTHTSTLPRGGNKYLRGGTRQMRPPRKNIPTSCGNCGLTIIVNKVETAPLQFQKPLYYKIICL

SEQ ID NO: 187911 - protein, 69 aa, Zea mays
  Clone ID: MRT4577_102963C.1.pep
RTLGIRLARGCDHLLQNLHTVSEGGLYIMTLWSTNSRASDFQFHLHLEVKKKKIKKGRPSTSELTNPAI

SEQ ID NO: 187912 - protein, 307 aa, Zea mays
  unsure (1)..(307): unsure at all Xaa locations
  Clone ID: MRT4577_102964C.1.pep
MASDRQALSVPAVPVPPNPNPTAPADLTPPSASAARKLPIKRRSPRPSSSPPSSSSPASSDPLRAPAPXGGGSDQQQPPFKFQRIWSESDELRFLQGLLGCGTQGLVFPRDLNVFYDRFSESMPQPYTRAQLSEKLRRLKNKFRSMSARVAGGIDPARLAPHDRDVLHLCSRLWDPANAATSPFAASAGTSGNKRRRSNPRGTPLPPPDASGDSNSHDYNGISSSAPGLFPDGSNGEVTFYLEQESGQLGNHEGAALVADSKFDVVVQEQPEGVVTLPNGNNGIGSEMSAECKTVVPCSNEHRMANA

SEQ ID NO: 187913 - protein, 37 aa, Zea mays
  Clone ID: MRT4577_102965C.1.pep
KFGPPSQILGMYTEIIGNSTHFLESPSILSWIKFISI

SEQ ID NO: 187914 - protein, 86 aa, Zea mays
  unsure (1)..(86): unsure at all Xaa locations
  Clone ID: MRT4577_102966C.1.pep
DPKREPHPRAGRGGPANAXTKDRQREGGAGDRARQEKRARGEQPPPPPRFXXWKSSFLFPPPPRHQPKNFIIELQLISNLKEGIGQ

SEQ ID NO: 187915 - protein, 111 aa, Zea mays
  Clone ID: MRT4577_102967C.1.pep
SPEPTAPRRGEASHQAHLVALFTHRDACCNSCVDGCFRTCWQLCPLVVAPSVGLFTRHSSRALVNVVVSWGTSVSTSPFSSHRSSPPAWEIECLLKDFPSACLLPVCRTTD

SEQ ID NO: 187916 - protein, 80 aa, Zea mays
  Clone ID: MRT4577_102968C.1.pep
PHRSPSRAYKINHRARDEHDSQVGKQGANNKKQELGDEPDAKAPEPRGQLHVLGGRAGLAQATVTEELPGHALHMRGESQ

SEQ ID NO: 187917 - protein, 191 aa, Zea mays
  Clone ID: MRT4577_102969C.1.pep
IGYLEAGLKNSASTRNQSSLDLSSEETRMLKQALEFNWLMLLEDIGLWIPDEVTHTVHDDKPENEPEEEEIVAGPPLSPQCNAELHTDYDGAAVRWGLTHHKESAADCCQACLDQAKNAKPGELKCNIWVYCPSEFGCFSPDKYEHKHQECWLKQADHPKLNFKDKYSEPYRDAHPTAPVVVPWMSGVIGA

SEQ ID NO: 187918 - protein, 110 aa, Zea mays
  Clone ID: MRT4577_10296C.1.pep
SFIASSIDFHSAALAVITPALALLVEYNRSIHMGLSICGSLVEPVEDQSFSLLVLSGKVFSLSSRLLVIHHTRRCLGFRSDSDGRVSSSSLTGQSAGSIACTHGRPRGSQ

SEQ ID NO: 187919 - protein, 129 aa, Zea mays
  Clone ID: MRT4577_102970C.1.pep
MAQPLPCIVPGRFCYASVDASDDLHGNSIFLNGIDLRFRVEVTEIGDYCDMLEGRQTWEVAVMTVEHGVVDQQRTESLHPAKREHRFLGLGWRKQPTNVIGRRGGGVCSRGPSGGGAGHGQRSEERRQP

SEQ ID NO: 187920 - protein, 64 aa, Zea mays
  Clone ID: MRT4577_102971C.1.pep
GKGGKWTPNPLGHSLTARPILVNAALLLIQLFRWACPPCFLEVKGFWGEVRSNGGGLREKFPHL

SEQ ID NO: 187921 - protein, 68 aa, Zea mays
  Clone ID: MRT4577_102972C.1.pep
LHEHVWVVCLFHQGRVFMDVCSALIATVWEILCVLGVGCGVQLVCVLPCRLVFRCLPLGKIKNFGRVG

SEQ ID NO: 187922 - protein, 95 aa, Zea mays
  unsure (1)..(95): unsure at all Xaa locations
  Clone ID: MRT4577_102974C.1.pep
AIGTTRVPYRTHGEGTWHWLDXLWNAVNRERLISIDDIVDXKXTNQGPASMLYLDSIDXSNRXVLYINGPYXNVTWCIGLCDTMLTIKRSIGTHC

SEQ ID NO: 187923 - protein, 125 aa, Zea mays
  Clone ID: MRT4577_102975C.1.pep
MYLVATKAKLRTKAQHKKIVFTLFLCAVLLWLLTAACIKTGRPQMAKRAIELAESRLLKDGWPEYYDGKLGRFVGKQARKFQTWSIAGYLVARMMLEDPSTLMMISMEEDRPVKPTMRRSASWNA

SEQ ID NO: 187924 - protein, 90 aa, Zea mays
  Clone ID: MRT4577_102976C.1.pep
LPRQRGYQFFTGPGGEAKLKQAGPLPQGAARETPDRQTHVVKTQKNPHIDLNIKPGPKRTGSTGGASPSESREDVQTNPRKPRRGASDHG

SEQ ID NO: 187925 - protein, 71 aa, Zea mays
  unsure (1)..(71): unsure at all Xaa locations
  Clone ID: MRT4577_102977C.1.pep
VVLRVRRHTTQTATRWVRPQVYPVFAAWGVAVGMSGFQLVRNISGNPEXRVNKAGRAPGVRENHDEGRRYA

SEQ ID NO: 187926 - protein, 162 aa, Zea mays
  unsure (1)..(162): unsure at all Xaa locations
  Clone ID: MRT4577_102978C.1.pep
MLQRYRAATQAIHQRLLGLDRELYCRRDHYYSDAHYGGGGIVTPXGLLXADPHRMWHANIQGNGSGQTLPLQPTTKSVXTANHNYAMNGPDDNVGHHPLNRKDEDQHXVKDMPCSSQHSGRLXYASLPLGNKVTGDGIEHSLXQNHPVRHDDYEPYISERVT

SEQ ID NO: 187927 - protein, 59 aa, Zea mays
  Clone ID: MRT4577_102979C.1.pep
IKFVSLVICSSLTLSLCDKDVVLVHGTRPNCKRHSCYYMTQVGPRHFGFSFFTRLTLFT

SEQ ID NO: 187928 - protein, 100 aa, Zea mays
  unsure (1)..(100): unsure at all Xaa locations
  Clone ID: MRT4577_10297C.1.pep
MTAKRFGLLMILGRIASTVTXTIFPQCSHAPIPSYLTLYQSTAEYSECENPIXLKPYQIQHAITIRILPISRLLMQQPINLLQLLPLVHXLTQNIKAQQL

SEQ ID NO: 187929 - protein, 661 aa, Zea mays
  unsure (1)..(661): unsure at all Xaa locations
  Clone ID: MRT4577_102980C.1.pep
MAADHGEGVGRCILVGLHMDAVGRDLLQWALHQEARRGDRIVAVHIYRKSDKTNTLKLIRTLDDYLAEYEALCNQKQVVLVGRVTPGSSIQKELVKEAKLCAAMVVVLGANKKYSFGGSSCLAKYCAKKLPPTTTVVAIQDGKAVFVREAXPGRHLEQSQSRXLRTVLHPSVGLEPKVIIPNPNRRARSMSMDLDAPCCGHGAADAPASRCLDDATKGDGGVAPEQRLGWPLLRRAHAAAASAAPVQTPGGKNHEPRKQSVVHWVMSLPRRSAPSESAEPHAGAGLESELKAMLGGSGARCRWFRYEELYDSTNHFSAENLIGNGGNSRVYRGSLACGRQVAIKLCKASVEASKDFLREVDIITKLQHHRIVPLIGVCVEGRNLISVYRYLPRGSLEDNLHGERSKPALSWENRYKAALGIAEALSYLHSGSSRPVIHRDVKSSNILLTEEFEPQLSDFGLAIWAPTNPTSLTHSDVVGTFGYLAPEYFMYGKVTDRVDVYALGVVLLELLSGRKSISSDGSSPKGQESLVMWATPVLSSGNICDLLDPRLDVKHDEVEVRRMASAASLCLRRGARLRPPISQILSILRGESAASIADQGATEPDCVDDEAXPAANVRSHLGLALLDVEDSESISSTEHSSGLSPLEEYLRERWSRSSSFD

SEQ ID NO: 187930 - protein, 113 aa, Zea mays
  Clone ID: MRT4577_102981C.1.pep
SCVRSPHPYPEEPLDALRGPMFTAIATVIGAVILTACLLGRVMLRLTLPTLSRALSRTETRTENGTENGIEDAIDAIAVAMVGLRLELTLIPESVDESGEEIGEKSSVTRAAY

SEQ ID NO: 187931 - protein, 69 aa, Zea mays
  Clone ID: MRT4577_102982C.1.pep
RVANRWVASWCAGAEPKPVLRTVLHPSVGLEPKVIIPNPKRRARSMSMDLDAPCCGHGAADAPEAGAWT

SEQ ID NO: 187932 - protein, 59 aa, Zea mays
  Clone ID: MRT4577_102983C.1.pep
KNKKKGKKKKKLKKKKKKKKKKKKKKKPVMGKKKTPKIKNFLKKFNFFSKKQKKKNPLL

SEQ ID NO: 187933 - protein, 268 aa, Zea mays
  Clone ID: MRT4577_102984C.1.pep
IRHEVWSAGERSKPALSWENRYKAALGIAEALSYLHSGSSRPVIHRDVKSSNILLTEEFEPQLSDFGLAIWAPTNPTSLTHSDVVGTFGYLAPEYFMYGKVTDRVDVYALGVVLLELLSGRKSISSDGSSPKGQESLVMWATPVLSSGNICDLLDPRLDVKHDEVEVRRMASAASLCLRRSARLRPPISQILSILRGESAASIADQGATEPDCVDDEAYPAANVRSHLGLALLDVEDSESISSTEHSSGLSPLEEYLRERWSRSSSFD

SEQ ID NO: 187934 - protein, 48 aa, Zea mays
  Clone ID: MRT4577_102985C.1.pep
SMSYDAACTSSVSLCSVVARSPFFFFFFKHKHVKCLYSCSSKYKVLHL

SEQ ID NO: 187935 - protein, 79 aa, Zea mays
  Clone ID: MRT4577_102986C.1.pep
GSNCAGRRRTSAAALVLGRAALRLMKLDLSLLSRRLTGAGAVPLPRLILLRPAAASPPYRLSRDAIVLASRFPYLSPAA

SEQ ID NO: 187936 - protein, 80 aa, Zea mays
  Clone ID: MRT4577_102987C.1.pep
PGGGEWNIIPQLKKRSHCPRGNVCCLLNNSRLHHAANSSEESPCCVKEELRETRDDPLSEMQTIISLITCWKTRRSCTKD

SEQ ID NO: 187937 - protein, 88 aa, Zea mays
  Clone ID: MRT4577_102988C.1.pep
LNEYIIQEHLWTIVFVHTESTKSIICLTQKLHILSSSNPYTYFILAEDTISNHLQTYLLNAIHNVHAYLYRLPLIIHWYPIYIQTHMI

SEQ ID NO: 187938 - protein, 81 aa, Zea mays
  Clone ID: MRT4577_102989C.1.pep
DYAERERMQHIRGFITTAVHMDIPVMLEKSLKKEISSVGPAVARTTAPIIEKTLSSAVSDHSRKFLVTRLRNNWTKPLSTK

SEQ ID NO: 187939 - protein, 161 aa, Zea mays
  Clone ID: MRT4577_10298C.1.pep
ALLSDEIFQPKVIWSLADVQATCGTLGLSTATVKLIGPDGEERIACSVGTGPVDAAYKAVDQIIQIPTVLREYGMTSVTEGIDAIATTRVVVTGDVANNSKHALTGHSFNRSFSGSGAAMDIVVSSVRAYLSALNKMCSFAGAARASSTEVPGSASVQRAE

SEQ ID NO: 187940 - protein, 158 aa, Zea mays
  Clone ID: MRT4577_102990C.1.pep
SGVNIHIFPGGPQFKPRRVSLGENLRGVCPNRGLIPGLGIARGPPKKKFGITLIQGIFSIGRWGGKTMPLGWVPTGSPPLKPIGGGENYFIFWKGEPSQVTPLGGFHHNPGRHYLDLWHGLVHSQQLGTQMGGPFELSLKKPYLGGFFFWLERGGTNP

SEQ ID NO: 187941 - protein, 68 aa, Zea mays
  unsure (1)..(68): unsure at all Xaa locations
  Clone ID: MRT4577_102991C.1.pep
XXXRXXALXXYXYSSXIXNXRSIDSNMXXISKXSQPRTSXPLINLIGELXIVIATXLLIEPLYHPYSN

SEQ ID NO: 187942 - protein, 65 aa, Zea mays
  Clone ID: MRT4577_102992C.1.pep
KQRGFLNLPACMQGCIQTQEGSAWPLWLKRQKTGSQRGGGPFGIPGRGGQSFKTPFLNQGQGPLC

SEQ ID NO: 187943 - protein, 363 aa, Zea mays
  unsure (1)..(363): unsure at all Xaa locations
  Clone ID: MRT4577_102993C.1.pep
SPSEDYWRKSKLPHATIFKPQHPYARRVPETFKEFPVPALALVDVLLSVDPADRGTASSALQSEFFTTKPHACNPSSLPRYPPSKEFDAKRREEEARRQGVTGGKQHKHDPERRTRESRAVPAPEANAELVSSLQKRQAQANTRSRSEMFNPCKEDSASGFRIEPPRPTPVTESSEDPQRAYPTRIFHSGPLVNQSQPSKAGGGKNGEPQVPGVANHPVVLSTRSGPRADDSGRTMVAQAEAFTHGRRLSESINEHFSNSGKYDQVFXEEDDRNIRADGAIGYGSKGSKIHHSGPLTCPSGSNVDEMLKENDRQIQEVFRRTRVEKSRARRDHGHHQGGIRPGDFGAIPVFPSSRSSYQAVQQ

SEQ ID NO: 187944 - protein, 95 aa, Zea mays
  unsure (1)..(95): unsure at all Xaa locations
  Clone ID: MRT4577_102994C.1.pep
AEQEAPSWGGGIRHNKDRXFGAREPKSQDIYPRLLVKLYRFLARRTNSTFNQVVLKRLFMSRTKRPPLSLSRMIRKMKLPGRENKTARGVGTITD

SEQ ID NO: 187945 - protein, 726 aa, Zea mays
  unsure (1)..(726): unsure at all Xaa locations
  Clone ID: MRT4577_102995C.1.pep
MGCVCGRPSSFEDGQCRATPPPAAKLSAAVRREEEARKQQLQLQQHARAGSGREEALERRRAMMAMAAACQVRSPVPRAVEAEQVAVGWPPWLVAVAPEAVRGWVPRRAESFEKLDKIGQGTYSNVYRARDLEKEKIVALKKVRFDNLEPESVKFMAREILILRRLDHPNVIKLEGLVTSRMSCSLYLVFEYMEHDLAGLASFRGVKFTESQVKCYMQQLLRGLEHCHSRHILHRDIKGSNLLIDNRGILKIADFGLASFFDPEQRQPLTSRVVTLWYRPPELLLGATNYGVAVDLWSAGCILAELYAGKPIMPGRTEVEQLHKIFKLCGSPSEDYWRKSKLPHATIFKPQHPYARRVAETFKEFPAPTLALXEXQQSKKPADRHTAMPAFDFFXTNHSHTLFRQGVTGGKQHKHDPERRTRESRAVPAPDANAELVSSLQVILHLLTVDTSFIFSFGDAHVLLVFLSFQTIHNLCCLLYEYLXXKRQAQANTRSRSEMFNPCKEDSASGFRIEPPQPTPVTESSEDPQRAYPTRIFHSGPLVNQSQPSKAGGGKNGEPQVPGVANHPVVLLTRSGPRADGSGQTMVAQAEAFAHGRRLSESINEHFSNSGKYDQVFPKKDDRNXRADGAIVSNVLPFSGSXKQGYGSKGNKIHHSGPLTCPSGSVVDEMLKENDRQIQEVFRRTRVEKSRARRDHGHHQGGMRPADFGAIPVFPSSRSSYQAVQQ

SEQ ID NO: 187946 - protein, 157 aa, Zea mays
  Clone ID: MRT4577_102996C.1.pep
RRATRYPERQPQPQPQQHHQNNQQQHHHQSNHQQQHHQNHHQQQQQQQQQWLRRNQITAAGTSGPKVVAPPPAAVGNDPSSQDWKAQLKLPPADTRFRTEDVTATKGNEFEDYFLKRELLMGIYEKGFEKPSPIQEESIPIALTGRDILARAKNGTG

SEQ ID NO: 187947 - protein, 55 aa, Zea mays
  Clone ID: MRT4577_102997C.1.pep
GPPPPGSWRRLMICSPAGSRAARNMHPGSVERRPLSYRTGCRRTSAATRTAASSR

SEQ ID NO: 187948 - protein, 64 aa, Zea mays
  Clone ID: MRT4577_102998C.1.pep
VEVVVTAQVIVHQRGVSLCRRPFFPSSSSCCWPSGGKPQVLFWWFPIVSLSDCGHPQMQLNDPN

SEQ ID NO: 187949 - protein, 41 aa, Zea mays
  Clone ID: MRT4577_102999C.1.pep
WLSFSERERSRKMRYKFICYQNKKDKSGWWSRLLTKDLRSC

SEQ ID NO: 187950 - protein, 191 aa, Zea mays
  Clone ID: MRT4577_10299C.1.pep
FISTSNTRPCRVPPPPPGRPLLNPATTLSEPSPGDQPWPSPLNPTAPAPPPPNPPPPSPTSLHPPPSPSAPPPAPRAPPMASLPPAWAAARRPPAPFASALGPSASARRSSSRGGALKTCRTASTTPGDDRSGCHRIRGQQLQTRLDMPLFQPLAQRERGGNGHRRVQRQSLPECPEQDVQLRWRCESQQH

SEQ ID NO: 187951 - protein, 470 aa, Zea mays
  Clone ID: MRT4577_1029C.1.pep
MATAAAARHVVAVPYPGRGHVNPMLVVCRLLAAADAALSVTVVVTEEWHALLAAAGVPGTLPDRVRLATIPNVIPSERVRGADFAGFVEAVHIKMVAPVERLLDRLSLERKPDAIVADTFLAWGVGVGSARGIPVCSLWTQPATFFLALWHLDRWPPVDGHQGEEGLSCRSLDQYLPFPALAPVKCSDMKTLRSMVLPMKRLAQVFSNLRKAQCVLFTSFYELETGAIDGTSQVVPCPIYAVGPSIPYMPLEGDSGEFHHEEDYFGWLDAQPRSSVLYVSFGTHVSMPSSQLEEVALGLHESTVRFFWVARDRASTATLEQISAGGKGLVVPWCDQLKVLCHPSVGGFLSHCGWNSTLEAVFAGVPMLAFPVAWDQLVIGHLVADEWKIGVDLRERRREDGVVGRAAICDTVTKLMDLTDDDSLEMRRRAAELREASRRAVQEGGSSRCSLNSFVRDVIEGRLNVAETSR

SEQ ID NO: 187952 - protein, 60 aa, Zea mays
  unsure (1)..(60): unsure at all Xaa locations
  Clone ID: MRT4577_102C.1.pep
SPEMPLQQEVRVGSCPVFSSSLSISCINYLSYHHSDHFGIVISLHYYRVXLSFWNPHAHI

SEQ ID NO: 187953 - protein, 51 aa, Zea mays
  Clone ID: MRT4577_103000C.1.pep
DAQNTPRTQNLLSSECLSNLHNHQLLDELTHFLFDRNLFHNLVTTFDLLFQ

SEQ ID NO: 187954 - protein, 83 aa, Zea mays
  Clone ID: MRT4577_103001C.1.pep
TEAINGLATCLICGRKLADVRPAARSIRKPRAVAGVAKYGDKSVYFDLIDIFNTTGQWDLYGSDAPSPYNPLLSKFFRDGPRL

SEQ ID NO: 187955 - protein, 73 aa, Zea mays
  unsure (1)..(73): unsure at all Xaa locations
  Clone ID: MRT4577_103002C.1.pep
XXXFFXXXXXXXXXXXFXXXGPKPPRGFFFGSQSLERRPPGFLGGGRILQQQGGGGTHWSKRNKTPNQSGLWR

SEQ ID NO: 187956 - protein, 128 aa, Zea mays
  unsure (1)..(128): unsure at all Xaa locations
  Clone ID: MRT4577_103003C.1.pep
MDLQPKKKGGGDILSFKTKKKGTVWQKKKKKRVRGTKKKAKNYRKVPRNQRPNFWKSQLMETKXKLKNFKTKGNSXSEKNKNRIPKRKKEKYMCXRTKVPWDPRHKTTKSLRGKNEKKKKKNKKTKKG

SEQ ID NO: 187957 - protein, 414 aa, Zea mays
  Clone ID: MRT4577_103004C.1.pep
MATKEEASAVPAASKTSWSSFLKSIASFNGDLSSLTAPPFILSTTSLTEYSAYWCEHPALFVAPAREPDPAKRALLVLKWFLSTLHQQYCSRSEKLGSEKKPLNPFLGELFLGKWIEDEDVGETRLISEQVSHHPPATAYSIVNEKHGVELQGYNAQKASFSSTIQVKQLGHAYLSLTPPGKDANNEDDREHYLITLPNLHIESLIYGTPFVELEKSCKIASSTGYISKIDFSGKGWLSGKKNTFSAVLYKESDGEKNPLYTADGQWSSSFTIRDARAKKDIETFTISNLKTTPLTVAPLDEQDEWETRRAWRDVAAAIERGDMEATSNAKTKIEVAQRELRKKEKEQGEEWERRFFKRVNEKDEPTFMRLAAMLDLTQGIESDRTGGVWRFDPSRAVDANPPYHKVGGEGLGL

SEQ ID NO: 187958 - protein, 59 aa, Zea mays
  unsure (1)..(59): unsure at all Xaa locations
  Clone ID: MRT4577_103005C.1.pep
VKIAAPDQNRALEFKSKXTTXIVHFFIVNRPHPGGRLXHXKEKNXXXXLFFFFFPXHLS

SEQ ID NO: 187959 - protein, 85 aa, Zea mays
  unsure (1)..(85): unsure at all Xaa locations
  Clone ID: MRT4577_103006C.1.pep
AAASSLCWAAGRASGPSPSSASGSXVWXCRPSASSSSRGRAGRGGPLAAXLVLVVAVRRGRARLPAALQTLLMVXLPQPXVLLPP

SEQ ID NO: 187960 - protein, 135 aa, Zea mays
  unsure (1)..(135): unsure at all Xaa locations
  Clone ID: MRT4577_103007C.1.pep
NYMMEGLKTPCDMKNTLSEARTTEAGLDKXKNNGKTTKGPVLQSLQTISRRSXIAPVASKRTEHTAVKIEMLGQXQLYFDRXNLYDFTXEEQETDIAGEMNERKTHALELXSVEKQYEDYNGTNASIRNIGEGDN

SEQ ID NO: 187961 - protein, 141 aa, Zea mays
  Clone ID: MRT4577_103008C.1.pep
YLQISVFACKFPDLNTYKSCDLLPSSWISVAWYPIYRIPTGPTLQDLDACFLTFHSLSTTPDGTISGCPETNNLHNSKVASVPGKITLPLIGLASYKLNGSLWTSNQHHEQQLTTSLLKAADDWLCQRQVDHPDYRFFLTH

SEQ ID NO: 187962 - protein, 229 aa, Zea mays
  Clone ID: MRT4577_103009C.1.pep
RKTDSSPQYTEFQKSTVVWEFLKGRILPGIAALDKCYPYRIPWSTVFCEPTLPLVVDIGSGNGLFLFQMAKSCESSNFLGFEMNEKLVIRCLQGMASDEKRNLYFVSTNATSTFRSIVSSYPGRLTLVTIQCPNPDFNKEQNRWRMVRRMLIEAIVDLLHTNGQVYLQSDVESVLLVMKEQFLSYSKGQLVTDGDGGNCIDNPFGVVSDWERHVLARGAPMYRAMLKKM

SEQ ID NO: 187963 - protein, 70 aa, Zea mays
  Clone ID: MRT4577_10300C.1.pep
MVMYSVSSMIVPSLLSNTSDSWPKSSGGSLSPAEMLDCKESTTARVARSSVSFAAPSSTVPTAASSSTLL

SEQ ID NO: 187964 - protein, 106 aa, Zea mays
  Clone ID: MRT4577_103010C.1.pep
EKQKRKLPSQIRISRPPAEGQREISHLLSTGSVQSRAREKGRWCVEGGRDFAGLEPDRGMSCFAHRRRSDVARRQDGLLVFVFFLSIPIRTSSFNLSSSNCSSNLL

SEQ ID NO: 187965 - protein, 88 aa, Zea mays
  Clone ID: MRT4577_103011C.1.pep
YVCTSRPVIMFTPPVIDIQHGVVMYTVQVPSVPAVTWRLRPPACDRAAFSGPETRGCRGLPQAGSLALSYAPSYAVKHCLWHRAVLRT

SEQ ID NO: 187966 - protein, 257 aa, Zea mays
  unsure (1)..(257): unsure at all Xaa locations
  Clone ID: MRT4577_103012C.1.pep
MDPNGLKTGGLLLPTIERRCTSPPSVIVIGGGISGVAAARALSNSSFKVTVLESRDRIGGRIHTDNSFGCPIDMGASWLHGVCNENPLAPLISYLGLRLYRTSDDNSVLYDHDLESYALFDKDGNQVPKETVDKVGETFERILEETVKVRDEQEHDMPLLQAISIVFERHPHLKLEGLDDQVLQWXVCRLDPRVRADADEISLKNWDQERVLTGGHGLMVNGYYPVIEALAQGLDIRLNQRFVFPHCLILLDLVANL

SEQ ID NO: 187967 - protein, 65 aa, Zea mays
  unsure (1)..(65): unsure at all Xaa locations
  Clone ID: MRT4577_103014C.1.pep
NFHGTMSTMLQVGNQIQQYKTVRKNKPLVKPDVKTLSKSFNXRIVAIDHQSKTTKKGTLLQIRXX

SEQ ID NO: 187968 - protein, 88 aa, Zea mays
  unsure (1)..(88): unsure at all Xaa locations
  Clone ID: MRT4577_103015C.1.pep
MDSTGTGAGGKGNNGASVRKVCAPRKKSVSRSLKVGVPVPGGRIGRYFKKGRFAQXVGTGAPFYFAVVSHNLSVKVWELVVNVAGGTR

SEQ ID NO: 187969 - protein, 80 aa, Zea mays
  Clone ID: MRT4577_103016C.1.pep
VVQGLKYYSYFALPAKMTMNCWHTDRFFLRALGDIAGANPSPLQMHAEPGILTTMIGPRGAHGSQTGVFKAVAAPCQTIV

SEQ ID NO: 187970 - protein, 161 aa, Zea mays
  unsure (1)..(161): unsure at all Xaa locations
  Clone ID: MRT4577_103017C.1.pep
MVTATATVSCSYPQLRYRPSPRCRRHGPAAATVAALATPRSEQDIVIVGAGVAGLATAVALRRLGVGAAVLEQGDALRAGGTSLTLFKNGWRVLDAIGVADELRPKYLRIQGMRMRSPGRDLREFSFDEEAPGQEVRAVERRALXETLASKLPPGAISFSX

SEQ ID NO: 187971 - protein, 99 aa, Zea mays
  Clone ID: MRT4577_103018C.1.pep
MRRAKPPPQQPSPSPEIRYRGVRRRPSGRYAAEIRDPAKKTPIWLGTYDCAEAAAHAYDAAARSLRGPTARTNFPSAAVRAPRHRAPSASAAAPTAPAA

SEQ ID NO: 187972 - protein, 54 aa, Zea mays
  Clone ID: MRT4577_103019C.1.pep
PVETNHHRSSTAAYTQEWPPSLVVCCSFKSVTHSSVTPLSSPRMMSPKKSKKKR

SEQ ID NO: 187973 - protein, 80 aa, Zea mays
  Clone ID: MRT4577_10301C.1.pep
GDGDVPLCPVRCFRPDPVCGADGVTYWCGCPEAACAGARVARRGYCEVGAGSAPVSGQALLLVHIVWLFVLGAAVLLGFL

SEQ ID NO: 187974 - protein, 56 aa, Zea mays
  Clone ID: MRT4577_103020C.1.pep
TGTSFFFFIFFFFYFFFFFFFFFFFFFFFWGEQKVCFFPPNTQQDGLPPPTRPNDQ

SEQ ID NO: 187975 - protein, 157 aa, Zea mays
  Clone ID: MRT4577_103021C.1.pep
MGGGEGKSKKRRSSTSSADEEGGERKRRDKKESKRRSRDDREDDDDRHKKKGKHIDRNKGKERDSKDRHSKEKTSKRKDKDAAFKEISKDDYFAKNNEFATWLKEEKGKYFSDLSSESARDLFLKFVKQWNKGKLPSQYYEGITSGPRSAHNWNIKA

SEQ ID NO: 187976 - protein, 66 aa, Zea mays
  Clone ID: MRT4577_103022C.1.pep
CCCGEQEPTFFFFPPKELLLKKCSALKGVSAAPIVGRPATNFSSLLGHQRSTNLTTAFIANQWIVS

SEQ ID NO: 187977 - protein, 225 aa, Zea mays
  Clone ID: MRT4577_103023C.1.pep
MGFTLGPNTRLPDSSVPSLLCNPGRPTRPGPPTATMGGGEGKSKKRRSSTSSGTQPPRDTYRIPYLVESVVSFCCGPSISFFLGLAEEEGGERKRRDKKESKRRSRDDREDDDDRHKKKGKHIDRNKGKERDSKDRHSKEKTSKRKDKDAAFKEISKDDYFAKNNEFATWLKEEKGKYFSDLSSESARDLFLKFVKQWDKGQLPSQYYEGITSGPRSAHNWDIKA

SEQ ID NO: 187978 - protein, 75 aa, Zea mays
  Clone ID: MRT4577_103024C.1.pep
MANLAAQIKDKFLGLVDRVTDAAAGFGRAAGGKDDDVQDPTTTKLHLHAVQRAEVIIRSRGGEPVVDTGSTAGAN

SEQ ID NO: 187979 - protein, 57 aa, Zea mays
  Clone ID: MRT4577_103025C.1.pep
ISDVIIDVGRTSTAACGVHVTILFAFFVIGSVLVDALIVWVAPSVPVSDSDPTRFSD

SEQ ID NO: 187980 - protein, 131 aa, Zea mays
  unsure (1)..(131): unsure at all Xaa locations
  Clone ID: MRT4577_103026C.1.pep
WLLPVPTRGERIAFSKIGPVSSVAPLGLGLALQGTPPSAPANIVPLLNSTGEVACFSNAIHYRFLLWGPLFWKLYFXFWVILHLYPPFKRLDGRPILSPTFGILLFHSVASNFLLPWVPIGSFLAKDFGPF

SEQ ID NO: 187981 - protein, 68 aa, Zea mays
  Clone ID: MRT4577_103027C.1.pep
AANDFLNGLLNPNGGSIKGHGLQQGPLKQNRNSLALFSGHLRGFFSLYKSLQKRDFFYAHPGTKGKKG

SEQ ID NO: 187982 - protein, 92 aa, Zea mays
  Clone ID: MRT4577_103028C.1.pep
KKKKKKKNKSKITKEKKKKLLHFIQSYFPYPSIQPFFSSLTSPQFTSLSFIIQLLTWQNLFFTQFNLLSSHPPFPIFLIPKHPRTDLPFQPY

SEQ ID NO: 187983 - protein, 109 aa, Zea mays
  unsure (1)..(109): unsure at all Xaa locations
  Clone ID: MRT4577_103029C.1.pep
YCLEELATRYPATKFVTIISTECILTYSDSNVPTSSVYSISAVKGTYVGLQXKFGENRCPPESVALALCQSVSVLNNGHGGSDSSRDNVFXGVRREFIXKLVAQHEEQE

SEQ ID NO: 187984 - protein, 105 aa, Zea mays
  Clone ID: MRT4577_10302C.1.pep
NKTIFISLDNKHLKRHYKHCSRERGGKKQRGQNPRKKGNMAKGDPKKKFETLAFEGQNFPTGAKKLKGSLFLKIFLGGHCSTGKGAPVPNNKTKSIIPLKYIPQT

SEQ ID NO: 187985 - protein, 132 aa, Zea mays
  unsure (1)..(132): unsure at all Xaa locations
  Clone ID: MRT4577_103030C.1.pep
LTDNNSVVVTLNLYMTQLKVTPADLELLANNXKPSMYPNMDDCELSXLSGLLQTCNALHELAGCAFCEPGEHTTHEKGDXRPTLCFXXGLTFMGKNEMPVILTNGTMLRTPDLAITILTTENHMELIAKCPN

SEQ ID NO: 187986 - protein, 68 aa, Zea mays
  Clone ID: MRT4577_103031C.1.pep
YMRHCLSVSSCMLCQVIIDTRFQVDTVSVESSKLFGKVSDHRTVSAPVKMKCLSRVLTSAKRHTQLLI

SEQ ID NO: 187987 - protein, 101 aa, Zea mays
  Clone ID: MRT4577_103032C.1.pep
MGDHDMAEEPELRGHHDRPGEAATKDGTPTEDAEEGEHDAELPAVKFRNYLRQDQQLRGGKMAPVSLPKFEDPISVENAYPKKVEKLCGTYTSQNPNWDLE

SEQ ID NO: 187988 - protein, 89 aa, Zea mays
  Clone ID: MRT4577_103033C.1.pep
QSKLFVIIVNIIWGTFLGCPALLQNGIPENFFLTITPLHFLAILFWPLGFSRGGKKNHLEKNHLLKAFYLKVPKLFGGKPFFHNNFFLK

SEQ ID NO: 187989 - protein, 40 aa, Zea mays
  unsure (1)..(40): unsure at all Xaa locations
  Clone ID: MRT4577_103034C.1.pep
LLLLFLXDLPSXWLSTXSVNMSLDQQWPDLYLYPTICPXE

SEQ ID NO: 187990 - protein, 56 aa, Zea mays
  Clone ID: MRT4577_103035C.1.pep
PIAGPWFPTMLTNPSQDFFLPHCAGLNIEDHRGFRLYANFLGRLVITFLHPFHKQK

SEQ ID NO: 187991 - protein, 158 aa, Zea mays
  Clone ID: MRT4577_103036C.1.pep
MTKSSGSHVMGVPVTSTAYAIEDATRDRPPAAAKKDGEDRLAVSLTHPSPYTSFGYKQGHVIHWMNKLGRRAQSFRDHVTLGPKLSETVRGKLSLGARILQAGGVERAFRRAFSAEKGERLVKALQCYLYTTGGPIAGMLFVSTRRIAFRSDRSLAVT

SEQ ID NO: 187992 - protein, 118 aa, Zea mays
  Clone ID: MRT4577_103037C.1.pep
PARCLSWQAPRPAVPSLLPKSLRTDALAFVPSARRVRIFVAGRAINPIIAISFANEGIGAPTKRTALHDLYELHGLSPWFVNLLPPVTDLLAIIISGVRGVTINPTIFQKDISFVQRI

SEQ ID NO: 187993 - protein, 45 aa, Zea mays
  Clone ID: MRT4577_103038C.1.pep
ILNQFQVNAIEKAKWNDDLIKIGRVRCKLVEVTLAQRSGQSRKEL

SEQ ID NO: 187994 - protein, 150 aa, Zea mays
  Clone ID: MRT4577_103039C.1.pep
GKFFPWIGCFDPEVEGGGFHQGGLPPFFIPNLGGGENLGKVPPRFAPKGRGGVPVSRGKDLVFKVGTFWKGLGGFFLVPPLKKRGKKNPRGGQEPFYLGDNFARVWVQKKFVFPKGKARGKSFPGGFLCFAKIIIVEPPRVFLNHLGFWG

SEQ ID NO: 187995 - protein, 32 aa, Zea mays
  Clone ID: MRT4577_10303C.1.pep
LKKNKGKGFPTHVYCMVVPENCALALARECPR

SEQ ID NO: 187996 - protein, 190 aa, Zea mays
  unsure (1)..(190): unsure at all Xaa locations
  Clone ID: MRT4577_103040C.1.pep
LVFQQGRPKIIHKNASWTISKSKYKEDTTKEVAAAKRCFVCQNLLPEWYQLWENPKVDPYRIQQANNNVELXPLITTKVRTTLQPASIDMQWTLMVXHLIXQNMKAQDLQQLEVTNLCGYAERQXLNGFNQLGEXKTLIHSXQRQLPLNQVXLTXPQELLAYNQLAAVNCAADPQNAPLLPFKQLSGVSP

SEQ ID NO: 187997 - protein, 72 aa, Zea mays
  Clone ID: MRT4577_103041C.1.pep
CGNRVIDRADMDSALSLFNRWPYNCPTMDEHTLPTLQLVPTRTDNGRTKTSLLPRLSNLLSIPRELGKPETI

SEQ ID NO: 187998 - protein, 257 aa, Zea mays
  unsure (1)..(257): unsure at all Xaa locations
  Clone ID: MRT4577_103042C.1.pep
MATTNWTLPDHPTLPKGKTVAVVVLDGWGEASPDQYNCIHVAQTPVMDSLKNGAPEKWRLVKAHGTAVGLPSDDDMGNSEVGHNALGAGRIFAQGAKLVDAALASGKIWEDEGFNYIKESFDKGTLHLIGLLSDGGVHSRLDQVQLIVKGASERGAKRIRLHILTDGRDVLDGSSVGFVETIEKDLAQLREQGVDARIASGGGRMYVTMDRYENDWSVVKRGWDAQVLGETXHKFXNALEAVETLRAEPKPNDQYLP

SEQ ID NO: 187999 - protein, 436 aa, Zea mays
  Clone ID: MRT4577_103043C.1.pep
MRAGRPKIGDQATSDVVVRLRTPEGRDEWLYCHSAVLAAGSTYFADRLSDAWPTCQILGSRYCVEVYCQELDLSSYVTALRLLYAIEPCSHFGVRGALGVLQAAVHLGCGQIAAACAGYIESAPWEEADEEEILRTVPGLGPQYECILARLRPIDPAPVTSIFLSAFRHATLSSAAGPARELKSAAQEQLEYMLTEDDDAPLIALDNDTVKSQVKDCATALLSQFSAFMSSILTKQKEAPPLDGEHGQLQQELQFFLCDISWVSQVLSKLEMMKCIVVYWVGVSTDMVETVDAVCTGDDCLKTRLKVVEVSAKVLEAVAFGNVILPAEKRRHMVNLWIRFARVTKSLADQGDQDGDGEAETPKENLDNEVWQGLESAIVSIVLTLPSNSQAEILSEWLQSKHVRYPDLTEALEAWCYRSKVAKRRLSFLSDIGQVS

SEQ ID NO: 188000 - protein, 24 aa, Zea mays
  Clone ID: MRT4577_103044C.1.pep
NPELVPTLNGCSLLYKSFLLGTNY

SEQ ID NO: 188001 - protein, 62 aa, Zea mays
  Clone ID: MRT4577_103045C.1.pep
FTKIDAVDASTVKRVANAFILDRSHRSNSNILIKDEAIAAMGPIQGLPDHNWFRRRTYMLRY

SEQ ID NO: 188002 - protein, 115 aa, Zea mays
  Clone ID: MRT4577_103046C.1.pep
KKQPATQPVLLQPVEVPPQGQRRLFFAPGVIFRLANIKITTWGLGFSNNFSLEEFFQGCAPAFSQRGGERPLKPTPHGGPPTQKQTPKCFCLRPPPTGGIIPPVLCNPCFSRPPR

SEQ ID NO: 188003 - protein, 93 aa, Zea mays
  Clone ID: MRT4577_103047C.1.pep
NVVAIAGDDYSIIASDTRLVNGYQIYTRNQSKLFKVTNNTVLGSTGCWCDVVTFNRILETQVKMYSYDHNQEMSCQAAAQLISIMLYNRRFFP

SEQ ID NO: 188004 - protein, 248 aa, Zea mays
  unsure (1)..(248): unsure at all Xaa locations
  Clone ID: MRT4577_103048C.1.pep
MATKLAALVVLAAFLAGPAACDGASICFNGWLRLPTYNAALCRPRPDVQTRQRRPAPSGSGLSSGYYNTRCPSAEKIVTDAVKKAVDANPGIGAGLIRLFFHDCFVRGCDGSVLLNTTNSKNSDTEREGPPNQNSLRGFEVIDEAKAAIEAACPDTVSCADIVAYAARDASYFLSDRKINIXKAGAGRYDGRESFSNETDQLPGPFSNLTALQGSFAAKGLTSDEMVTLSGAHTMGRAPLLVLLQPFL

SEQ ID NO: 188005 - protein, 120 aa, Zea mays
  Clone ID: MRT4577_103049C.1.pep
MARSGLATAAERSGCLAGGTELAGQSAGLERLSEVRREYGRGLPALIDAARCTGGPRPTWPRGRARLGVGTFGFGMKLYTIWIAGSERRLNQRRSYAQGSFGSGAEKGTDLRMKRLSSCR

SEQ ID NO: 188006 - protein, 88 aa, Zea mays
  Clone ID: MRT4577_10304C.1.pep
REVGGQDPGAQEFLRSPFPPFFSTGRPPSTQADDTRHQAGIFFLWLSPPKRGPGLKKYKPWGGFEGQKKKKKKKNTHKKKKKKKKKRE

SEQ ID NO: 188007 - protein, 181 aa, Zea mays
  unsure (1)..(181): unsure at all Xaa locations
  Clone ID: MRT4577_103050C.1.pep
APPPFVPGYPPIFPPMVPKVGXKPPXFRVVPEKPTXGFPPGERIPPGGARGGPXGPLAGVGXPQPCPFPXQGTGGFPPAPGKGGPPRACVKNFFCPPQGGKGFPPPPPGSWPRVFPPPPKNVGGXGETKPFPPPPGPFFSPPPPKKNRGVFFFCRPSFFSPKNWLGSLFRANLFQTQGFPG

SEQ ID NO: 188008 - protein, 79 aa, Zea mays
  Clone ID: MRT4577_103051C.1.pep
LVPSGGFPGTLSDQSSLWREFSCIKRARFVPHPQVMCGVLMTRECCCPSCIFCAGCRQSLGLAVVCPLACWLAVAFAVR

SEQ ID NO: 188009 - protein, 44 aa, Zea mays
  Clone ID: MRT4577_103052C.1.pep
RTICLYMSALTEDKNQSNLNNRNYFSLNNRNRLSLNNRKNLQQT

SEQ ID NO: 188010 - protein, 277 aa, Zea mays
  unsure (1)..(277): unsure at all Xaa locations
  Clone ID: MRT4577_103053C.1.pep
RNSARGSAELSKLAANAFLAQRISSVNAISALCEATGXANVTEVAYAVGKDTRIGPKFLNASVGFGGSCFQKDILNLVYICECNGLPEVANYWKQVIKINDYQKSRFVNRVVSSMFNTVAGKKIAVLGFAFKKDTGDTRETPAIDVCKGLLGDKAQISIYDPQVTEDQIQRDLAMNKFDWDHPMHLQPTSPTAVKQVSCVWDAYEATKGAHGLCILTEWDEFKTLDYQKIFDNMQKPAFVFDGRNIVDPEKLREIGFIVYSIGKPLDAWLKDMPAVA

SEQ ID NO: 188011 - protein, 290 aa, Zea mays
  Clone ID: MRT4577_103054C.1.pep
LKVVYAHWVPEANIITTNLWSAELSKLAANAFLAQRISSVNAMSALCEATGANVSEVSYAIGKDSRIGPKFLNASVGFGGSCFQKDILNLVYICECNGLPEVANYWKQVIKINDYQKSRFVNRVVSSMFNTVSGKKIAVLGFAFKKDTGDTRETPAIDVCKGLVGDKAQVSIYDPQVTEEQIQRDLAMNKFDWDHPMHLQPTSPTAVKQVSVVWDAYEACKGAHGVCILTEWDEFKTLDYQKIFDNMQKPAFVFDGRNIFDSEKLREIGFIVYSIGKPLDAWLKDMPAVA

SEQ ID NO: 188012 - protein, 43 aa, Zea mays
  Clone ID: MRT4577_103055C.1.pep
PRFAWGPRPCVVGGTKAIVLGGPTGEKWMLSKKPELFLVPPPV

SEQ ID NO: 188013 - protein, 75 aa, Zea mays
  Clone ID: MRT4577_103056C.1.pep
SHTLLVQELRSHIETSSCQTWIISIEYDSDLLNSETRRCPPLRHGQRPCLPSVCYICWPPLTVALPEPSPCHLLH

SEQ ID NO: 188014 - protein, 80 aa, Zea mays
  Clone ID: MRT4577_103057C.1.pep
THVPSRGMMGRIFWWPPVLLELLGPVWNLRGRFGHKFFQSFLKNNAVFSKTLVLYTKTSLTYYLNSLFSKLKYYKFLLSF

SEQ ID NO: 188015 - protein, 85 aa, Zea mays
  Clone ID: MRT4577_103058C.1.pep
MSKIPTMATQLPALDLMEFPPLISYGTATGPYLNLSPPIQRIAENKDAVNNVISSELLLRGKRLLVRPPTESRELPITACAPRYP

SEQ ID NO: 188016 - protein, 61 aa, Zea mays
  Clone ID: MRT4577_103059C.1.pep
SLHLSQGQRDGGLSAWLEGHKSSQAQNKMPAKTKRSSARAEPEPQGRVHRLACVRYAHWGA

SEQ ID NO: 188017 - protein, 68 aa, Zea mays
  Clone ID: MRT4577_10305C.1.pep
TYPFNPNVILLRLPPFCSPGWIPLTMMPHSHRCFMIWQFPCYPTEWPVYNTGPSPCLPMFQNAREWCS

SEQ ID NO: 188018 - protein, 64 aa, Zea mays
  Clone ID: MRT4577_103060C.1.pep
ESRITKKKIFLEKKFPKSLVRRGCLRAYYFFVKKINRCTPNIFLYFPHVSIVNRFLLSSLNQTL

SEQ ID NO: 188019 - protein, 81 aa, Zea mays
  unsure (1)..(81): unsure at all Xaa locations
  Clone ID: MRT4577_103061C.1.pep
GVLIGVSDNNLGLSPTRCSLFPWSSGCRFSRVKVLGIFIRLSIIVTDVLLCPHLRVQEVDHTNRMEYRFLFFXXKKKRARR

SEQ ID NO: 188020 - protein, 49 aa, Zea mays
  Clone ID: MRT4577_103062C.1.pep
LSNEIWEKSSIHLSLYIYVIKRRDNTHSGVWGDTNYIRGDIIKLGFLCL

SEQ ID NO: 188021 - protein, 74 aa, Zea mays
  Clone ID: MRT4577_103063C.1.pep
STDLSDRLREEKGWNTPGLCGLLNKNYVLWNRTWVEKLPRLLVLVFTRFASSTLLCVEVPLLILIRVCFHRNLH

SEQ ID NO: 188022 - protein, 58 aa, Zea mays
  Clone ID: MRT4577_103064C.1.pep
FNSTARGLTPSGLENPCLSQTNWLGRNSPFRQLAYYQKGPNRWPFQPFAHPDWQLEPP

SEQ ID NO: 188023 - protein, 64 aa, Zea mays
  unsure (1)..(64): unsure at all Xaa locations
  Clone ID: MRT4577_103065C.1.pep
ARIWLRLVSCLGTNGLPGCRSPPGASRCTWRKSCTSPGRXXRMHQNRDRPQGVQGMPTLRAPII

SEQ ID NO: 188024 - protein, 92 aa, Zea mays
  Clone ID: MRT4577_103066C.1.pep
VGSSGPGNYSGQKSFDSCRHEKAVLNHSKNWIVSLLENTLKHGVMSKTNIMLLSEVLAYRQYPLPSLSGFCSFLLGLTTGVFVYFTKDRYLK

SEQ ID NO: 188025 - protein, 35 aa, Zea mays
  Clone ID: MRT4577_103067C.1.pep
PFRPNCALLQPMVNNNLFFKGRVQGGPEFPTTLRG

SEQ ID NO: 188026 - protein, 64 aa, Zea mays
  Clone ID: MRT4577_103068C.1.pep
FFVPLRTQLSGTIIKGTQITSLIVPRHPSTRKSQGKHALTSKVTQDQAIIRPRLRVPTAQLRFA

SEQ ID NO: 188027 - protein, 73 aa, Zea mays
  Clone ID: MRT4577_103069C.1.pep
PSIPPLQTRRGQLTAAQEPQNRRKGERSQGTLPSCTSNPWNSALKLKRGQTVSATKTLCRKKEPLLTSLLDSV

SEQ ID NO: 188028 - protein, 135 aa, Zea mays
  Clone ID: MRT4577_10306C.1.pep
WRPKARRPKEQATVFLPGGRMVALSSLIWAGRGGSVPSSSRMRRHGAAAKGQKLRVRVASESVALGAGGGPLWVDVVECYAVPQGRPRRPQRSIQPLTLGYTGWCPDLLGNADFIYFHPPSAVKGAPFLDFPFFP

SEQ ID NO: 188029 - protein, 62 aa, Zea mays
  Clone ID: MRT4577_103070C.1.pep
PSMTDMLYMATILSQSHQTQTLLVLRLVHDVHCGCDSNMTSHDRSCPPSIGCEDHTLIQWVI

SEQ ID NO: 188030 - protein, 84 aa, Zea mays
  Clone ID: MRT4577_103071C.1.pep
LIGQGPEDFRAYTPRFRRVQHQITQQRRNQDWRFSFVPAGSEKQAVVYESPILSPPRLIFIFQMVIFCTLSLGVQVNASWPAYT

SEQ ID NO: 188031 - protein, 71 aa, Zea mays
  Clone ID: MRT4577_103072C.1.pep
LPLAWPIFVLMARVPSSPPSSWYGACVVSFGECGGVCFRAPRMKGHYATCQCVPITCVLYFRPSAIIAGIV

SEQ ID NO: 188032 - protein, 154 aa, Zea mays
  unsure (1)..(154): unsure at all Xaa locations
  Clone ID: MRT4577_103073C.1.pep
MGNCCSHGRDSADNGDALENGASASNAANSTGPTAEASVPQSKHAPPSPPPATKQGPIGPVLGRPMEDVKASYSLGKELGRGQFGVTHLCTQKATGHQFACKTIAKRKLVNKEDIEDARREVQIMHHLTGQPNIAELTGAXEDKHSVHSVMGAL

SEQ ID NO: 188033 - protein, 69 aa, Zea mays
  Clone ID: MRT4577_103074C.1.pep
MDAIDSVFDPLREFAKDSVRLVKRCHKPDRKEFSKVAVRTAIGFVVMGFVGFFVKLIFIPINNIIVGSG

SEQ ID NO: 188034 - protein, 396 aa, Zea mays
  Clone ID: MRT4577_103075C.1.pep
MAVAERFGTRWPPSRFFVAVLLVLLTDGGAAWKRAEGLSLGINYGQIADNLPSPARVSYLVRSMQVSKVKLYDADPYVLSAFVDTDVEFVVGIGNENVSAMVEPAAARAWVERHVQPYLPGTRITCITVGNEVFKGNDSALKASLLPAMQSVYQALTAVGLQGRVNVSTAHSLDIMGSTYPPSAGAFGPDAVPYLQPLLAFLSAARSPFLINCYPYFAYKADPGNVPLEYVLFQPDAAGVTDAGTGLRYDNMLYAQVDSVYAAIQKLGHTDVDVKVSETGWPSRGDPDEAGATPEYARTYIGNLLQRIEMGQGTPMRPSAPVDVYVFALFNENLKPGPASERNYGLLYPDGTPVYDVGLRGYLPPMDYSQGTREAVRFFAFISFVAIASITLSLSS

SEQ ID NO: 188035 - protein, 102 aa, Zea mays
  Clone ID: MRT4577_103076C.1.pep
GFLPREAARTHGCPARVKASLTTVAVVHALLPVPLCRTSLMLLYMKPNGLLVSPELYEVCTCRIEAPYWFRQAVEVGFLHLSLWIVQHSSATYQLLPSVHLL

SEQ ID NO: 188036 - protein, 103 aa, Zea mays
  unsure (1)..(103): unsure at all Xaa locations
  Clone ID: MRT4577_103077C.1.pep
RLLLAFDPFVLGQVVAYQQQQQVLQFMPELNRLAMENPERYLQLVYFPXITVGXTPPFLQHQLLXIRNRALTQLAVCKPAAYLQQVLPFNQLAVANCGAYLQQ

SEQ ID NO: 188037 - protein, 51 aa, Zea mays
  Clone ID: MRT4577_103078C.1.pep
VPRAVQCLVQLKTAHERQVIRDLAAHDHRELAFSILVQDRMQDGCCRSAWL

SEQ ID NO: 188038 - protein, 90 aa, Zea mays
  unsure (1)..(90): unsure at all Xaa locations
  Clone ID: MRT4577_103079C.1.pep
QIQSDATGNLLPYISRKRKAGKCLINNGAKRHLKVLPNNIQRITNPTIQRLTKTAILKLICRLIYXYTLCLLYIFIHNVIHNSVTYTDHA

SEQ ID NO: 188039 - protein, 70 aa, Zea mays
  Clone ID: MRT4577_10307C.1.pep
SNCMRQLQRGGLGQRHCDRTLVCMACTMLWMALHIHGYCMDYRLPLMLRYMPHSVIAMDDTRCREYPVMC

SEQ ID NO: 188040 - protein, 128 aa, Zea mays
  Clone ID: MRT4577_103080C.1.pep
MSCRSRYEFAVYHKTSSHKPSPYLISNLRKHEALQKRCGPGTAAHKKAVRRLDSGEGVVDDDDGCRYLVYISYRGLGNRMLGITSAFLYAVLTERVLLVDGGKDTGALFCEPFPGTTWLLPQGGWSFS

SEQ ID NO: 188041 - protein, 68 aa, Zea mays
  Clone ID: MRT4577_103081C.1.pep
VPGTAPHSLVLYLFNLFTLELEKGHWILVGCHCTPKSLLIEGLGTRYGLSGMLLPQRNGMESSGMIDV

SEQ ID NO: 188042 - protein, 81 aa, Zea mays
  unsure (1)..(81): unsure at all Xaa locations
  Clone ID: MRT4577_103082C.1.pep
AEAPSREARVLEKDIYRYMHPFAASSISPRYQQGGKRTVEHSPWQRIGGVERRRTGLQTTMNRVPXGLEGPNRKXXXXXXX

SEQ ID NO: 188043 - protein, 183 aa, Zea mays
  unsure (1)..(183): unsure at all Xaa locations
  Clone ID: MRT4577_103083C.1.pep
EGGVSMLGHGDMSFPYLIESFPMLLLCSEDNHLEPLVDFLEHIGIPKPKIASVLLLFPPIILSDVENDIKPRIREWEKAGIEQDYITRMLLKYPWILSTSVIENYSKMLLFFNQKGISSTVLAIAVKSWPHILGSSSKRMNSVLELFRVLGISKKMXVPVITSSPQLLLRKPDQFMQDELLIG

SEQ ID NO: 188044 - protein, 95 aa, Zea mays
  Clone ID: MRT4577_103084C.1.pep
HQPSSSIVASFHQRFSYLLPVPSSRVNASSVTRSHSRSMNPSSVVVVTSISADGEISLLTAGLRRVHGLFHGDREQHIRTPTLREHHLLRSWRGL

SEQ ID NO: 188045 - protein, 55 aa, Zea mays
  Clone ID: MRT4577_103085C.1.pep
LLNKTKGLPYLEDSRIFCSPYPYDGHTIWYSGSLFELISRALSIFGLRTPWWSDL

SEQ ID NO: 188046 - protein, 59 aa, Zea mays
  Clone ID: MRT4577_103086C.1.pep
MPPKLDPSQAVEAFIRVTVGEDDDAATLDPKIDALGLSPKNIAEDILTDTDKDCKALRN

SEQ ID NO: 188047 - protein, 169 aa, Zea mays
  unsure (1)..(169): unsure at all Xaa locations
  Clone ID: MRT4577_103087C.1.pep
LQQDVSPTRVQPDLGPRHXTVXGDQKKNDQERRTHSDVDQVQXSSEXXTARAARRGRGAPXLQRRGGAITGTTHPRVRKXGSPXXLGXPSFTAPPRFTXTRRXXNMPLGXCSSACCXASRPLXXPLTXQRSFLAGXRMQTNHQXCRAVVHAHTLNPKSSXXLDQSYXCX

SEQ ID NO: 188048 - protein, 62 aa, Zea mays
  Clone ID: MRT4577_103088C.1.pep
MLHILYKKIIVAYTIPNKDESHSHTQTTKSISTRGTTGGFSKTKRLVGLHSKEPPGWFHDGT

SEQ ID NO: 188049 - protein, 110 aa, Zea mays
  unsure (1)..(110): unsure at all Xaa locations
  Clone ID: MRT4577_103089C.1.pep
MATKILALLALLALLVSATNAFIIPQCSLAPSAIISQILPPVTSMGFEHPDVQAYRLQLALAESVLQQPIAQXYINFLAHLNLQTIVTQQQHQLLSSLIHLALVNSVDYL

SEQ ID NO: 188050 - protein, 98 aa, Zea mays
  Clone ID: MRT4577_10308C.1.pep
LGDDGLNHSRTHYNILQAPNPGGPGLDLALKIPGTRGILRILETSQPRVRGGNNSGHGATHANPSKHAQVCPTLGGRRRTRTGKETPWAEAIHPYIPG

SEQ ID NO: 188051 - protein, 55 aa, Zea mays
  Clone ID: MRT4577_103090C.1.pep
QARGSKKGTLKRAAPNNYFINFINYNVFFFFFFILFFFSPSFFFFPTLFFATNRI

SEQ ID NO: 188052 - protein, 94 aa, Zea mays
  Clone ID: MRT4577_103091C.1.pep
QGILFDYMGSPPTLFLVTTTTFFLFPGRFGLAPSANPKATGGFKLEGGDSGLQRGAPPGFPLPDPLALGAVGPILGVGFVLGLKNPGALDQILG

SEQ ID NO: 188053 - protein, 47 aa, Zea mays
  Clone ID: MRT4577_103092C.1.pep
GGLKARSGRALLAPEGPLTSWVGWEFRPNWAVNFGQGLIQARVLIAP

SEQ ID NO: 188054 - protein, 75 aa, Zea mays
  Clone ID: MRT4577_103093C.1.pep
LYLTMCLHVFLKISGNNRLVDLLFGQLHERSFGRLFKPVGIVDREFLLLTSSTSHNKDVVRARPTATKITFAEIW

SEQ ID NO: 188055 - protein, 730 aa, Zea mays
  unsure (1)..(730): unsure at all Xaa locations
  Clone ID: MRT4577_103094C.1.pep
LEYEFRMPNPPFQIDFERXVDDFIFMCFFVGNDFLPHMPTLEIREGAINLLMAVYKKEFPSMGGYLTDSCTPDLNRVEHFIQAVGSYEDKIFQKRARLHQRQAERIKREKAQAKRGDDLDPHVRDDLIVPVSNFRGSRLASGAVPSPYEQNGSQRERYNQTRKAPRVSSSGSSIAAAIVEAEQDLEAQERENKEELKSMLKDALREKSDVFNSENSEEDKVKLGEPGWRDRYYEEKFGARTPERMEEIRRDVALKYTEGLCWVMHYYYEGVCSWQWFYPYHYAPFASDLTSLSQLNITFELGSPFKPFDQLMGVFPAASAHALPLKYRQLMTDPNSPIIDFYPTDFEVDMNGKRFSWQGIAKLPFIEEDRLLAEIKKVEDTLTPEEARRNSTMCNMLFVNGAHSLSPYIYSLNSKFGHLPDKDRGAIKEKLDPSASGGMNGYIALCGGDPSPPVFRSPVDGLEDIMDNQVICSIYKLPDPHKHIARPPAGVIIPKKSVEAGDLKPPPVLWHEDSGRRPHDNNHRRPYDNSNRQNPSGALSGRQLGEAAHRLVVNSLNVRGGGQNNSPSMPYQTMMSGMNYPNGRHHVGNHGVPPRMEQPAGRSGWHVSDDNMTNGQAAYGQYQPERLGPSRHERGNHGRQQYNPYARDNHHDSSGRVQPPGYHQNRGNPQSAAPSAGPGLYGPYPPAYAGGYSGGYQPVPYGGQQWQQRPYGGGTPPTRPNSHQSQNRYG

SEQ ID NO: 188056 - protein, 72 aa, Zea mays
  unsure (1)..(72): unsure at all Xaa locations
  Clone ID: MRT4577_103095C.1.pep
GKGVFSSIISSPQGPRLXKNSTXKLFWQGKDGTYRLALDRYCILMCHISIPRDSSWAQHHNKCILEMRLSVC

SEQ ID NO: 188057 - protein, 57 aa, Zea mays
  Clone ID: MRT4577_103096C.1.pep
HASAHASAGAWEKSKLQLLIYNAIYIVNCSKQSINNISQELRIQICSYKFMHKFDII

SEQ ID NO: 188058 - protein, 242 aa, Zea mays
  unsure (1)..(242): unsure at all Xaa locations
  Clone ID: MRT4577_103097C.1.pep
DGRIRRDVALXYTEGLCWVMHYYYEGVCSWQWFYPYHYAPFASDLTSLSQLNITFELGSPFKPFDQLMGVFPAASAHALPLKYRQLMTDPNSPIIDFYPTDFEVDMNGKRFSWQXLTEHNLIIMSYMSPSKXVLGEHIYLLHICIPVMTKSSAYFXGIAKLPFIEEDRLLAEIXKVEDTLTPEEARRNSTMCNMLFXVNGAHSLSPYIYSLNSKFGHLXTXDRGAIKEKLDPXLVEGMNGYI

SEQ ID NO: 188059 - protein, 53 aa, Zea mays
  Clone ID: MRT4577_103098C.1.pep
GGYQPVPYGGQQWQQRPYGGGTPPTRPNSHQSQNRYGTLDRSSNKRSSGHGQY

SEQ ID NO: 188060 - protein, 95 aa, Zea mays
  Clone ID: MRT4577_103099C.1.pep
PMPTGTLHVPPAYHPRQLAFGLSSLILDKMFEKGHVSYKNLANILKIITQELISKAQEISRPQFQTLLSNSKILKFHVLMVLLIDLTDCLLEHLL

SEQ ID NO: 188061 - protein, 46 aa, Zea mays
  unsure (1)..(46): unsure at all Xaa locations
  Clone ID: MRT4577_10309C.1.pep
MADTEDMQPLVCDNRTGMVKAGFCGDDAPRAVSPXIVGRPRHTDAD

SEQ ID NO: 188062 - protein, 189 aa, Zea mays
  Clone ID: MRT4577_1030C.1.pep
MGIDLDRHHVRDGHRKVPKSSNPYVKLLVRLYKFLARRTDAPFNKVVLRRLMMSKINRPPVSLSKIVATAANKANAKNNEGKTIVIVGTVTDDNRLLELPKLSVAAMRFTASARARIEKAGGETLTIDEVATRFPTGANTVLLRGPKNSRESVKHFGFGPHSNKKPYVESKGRKFERARGRRRSRGFKV

SEQ ID NO: 188063 - protein, 205 aa, Zea mays
  unsure (1)..(205): unsure at all Xaa locations
  Clone ID: MRT4577_103100C.1.pep
QSIASSHACKTVQGSKQEAMLNPLSISSHNEHALRQQRNHDSTVRNLPNSKFPVETAPWKQQERIVLTRKLPKGSKGAHGREQPAASVISDIEKRLKDLDFRQSYKDLRALKHILDSMQAKGLLENKNREEISMPKLSDGNHNGQEIASVNMRVSSNTNNVCMPEESNAESSFKSPIVIMKPXKCAYLFNEVDSSVVPLGGHLTP

SEQ ID NO: 188064 - protein, 799 aa, Zea mays
  unsure (1)..(799): unsure at all Xaa locations
  Clone ID: MRT4577_103101C.1.pep
MAAPLLSPLLLLLLLLLSSSTPLQAQHNFTQGSSLTPQGPTTSWLSPSGDFAFGFQPIEGNTSFYLLAVWFNKIGNLTVTWYAKTSDPDPAPVQAPSGSRLQLNSNGALSLQDSAGTEVWNPQVVGASYAAMLDSGNFVLAAADGSSTLWESFKYPTDTILPTQMLTTGMSLRSRIIPTDYSNGRFLLGLQSTGASLYTVAVPSGYEYDPYWSMDVNTTNLVFDASGVIYIGNRSEITSWVVSSIADYYLXVPHLTPMAFSXTVYVPKEXATRVIRXSVVDFKPPNICGAQLTNVGSGICGFNSYCTWNGANNQSTCKCPEQYSFIDDERKYKGCKPDFQPQSCDLDEAAALMQFKVIPMSHVDWPLSDYEQYSPITKDQCQQLCLTDCFCALAVFHDEDNTCWKKKMPLSNGQMGXVPRGQSISXTKGQRHAVGDXIPTNGRKTRRTGSLEVHCSWEALSWSTFXISIILFGTYCTITIKEVPAMQSSNSIGLPLKAFTYAELEKATGGFQKVIGTGASGIVYKGQLQDDLSTHIAVKKIDKLEHETEKEFTIEVQTIGRTHHKNLVRLLGFCNEGKERLLVYEFMTNGSLNRFLFGDAKLQWNIRAQLALGVARGLLYLHEECSTQIIHCDIKSQNILLDGNFTAKISDFGLAKLLRTNQTQTNTGIRGTRGYVAPEWFKNIGITAKVDVYSFGVILLELVCCRRNVELEATDEDQKILTDWANDCYRCGRIDFLVEGDEEAISDLKNVERFVAVALWCLQEDPTMRPTMLKVTQMLDEAAAVPSPPEPTSFVSALA

SEQ ID NO: 188065 - protein, 142 aa, Zea mays
  Clone ID: MRT4577_103102C.1.pep
KDWKGGRASTFNIIPSSPGVSKAVGKVPPDLKGKPPGMSFRVPPVDVSVVAPPVRIEKGASFGDIKKAFKAASEGPPKGIMGYVGGDLVFPPFLGATRLGIFDPKAGFALNAPFVKLVSWYATKWGSSTRVVALIPPMFKTQ

SEQ ID NO: 188066 - protein, 212 aa, Zea mays
  unsure (1)..(212): unsure at all Xaa locations
  Clone ID: MRT4577_103103C.1.pep
RPGTTLPVTVSTNFSAASSLSRQLSVTRFSSRSRFTACAKPPRTRTFATSRPLNAFKLQKSQKRTKDTMTSSATTLKGQPLDKAVLESILRRRMFYTPSFEIYGGVGGLFDYGPPGCALQAAVIDQWRKHFILEEXMLEVDCSVLTPHEVLKTSGHVDKFADWMCKDPKNGEILRADHFVEAILEARLGDKEARGQKVRKKERTPKKKKKPR

SEQ ID NO: 188067 - protein, 86 aa, Zea mays
  Clone ID: MRT4577_103104C.1.pep
GFPPLWAPRAFPFFLPARFLCGFVPVSFFPPESGFALVSPELYWVSLWGTLVPLQVRVRISRVSPRGGFGWFFRAIFFQFQGFPRV

SEQ ID NO: 188068 - protein, 78 aa, Zea mays
  Clone ID: MRT4577_103105C.1.pep
RKKYGSYGTGIKKGKDSLPYKGVGSQKQTVQLTKLHSVRRHRRQARWRPLEANVEQVGAGHHPTVTSARLFLYVLFFF

SEQ ID NO: 188069 - protein, 79 aa, Zea mays
  Clone ID: MRT4577_103106C.1.pep
RLDTHRCTTILKHNTAGTKYLIVQKHILNKSLNSIKPGCRNLAAFTNEHTQNTLCGSPMEVLDVQGYSHSAKCSLEGKH

SEQ ID NO: 188070 - protein, 589 aa, Zea mays
  Clone ID: MRT4577_103107C.1.pep
MGTYKCCIFFTRRFALGDTSTPEDVRALFSLYAGGSPYMLADDLRRYLAAWGGADGEVPEQIIDRILQDRSRTPRFGRPALTVDDFLHFLFSEDLNPPLRYSKVHQDMNAPLSHYFIYTGHNSYLTGNQLSSDCSDVPIIKALQLGVRVIELDIWPNSCKDDIDVLHGRTLTAPVSLIKCLRSIKEYAFVASPYPVIITLEDHLTPDLQERVAKMVLEVFGDILYYPESKHLQEFPSPEALKGRVMLSTKPPKEYLEAKGDTMKEKEIEARIKRGEREAAAWGVEVPDIQDEMQVADKDEDELLYRERGADGDDGKETKHVAAEYKHLITIKAGKPKGPLVDAIKNDPDKVRRLSLSEQELAKVAAHHGPNIVSFTHRNMLRIYPKGTRFNSSNYNPFLGWVHGAQMVAFNMQGYGRALWLMHGFYKANGGCGYVKKPDFLMQTCPDGKVFDSKADLPVKATLKVKVYMGEGWQKDFKQTHFDSYSPPDFYVKVGIAGVPLDSVMRKTKAVEDSWVPVWEEEFAFPLTVPEIAVLRVEVHEQDVNEDDFGGQTALPVAELRPGIRAVPLFDHKGLKFKSVKVLMSFEFA

SEQ ID NO: 188071 - protein, 571 aa, Zea mays
  Clone ID: MRT4577_103108C.1.pep
MVIGNGIKAKFWHHSWLDGEAPRNLAPHLFKLVRRKNKSVAQELTNSAWIQSLRGKITTTTQLEEFVYLWTRIRQVHQDMNAPLSHYFIYTGHNSYLTGNQLSSDCSDVPIIKALQLGVRVIELDIWPNSCKDDIDVLHGRTLTAPVSLIKCLRSIKEYAFVASPYPVIITLEDHLTPDLQERVAKMVLEVFGDILYYPESKHLQEFPSPEALKGRVMLSTKPPKEYLEAKGDTMKEKEIEARIKRGEREAAAWGVEVPDIQDEMQVADKAWILNCAAFYDEDELLYRERGADGDDGKETKHVAAEYKHLITIKAGKPKGPLVDAIKNDPDKVRRLSLSEQELAKVAAHHGPNIVSFTHRNMLRIYPKGTRFNSSNYNPFLGWVHGAQMVAFNMQGYGRALWLMHGFYKANGGCGYVKKPDFLMQTCPDGKVFDSKADLPVKATLKVKVYMGEGWQKDFKQTHFDSYSPPDFYVKVGIAGVPLDSVMRKTKAVEDSWVPVWEEEFAFPLTVPEIAVLRVEVHEQDVNEDDFGGQTALPVAELRPGIRAVPLFDHKGLKFKSVKVLMSFEFA

SEQ ID NO: 188072 - protein, 199 aa, Zea mays
  unsure (1)..(199): unsure at all Xaa locations
  Clone ID: MRT4577_103109C.1.pep
KSPLEXLPPGMPPLSAPPTVVEKSGTKPGLPNAVKASNGPIGAPMVQGAPMAQGTPGAQGIPMNQVTPSQGSDEAKPLEATVVDAAPTTSEGTAAPAAAEGTAAPSSEEAKAAPGSEGGTSHPINEEATAVAVSDAPGSPDAAAAAALAPAADTSSSDAPAVTPSEVTVSPPSTDAPELTDKPSPTEASLPPPPSVSGV

SEQ ID NO: 188073 - protein, 271 aa, Zea mays
  Clone ID: MRT4577_10310C.1.pep
SQDWPEVTKYAGLVSAQSHRQELIEDLYNVTHDPQKGTVCGGMVRELLISFKKSTGQKPQRILFYRDGVSEGQFYQVLLHELDAIRKACASLEANYQPQVTFIVVQKRHHTRLFAHNHNDQNSVDRSGNILPGTVVDSKICHPTEFDFFLCSHAGIKGTSRPAHYHVLWDENNFTADALQTLTNNLCYTYARCTRSVSIVPPAYYAHLAAFRARFYMEPDSSDSGSLASGARGGGAPSSSSTSRSTRATAGGAVRPLPALKDSVKKVMFYC

SEQ ID NO: 188074 - protein, 146 aa, Zea mays
  Clone ID: MRT4577_103110C.1.pep
QISRVTADLKSKRPRLQAPSLHRQSNNPSGRRRRSPKRTRTSPPPPPVYLHRAACAFAAPPGRLESAVDGSMPIHSPMARPARLAAAHHRDGKARRPRPVHAYPRASRCGLLYICDWYRIAAAGYCGRVGGRVGGRVGGRVGGRVG

SEQ ID NO: 188075 - protein, 161 aa, Zea mays
  Clone ID: MRT4577_103111C.1.pep
FFFFFFFFFFFFFFFFFFFFFFFVLFFTIPLALGNPNGEIKARPKKNPIGKKKSKAGWHPQPQRPKRPNLGKIGTIREGTKPWPGTWGVTSPQFLKRAGKGPGENLTGRVISLLNGTPGKTRTRKKAWGGGIKPQKKKTRGPVPLKGPKKFGRAFPKFRGF

SEQ ID NO: 188076 - protein, 534 aa, Zea mays
  Clone ID: MRT4577_103112C.1.pep
MSGGLRNESASKLEKVEVASTSSFGADVDPRAIDLAMKIAERMFLKMKEDEAKNKIEEEENDRWRPNDESTSSQGSSFKSTSHMCFIANGSDSESESEDEEEQESDSEDEDDLQQFFAQLSKKHRMSLLKLMKRAEEQKEMLHKQEDFLIRKIEDLEKLTKEHEKLKCSHDDVVQRYEDISIEKIKAINHSSYIAQLENKNAMLKNTVEKLNIENIALQEKHDMLVCSHNKFMDSHIMLEMAHEVVLTNLKSYQPHMCTCVEIETILPCANNCCYQASQSSIELEISGISDISITQENKELKEEVGMLRRSLTRLKGKCHAQPSPDNHDNMVKKLEKGTTVACTKPLQKNTKLSKKVMSKHQDKKSKAHDKCLNHVSTCSTQGNKQATLPNKRICTRKCYQCHEKGHEIKSCPYIKDSGLTLERKRLTNHVANKKQGKKESCKIKNQICYTCRRKGHLCKDCPMSKYPKSTMSIHSYSLRRPKNDICARKGIRINLCGNQAKGLQPSDIQRMPHRKNEALENELKRFYLALERI

SEQ ID NO: 188077 - protein, 549 aa, Zea mays
  unsure (1)..(549): unsure at all Xaa locations
  Clone ID: MRT4577_103113C.1.pep
MDAQFDVTQEWLDRVKIARKGLRGTKRSLQVRLANRSPEVSGEAQPPWGGGSTALVNPDQSADVDPRAIDLAMRIAERMFLKMKEDEAKNKIEEENDRWRPNDESTSSQGSSFKSTSHMCFIANGSDSESESEDEEEQESDSEDEDDLQQFFAQLSKKHRMSLLKLMKRAEEQKEMLHKQEDFLIRKIEDLEKLTKEHEKLKCSHDDLVQRYEDISIEQIKVVNHSSYIAQLENKNAMFKNTIERLNIENLALQEKHDMLVCSHNKFMDSHIMLEMAHEVVLTNLKSYQPHICTCTQVETILSCANKCCSQESQSSIELEISGISDISITQENKELKEEVGRLRRSLTLLKGKCHAQPSQDNRDNMVKKLEKGTTVACTKPLQKNTKLSKKGMSKIHGEKINAHIICSNNVPMCFNKERSKRSDRRCYGCKEKGHEIGSCPHMKNQDLARSRKMTIKKDESKRQMHCKDKHRICYNCRERGHLFKVCPKGKTPKPNLSIHSNMLRRPKFDSCARKVMSSPHSRTKAIWVPKSLLANLDGPIMXGYQNVL

SEQ ID NO: 188078 - protein, 472 aa, Zea mays
  Clone ID: MRT4577_103114C.1.pep
MSGGLRNESASKLEKVEVASTLSFGADIDPRAIDLAMRIAERMFLKMKEDEAKNIIEEEENDRWRPNDESTSSQGSSFKSTSHMCFVANESDSESESEDEEEHESDSEDEDDLQKFFAQLSKKNRMSLLKLMKRAEEQKEMLHKQEDILIEKIKDLEKLTKEHEKLKCSHDDLVQRYEKISIEQTSTSNALSCVAQLEKENTMLKNTIERLNIENLALQEKHDMLVCSHNKFMDSHIMLEMAHEVVLTNLKSYQPHICTCTQVETILSCANKCCSQESQSSIELEISGISDISITQENKELKEEVGMLRRSLTRLKGKCHAQPSQDNRDNMVKKLEKGTTVACTKPLQKKTKLSKKGMRKIHGEKINAHMICSNNVPMCFNKERSKRSDRRCYGCKEKGHEIDSCPHMKNQDLARSRKMTIKKDESKRQMHCKDKHRICYNCREKGHLFKPHRKNEALENELKRFYLALETI

SEQ ID NO: 188079 - protein, 514 aa, Zea mays
  unsure (1)..(514): unsure at all Xaa locations
  Clone ID: MRT4577_103115C.1.pep
MSGGKRNESASKLEKVEVASTLSFGADVDPRAIDLAMRIAERMFLKMKEDEAKNIIEEEENDRWRPNDESTSSQGSSFKSTSHMCFIANGSDSESESEDKEEQESDSEDEDDLQQFFAQLSKKHRMSLLKLMKRAEEQKEMLHKQEDFLIRKIEDLEKLTKEHEKLKCSHDDLVQRYEDISIEQIKVVNHSSYIAQLENKNAMFKNTIERLNIENLAFQEKHDMLVCSHNKFMDSHIMLEMAHEVVLTNLKSYQPHMCTCVEIETILPCANKCCSQESQSSIELDISRISDISITQENKELKEEVGMLRRSLTRLKGKCHAQPPQDNHDNVVKKLEKGTTVACTKPLQKNTKLSKKGMSKIHGEKINAHMICSNNVPMCFNKERSKRSDRRCYGCKEKGHEIDSCPHMKNQDLARSRKMTIKKDESKRQKHCKDKHRICYNCREKGHLFKVCPKGKTPKPNLSIHLNMLWRPKFDSCARKVMSSPHSRTKAIWVPKSLLANLDGPIMXGYQNVL

SEQ ID NO: 188080 - protein, 619 aa, Zea mays
  Clone ID: MRT4577_103116C.1.pep
MASGRTPLQQCPRPHLRSRGEDKYKEPEVRSADGGGDPARDPTVPARRIGHGPVSLGRRRDGRCGQKWAGSNGGGRRAEAAVTSSAKLTSPHGTDVTQEWLDRVKIARKGLRGTKRRFNRFFALFTFLKILVQPDTQPDTQPVFVWWKQLWYYIEFFVDSLLLELLAPRRLGVAYVDPRAIDLAMRIAERVFLKMKEDEAKNKIEEENDRWRPNDESTSSQGSSFKSTSHMCFIANGSDSESESEDEEEQESDSEDEDDLQQFFAQLSKKHRMSLLKLMKREEEQKEMLHKQEDFLIRKIEDLEKLTKEHEKLKCSHDDLVQRYEDISIEQIKAVNHSSYIAQLESKNAMLKNTIEKLNIENLALQEKHDMLVCSHNKLMDSHIMLEMAHEVVLTNLKSYQPHICTCTQVETILSCANKCCSQESQSSIELEISGISDISMTQENKELKEEVGRLRRSLTLLKGKCHAQPSQGNCDNMVKKLEKGTTVACTKPLQKNTKLSKKGMSKIHGKKINAHTICSNNVPMCFNKERSKRSDRRCYGCKEKGHEIDSCPHMKNQDLARSRKMTIKKDENKRQMHCKDKHRICYNCREKGHLFKPHRKNEALENELKKFYLALERI

SEQ ID NO: 188081 - protein, 97 aa, Zea mays
  Clone ID: MRT4577_103117C.1.pep
PPYSVHHHRRSSDFPGIGLFCRREGPLRGQPFSENKEEIEVEEARTTPPPPEEPQVGNCFYFDICGAEPDSPITQGEEAANFCCFCSKVVPKEENQG

SEQ ID NO: 188082 - protein, 105 aa, Zea mays
  Clone ID: MRT4577_103118C.1.pep
LSHLIVDSALVVLKKIKCRTRIVSSMIIVKFIRLRNVLMFFHFFSLTSSYLIMECRRFHHFIADSALFSMFLVLANQIKIMASVDASPATSDSYPSRSHIGSFFK

SEQ ID NO: 188083 - protein, 79 aa, Zea mays
  Clone ID: MRT4577_103119C.1.pep
QHGCAVSTPSRPATSIADVATAETYQPWGSRRRGWSSPTSGCSLSRSSRRSSPSGSSHSPSTMTSTKSSSTRCGNPATS

SEQ ID NO: 188084 - protein, 100 aa, Zea mays
  Clone ID: MRT4577_10311C.1.pep
RPFLKYIYTIKPYHHPPIKISLQQTQSNQPTYTKTHTHYHKHSPQTSIQQQTTQKLFLFFSHTHTKQILFMASLSTSLIIVQPPPQATITIHISIVNHQL

SEQ ID NO: 188085 - protein, 123 aa, Zea mays
  Clone ID: MRT4577_103120C.1.pep
RESPLRLCVCSGAAAPDRGTPARPGRRPPRRDQIERRPRESPGARGHLLMPRRGGTVRARRRWPGRARVWLDLAVAEGGRRRGGFYTNGGVGAEAGGAHRCSEPTRATDKGSLAGAKESGRVG

SEQ ID NO: 188086 - protein, 117 aa, Zea mays
  Clone ID: MRT4577_103121C.1.pep
VRMEKPIPANFFMSLSHCTRRSLIASTVGPSAALRLPDSRRSRSQLHSLANSWHWILFTRTRFELLMMEDTSDETVATPAPTSFMVDYGWGHQVARTWELCDHSWYLRMRECSTQCE

SEQ ID NO: 188087 - protein, 106 aa, Zea mays
  Clone ID: MRT4577_103122C.1.pep
MWRRALAMVLFMAGAALLAGAAGASAHQGVWSIITRPMFQSMLSHRADTACQGTSYTYDAGMKTATRAPRTGAANASNRGGRQRSDAELADKAAPGGLSTTGPGPG

SEQ ID NO: 188088 - protein, 70 aa, Zea mays
  Clone ID: MRT4577_103123C.1.pep
NKNGLKHRLTGHGNLQTTSKFSRDKKLDRGRKQRQREEHTTSPGHTDGTSRTRNRSPPVCAAPHQPGNVE

SEQ ID NO: 188089 - protein, 43 aa, Zea mays
  Clone ID: MRT4577_103124C.1.pep
QAWDTFCHKVRLVCHAPDSLEDVELPVLRIFMCTFGLFVVLYH

SEQ ID NO: 188090 - protein, 75 aa, Zea mays
  unsure (1)..(75): unsure at all Xaa locations
  Clone ID: MRT4577_103125C.1.pep
TWQDRVPKLFGFKRLAGLGKLLPFLVRECSRVQPQLWARYDMGVERCLSLGGLTGALMDXELEELAKAGESLKTK

SEQ ID NO: 188091 - protein, 83 aa, Zea mays
  unsure (1)..(83): unsure at all Xaa locations
  Clone ID: MRT4577_103126C.1.pep
XKGSFFIFLVGEKIGSKKTTIGGGNQKHPSFYKERCFKVPKKKETNYPWTSTGLAFTRVEISEGPAYLIGLKPKSPVPRGLLI

SEQ ID NO: 188092 - protein, 127 aa, Zea mays
  Clone ID: MRT4577_103127C.1.pep
GGTLRFGLALYIAFFSPGMGPVPWAVNSEIYPEAYRGTCGGMSATVNWVSNLVVAQTFLSIVGLVGTGPTFLIVAGIAVLAFVFVATYVPETKGLTFEQVEQMWRERAWGNSGGNCESLLAGTAAAP

SEQ ID NO: 188093 - protein, 66 aa, Zea mays
  Clone ID: MRT4577_103128C.1.pep
PRVRKKKKKKKKNKKKKKKKKKKKKKKKKKKKKKKKKKKKKKKKTKKKKKGGPPKGFKLNLPVNET

SEQ ID NO: 188094 - protein, 186 aa, Zea mays
  Clone ID: MRT4577_103129C.1.pep
APSRRPSCPRNPPSEVKKEKCSDQSMSRWSGVAGISSASLPDGCCCCAAVGCAFSLAPLICTSPAASAPAPPTSAAVPSMAPNLPSRRARATDQQRAARAAHPRAQRSAATSPRPPPESDDPACDWRERAAQGPAGAWPPAAGAAGQRGRGAREFPETESCLGFLLSLSLAVRPSAPPADCCFLPR

SEQ ID NO: 188095 - protein, 73 aa, Zea mays
  Clone ID: MRT4577_10312C.1.pep
RRMQLPSFRLQCHPVPSGCVRYLPSVRAWTRAWDGAMDVEMEAVEGEMATDLLWSYTDEPYALRQRKIMAMYS

SEQ ID NO: 188096 - protein, 130 aa, Zea mays
  Clone ID: MRT4577_103130C.1.pep
TDGDPTGFCLHTLSILVNDVRGVLNLGTGVFSRRGYNIQSLAVGPAEKEGTSRITTVVPGTDESIAKLVHQLYKLIDVYEVQDFTHLPFAARELMIIKVAANATARRDVLDIAQIFEAQKVDISDHTITL

SEQ ID NO: 188097 - protein, 218 aa, Zea mays
  unsure (1)..(218): unsure at all Xaa locations
  Clone ID: MRT4577_103131C.1.pep
ASLYLPRCCTHISARCRLSPWVTLILFLIVCTQNVAPIPRPGAVDAQAVAIRINGDQAAFWGCGFFGAQDTLHDDRGRHYFKECFIQGSIDFIFGDARSLYEVSENKYLKGLQNNVLKLPTALLPFCXQNCRLISIADPVPSGQRSITGSVTAHARESEDDNTGYSFVNCSIGGTGSIWLGRAWRPYSRVIFAYTSMSDIIASEGWNDWNDQTSLVPN

SEQ ID NO: 188098 - protein, 145 aa, Zea mays
  Clone ID: MRT4577_103132C.1.pep
MAHFCSDKRHFEQATAPQGRRRPCRLRAVDRPRPDSRAWMTTGRPGHHHLDDAARDPIPDALKHCQGTSQTTPPEPSKSKLTSLGLRPSYLKTFDYNIRISPPFSKMLGPSLCIKSGKGADDKIQKSQESFKGMAQENTQAIEYN

SEQ ID NO: 188099 - protein, 334 aa, Zea mays
  Clone ID: MRT4577_103133C.1.pep
MTMNAAIASRLGLAVSRCGAGSRVDSRPLTPAVGFTAGPRARSVAVTAASSSPATGGVTPVPPRSNRSVMKRHTLSVFVGDESGMINRIAGVFARRGYNIESLAVGLNKDKALFTIVVSGTDKILNQVVEQLNKLVNVIKVDDLSMEPQVERELMLIKVNAEREKLPEIMGLVRIFKAEVVDLSDYTLTIEVTGDPGKMVAIQKTLSKYGIREIARTGKIALRREKMGETAPFWRFSAASYPDLEVAIPSNFQQNTGVKAINQNPEESSGGDVYPVESYESFSSTSQILDAHWGVMTDGDVRSCVLMTLNCFVLARDDPHLIVLISLEVVCCEK

SEQ ID NO: 188100 - protein, 85 aa, Zea mays
  unsure (1)..(85): unsure at all Xaa locations
  Clone ID: MRT4577_103134C.1.pep
MNSCSERLMLLLLLLLRSTSQLSAVAAAHQTCPADLDRKCNENVPDDCKEEYXFPDVPTIKYEDTTSNNPLVYKSDNQEEIILVK

SEQ ID NO: 188101 - protein, 81 aa, Zea mays
  Clone ID: MRT4577_103135C.1.pep
PSSASRTLTQVGIECCACDDYQNLRALLRPEGNPRSLGDDVQAAEHHDYEDMLACVRATKTCTPKHRTNACRERSAPARYT

SEQ ID NO: 188102 - protein, 103 aa, Zea mays
  Clone ID: MRT4577_103136C.1.pep
TVLHHNVFRMWNWNSRSHADLISDGIRIGLIRERIISDSYMYVYASLFLEDVQLQFHDEFRSHLVWLQDRHNNKSDNYHSYSTRCPNSCKSKHSQGSLSRLQA

SEQ ID NO: 188103 - protein, 48 aa, Zea mays
  unsure (1)..(48): unsure at all Xaa locations
  Clone ID: MRT4577_103137C.1.pep
FLGHQIISSWTFQGFPVCSKKPILYVKCSSKFSSQKKGPPPLSKAYKX

SEQ ID NO: 188104 - protein, 59 aa, Zea mays
  Clone ID: MRT4577_103138C.1.pep
WSRGSLDTDGGHIARAVTSTVDMGRADATETEQRSPRRRRRLGRLPLQRGCGQLLIEVA

SEQ ID NO: 188105 - protein, 102 aa, Zea mays
  Clone ID: MRT4577_103139C.1.pep
DEDATTTLLLLLCCLCSLLLLQNHNNAPPPPPHPSATVCGSSIVAIQERRYADAKTSMSAAVDAPVTCEDEFKEQGLEPPMRAETKRLFQQAVISLAIISLL

SEQ ID NO: 188106 - protein, 108 aa, Zea mays
  Clone ID: MRT4577_10313C.1.pep
AWGMSQLCYEGAIYSKLFCREDMYGEEVVFESTIVISLGGRELHHPAVAVVDAVRCGLYGRCHRGTCSFGRSPGRQMIGSGFPKTYFMAYPRRATYQFVGEGSEREIR

SEQ ID NO: 188107 - protein, 57 aa, Zea mays
  Clone ID: MRT4577_103140C.1.pep
TPTRPLNSSDRVPRAAIICVRVLTGVIVLIFLGGYLKPRLFRNRPLALVPVSKGKGS

SEQ ID NO: 188108 - protein, 78 aa, Zea mays
  Clone ID: MRT4577_103141C.1.pep
MGQDRGLASSLCWHSSVPHRFLEFCKENGGYTGCPFPAKLDLQQGQNLLQGLSKLSPSTSGPHSHDYLPQEREGEGGL

SEQ ID NO: 188109 - protein, 61 aa, Zea mays
  Clone ID: MRT4577_103142C.1.pep
TGPFPCYRARTRCYISESGVCTVVYIVCTKSIISSPVVVCSPPEELAPGLRRRAVSIQATT

SEQ ID NO: 188110 - protein, 68 aa, Zea mays
  unsure (1)..(68): unsure at all Xaa locations
  Clone ID: MRT4577_103143C.1.pep
SRSFRRSETXRIIGPLLNLLHEREPHVSRQAAISLTKFACTDNYLHVDHXKQIIIAGGATHLVQVVAP

SEQ ID NO: 188111 - protein, 88 aa, Zea mays
  Clone ID: MRT4577_103144C.1.pep
MWGLAGNQKGTCYGTSLFRFLRGPQREQSFGVYALFISRVLVSRLIRGKEKGSFHGPTQGVYPLVFFFLPKNKCENNKKNKKIKLKSH

SEQ ID NO: 188112 - protein, 123 aa, Zea mays
  unsure (1)..(123): unsure at all Xaa locations
  Clone ID: MRT4577_103145C.1.pep
MEGRLASLTSQAVHCGEVRXNHGGSYYKELMEKNTQCAKQAPTIGKCXQELCKLLLYTYLGCLPGQYESXYKELDVYNQVWKNTKDLKVDDLVIATICXLDLYAWFCVSEIAGTGLTLTGYKV

SEQ ID NO: 188113 - protein, 87 aa, Zea mays
  unsure (1)..(87): unsure at all Xaa locations
  Clone ID: MRT4577_103146C.1.pep
LRPAGSGSCPSGLRSGCSGLNALGKGAVVGRVLVVGAGLLRRRCAPRRVPRCLRPVLLLRCHGARXXLSSPLSPLPKPVPSFVRVPG

SEQ ID NO: 188114 - protein, 25 aa, Zea mays
  Clone ID: MRT4577_103147C.1.pep
SHNSALGYRVIISHMFMNTTCSANI

SEQ ID NO: 188115 - protein, 133 aa, Zea mays
  unsure (1)..(133): unsure at all Xaa locations
  Clone ID: MRT4577_103149C.1.pep
MAPPPSHLSSSTISASVFASHYLKDQLYGRLMSLHCHMYFGQIQNEYVYXDQKNLERELLRAHEESXRLSDVRVALHPLMKMSEADELIMSCTTFSRYYVLMLSTIMPSMLLETYSSVTLIFHSKDLVDELTS

SEQ ID NO: 188116 - protein, 176 aa, Zea mays
  Clone ID: MRT4577_10314C.1.pep
TYEEAVNTCLLSWLLLLGTLTLAARPDAGGGLDAATVAAQELDRVLSLPGQPSYSSASPKQYSGYVTTDEHLGKALFYWFFEATETPDEKPLVLWLNGGPGCSSIGFGQSQELGPFLVKKDVPELELNPYAWNQAANLLFLDSPAGVGFSYTNTSFEKDPPGDNSTGMEYVYMSVG

SEQ ID NO: 188117 - protein, 41 aa, Zea mays
  Clone ID: MRT4577_103150C.1.pep
SAKFVFESYVAMKMFGNVGTAATSTSAFWASGSSTSGGAFF

SEQ ID NO: 188118 - protein, 64 aa, Zea mays
  Clone ID: MRT4577_103151C.1.pep
TAEKLNLFQRCITHHQFSVDGPNSYIYSNIMSSKYTFRLDPATLSNQLVICHRLIAIGPDNRSS

SEQ ID NO: 188119 - protein, 64 aa, Zea mays
  Clone ID: MRT4577_103152C.1.pep
YRLASKMQFIHGVVILNMKPYLKLNHAAVDISLPLTRKPNVPLPVKHKNIYFSIRSEGWDMFFT

SEQ ID NO: 188120 - protein, 82 aa, Zea mays
  Clone ID: MRT4577_103153C.1.pep
LNALKSKGSVCVMFMKMRLERCYSSDSEGTPRYICNLKITANIFTLLWVFSTSVNLVFLCVFCRLVFFHPSTELKVGFVVTL

SEQ ID NO: 188121 - protein, 41 aa, Zea mays
  Clone ID: MRT4577_103154C.1.pep
FYGPLGSRLVGPARCSLATSTMIWSCNYLCRPEQSYVRSRQ

SEQ ID NO: 188122 - protein, 99 aa, Zea mays
  Clone ID: MRT4577_103155C.1.pep
ACRLSCCGRALLQVLEEDVRCPLVRVRRVGGTSSGGFGFRRARWVSRDGSEGRVVARLPVRPGEGPCRRAAGAPSAARRTVPADGVHRLVPGVLQRFSS

SEQ ID NO: 188123 - protein, 132 aa, Zea mays
  Clone ID: MRT4577_103157C.1.pep
IPSSPLRRRRTPATTPSTQPSTLPQQHRSRPSSYQLAAPPARLLSLHPQWWSDPRRVLVGACVRPPHSTLERPLLESSPPGKAATICLTKMTTAASSWGTHLVGDRPGETLLHEQGSTNRSRWINSPRSSPE

SEQ ID NO: 188124 - protein, 75 aa, Zea mays
  Clone ID: MRT4577_103158C.1.pep
RQCKRLVLREITRPASCRLTLFERKNGSLRFRSQVSDNSLCWEWGNRITPRYSFLRFSMRKMRKRRRVIRIGRPL

SEQ ID NO: 188125 - protein, 72 aa, Zea mays
  Clone ID: MRT4577_103159C.1.pep
CCLILETLFDLLACFIFSLRGMSGQTCFNFRKLETLLLVSELREVYFSFRIYNDRDTSLSICSVVIKTMVVD

SEQ ID NO: 188126 - protein, 238 aa, Zea mays
  unsure (1)..(238): unsure at all Xaa locations
  Clone ID: MRT4577_10315C.1.pep
MAPRPWWSPLALPLGPIVALLVLACCVAEASVVEHTFNVGNLSVSQLCQPPRVITAVNGQLPGPAIHAREGDTVVVHLVNQSPYNITIHWHGIFQRGTPWADGPAMVTQRPVKPGGNYTYRFNATAQEGTLWWHAHISFLRATVYGALVLRPRAGADAYPFPKPHAEXPXLLGEWWNDNVYDLQQMAFLTGRPARSADAYTINGKPGDLYNCSDXNQTYRGQVXSNETYLLRIINAAL

SEQ ID NO: 188127 - protein, 131 aa, Zea mays
  unsure (1)..(131): unsure at all Xaa locations
  Clone ID: MRT4577_103160C.1.pep
ARAPPFWDPPENFAPKRFKKSGQTFKGMVFGFPPSGAERRISPAMAFGLAPIKPPPRGLLFPFPXNPPEGVVPKKINMAKGVAIPPPPRFDLGGPPVTRPPGSKKCAPPPKLFSFGRLKTPPPLFFPFRGL

SEQ ID NO: 188128 - protein, 84 aa, Zea mays
  Clone ID: MRT4577_103161C.1.pep
MRSQVAAVAMFLLLLALGAEADLCVTRSRTFKGWCHQSENCITVCKSEGNTGGFCKLGACMCTKECVRSTDAAGANKAPQQHLS

SEQ ID NO: 188129 - protein, 116 aa, Zea mays
  Clone ID: MRT4577_103162C.1.pep
QVPSAVAQGAEGWRQRWPVPDPSVLWQEMILLLNEYVVSLGAWLAEPKSCMQLCRCRAHLWLSLDVALVSSHGSWMQQKRETSLLKSLMVGSGRWCGLGRAYLHYTSAVLDLTLQS

SEQ ID NO: 188130 - protein, 93 aa, Zea mays
  Clone ID: MRT4577_103163C.1.pep
SPSASSAPRCRTPRALPASWCNYNPQWMRLHGSPQGEIAKSEPESPKPSHRARALVHRPSGSSEILPEKAEKYSAKSLARIIQEVAETNGSPT

SEQ ID NO: 188131 - protein, 264 aa, Zea mays
  Clone ID: MRT4577_103164C.1.pep
MGSSKSLQPLRSATKTLNALPAAYAGAQVASRRYAGTLANFKIPTVNNEPNQHYAKGSVDRQKLQDAVARMKKRGPVEVPLAVGGEYIKTSSILTQNNPSSHADVIAKYSNASPADVKKAIDAALAAKPAWEALPFADRASVFLKAADPISTKYRYEIMAATMVGQGKNAWQAEIDAAAELCDFLRFNVKYAEETYGHQPVHNSPGVWNRVEYRPLEGFVYAVSPFNFTAIGGNLPAAPALMGNVVVWEPSPSAIASNWLLYQI

SEQ ID NO: 188132 - protein, 516 aa, Zea mays
  Clone ID: MRT4577_103165C.1.pep
MTVTAAAWPVCTICYEDLRPLSDQHLHCLPACGHVFHALCLEQWLEYCPGGKKKRTCPVCKQPCGAAHPPTRLYFSSTGTCPTQACSSPGSASGSADPEALAAEVARLEQKAASLGKVVEEQRQSINDLKSEAAWLREQAEAGDFMLQAAKKDKESVQILLNAKTEELSRKTSECGRLQEKSLALAKELAALKLSADMNLQEEEIMKFASLGNQGNLQNAVDVLKRSLAIRNKSYKELMVQCNVLGRSESRMQQKLEKAKEILKKLKARVQELEKELEDKENGLLRDLKSSKKFKADHIKSGNATANSAFTSSSPGYENQTNKLDEVMQDPCNDKTHFDRSKSEAGSVLNAQDNLDNKDVDVIDLEANDSVFGYEQKAQFSAKPFGTEDSTPNSENKSSLCQNDDRQSVASECTTAHATNGGPFLKHREATVKSTFMANIRAKLHIPRESPSVRTNATSSTLESETLTIDGISKQATRLASGTGPQQIHNFNSFSDDFQAPGIPGTDGARRSIGKW

SEQ ID NO: 188133 - protein, 76 aa, Zea mays
  Clone ID: MRT4577_103166C.1.pep
ICRGEIFTGYIVGAELGQSAVESPRAALAMLSSPLHWMCISSVQLAKERERELKRPDQDTVLIFSGSDPESSCHNL

SEQ ID NO: 188134 - protein, 69 aa, Zea mays
  Clone ID: MRT4577_103167C.1.pep
KVLPPTSINSSARLTSITVRSRTHCQDMENDLAKKHPHHTSTPQNKYINYSLSHNKNTTLNITYLHMLG

SEQ ID NO: 188135 - protein, 48 aa, Zea mays
  Clone ID: MRT4577_103168C.1.pep
MGGLHKQGGKGLINFCSGVLQNALHTLYIGACINSKGAKIGNWKHSPT

SEQ ID NO: 188136 - protein, 189 aa, Zea mays
  Clone ID: MRT4577_103169C.1.pep
MQTQSRLAMSGGGGTGGSSSSSASEDEHEAVIRELTRGHELTAQLRAEALRALRGQGQAEATAAFILQEVSRAFTVCLSIMSSPARAPPPTMEMPAPALAPRRGRDDSIPREQRRTSSPHSDGYQWRKYGQKRITKSPFPRCYYKCSFHRERSCRATKQVQQCSDGDGHPPQYVVMYFNEHTCDTAGWE

SEQ ID NO: 188137 - protein, 33 aa, Zea mays
  Clone ID: MRT4577_10316C.1.pep
TICGFTIVGRNYNTTYPLNHLIHHLRHKPYKFF

SEQ ID NO: 188138 - protein, 80 aa, Zea mays
  Clone ID: MRT4577_103170C.1.pep
IDPMSLHVMRSLFFFFFPPSLLFFFFFFFFFFFFFFFFSEDTYLLRVACYKELNHLDSNGFSVPLKYAFFFSALQHELTS

SEQ ID NO: 188139 - protein, 100 aa, Zea mays
  Clone ID: MRT4577_103171C.1.pep
KAAGSSGISPLSRPQTQSSFLGRMAFRSSNITADMDLVRQIEAKYPAFLFKQQLTAFVDGLYGMIRDNVKNDLSSLLAYAIQVPRTVIASMVRGRSFGSS

SEQ ID NO: 188140 - protein, 137 aa, Zea mays
  unsure (1)..(137): unsure at all Xaa locations
  Clone ID: MRT4577_103172C.1.pep
MVLIVGLALLAXGASAVSRTWPLLGVQTPAXYLPPPVYMHAPLYLAPQQEAHAWHYPTQXPEVSLRQQVGSCEGHGDGSPFLGHREEMLMHQRNPAATXPYGSTQRQALDDQRCHQIRQAEPMHRHQAXYGVDLQNF

SEQ ID NO: 188141 - protein, 67 aa, Zea mays
  Clone ID: MRT4577_103173C.1.pep
HQLYSGQATFENGGVTKDHSFAKDASPDDRATVSGDEHLKGIYLEVTKTNATGIGVANKEKITIESD

SEQ ID NO: 188142 - protein, 78 aa, Zea mays
  Clone ID: MRT4577_103174C.1.pep
SLSLSLVPPDADVSCGKCTSDSSTHSSTALVDADDGVDVDAHFAAERREAYYREDKFIICTHCTHDDKCDGRVRDESQ

SEQ ID NO: 188143 - protein, 29 aa, Zea mays
  Clone ID: MRT4577_103175C.1.pep
HYNFYNVSLNSAIHSNVFAHLIAAYISHE

SEQ ID NO: 188144 - protein, 66 aa, Zea mays
  unsure (1)..(66): unsure at all Xaa locations
  Clone ID: MRT4577_103176C.1.pep
LVPFGLVAAGXRAPFLTQPQLLPFYHPFAVGPASLLHLQQLLPFAXLALADPAAFYLLHIIGGALF

SEQ ID NO: 188145 - protein, 170 aa, Zea mays
  unsure (1)..(170): unsure at all Xaa locations
  Clone ID: MRT4577_103178C.1.pep
AAXAVGXVLPVLXGXLPGLSSRVXPVXVSVVALPVXXXXGASFXXSXXAXXAASXGXLXGXXGXVXGXLVSPAFLGAGGSGFFXAXAGXALXAXFVXLVSWXAXGWGSGPRVVALXRPXFXXRWGFFPPASPWLRLVAAPPSGWRVPLGRRVPAGSGPVLPFCFPSSLCR

SEQ ID NO: 188146 - protein, 496 aa, Zea mays
  Clone ID: MRT4577_103179C.1.pep
MSTRREVVLYHPLPAPGVTNNLKDGIQSKVMETVGNAINSFDPNALPRHIEGALGTAGNLINSFEPKWSGKNEFDLNGEADFLDGYECPDEYWGSAPVKAHKPVNIKNLLGGVIAIIGRTHASAEAEQPKDTKTSVSFLGSADDGNTFLHSSVYMPSAPPVLDEEALNYNIYRAVLEAEPPEWLPDSYASACMQCAALFTALTRGRHHCRFCGGIFCRACSKGRSLLPAKFRERNPQRVCDACYDRLDPLQNLLINSVSNASQTAKHDVMDWTCARGWLNFPIGLTMEHEIYKAANTLTSYSQVARINPEKSIPHAVLSGASGLAILTVVKAGAILTYKLGTGLVVARRSDGSWSAPSAILSAGFGWGAQVGGELMDFIIVLRGPEAVQTFCSRMHFSLGAGVSAAAGPVGRVAEADLRAGDKGSGVCYTYSCSKGAFIGVSLEGNLVATRMDANLRFYGDPYLTTSDILTGNVEQPNAAKFLYTALDNLYSGLDW

SEQ ID NO: 188147 - protein, 62 aa, Zea mays
  Clone ID: MRT4577_10317C.1.pep
KKFLVVSCPASAPGLRPACTLRVGCLRVSGYGQGSGIFSTGIMFRSLLNIISRGRSFPPLSS

SEQ ID NO: 188148 - protein, 50 aa, Zea mays
  Clone ID: MRT4577_103180C.1.pep
DLGVRILLRTGHSSLDGQRASPLSPFSPVRIEERAVVNRVCSRTGGYPPP

SEQ ID NO: 188149 - protein, 372 aa, Zea mays
  unsure (1)..(372): unsure at all Xaa locations
  Clone ID: MRT4577_103181C.1.pep
MGDGAPPPGALYSFGTPWPELNQGLTYTDTFRCADADAATTLIEFYSTNHKSSAPLPGWIKRIRNGQITVDGEVVTDPDMTLEPFAPYLLEVLYEDDDMVALNKPSGLQVLPKGLFQQRTVLAQLQLXTGRWPHLAGSREKXQSHPVPVHRLGRGTSGLLLCAKTKVAKVRLASYFAEGAINAAKKRDKSEFSEERKISKFYRALVTGILDDDEVVVTQPIGLVHYPGVAEGLYAACSSGKPAMSKVCVLERLAHQNHTLVQVEIHSGRPHQIRIHLAYIGHPLVDDPLYGIGGHPNFVEPESTGTDSSFASDGGYERPLQPVPGDCGYHLHAHWLVLCHPTTNKMVKITAPLPQILQTREERRAAAEQTGG

SEQ ID NO: 188150 - protein, 384 aa, Zea mays
  Clone ID: MRT4577_103182C.1.pep
MAKCYSDWPPIPPFHPSRRTPPQSHASPITIRRQLASFVLHCSRSCAPLLEPKNLPDEFEAVPATTTPPLPDAAIYSSVLRALAAAPEPAPAEDLYNEARDSTRPCRRRRFFSRTTPHGEGGLVKSSMEAAATLRQIGLRVTDCILSTIVNGFVKRRGLKPAIRAYDKLVLIGCEPGQVTYASVINVYCRLGRSDRAEAIFSEMIERGFDRCVVAYGNMISMYGKIRRASEATRLLALMKQKGCEPNVLVYNSLLDMHGRLGNSKQAEKIWKEMVRRKVRPDRISYTAIILANNRAGELDRCMELYQEFRETGRKVDMVMAGLMVGVLSKTSRFNELIELLKEMNGTKLDRRLYMSVLRSLRDAGLEVHVKWLQSNFTFMEEKT

SEQ ID NO: 188151 - protein, 386 aa, Zea mays
  unsure (1)..(386): unsure at all Xaa locations
  Clone ID: MRT4577_103183C.1.pep
MGDGAPPPGALYSFGTPWPELNQGLTYTDTFRCADADAATTLIEFYSTNHKSSAPLPGWIKRIRNGQITVDGEVVTDPDMTLGDGSKLVYHRFPWQEPFAPYLLEVLYEDDDMVALNKPSGLQVLPKGLFQQRTVLAQLQLXTGRWPHLAGSREKXQSHPVPVHRLGRGTSGLLLCAKTKVAKVRLASYFAEGAINAAKKRDKSEFSEERKISKFYRALVTGILDDDEVVVTQPIGLVHYPGVAEGLYAACSSGKPAMSKVCVLERLAHQNHTLVQVEIHSGRPHQIRIHLAYIGHPLVDDPLYGIGGHPNFVEPESTGTDSSFASDGGYERPLQPVPGDCGYHLHAHWLVLCHPTTNKMVKITAPLPQILQTREERRAAAEQTGG

SEQ ID NO: 188152 - protein, 67 aa, Zea mays
  Clone ID: MRT4577_103184C.1.pep
AHLRLFSNQSRAERKRFCQIMKRSLPFELSSFKWIALIFPTFLNDCNDFLLLRIPFYLKYITIIYII

SEQ ID NO: 188153 - protein, 39 aa, Zea mays
  Clone ID: MRT4577_103185C.1.pep
RPRCSNADIDNSFIGIYCRENKTCHKIKSIFFGRKNKLM

SEQ ID NO: 188154 - protein, 390 aa, Zea mays
  Clone ID: MRT4577_103186C.1.pep
LSARGQNKNQELMKQIEICQEENKILDRLHRQKVAEVEKLSQTVRELEEDVLQGGAAANVVRDYQRKVQEMNEEKKIRDRELARAKVTANRVAVVVANEWKDANDKVMPVKQWLEERRFLQGEMQQLRDKLAIAERTARSEAQLKEKYQLRLKVLEDGLRGTPSGSCRPPMEGKCISNGPPRRLSLGGADSISKISPNGVLMRRSPSFNSRSSLSTSSCLVLKHAGRTSKSFDGGTRSLDQGKVLGSGPHSLNRSTDAVRDCETADSWKANAEEKSNETANNDSADMVSGVLYDVLQKEVVSLRKACHEKDQTLKDKEDAMEMLAKKVDTLHKAKEVEAKKKRQEIAALEKKFAAVCLEQERLGNLRGPGTSQTVSGRTASRGGLTRNLQ

SEQ ID NO: 188155 - protein, 171 aa, Zea mays
  unsure (1)..(171): unsure at all Xaa locations
  Clone ID: MRT4577_103187C.1.pep
VSKIFPPVGLIEFFXKQARGPGIQSFLTALPYCSYAFGFYLSSVLVSLVXRVPASRXGGGHGGWLGDNDLDKDRLDLFYWMLAVLSVINFFCYLLCARWYNSGGADDGCDASASAQVAAEGDGNGKEIMNTNAGEGDDEQWILQRRTPRSRSLLYLGFIGRVGRPGNSGPG

SEQ ID NO: 188156 - protein, 111 aa, Zea mays
  unsure (1)..(111): unsure at all Xaa locations
  Clone ID: MRT4577_103188C.1.pep
SRVRAEGADARAERRELRELGSEQGEGNGHGGELQAEGDRWSGXSREEARSIGAGARREGEAWRRAARGDGAGRQKGEQRKLRRLGKRERATRQGEEGRLAGVFFPGRLRG

SEQ ID NO: 188157 - protein, 40 aa, Zea mays
  Clone ID: MRT4577_103189C.1.pep
GCDRPTNWFLCIEATTTGLARPVLNAHGREHTCIYSRVCG

SEQ ID NO: 188158 - protein, 33 aa, Zea mays
  Clone ID: MRT4577_10318C.1.pep
MSLNHKQVKVLLNFSKFFLISSNPYIIGIIERG

SEQ ID NO: 188159 - protein, 130 aa, Zea mays
  unsure (1)..(130): unsure at all Xaa locations
  Clone ID: MRT4577_103190C.1.pep
PTRAAGQKNTTGRNNPXRTPRATPEPNRATKREGNKQXDPXNAHTAFFYQEGVADLLWPXNCFHPKLEIRKDSKGVVTAENVTXVPSMLRIEELRAILPRXSDRRPTAGXTNMNDDSSPAFPMPLNHDTK

SEQ ID NO: 188160 - protein, 71 aa, Zea mays
  Clone ID: MRT4577_103191C.1.pep
TIKSLLFYFNIQEQCTLSVQPSSQHVLCGCGHVWIAEPTSAQRRRVLLLKNLEVCVWSFVLCNPLIIEAIY

SEQ ID NO: 188161 - protein, 113 aa, Zea mays
  Clone ID: MRT4577_103192C.1.pep
LYWFVSLIICKYAGEMGLKCVFFKKKPPSISSAFISINHPPPVSFGLFSNIYVPPVGPFFKFLRALLGSTPPPFFFLKKKKKKKKKKKKKKKKKPKKKKKKKKKKVLCVVTTA

SEQ ID NO: 188162 - protein, 87 aa, Zea mays
  Clone ID: MRT4577_103193C.1.pep
RCIWRWTTTRLLRKRHDSTPDTGLDPPSSSHPSLCHVLSTLSSVFLFCYLPLASTFSICRCNSKVLSDILRIFKPHGCGVTPRFMLT

SEQ ID NO: 188163 - protein, 129 aa, Zea mays
  unsure (1)..(129): unsure at all Xaa locations
  Clone ID: MRT4577_103194C.1.pep
GFVFCRARFPRLAPLVLFDPLSYPCSPLLGCSCVCPFVRVFVPCFCPSLAPVVASRLLLRGGCFWPVSLXGCRPRWRQGPFLPCLVPCRFARPSLFPPLCRALSRRXCSWLCPCPGRRCLGLLPRGCVG

SEQ ID NO: 188164 - protein, 236 aa, Zea mays
  Clone ID: MRT4577_103196C.1.pep
MPKKMGVNSKAEAARDRRSAAEADRRDRQERAKEEQYWAEAEGPKSRAARRREEDAEKRAEAAARKAENRRLAEAEAAAVAASASAPSKAAARKASRVAAPPPKVTEAELVRLREEERLRLEREAEAAKKRAARVAEEEEYERVVLVENTNRDDSLIEARSVEEAIARMSVVDPQASLPADKHPERRLKSTFKAFEEAELPKLKEEKPGLTLHQYKDMIWKLWKKSPDNPLNQAAD

SEQ ID NO: 188165 - protein, 208 aa, Zea mays
  Clone ID: MRT4577_103197C.1.pep
FPQGRSSSSTPSCTSVFCSCQVPTPALLLLFSVLASHLCSIFQRRPRPAALSPTSSQLASHRHDRRSQCRLLQSAPPRSSSLILRLPVAEARVALSLTGFSVRALTRARDLAASLELALTCSTTPHQLAPNMISSSFRVSARNPKTKLAARYFPSARQITWIGKSLPISRIRVSCGNGAIINHVIRKMTQVDPKRGLLRMEMLMNEPV

SEQ ID NO: 188166 - protein, 101 aa, Zea mays
  Clone ID: MRT4577_103198C.1.pep
MFQEKFSRDRLLNLIDMFRVSHSLAQEHGAIGLQRLAIWWIQNDCQQWPTMSQFVKVLSGSITVGVHIDSNFVVPHSAFLRARTIVVILAPPLVSEVSGLR

SEQ ID NO: 188167 - protein, 56 aa, Zea mays
  Clone ID: MRT4577_103199C.1.pep
PKPLAIIRVYRGGTITHSGFNAVGKGEWHWPFRFYNCWEKGYVRASYLFGQLQGFA

SEQ ID NO: 188168 - protein, 118 aa, Zea mays
  Clone ID: MRT4577_10319C.1.pep
FHVKKQYDAHSKAQALKFRRRHGWIRRCRSFPDRIHRRLHWSKAGAAPLASADACAAPASLSRILDDRSRKESKGSTRLLLSIFVSPRQPLMLKLRPPRLRLPRHPGTIIYMECTSVS

SEQ ID NO: 188169 - protein, 66 aa, Zea mays
  unsure (1)..(66): unsure at all Xaa locations
  Clone ID: MRT4577_1031C.1.pep
HCEXKGPXYXPPLLQSNLHEDLCLXLWXSLGXXKPKRXXASPFWXFXVXGRQXXTXXTXNAXXPXX

SEQ ID NO: 188170 - protein, 116 aa, Zea mays
  unsure (1)..(116): unsure at all Xaa locations
  Clone ID: MRT4577_103200C.1.pep
MAPMGGTNSANNTPLEDEPAVAXTTAGKKPKAQNAIPDGKSDAMDDGEGKRGLKKVTISVETYTIYILXALNLVLPYISISSKAMSIMNSFIINMFXKLVSEAIKLARYNKXPTIT

SEQ ID NO: 188171 - protein, 29 aa, Zea mays
  Clone ID: MRT4577_103201C.1.pep
GRVGGFVGGLVGLPDKTNTSRLVHSGWLS

SEQ ID NO: 188172 - protein, 61 aa, Zea mays
  Clone ID: MRT4577_103202C.1.pep
NKKIPFPTKKKNNKSSFKRPKGATALGTSNPTTLRETDQEVPNASCDEKGGLKKVNRELHE

SEQ ID NO: 188173 - protein, 45 aa, Zea mays
  Clone ID: MRT4577_103203C.1.pep
RIPLTYLSTTCLCSRPFFLCSIYVVPIQQKVPKDFLVYLITLYLH

SEQ ID NO: 188174 - protein, 34 aa, Zea mays
  Clone ID: MRT4577_103204C.1.pep
EVQRTYYRRVQAFIMETGCGHKSPDTAPPVAHLN

SEQ ID NO: 188175 - protein, 45 aa, Zea mays
  Clone ID: MRT4577_103205C.1.pep
MGLSSLNTRASPETYHHATCNCLKRMTVRFDRDDRMTNLDNITVK

SEQ ID NO: 188176 - protein, 133 aa, Zea mays
  Clone ID: MRT4577_103206C.1.pep
TSVNFLSGGAGGFCPFVFFKARRGGTVTTKTGRISSFGGPVIPHQVQFDVVSSSSVVCALSIRVVGDCNPLVDYYPPFVVEVEVICLLKPSISPQVILLGLPKIFSRGRNFRSPPIGGEFSGEFLGQVKGLMS

SEQ ID NO: 188177 - protein, 56 aa, Zea mays
  Clone ID: MRT4577_103207C.1.pep
APLKRFFFLFAHALLVPLFLCWGQQLLCWASNGELWGIACTSRGPRGGGTTTFCPI

SEQ ID NO: 188178 - protein, 95 aa, Zea mays
  unsure (1)..(95): unsure at all Xaa locations
  Clone ID: MRT4577_103208C.1.pep
PRTAEQILILHIPLLXGGQKNNVLKKSXLTSERENRVGFVPLKIQVGKLCSWRLASGQCYTVFYLKYSSSYFLRXXNTLVNGLSATGAYSLRSGN

SEQ ID NO: 188179 - protein, 141 aa, Zea mays
  unsure (1)..(141): unsure at all Xaa locations
  Clone ID: MRT4577_103209C.1.pep
MTNARSPAPVNDDRMLKFAELPPKRLHRFITFMMDDKLQEIDVDHVEDRSTSYDDFXNSLPDNXDCRYAXIYDFNFVTAQDGLKSRIFYMLWSPFSAKENSKMLYASCDQICSSGLNGIQVELQATDASEINLDEIKDRAR

SEQ ID NO: 188180 - protein, 294 aa, Zea mays
  unsure (1)..(294): unsure at all Xaa locations
  Clone ID: MRT4577_10320C.1.pep
HWGPRGRPVLNFLSPRPLRLVALEASSAASRRATMAAAVTLLRLPLARLSYHLRSVPSSRLPSPRLRIFASHRLFSSLXMAPPLLPPXAAVAEVVGVPDAEEESVEEESAAEAEAEAPRSFVLPRLPRPKLSVKERKELASYAHGLGKKLKSQQVGKSGVTPNLVSAFSDNLESNELLKLKIHGNCPMELPDVILQLEESTGSIAVDQIGRSVILYRPSTSKMKKKQQVDENARRFSRTEEGNARRFAKSEESFEERPRNRPGRRSVGPGSTFKGAQQKRRPMASKGSSSYGRG

SEQ ID NO: 188181 - protein, 56 aa, Zea mays
  Clone ID: MRT4577_103210C.1.pep
RANTPPCPSDPPPARRSGSICGRSAFLGCNRRRQGGALTKCAPSLYRMVWDLESVA

SEQ ID NO: 188182 - protein, 224 aa, Zea mays
  unsure (1)..(224): unsure at all Xaa locations
  Clone ID: MRT4577_103211C.1.pep
ALRILTDFSPPKGLRVREFPELPTSHERCVTLTCPLFTRNTPPPLASVARFIMFGKRSLASSKDKDRSGKITKQPKRSFRDASKQKAMAEKLDARKDSPMMDGGSPQLTSAIVTVIVGSDQRLFAAHEDVLCHSPYFAELLRSQFFESTNRRIDLPTEEPEIFSCILEYLYKGDYYPRLVHDKRRQTWMLEGAIASPDPNKTGDRAAAVEPTFFHTXRGRRSSP

SEQ ID NO: 188183 - protein, 42 aa, Zea mays
  unsure (1)..(42): unsure at all Xaa locations
  Clone ID: MRT4577_103212C.1.pep
RGASLRATXFAVAXVAASCALGSRCRDALRLYGSIVPVXLTP

SEQ ID NO: 188184 - protein, 53 aa, Zea mays
  Clone ID: MRT4577_103213C.1.pep
TSITLVFFQDSCVVFVVQCTCCTYSLFCCTFDALYFDSNIKICVNFRFISAIF

SEQ ID NO: 188185 - protein, 87 aa, Zea mays
  unsure (1)..(87): unsure at all Xaa locations
  Clone ID: MRT4577_103214C.1.pep
AYRDFIKVLEADIQYAITLSSEFPRDYDGACLQMRLLYSSEADIFLLLVLGADCTLVGALGLLLILISQVYVDGHTXCRFHERKATL

SEQ ID NO: 188186 - protein, 47 aa, Zea mays
  Clone ID: MRT4577_103215C.1.pep
LSSSDPRHHLGETQFSSLMIVRCFTVVSSSMTYTRSLSRSIVQGAVS

SEQ ID NO: 188187 - protein, 202 aa, Zea mays
  Clone ID: MRT4577_103216C.1.pep
MKRCIAAVLLVLSLEALAAGRLSATVADDHVDTIRLPSNDLADEVATAATEIGAEKTRPWKCCDRPLCSRSIPPRCRCMDAVEQCDEACTRCEASQSDPSKRICNDRYHGWPGPSCTNPDADDIATGPGVSGPPVAVATEEEVVSEESAVVGTEKPRPWKCCDDTLCTRSAPPTCACNDKVKKCAKTCKKCDKDESDASRFV

SEQ ID NO: 188188 - protein, 67 aa, Zea mays
  Clone ID: MRT4577_103217C.1.pep
NTSCPIKYAPVLSRCQCFCNVPLKRCIHGHATSDAWFHLRVMQSLIIGNAGFLTDHNIQGFGSFVLV

SEQ ID NO: 188189 - protein, 52 aa, Zea mays
  Clone ID: MRT4577_103218C.1.pep
AWGKTYANGEFWFCCHVCEKGFHGKCVGITPPKAERINQYKCPGSSSKRSRE

SEQ ID NO: 188190 - protein, 38 aa, Zea mays
  Clone ID: MRT4577_103219C.1.pep
LARPYPFPFMGDPGKLFCAHGYFLCGKLPVRHGVVSCF

SEQ ID NO: 188191 - protein, 93 aa, Zea mays
  Clone ID: MRT4577_10321C.1.pep
IVSYISHYIFYEENTVEKSLKNPVLVIGQKRQLFFELGSKSGFYFWHFLRAPFGKMGQDVKKTFQQKNANRLPEEAHPRGYWNHLVFLELFPR

SEQ ID NO: 188192 - protein, 112 aa, Zea mays
  unsure (1)..(112): unsure at all Xaa locations
  Clone ID: MRT4577_103220C.1.pep
MQSDSHSLPDQSYGVRCSMSLRRDQQGLGDTATYGRVRRYEVCEATPTTSSRQFQFELYKRRTTVLLPRDLFLDLVLELDALAXLKLVAPNHRTDLMLACWIRERKESITVL

SEQ ID NO: 188193 - protein, 210 aa, Zea mays
  Clone ID: MRT4577_103221C.1.pep
MSSGGGGRVPAAAAAQSQELQLPPGFRFHPTDEELVVHYLCRRCAGLPISVPIIAEVDLYKHDPWQLPRMALYGEKEWYFFSPRDRKYPNGSRPNRAAGAGYWKATGADKPVGTPKPVAIKKALVFYAGKAPKGDKTNWIMHEYRLADVDRTARKKNNSLRVRCDRSSSGRRVHQNISFVSVQKIISCSYILLFVNNIYLLSLPYQQRKS

SEQ ID NO: 188194 - protein, 147 aa, Zea mays
  Clone ID: MRT4577_103222C.1.pep
CPQLLGSHWGPPCSPSRCPSPCFLKTRGFSFLEPPPVLFCLLCQSLTLCPSSRARLSSKPPPCLANFVLKRALPPVEISFDSRGLGPPQFLSPDTFFPPLLKCWAPAPPRFCRVFPCWASLEKKKKKKKKKKKKKKKKKKKKKKKKK

SEQ ID NO: 188195 - protein, 81 aa, Zea mays
  Clone ID: MRT4577_103223C.1.pep
RPRRSFRVYPHALVSHAGALTTRGSGLSSWESLKAVMSREQLLLKRTSVMYIFKVTQVIILALMDMTEVLRIQMPHGQIAD

SEQ ID NO: 188196 - protein, 70 aa, Zea mays
  Clone ID: MRT4577_103224C.1.pep
GCFFPWQNLGGDQVPRSGFFFPKKGGFLFGEDPLVGCFAHPGFIFFFRARFFPFFFLGPNLLGLVYPIAL

SEQ ID NO: 188197 - protein, 149 aa, Zea mays
  Clone ID: MRT4577_103225C.1.pep
VQTPGTVEQAWVGAGKQRRPVGAPGGGAVVPTESWWRGACRRAGTGGAAFSECGSGGGGGGAVPDLRLRRRNPPFPGQWGHREVEPLFQQPRVGGAAPAAGQGLVVLPSRSAAAAEQCQICDPDGAIHHSLASALHQDLTINKQACPVS

SEQ ID NO: 188198 - protein, 43 aa, Zea mays
  Clone ID: MRT4577_103226C.1.pep
DSNNMFIITSSQEYKHKITLNLRRIRKHQVILEYYYKYSLHLQ

SEQ ID NO: 188199 - protein, 147 aa, Zea mays
  unsure (1)..(147): unsure at all Xaa locations
  Clone ID: MRT4577_103227C.1.pep
GGGQNPKRKGGGIQGNTGNSLWAQQKRAGGPGTPNKAKKKGPGGPGSPRGARGISGPPAWFPGPPRGGQRTGGGERPCPTKTPGTPGGSKGTTEQGGPGENFKGARGGGKFSSGXGNPPRGEGLWANPXRPLGLREGPLDPPLLKPR

SEQ ID NO: 188200 - protein, 143 aa, Zea mays
  unsure (1)..(143): unsure at all Xaa locations
  Clone ID: MRT4577_103228C.1.pep
MASLAASPEPXDIRSLDGSSISGMKLADCRSAALSILGPRANDVKINYLDHNDYFDITPHPXTTEQWDLYGSDTPXPYNPLQSKFFKTFAGPITKRGLMLKLLLMDXTSLLIYXXSTSASPDLLTIKTRPQETLACRSLRMNI

SEQ ID NO: 188201 - protein, 58 aa, Zea mays
  Clone ID: MRT4577_103229C.1.pep
WNTNCCSEEPKLSHAKNDYSFCTTVGIQSPTNGGDKSCLPHIRPRVSFCPNGCRSISL

SEQ ID NO: 188202 - protein, 68 aa, Zea mays
  Clone ID: MRT4577_10322C.1.pep
FQCIPQAPVRACFIWGSNKPMVPLRHGVGNDEWFSPCQGLFLVYPKKKKVVLGAAKIKKNRQINKKKC

SEQ ID NO: 188203 - protein, 156 aa, Zea mays
  unsure (1)..(156): unsure at all Xaa locations
  Clone ID: MRT4577_103230C.1.pep
MISEVLGGPRASSIECMALVLNSETGTMMPAXALSAAEYSDIMVELTKDFEMSAFNKTPEFLMMNPLGRAPGLETPDGPVXDSNAIGRYVARLTDDYPLLSSSRIRXAHFRHRMDSTAAEEDPAAAWYSDPEIAHLPYDTSSEDSYILSCDTALVA

SEQ ID NO: 188204 - protein, 55 aa, Zea mays
  Clone ID: MRT4577_103231C.1.pep
FVSPPPLPVLDFFFGLFFFLCPWVKKKKKKKKKKKKKKKKKKKKKKKKKKKKNTT

SEQ ID NO: 188205 - protein, 141 aa, Zea mays
  Clone ID: MRT4577_103232C.1.pep
MCAKKKKKMARTHPLAQKATSVHTPHKFSSCPWQQVGVYYTGSVALPSELVWFCFVSFWLGFHRHRAPATEMADWGPVVVAVVLFVLLSPGLLLQLPAKGGRFVEFGNFQTSGASIFVHAIIFFALAAVFLIAIGVHITTD

SEQ ID NO: 188206 - protein, 70 aa, Zea mays
  Clone ID: MRT4577_103233C.1.pep
MADWGPVVVAVVLFVLLSPGLLLQLPAKGGRFVEFGNFQTSGASIFVHAIIFFALAAVFLIAIGVHITTD

SEQ ID NO: 188207 - protein, 98 aa, Zea mays
  unsure (1)..(98): unsure at all Xaa locations
  Clone ID: MRT4577_103234C.1.pep
PTFWAKTEQGVAQAIIRSVIDFKRYPWPKVSDNGKELVRGMLDPDSKRRLTAHQVLGQPWLQNIKEAPNVNLGGTVXKARLQQFSEMNKFKKHALRVI

SEQ ID NO: 188208 - protein, 114 aa, Zea mays
  unsure (1)..(114): unsure at all Xaa locations
  Clone ID: MRT4577_103235C.1.pep
PKGGRKWAPPPGGVKNPQRFPPGPVPFREIPKPQKSRELLLRKLPSHRLVGEFAQAFKPPLGFQSPPVPPLKEPPKGYLVGLFXDPPLCPPPPKRVPLMPKDIQLAPRIRGERP

SEQ ID NO: 188209 - protein, 137 aa, Zea mays
  unsure (1)..(137): unsure at all Xaa locations
  Clone ID: MRT4577_103236C.1.pep
EVFNLINHDIYVCITTNELETVMTSLAKNPTEAELTDVMIDDDADXHVAIXDFPEFLILXMSSKMMDTXPRYQLDDTFPVINKDQKGFISTAELRHVMTNLDSNLTKEEXHDMIRSTDVHEDAHILYDEFEYVKMSE

SEQ ID NO: 188210 - protein, 96 aa, Zea mays
  Clone ID: MRT4577_103237C.1.pep
PRVRGHLGLIRCWMHHEYEGGLCMVNGACDDMNRSQLYKLCCYDLACHLLELYQHKHKRTKMLEALGVLRDMHHNVANVILPGHAETYTVHTNMTV

SEQ ID NO: 188211 - protein, 48 aa, Zea mays
  Clone ID: MRT4577_103238C.1.pep
SFCVTRTLLLCQPALPSFSPFPVGILVTTMLVRSGTRFLLLLAQKLLS

SEQ ID NO: 188212 - protein, 90 aa, Zea mays
  Clone ID: MRT4577_103239C.1.pep
MWLCVGVFVDVQEGDNADGQVGGHLGGPVVVLADQDVRLDPVQLLHHDQAMDRRAGTCSWLLLQQCSEGGCCCPRGTFLTSMAVGRPAPI

SEQ ID NO: 188213 - protein, 50 aa, Zea mays
  Clone ID: MRT4577_10323C.1.pep
NQVDNFKDLFFLAFIFKGLVSKTVIEPTMISLKIPGLDLSRRKRQNGCSC

SEQ ID NO: 188214 - protein, 96 aa, Zea mays
  Clone ID: MRT4577_103240C.1.pep
RWFPDRFTPWKSLDVDVYNSPEYKEPWPPPAQFVILGARAWLTVIWQLLELVTPTYAGQLKFGELARFDSYSLFHVFGIRGWGLLAEMRTVSSMAL

SEQ ID NO: 188215 - protein, 166 aa, Zea mays
  Clone ID: MRT4577_103241C.1.pep
VPSGSAGVSKLCSSELLCSSSPIARSQPVSVLLPPAKAARPPAPAVDSAYVLSSSTSSLCSSLPSSTGALVVAELLARRDIIAVFSPAALDPQLLLVVVLDNPQPLLRPRRTRAPHTRQAVVLGVFSPCGLTGSSRFIGLSRVRAEHQEEELIFVKEEPAPVLLIQ

SEQ ID NO: 188216 - protein, 47 aa, Zea mays
  Clone ID: MRT4577_103242C.1.pep
PWGALWAPYGARRQNRRTCTSSLTSPQPPPSPSEIWCSTSEGGRPRV

SEQ ID NO: 188217 - protein, 173 aa, Zea mays
  unsure (1)..(173): unsure at all Xaa locations
  Clone ID: MRT4577_103243C.1.pep
IRLESDGIIGAGSSGTVYRAKMPNGEVIAVKKLWQPSAQKEGGXLRRRRSXKRKDEADADDGNRSMLAEVEVLGHLRHRNIVRLLGWCTDGEATLLLYEYMPNGSLDELLHGAVCRGKQAGLDWDARHRIAVGVAQGMSYLHHDCVPAVAHRDLKPSNILLDADMEARVADFG

SEQ ID NO: 188218 - protein, 157 aa, Zea mays
  Clone ID: MRT4577_103244C.1.pep
NESNRKAAQRKHAEHDGLPGVRSASTTRSKQGLWVVEDDDAKELWVERGRRESDDDVTTRQELSDDKSTGAAAMRSRDTTLKQQDDDEVELGRLENGAEVRRTGQAESEELQRSSLEHSLETSKYRVAAGARKHGIEGIKPHPIWLATEGGALAYGN

SEQ ID NO: 188219 - protein, 45 aa, Zea mays
  Clone ID: MRT4577_103245C.1.pep
MDRFTEGSMGSSSFFHPLRISTWKVEPLDASSFTSYGFRIAFRFW

SEQ ID NO: 188220 - protein, 211 aa, Zea mays
  Clone ID: MRT4577_103246C.1.pep
GFMPSIPCFLAPAATLYLLVSKLCSSELLCSSSPIARSQPVSVLLPPAKAARPSAPAVDSAYVLSSSTSSLCSSLPRSGPAYFNTFLQPSELHLVVVLLFQRRIPLPHRSSTGALVVAELLARRDIIAVFSPAALDPQLLLVVVLDNPQPLLRPRRTRAPHTRQAVVLGVFSPCGLTGSSRFIGLSRVRAEHQEEELIFVKEEPAPVLLIQ

SEQ ID NO: 188221 - protein, 164 aa, Zea mays
  Clone ID: MRT4577_103247C.1.pep
PRHPPCTCSFPSCAPASFSVVLPQSLALSLSGPAYFNTFLQPSELHLVVVLLFQRRIPLPHRSSTGALVVAELLARRDIIVVFSPAALDPQLLRVVVLDNPQSLLRPRRTRAPHTRQAVVLGVFSPCGLTGSSRFIGLSRVRAEHQEEELIFVKEEPAPVLLIQ

SEQ ID NO: 188222 - protein, 179 aa, Zea mays
  unsure (1)..(179): unsure at all Xaa locations
  Clone ID: MRT4577_103248C.1.pep
MAALRLASLTLRPADDSYGATSSVPGAASLSSAGRGLHSLRLAPPRRRRGDLARPRAENKAVVESYTSALTEEAVKNGTLDQTVSDLQKLEKIFANEAVHEFFNNHTVPSEEKAHLIGEICKLFEXMQPHGENCLNVVGDTYRASIVPETGVKFKNEYKWLTXTEDVTVTYDMQFESQD

SEQ ID NO: 188223 - protein, 47 aa, Zea mays
  Clone ID: MRT4577_103249C.1.pep
NNQRQPVAIIEIGLRPCLSRFCGDLCPQALDVSLVRFSSDHHLEGKG

SEQ ID NO: 188224 - protein, 222 aa, Zea mays
  unsure (1)..(222): unsure at all Xaa locations
  Clone ID: MRT4577_10324C.1.pep
MGGSGTLISVYPEELTFLFLAXVVEEKPCYCNLKVVNNSEHHVAFKVKTTSPRKYFVRPNASIVQPWDSCTITSKHLFLHGPWLCLASSVWISMCECLCLPAFSPIWGXVTLQAQKDYPPDMQCKDKFLIQSTKVAASTDMDEIPPDTFNKEXDKVIEEMKFKVVYTLPSYGGSNDSSVSFLGSRSFKAASDDLMMLKNASLEEVIRSMPTILTIFFTLGLH

SEQ ID NO: 188225 - protein, 55 aa, Zea mays
  Clone ID: MRT4577_103250C.1.pep
AYRLNFVLRSRRHNPYRESTFLSVPVFTTCTFEPPQQILAGAGPRQLLLPPGPSY

SEQ ID NO: 188226 - protein, 59 aa, Zea mays
  Clone ID: MRT4577_103251C.1.pep
HNPPKPVYTHPTPIYHPLADHKMVQVPKTDPQLFKKLLPFIKKNPFFKKFPPAKEDTKP

SEQ ID NO: 188227 - protein, 108 aa, Zea mays
  Clone ID: MRT4577_103252C.1.pep
TRGALKNRTRSRTPPRGGPGPWPGRENPPPNYGRRRPPTWSVHERKGAPRGLCFFPCPFFFFFPSRGGKKKVAFFKGGGVVSSFFFQRLIFPPCQGLVPPFNRGGLFL

SEQ ID NO: 188228 - protein, 62 aa, Zea mays
  Clone ID: MRT4577_103253C.1.pep
VVPNPVKKFNAARQIVVCSAIGRINREKLIGWGSEPNRQTVLDGQHQKGHLANLRFSCCPST

SEQ ID NO: 188229 - protein, 429 aa, Zea mays
  Clone ID: MRT4577_103254C.1.pep
MAPLHAALPPPSSAAAHHHAAAPHVFLARSLYHPRRAAASCPLAVAAAPSSRKAFLSCPLLGHWTTAAPPRAIPSSSSSSTPALIASVQDLYDFICCGPLVDRIGYTSEKIAESIDRWLLAGARVARLFRLNELQLSDAEKARIYHFYIPVFLWCEDEVMVHRARYNDGDDIPPLVIGVSAPQGSGKTTLVFALDYLFRVAGRNSATLSIDDFYLTAKEQNELRDRNPANALLEFRGNAGSHDLQLSVETLESLIKLTKEGMKMKVPRYDKSAFGGRGDRADPSVWPEVEGPLEVVLFEGWMLGFKPLPNEVVKEVDPQLEVVNKNLEAYSDAWDRFIQSWIVIKIREPGSVYQWRLQAEVAMRADGKPGMSDEEVMDFVSRYLPAYHAYLPTLYKEGPNGSNPDHLLVIDIDENRNPICGGSWDISCL

SEQ ID NO: 188230 - protein, 43 aa, Zea mays
  Clone ID: MRT4577_103255C.1.pep
FLTPRPSVPHTGTPLSLQSCHGRWKRALCSFSVSFKYKVPLYT

SEQ ID NO: 188231 - protein, 47 aa, Zea mays
  Clone ID: MRT4577_103256C.1.pep
RRPTDHVFVDELNIVKFGDIIFPNKVLHVIDASLCDDFNSAQINIVT

SEQ ID NO: 188232 - protein, 173 aa, Zea mays
  unsure (1)..(173): unsure at all Xaa locations
  Clone ID: MRT4577_103257C.1.pep
FTLGVERPFTIXHVIAKYQDKEGITPNQHRLIFXGKQIEDRRTLVDYNMQNESTLHLLLGLXGGMPKHHRTPSSGKTITIVVXESSHTIXNGQEPKIHKQQKASLPXTMQRVIFNSKPLGDGXPLTDYNIHNESTLHLGLRLEGGMHDFQKTLTDDEITLAVELVYAINNDNA

SEQ ID NO: 188233 - protein, 83 aa, Zea mays
  Clone ID: MRT4577_103259C.1.pep
QYILQAIDSMVLSIIPGTIGQRPCELCGSQQATQRAVAILSAAQGPPSMCGLYHSYYQNNPCSIYDMSGVCNSRSVSTNPLNS

SEQ ID NO: 188234 - protein, 44 aa, Zea mays
  Clone ID: MRT4577_10325C.1.pep
ASKHWIMRFDSKVWWGSNVEASCTKPIERSHGYAQISLTLKTGR

SEQ ID NO: 188235 - protein, 76 aa, Zea mays
  unsure (1)..(76): unsure at all Xaa locations
  Clone ID: MRT4577_103260C.1.pep
LHHRSVPPCAFSFGFCPKCIGGRRREPNAENVSPGPXTERTDXFVLRGAHIFAXXNDTFIHITDMRGRETLVLISG

SEQ ID NO: 188236 - protein, 74 aa, Zea mays
  Clone ID: MRT4577_103261C.1.pep
SIGAPDTEICCEGEPIKREDEERLDEVVYDDVGGARKHMAQIRELDELPSRDPQLSKSIGAKPPKGTIAAGPPW

SEQ ID NO: 188237 - protein, 82 aa, Zea mays
  unsure (1)..(82): unsure at all Xaa locations
  Clone ID: MRT4577_103262C.1.pep
AQQKGGQTEKKGRNQRITVCIITLPHTTIHALCHHREKRGGGXGNTTPPLHQACTEKARWCNSSTHXQVFQRMNRTSTIPCH

SEQ ID NO: 188238 - protein, 44 aa, Zea mays
  Clone ID: MRT4577_103263C.1.pep
PNQFICVRCTAPLIQSKGQSQNAISYDYTPRESVNNCCKVRPPG

SEQ ID NO: 188239 - protein, 74 aa, Zea mays
  Clone ID: MRT4577_103264C.1.pep
MCQPNQTAHLTMSSARIGPARPDLGSKMRDGALLPTHGICNITLKLEVFYLRPDATTYPTPVMSFHKLGLEDSS

SEQ ID NO: 188240 - protein, 132 aa, Zea mays
  unsure (1)..(132): unsure at all Xaa locations
  Clone ID: MRT4577_103265C.1.pep
PGSSFPTHAVVPHMFTNGNKNVLLFAVKTAYSYPRAGKIKEFLKVPNKFAVTSPVYFGDSGLAPAPKEEDKTPEPXNRSRTXMGFSLFEVLKGCFCQTSASFGFFYHLQVLFPTVFSRQTIVGKRQLYLLYY

SEQ ID NO: 188241 - protein, 99 aa, Zea mays
  Clone ID: MRT4577_103266C.1.pep
WVAECAGGSSPLALLRGRVASIGGTEGMRKQVASLISGSDMRACGVRVSSCTEILGCGRKRKRSTKNSLGKMWILNGRQRSLCSSLFLRSGFIQAGGWI

SEQ ID NO: 188242 - protein, 50 aa, Zea mays
  unsure (1)..(50): unsure at all Xaa locations
  Clone ID: MRT4577_103267C.1.pep
XVLCCTVFMRSASVFLHSVAYLFPWQQISYTVEKHRSRTHEHSSSYHFLT

SEQ ID NO: 188243 - protein, 58 aa, Zea mays
  Clone ID: MRT4577_103268C.1.pep
RVFREQVVVSSGKRVYCFLQDSIMCCNVIKIICSCHGPCTFVSHKPFWFGSEVKKKKE

SEQ ID NO: 188244 - protein, 50 aa, Zea mays
  Clone ID: MRT4577_103269C.1.pep
SGNSRLEYSTSANLPVSFQRYPMPLTPYTVASRLVNIHLSGPWSVVGISN

SEQ ID NO: 188245 - protein, 55 aa, Zea mays
  Clone ID: MRT4577_103270C.1.pep
GRAPRAPRPPPGSPPAALPRPPPRSGSGPRQCPTGADPQASCPHQGVARLARAYS

SEQ ID NO: 188246 - protein, 75 aa, Zea mays
  unsure (1)..(75): unsure at all Xaa locations
  Clone ID: MRT4577_103271C.1.pep
KELEKEPKFLKNGEAGMGKIXLTKPMVVETFTGNPPLGRXAARNKRQTVAVGVTKSVEKKDPPGAKVTKAAAKKK

SEQ ID NO: 188247 - protein, 82 aa, Zea mays
  Clone ID: MRT4577_103272C.1.pep
PSYRTNPWGVSLSIPPEYLFVNSGNLLCPLLPNYKSNKAVRLHTLSFVVFPIKYAWSKKRFGFNGDGTENEQLLVQKKKKLV

SEQ ID NO: 188248 - protein, 98 aa, Zea mays
  Clone ID: MRT4577_103273C.1.pep
GPARPLQNASFLPSIWFFPYKCYFPRFVFLNSLPCQVLMVFPFGFQVLTFWCPAPLPYGCCVVFCFHSSPSPLRPRSIFFFLGLNYFTMGGKLCKNVW

SEQ ID NO: 188249 - protein, 69 aa, Zea mays
  Clone ID: MRT4577_103274C.1.pep
CPLRKSTALHWNWKSGGGDPFATLLLQPMDLVLIFALLAMGQLCKVLTHAMHGWKEGVLALAVGDRTLL

SEQ ID NO: 188250 - protein, 103 aa, Zea mays
  Clone ID: MRT4577_103275C.1.pep
MVTVAERFPREVSSEAVFRCVRLGPVDQAEAEVAYQTTVSIGGHVFKGILHDVGPTACLPLESEAAPSSTTSATPGTDCRRARQPLAKQAAVAWGVSSCHRLW

SEQ ID NO: 188251 - protein, 67 aa, Zea mays
  Clone ID: MRT4577_103276C.1.pep
NTKKRTKKTQEGKLKKPHKTKKKTNKNKKNQQKKTNCSKQNKCYAPIYFIQLACTYGNLNCLLRPFS

SEQ ID NO: 188252 - protein, 132 aa, Zea mays
  Clone ID: MRT4577_103277C.1.pep
RPPHCQAPPLAPRRQSTPPLGRSFTSSSSRFHPAASSSSPCRQLPETSTASWPPRRQRLVEVLSSPRDLPAARPVELLSACGCGHRLSRHLAWIAAAHSRSSRVEFVIQILHMEIVLAEKLGPEHSDISNPN

SEQ ID NO: 188253 - protein, 193 aa, Zea mays
  unsure (1)..(193): unsure at all Xaa locations
  Clone ID: MRT4577_103278C.1.pep
MVTASSFTAIFFRSAFVACFAEXPTAAGGGTLATITCIAREEGVATLXKGIILGPHCQFLYDGLHIXPVKAFFVRGAVVGDVSLLSKILAALATGVIAIVVANPTDLVNVRLQVDGKANTVKRSYSRALNVYAIIIRHVTLTIMGSKCTRLFLFSLSLKSFMXQEGIGALWTGLGPNVARNVIINAAELDNYD

SEQ ID NO: 188254 - protein, 185 aa, Zea mays
  Clone ID: MRT4577_103279C.1.pep
METALQQSAATTAGGGMRPGAATTVKKARQELEQELRFPQAAPADQGGLDEELRRGPWTVDEDLTLINYIADYGEGRWNALARAAGLKRTGKSCRLRWLNYLRPDVKRGDFTADEQLLILDLHSRWGNRWSKIAAHLPGRTDNEIKNYWRTRVQKHAKQLNCDVNSKRFKDAMRFLWMPRLAERA

SEQ ID NO: 188255 - protein, 90 aa, Zea mays
  Clone ID: MRT4577_10327C.1.pep
RKTTNTIHKFKNVLILKISTGLVYLGKASSIRGKKQEGVFLYRRRSGFFFFFFPGITFTLFQKCDINRKEKNSLLHLHRRRKKSRSAHFV

SEQ ID NO: 188256 - protein, 52 aa, Zea mays
  Clone ID: MRT4577_103280C.1.pep
PGHRHSHLRNEEHQQPRGDTQHCNGQASTQHRQHSYVHWRLTDHKRRMHSTR

SEQ ID NO: 188257 - protein, 102 aa, Zea mays
  unsure (1)..(102): unsure at all Xaa locations
  Clone ID: MRT4577_103281C.1.pep
CSVCSSDTGTRATSRRARRSRCLLRDSQVEDLARPTRWVVKVPYTATLRHTANALLVARVSTLGVAATPGHWIGAGCSMILECYSGSGAXRKHYILMENMLN

SEQ ID NO: 188258 - protein, 75 aa, Zea mays
  unsure (1)..(75): unsure at all Xaa locations
  Clone ID: MRT4577_103282C.1.pep
QEMIKVPKYQTTQRAKYDKFTICIVVSHRQFIMTHVTSKSSISMGIPCIPASTVPLTSMQNMKKHWRKSNCCINX

SEQ ID NO: 188259 - protein, 475 aa, Zea mays
  unsure (1)..(475): unsure at all Xaa locations
  Clone ID: MRT4577_103283C.1.pep
MAVPSPAPRSPRRPDAIVAPDPSSADVPPSLDFGDPASLAALRVLTDAGAATRLLHECVAYQRALDARLDALLARRADLDRAAASLLRSAPPLLSLAASDAAALKESSTTTAALADALSSRVRHLDAAHSRADAALARAEAALDRSRALEAARRALAADDLAAAATAVHEFLAIDARFPTDDDLRRDLLDMKRRLEGLARRRLAAVVDAQDHPAVLRLVRLFPLLGLADEGLQVYVAYLKKVVALRARADFEHLAELTSATQPTSERXDFVGCLTRLFKDIVLAVEENDAVLRELKKKKKQKVALRARADFEHLAELTSATQPTSERPDFVGCLTRLFKDIVLAVEENDAVLRELKKKKKQKVALRARADFEHLAELTSATQPTSERPDFVGCLTRLFKDIVLAVEENDAVLRELKKKKKQKVALRARADFEHLAELTSATQPTSERPDFVGCLTRLFKDIVLAVEENDAVLSEL

SEQ ID NO: 188260 - protein, 67 aa, Zea mays
  Clone ID: MRT4577_103284C.1.pep
QIAGGKKDAPWRPPSCTRRTRRNDSKLLRDTACKRCLYTEQMRRLNPTAASGACSPRCATRAMAMVS

SEQ ID NO: 188261 - protein, 98 aa, Zea mays
  unsure (1)..(98): unsure at all Xaa locations
  Clone ID: MRT4577_103285C.1.pep
PCLVQQARSWAVPSSVPPCLGSLQSLCARCAWAVLPLWACTPRGGYFILGGLSVPRFWCGGPLALCCSAVVPPAVRWCSLLGICPPPLCVVWXKKKKG

SEQ ID NO: 188262 - protein, 38 aa, Zea mays
  Clone ID: MRT4577_103286C.1.pep
WGAHHSILEQIPRLFCTTYLFSFKRLESHFSNYIRKGR

SEQ ID NO: 188263 - protein, 64 aa, Zea mays
  Clone ID: MRT4577_103287C.1.pep
WMDHPSFWTVWLLSHFARWITGALYIVYRHQWCFDPWFVPCRSEYGQGQCSPVWRATVCFLPSP

SEQ ID NO: 188264 - protein, 120 aa, Zea mays
  unsure (1)..(120): unsure at all Xaa locations
  Clone ID: MRT4577_103288C.1.pep
GTLEAGRXKKLRRTKKEKRKKKKKKKKKKKKKKKKKKKKKKKKKKKTREAPRFGQNLKPFPLGPGKLGKFKKGSPPILGGGWKTPPGGRKWPKKNLGKNPMGKRGGKKDGWTPGGGGLGG

SEQ ID NO: 188265 - protein, 43 aa, Zea mays
  Clone ID: MRT4577_103289C.1.pep
LKASNGIVRLQSLKAPPFILVSLIASFFFFFCFIFFFFFPRVR

SEQ ID NO: 188266 - protein, 90 aa, Zea mays
  Clone ID: MRT4577_10328C.1.pep
GASGVGALCSGGGKLMCWGFWIVSGIGKVLPKKGALSFPVAWNSSVLDKWLGGSNFVVKDIICLFPPLALDQGVFPAACCRSRKIFALWA

SEQ ID NO: 188267 - protein, 181 aa, Zea mays
  unsure (1)..(181): unsure at all Xaa locations
  Clone ID: MRT4577_103290C.1.pep
RDYLFAXPARDDASLLKICNLNKCGGXVEHVFICHRPGSRRATNRTRLHDAXRCTLTPTXDADDDDAIARXTGDGAGWXPETVLYVYRHXQIMRLPRRVALPETLGPLHHQVFHVXPLRARVPVLSLRPDLLLDMFNAVHTLDEXTADXNGLDKGMPLKCRVCGRVGAYCSRLAKRGDYWT

SEQ ID NO: 188268 - protein, 107 aa, Zea mays
  Clone ID: MRT4577_103291C.1.pep
EHGVPSHRAPAWVPLRGGRFRVWRILVHICFLGAIASRSCLLVIRGAATFESRPRRASRGPRSARLDRQQGGEEPWATRRRMAATPIGVGEAKRDMTLRQRDPGPAG

SEQ ID NO: 188269 - protein, 73 aa, Zea mays
  Clone ID: MRT4577_103292C.1.pep
FSMKFFAASTRSMVMFDPTAASACSSPSASPSPSSATAASFSAAAAVIAAACASAISLSIPSSSPTQAHTHPT

SEQ ID NO: 188270 - protein, 45 aa, Zea mays
  Clone ID: MRT4577_103293C.1.pep
HRAHSIGRGTETPREGSIYDLVCRPAGGRGNWMEDKRLASRVSSG

SEQ ID NO: 188271 - protein, 73 aa, Zea mays
  Clone ID: MRT4577_103294C.1.pep
LIPGGPTRPIQSLVEFPSIHPAVPHQGRSIQKYLLPILLFHLRLTIPQLSLLLLNPLIYIIYLLISSTNQLIF

SEQ ID NO: 188272 - protein, 79 aa, Zea mays
  Clone ID: MRT4577_103295C.1.pep
RPRGSPTRSSPPTYTTPQGRVDLTHALLALDHRRRLHHYVLLPEVPMTDGRGQTEALILDLTGVSAYMLKSCIKLYEPI

SEQ ID NO: 188273 - protein, 131 aa, Zea mays
  Clone ID: MRT4577_103296C.1.pep
LRDLGKSLEGVKTGSWFRPSGFLFNVFRGLHLVKMCNGVWAGDPPPVFWYSISSGKGVNGPPGFKFVLRKKPPPVGVKLKTSYLVGSPPGWVSSSFYISCPLWAVGLFPLPLYGQQLAQGAWVFFLRGVFF

SEQ ID NO: 188274 - protein, 83 aa, Zea mays
  unsure (1)..(83): unsure at all Xaa locations
  Clone ID: MRT4577_103297C.1.pep
KVLFFFFFFFFFFFFFFFFFFFFFFFFFLKGDFKIHKSIKTMVRQQKRKQTKYKLSXNHGKLPIHRTIKFLFCHPRMSGSSGN

SEQ ID NO: 188275 - protein, 511 aa, Zea mays
  Clone ID: MRT4577_103298C.1.pep
MGSLGEVGDGKEIFHGHGHSDPVVDELNRLQNLLREKERELGHAYSEIKGLKVTEALKDKAIAELSKELKRQDERMRSMEKQLEQKNLEVKRLHNERKEALSAQFAAEATLRRIHSSKKDEESVPFDAIIAPLESDIRKYRHEIAVLQDDKKALERHLKLKEVALVEAGNILHTALERALIVEDVQNQNIELKKHMEIYHEENKLLEKANRQKVLEVEKLTQTINELEESILATGEVANVVHFYQNQATKLNEEKRTLERELARAKVYVNRVASTAANEWKDDSDKLMPVKRWLEERRLLQGEIQRLRDRITVAEKSAKIEAQLNDKLKRRLKSLEEDMRNKTSNSSTKEINKQATPKRSLSQPKQPKTMRVLPQLYSPEVVDKRRPISQPRASMVGKVLKQPNSEIEPTKKSTVVKRFDSPGRRTISSKEECPMKNQLWASKTKTDVIVGKENKVQKPNSKARLNASHSQGHVDTKVFDGNDEYGLQNSEHHEAMANERNGNSSSDESSP

SEQ ID NO: 188276 - protein, 60 aa, Zea mays
  Clone ID: MRT4577_103299C.1.pep
PDDDHPEPTRLPESMTDSNCDTLPCTPYVTQRPREYHRVSPNETHGLQRTIGSHTARTSP

SEQ ID NO: 188277 - protein, 104 aa, Zea mays
  Clone ID: MRT4577_10329C.1.pep
GKTSISKHRIESLNKAPQISWLSKSLEGCSTQELPRETILSLSQAGTGSEAMLSQWQTRGCGFHKTTWLCAVTPSLQQRLDIQKAWQFPKLGCTGKTPGELRNT

SEQ ID NO: 188278 - protein, 116 aa, Zea mays
  Clone ID: MRT4577_1032C.1.pep
KGGGAGGQARGQEVRRAKGELAGAVRGLEQRRGAVGRPNRRQAWRSNTRGFRAQNSCSGGLGPLGKATCMSHRGAEGAISTREIRIGARSSQSSSSSRLPGSWRSTAGVPVLAPLR

SEQ ID NO: 188279 - protein, 95 aa, Zea mays
  Clone ID: MRT4577_103300C.1.pep
NNKTSWSVGVYFCMKTQNGSPNNIIMYRCSMTYFKGRVCPSTSILFCPGDCLNNKTSCGVIILFCLFVLSWTYKLYLKLYKCNFVRLLKKSIWLF

SEQ ID NO: 188280 - protein, 127 aa, Zea mays
  unsure (1)..(127): unsure at all Xaa locations
  Clone ID: MRT4577_103301C.1.pep
RTRGLHTALERALIVEDVQNQNIELKKHMEIXCKYTHYLIFCVCFCKVVELILFYYNVYXEENKLLEKANRQKVLEVEKLTQTINELEESILATGEVANVVHFYQNQATKLNVHAILVLKSFKCWIP

SEQ ID NO: 188281 - protein, 48 aa, Zea mays
  Clone ID: MRT4577_103302C.1.pep
PAHGPASVCCETQRVHVVIDRVNQSSNELAPVAESPTSESHVDGRAYV

SEQ ID NO: 188282 - protein, 303 aa, Zea mays
  Clone ID: MRT4577_103303C.1.pep
PRVWPGRTFAAMKDYQLDGNKEMVALGTMNIVGSMTSCYIATGSFSRSAVNFMAGCRTPVSNVVMSTVVLLTLLLITPLFKYTPNAILGSIIISAVIGLVDYEAAILIWKVDKMDFVACMGAFFGVVFKSVEIGLLIAVSISFAKILVQVTRPRTVLLGNLPGTTIYRNTEQYPHARHVPGVVIVRVDSAIYFSNSNYVRERILRWLTDEEDRVSAEGLPRISFLVVEMSPVIDIDTSGIHALEDLYKNLQKRGIQLLLSNPGSAVIEKLQSSKLTEHIGNGHIFLTVADAVRFCTSKSMQEP

SEQ ID NO: 188283 - protein, 164 aa, Zea mays
  unsure (1)..(164): unsure at all Xaa locations
  Clone ID: MRT4577_103304C.1.pep
MERQSVGNTLHWTTMRHWKGYLRPPWPTVKSRFSTRQGRLPDHKRVKIGGKQNEDRCTLADYNIKKESTLHLVLQSRGGMQIFVXKTLTGKTITLKVEXXDTIDNXKAKIQDKEGIPPDQQRFIFAGKQFEDGRTLADYNIQKESTLHLELXLRGGMQIFVKTL

SEQ ID NO: 188284 - protein, 83 aa, Zea mays
  Clone ID: MRT4577_103305C.1.pep
CLFIFHQKLNFAFVINQAIDPGHGTGTWNTERIYLIRLSKPYISAYKKQPHHAPRTNIASLPRDLENLQTPLANIFWLTLPHK

SEQ ID NO: 188285 - protein, 68 aa, Zea mays
  Clone ID: MRT4577_103306C.1.pep
NKKKKKKKKIKITKKTYTYIIPYSPFPLLIFLSFARLLSTSSSLTYPCVPPFLSFYFFISPSFQLSLS

SEQ ID NO: 188286 - protein, 83 aa, Zea mays
  unsure (1)..(83): unsure at all Xaa locations
  Clone ID: MRT4577_103307C.1.pep
ENYCLAVRDGAVVLAPVNPKDDHQHWYXDMRFSTQVKDENGMPAFALXNKAIDSAIKHSLGQSHPVKLEPYNPDHEDESVLWT

SEQ ID NO: 188287 - protein, 38 aa, Zea mays
  Clone ID: MRT4577_103308C.1.pep
RRDHNVIATIAICGSRVTAGRLSRLLLVMLCSLQATYR

SEQ ID NO: 188288 - protein, 91 aa, Zea mays
  Clone ID: MRT4577_103309C.1.pep
LADGAPNQSSRASFAGWRARSSPCPALSARPRRARRRQHRDCLPRPPPSPPLICAQSSDAELCKYARSMLLLLGCTAATGPQGRACRRSQG

SEQ ID NO: 188289 - protein, 67 aa, Zea mays
  Clone ID: MRT4577_103310C.1.pep
GDVFNVWGCLAMPSHVHGNSYPGRLDKHSSSSAHGSVWLSPSVCVRNNPHMLCIEQRSTVFGTASPG

SEQ ID NO: 188290 - protein, 129 aa, Zea mays
  Clone ID: MRT4577_103311C.1.pep
CYYHVNQPSMCWVPPVGGGPPLKLHPLLSPTVVRALMTIVYAARDHLTNVRSAMSLNYTSLPRLQIFIILPTREDCNPVPYYIFVCPLRTHAALVHSHMTCTIMYSLYELQHKHYEIINTLFIDYLQLI

SEQ ID NO: 188291 - protein, 112 aa, Zea mays
  Clone ID: MRT4577_103312C.1.pep
PRVRFIKFIRTLYYQLKHGFQHTQDSKSGDMGNSLCLDETWFSRDIFLYRLSKDFFTVVFEAPVVDGDLLSWARKLKSLLETTFGWDLEDDAVNLIDEDDEFAPVVVEMDGS

SEQ ID NO: 188292 - protein, 60 aa, Zea mays
  Clone ID: MRT4577_103313C.1.pep
LGLVAGDASRSSSFSLMPYMAFRIASSLEKMTTSETSGPVRLPIEDDRGRQDLAVGGTGV

SEQ ID NO: 188293 - protein, 42 aa, Zea mays
  Clone ID: MRT4577_103314C.1.pep
GFHLSPFVSCIELMYVESMIKTSVYFMPFMGMTPLKTVQAQT

SEQ ID NO: 188294 - protein, 67 aa, Zea mays
  unsure (1)..(67): unsure at all Xaa locations
  Clone ID: MRT4577_103315C.1.pep
AASTAAVRTVQNPFEVFFEXFXRSTEEGKPSSHYCRSWKASVPRLKSRDDLEKSWYGLXKEKNMLMT

SEQ ID NO: 188295 - protein, 219 aa, Zea mays
  Clone ID: MRT4577_103316C.1.pep
MSSSWNSVGLAILYQVLGWVAFAAWSFSFYPQVLLNYKRKSVVGLNFDFLVLNLTKHSSYLIYNAALFFSPFIQQQYHDKYGDKEMIPVAANDVAFSLHAVALTAFTVFQVFVYEAIMNFRRKSTIGWSVGNILLDLTGGVLNFCQMGVQSMDQHTLVNFYGNIGKTLLSLETVFFDVLFIIQHYVLYPVKKDENGKAIISERVAPLIRPSDKPEEDNV

SEQ ID NO: 188296 - protein, 61 aa, Zea mays
  Clone ID: MRT4577_103317C.1.pep
LINSRSRFVNCSAARACDATHPECATPSVTVILIYYCLHIIHPKYYYINKILNIFPHQKYF

SEQ ID NO: 188297 - protein, 275 aa, Zea mays
  Clone ID: MRT4577_103318C.1.pep
MSSSWNSVGLEVLYQVIGWIAFVAWSFSFYPQVVLNYRRKSVVGLNFDFLVLNFTKHSSYLIYNAALFFSPFIQKQYHDKFGDKEMIPVAANDVAFSLHAVALTSFTLYQVFIYERGNQKVSKVCISISAVVWSAAIVCLIVAWPKSNWLWLIDVFNSIQVAMTTVKYIPQAVMNFRRKSTVGWSIGNILLDLTGGVLNFCQMGVQSIDQHTLVNFYGNIGKTLLSLETVFFDVLFIIQHYVLYPVKKDENGKAIIFERVAPLIRPSDKPEEDNV

SEQ ID NO: 188298 - protein, 377 aa, Zea mays
  Clone ID: MRT4577_103319C.1.pep
VPYRNSKLTQVLQDALGGLAKTLMFVHVNPETDSFSETMSTLKFAERVATIELGAARANKEAGQVKDLKEEIAKLKLALDEKENEVAQFKDLANRVTSEMRNARTRSPLTASMSLKPEVSQESSVDTCTSEIRSSSSGKQRRFRSPLSVRELDDKSPVISRELYLSARKYKTPSPPVRSSLSVERGSFAKIVENTGSIDCTPISKVEVPPKVWSSSSNSKTTPSSVLTAQNLRKFRDSEENRTKIPPVRQSMVKNRSESTPKTHNEEKPANRHSGTKARSEARNTRDSSEIENEFAGDEPTFHFNRTAKKLPTKVMSRQSQNIDVSVRASVRGEMEPLTEGRQRRNWSKPPHAERTNMPLPDIRRSVSLPRGKNPLV

SEQ ID NO: 188299 - protein, 81 aa, Zea mays
  unsure (1)..(81): unsure at all Xaa locations
  Clone ID: MRT4577_10331C.1.pep
SYHKRTSQACQGGLSQMNMVGGLGPISSSXQGCAAPALLNMDDSILPFKAGTLWKVPVSPPHCTPPAIKTTWVSDGGGQIW

SEQ ID NO: 188300 - protein, 275 aa, Zea mays
  Clone ID: MRT4577_103320C.1.pep
MSSSWNSVGLAILYQVLGWVAFAAWSFSFYPQVLLNYKRKSVVGLNFDFLVLNLTKHSSYLIYNAALFFSPFIQQQYHDKYGDKEMIPVAANDVAFSLHAVALTAFTVFQVFIYERGTQKVSKVCISISAIVWIAALVCLIIAWPKSDWLWLIDVFNSIQVGMTAIKYIPQAIMNFRRKSTIGWSVGNILLDLTGGVLNFCQMGVQSIDQHTLVNFYGNIGKTLLSLETVFFDVLFIIQHYVLYPVKKDENGKAIISERVAPLIRPSDKPEEDNV

SEQ ID NO: 188301 - protein, 114 aa, Zea mays
  unsure (1)..(114): unsure at all Xaa locations
  Clone ID: MRT4577_103321C.1.pep
RRLRVRHPWFQCGGSFVCRACTCVPLWAATRCVPVPAPSARLLRRSIRSSRPCISPHGLRVVLLFAGFSLPCVGPCGASWGFHSLRCCXLRDRVVELLCGASCVACSWACDNNL

SEQ ID NO: 188302 - protein, 134 aa, Zea mays
  Clone ID: MRT4577_103322C.1.pep
HPRARLPSCAPSCCHHLPLPTPLTGLPSCRLHRGSALPLLHLRTPPVPPPPFPPALGRFTLPHRLAPVHHLLQPSSHDPMPRSRRRPPTRLTTPRRHTHAPSPSLYTVFHGILSGGTPNAIPVSDLRLMTPGQR

SEQ ID NO: 188303 - protein, 79 aa, Zea mays
  unsure (1)..(79): unsure at all Xaa locations
  Clone ID: MRT4577_103323C.1.pep
MISITMAVSSTAXFDDKVVNVPSAPAFAQGHVDMRNTAGKVLPAAGSGSPCDHPDRLLRLGPLSRDPPNYLPDQFPHDY

SEQ ID NO: 188304 - protein, 82 aa, Zea mays
  Clone ID: MRT4577_103324C.1.pep
ICVPVRLKNVIWNMLTALYIKHFRGHKPIVIVPVMAATIKLGKMGLILTPVNKQKILLVPDGNGQPVTLSIWANCPPPEHWA

SEQ ID NO: 188305 - protein, 160 aa, Zea mays
  Clone ID: MRT4577_103325C.1.pep
LLPTQAALHHFSPPRSLKRLLHRRTPSNLEIVPEEVPAMSAPDDDAGPVPPKSHSEPQLGVSALSARPLPGDSTHAGAAFLDDTAPSSVNQPTSSPGLSRTASFSNSSYHDESDPEDASFFPPVEKLTMFDFVENLALAQRIEKIQSSISNQTERIRNQA

SEQ ID NO: 188306 - protein, 100 aa, Zea mays
  Clone ID: MRT4577_103326C.1.pep
MPGKQEEGGQGPAGSSVCLWLVTALLLLSVLVGGACLAAYVLLPPQETPAWLPAVGLALVALPGAFWILTCAYRCAAARAVERTTMAVAPSGSMCSRYGS

SEQ ID NO: 188307 - protein, 101 aa, Zea mays
  Clone ID: MRT4577_103327C.1.pep
HEDQCYGMLAAYGMRSMSGGRMLLPLNATADAPIYVNPKQYEGILRRRRARAKAESDHFLPLASLFSLSALARARRRRRMPSYCFGLSLSVSVWILCCHSV

SEQ ID NO: 188308 - protein, 82 aa, Zea mays
  Clone ID: MRT4577_103328C.1.pep
IICYHSFCCRVRDLCSNRFLYTPRRIVSVVHHSVAPVVSYARFRSQGRLVDLRTSTTCGLVFSVVPYGALIATPPRGHPSKN

SEQ ID NO: 188309 - protein, 101 aa, Zea mays
  Clone ID: MRT4577_103329C.1.pep
MPGKQEEGGQGPPGSSVCLWLVTVLLLLSLLAGGACLAAYVLLPPQETPAWLPAVGLALVALPWAFWILTCAYRCAAARAAERRTMAVAPSPGSMCSRSGS

SEQ ID NO: 188310 - protein, 107 aa, Zea mays
  unsure (1)..(107): unsure at all Xaa locations
  Clone ID: MRT4577_10332C.1.pep
SDPVXKRDGTNILRTRGVSYIDAILGTTVKVPTVDGMVDLKIPSGTQPGTTLVMAKKGVPLLGKSNARGDQLVRVQVEIPKRLSSDEKKLVEELANLNKAQTANSRS

SEQ ID NO: 188311 - protein, 204 aa, Zea mays
  Clone ID: MRT4577_103330C.1.pep
MAQGHISLSCMSQDKVRTKDSCWSVEVVYGPRGMPRLVTLDFSTQTIGVRSVQATVSPVCPALSTPSVTVSVPALFSTPALAHVPQTEPSATSESTLALASTIDPRSYYDFDFDAEFVLTPHPRTNAPTARLWILRLGRIFWGLTLKGAIGKCMRVRGARERWKVHLNWEHRSGCCLEGVNRRTKINTKNLELLTLLKAVYEVK

SEQ ID NO: 188312 - protein, 44 aa, Zea mays
  Clone ID: MRT4577_103331C.1.pep
ISPFFKIKKYFPDWGGKKKKKKKKKKKKKKKKKKKKKKKKKKKL

SEQ ID NO: 188313 - protein, 58 aa, Zea mays
  unsure (1)..(58): unsure at all Xaa locations
  Clone ID: MRT4577_103332C.1.pep
GASEHCVRMKQFDELSKRARRARRANILVTLVVRSLLVRYAKCVYECSGCVGRPXFXX

SEQ ID NO: 188314 - protein, 56 aa, Zea mays
  Clone ID: MRT4577_103333C.1.pep
QQHQFYLSKFRTELHKASTTVWVVPYIINTQFPGSLPVKIERQLSKMRLALLITQS

SEQ ID NO: 188315 - protein, 56 aa, Zea mays
  Clone ID: MRT4577_103334C.1.pep
TTCTMTEASGPMVYTARMVARMTSSTNHSSTSKLLTMTADAYSEHTTSCSWKVIRT

SEQ ID NO: 188316 - protein, 52 aa, Zea mays
  unsure (1)..(52): unsure at all Xaa locations
  Clone ID: MRT4577_103335C.1.pep
LGGVSLVLLARLTGGQKXDKPVTVAEKKERLIAVGNVAEDAMGEAKDGEEGK

SEQ ID NO: 188317 - protein, 89 aa, Zea mays
  Clone ID: MRT4577_103336C.1.pep
DPRVTLSATPKTLSFFTLSTCQVSTIIEPSSARKRNPRVTISHLKYHMAHFTAPPSVRHLLMSILLSTELQHNYNLRSIPIPNDDKVHV

SEQ ID NO: 188318 - protein, 105 aa, Zea mays
  Clone ID: MRT4577_103337C.1.pep
PRGLINTSIFGPQKKFWVSPFTSKTALRGGKPFIAPPKGPVSRKGDIKKGAGVIFSKGQKEPCPPEKVFPGRAPGLGGFGPLGSPFSMGGNKFPPKVFPKKKKKK

SEQ ID NO: 188319 - protein, 33 aa, Zea mays
  Clone ID: MRT4577_103338C.1.pep
NEDEDSPNKLYTLVTYVPVTTFKNLQTVNVDEN

SEQ ID NO: 188320 - protein, 263 aa, Zea mays
  Clone ID: MRT4577_103339C.1.pep
EGEEGSPVKLSKPEQAGSDSSVEDGGAQNQKPPPPGKGKNAKPVEPPRDYVHVRARRGQATDSHSLAERVRRERISQRMKVLQDLVPGCNKVIGKALMLDEIINYVQSLQRQVEFLSMKLATVNPLDLSNLPTLLQKDMFQACGASASSVFSLESCSPGFPFGGQGDVFQSFVPNGLENPCGGLNPLDLALSQATGGQFGFQDGTAGTNLQQRNYWEEEEEDLQSVFHIDDNGQSQEHGASASAQSFHGQLQPQEGHMKMEFF

SEQ ID NO: 188321 - protein, 275 aa, Zea mays
  unsure (1)..(275): unsure at all Xaa locations
  Clone ID: MRT4577_10333C.1.pep
MANIPRRVILFALESDFDNFVTLPAAESAGCLATSLWVFSEFTKLIPIVWLINELGLKDIPLLGRKYTWTNGQIDPTLDVVTKACNLVPRGNCPFESLAKKFRATSKALQSWSQKCNGHMEFQLGLAMEIWLRNHLKTHLLALSSLKRTIARSRSRIWWLEEGDANTALFHAHARYRKQRNFIGSLVEGDLILTNHEEKEKAIHDFYFNLLGTNLSREYTINLEELEIISHDLADLDRSIPVEEVWQTIYQLPSDKAPAPXGFTRHFYKFCWSII

SEQ ID NO: 188322 - protein, 158 aa, Zea mays
  unsure (1)..(158): unsure at all Xaa locations
  Clone ID: MRT4577_103340C.1.pep
GTSRPRDSSSPQNSLGAVSESASQVSRYVQPAAALKGNPRVTSSCWKCCKAYFTGPSSVRRALMSGGLSTEXIRHKYNVRSIPIRKDDEVLAVHGTYNGREGKVVQVYRRRWVIHVERISREKVNGSTVNVGIHPSEVIVTKLQLDQERQAAPRPNGP

SEQ ID NO: 188323 - protein, 87 aa, Zea mays
  Clone ID: MRT4577_103341C.1.pep
EDNLQEVVINTEFVYQESGQAIQNRLCECRTCEDTYNQKICLKKDMVVTGSIQFPPRKLFVNLSVYQYVKTSAATTHNPTAMAAGSM

SEQ ID NO: 188324 - protein, 55 aa, Zea mays
  Clone ID: MRT4577_103342C.1.pep
ETGRGCGWRAKCQPREAPGFSCPPAMVLCWGTDTTALGARPAVATPNPSGDGCWR

SEQ ID NO: 188325 - protein, 59 aa, Zea mays
  Clone ID: MRT4577_103343C.1.pep
GRGPSRQIHGVSPPGVSAFGCCLLSNFSFFLLRQSVMDQKFPAFVRGLNIASSVLHFIL

SEQ ID NO: 188326 - protein, 89 aa, Zea mays
  Clone ID: MRT4577_103344C.1.pep
NYSVNNNRTQRLQAGTLHESAYLDLCLIFRRFLLSRLIRFFFHCTSASSEPWEMASGKPQNEYKDRKIPEKPLVLNWTKIKTKQLSTWP

SEQ ID NO: 188327 - protein, 106 aa, Zea mays
  unsure (1)..(106): unsure at all Xaa locations
  Clone ID: MRT4577_103345C.1.pep
ICLLGPLPHLSALPLKPPHPLLLPLGPHRGGMTASRTGLGEDRKAGREACDATAAAAAVRALAALLYRRASGLTLAGITVLGQILSYHGPQLLDKRXSGLTLAPAG

SEQ ID NO: 188328 - protein, 79 aa, Zea mays
  Clone ID: MRT4577_103346C.1.pep
DPHPVPWLPSLIIDPCVCSAGVSCYPVPVLLVPASCRILETGCGVQACKAPPFPIHIISAFWETGCLHFIIRAHPFPAE

SEQ ID NO: 188329 - protein, 66 aa, Zea mays
  unsure (1)..(66): unsure at all Xaa locations
  Clone ID: MRT4577_103347C.1.pep
ATVKLHFXKLICMGVAVGKLXVEEXQIQLYCQMSVKFLVSLLNKMCHNVRCMYVKSIHREAIHRCY

SEQ ID NO: 188330 - protein, 40 aa, Zea mays
  unsure (1)..(40): unsure at all Xaa locations
  Clone ID: MRT4577_103348C.1.pep
ENVYMAMLAYLSERYEXMVEYMENVSNTVYVEVLTVEERN

SEQ ID NO: 188331 - protein, 56 aa, Zea mays
  Clone ID: MRT4577_103349C.1.pep
SHTLSQTSFFQSQVYLLPGSYLTREEAAIISDHNHHHFFNHHINDLHHTAVQLLYS

SEQ ID NO: 188332 - protein, 98 aa, Zea mays
  unsure (1)..(98): unsure at all Xaa locations
  Clone ID: MRT4577_10334C.1.pep
DVTINAIHSRHTXQSEGCGFLECLAHASYIESSXNFTGQVMPNTDRPFKLNWSSYSMFETRSELATDHSIFDAHLAADVTDQMLQELFLSKYRSVKGA

SEQ ID NO: 188333 - protein, 52 aa, Zea mays
  unsure (1)..(52): unsure at all Xaa locations
  Clone ID: MRT4577_103350C.1.pep
AFNNGNESYTHNDQTXRKLISYMRLAEGFDIGNIADITQSLQLQRERLRPRH

SEQ ID NO: 188334 - protein, 121 aa, Zea mays
  Clone ID: MRT4577_103351C.1.pep
TAYPTQENIKEQIAAVWKRYGLDKKTVFDTPITSVKKNSAGRWIINDNEAEYGTFDGIIAAVGSCGDPQMPHLPDHEKFSGPTFHSSELDGKDVKGKKVLIIGGGASAVEALEFAVRNNAA

SEQ ID NO: 188335 - protein, 162 aa, Zea mays
  Clone ID: MRT4577_103352C.1.pep
MLPAREGSISVESRRLQLRLVASRTNMAAPSPSPVEATLPPEAAAAAEEDQWDNDVAEPSVPKEKDPEPLQANDEKIYLGPHGAPPSQAKQQELNTVGRKQRFRNKLKEADRKFPGNAQENKVENLRELMGARGGTSLPKSSPRDWLDPHCHESEFDRKPTR

SEQ ID NO: 188336 - protein, 148 aa, Zea mays
  Clone ID: MRT4577_103353C.1.pep
VFLLSLNLCSIVHLCPEPYPEENARFLRTNGIRLHQFAVEGSKSGPTVLDTMSAQEPFVHIPEETIREALKVVLDARNQPVLIHCKRGKHRTGCVVGCLRKLQKWCLSSVFDEYLHFAAAKARSTDQRFMELFDASSFTHLAASQSQY

SEQ ID NO: 188337 - protein, 120 aa, Zea mays
  Clone ID: MRT4577_103354C.1.pep
RTEGILSILATYKHLKYKHYDKDSYSAVGIQSNMVLGYLLQAVKYTFHKNKKYVSHYITNQNRTGAGTEPEKSLGGTELNCCSIKAHSTLYCIHFRLEETVVGLHGIRNGRETRAPPTHR

SEQ ID NO: 188338 - protein, 151 aa, Zea mays
  Clone ID: MRT4577_103355C.1.pep
MAAPSPSPVEATLPPEAAAAAEEDQWDADGYVIPNLPTQDNDVAEPSVPKEKDPEPLQASDEKIYLGPHGAPPSQAKQQELNTVGRKQRFRNKLKEADRKFSGNAQENKMESLRELLGARGGTGTSLPKSSPRDWLDPHCHESEFDRKPTR

SEQ ID NO: 188339 - protein, 110 aa, Zea mays
  Clone ID: MRT4577_103356C.1.pep
ASCWLPPPMAEKPNGLEQPPQRQQSRQLRRRHRHGTIIERSPRTPTGSTSCQVLEQGPPTPSRSLPGHAEHEVLPQRHLVQLHRQRCQGCRAYHHNATITSQYILTNCPP

SEQ ID NO: 188340 - protein, 67 aa, Zea mays
  Clone ID: MRT4577_103357C.1.pep
ASGERVLALSVHRLPSLARMPLPLRPSAQRSPAVGGGGSSQHPLLLISLSDQPFLEASKPYRRRKRS

SEQ ID NO: 188341 - protein, 84 aa, Zea mays
  Clone ID: MRT4577_103358C.1.pep
HGARLQNVCACGPAAHLGAYWPCVGPHGCRMWARTLGTAPPPCSEVLEPKHPPFHLWLSVRRELIHGQCAAGLGVCGFSDEGVV

SEQ ID NO: 188342 - protein, 90 aa, Zea mays
  Clone ID: MRT4577_103359C.1.pep
EGKVKICWVPWSTYFISAHVGPINRTMLSSNGINKKKKWHAPRNRFGITKWRHACFYLFFRGPPPPNCEKTTPHQFGLWCNNNYPEGFGV

SEQ ID NO: 188343 - protein, 52 aa, Zea mays
  Clone ID: MRT4577_10335C.1.pep
AILSRSLITSSILYHISSLLCKQCHHLQFRGPYFILSTGHSLRRRYRGLGLV

SEQ ID NO: 188344 - protein, 89 aa, Zea mays
  Clone ID: MRT4577_103360C.1.pep
FNSFFFFFFWLFPIIPDLLAEAGNITKPGCHKYEDCACSTGNLLTRSFSRQRLRLLIKTFNGPTLHSTRADVDPPEHQIASHATCYVSL

SEQ ID NO: 188345 - protein, 69 aa, Zea mays
  unsure (1)..(69): unsure at all Xaa locations
  Clone ID: MRT4577_103361C.1.pep
IGKRLXFSTPYVFQPRPIKTRNTKPQKGKLGPGPPRKCFFFLVFFFFFFFFFFFFLFFFFFFFFFPRAE

SEQ ID NO: 188346 - protein, 45 aa, Zea mays
  Clone ID: MRT4577_103362C.1.pep
ETPLAMRLSAERQAVQRVDLAKDTVRLGKKLLTTSYLVGKSILVW

SEQ ID NO: 188347 - protein, 138 aa, Zea mays
  Clone ID: MRT4577_103364C.1.pep
FQGGPHASATRVRKDKEGFSSDQQRLIFAGRHLKDGGTLPDSKIQKGSTLNLVLRLRGGLQTFGKTLTGKTITLEVGSFNTINTVKAKIQDREGFPQNQQRLIFAGKHLKNGRTLADYNIQKESTLHLGLRLGGGFKT

SEQ ID NO: 188348 - protein, 58 aa, Zea mays
  Clone ID: MRT4577_103365C.1.pep
FVHQAPLKGESGGTIGAPWGPKKFSLLLALGFFTRGGNPKIFPQCLQGSLVSLFPPNL

SEQ ID NO: 188349 - protein, 82 aa, Zea mays
  Clone ID: MRT4577_103366C.1.pep
MAMATSSSYPPPPPFYRLYKNFEQDPSSAPEPPPPIDGPFKALGVDYTGDVVIPSLESHNVRQLYPKGPNIDHGGMQDMVVG

SEQ ID NO: 188350 - protein, 80 aa, Zea mays
  Clone ID: MRT4577_103368C.1.pep
TSSSIISHLSLHQLMWSCHLNLPNVQILYQFTVDPFIFQVSVPAYCPHLPKFSTSLFCWHPHVTKAIKRTLGPTHLASKS

SEQ ID NO: 188351 - protein, 96 aa, Zea mays
  Clone ID: MRT4577_103369C.1.pep
TGGFYPGWIFFSETLGFKKRGGKGSFSGFFPFVFSPRGAFFPGYRFFRGPIIFFPPKKKKKKKKKKKKKKKKKKKKKKKKKKKKKKKKKKKKKKKK

SEQ ID NO: 188352 - protein, 320 aa, Zea mays
  unsure (1)..(320): unsure at all Xaa locations
  Clone ID: MRT4577_10336C.1.pep
MAPSKPLFPVAVPAPDPSDEVVREFGPLLRIYKSGRIERPLVAPPVEPGHDAATGVQSKDVHLGSYSARLYLPPSAGAGAKLAVVVYVLGGGFVAESAASPNYHLFLNRLAAACPALAVSVDYRLAPEHPLPAGYDDCLAALKWVLSAADPWVAAHGDLARVFVAGDSAGGNVCHHLAIHPDVVQAQRARQAGAPPLKGAVLIHPWFWGSEAVGEEPRDPAARAMGVGLWLFACPETNGLDDPRMNPLAPAAPGLHTLACERVMVCAAEGDFLRWPARXYAEAVAAXRGGDXGEXAGVEXLETMGEGXVXFLXKPELLRG

SEQ ID NO: 188353 - protein, 688 aa, Zea mays
  unsure (1)..(688): unsure at all Xaa locations
  Clone ID: MRT4577_103370C.1.pep
PPRFRPAPVTSPPRPRPRSSDMAGSVAPHAVVLGLLLLAGLAAAQRATTPAAAAPAPDPGCNGIQLTYNFVDRTKIRPFVSDKNKQPYAFRANVTVLNSGTRPLKSWVALVTFGYGEILVGVDGAVLTGGGDLPYNTTEDAGNATSFSGYPHTDLLTPIATAGDLSQIQASVGIVGTLFAGPGPFVPLPTALSLDDPAYACPAAANVTARVLSTCCVLTPEAEANATAIDANTTDPTKDFLPRGTGDLVITYDVLQDYPSSYLALVTLENNXSTGRLDNWRLSAKWRRGEFIYSMKGAHPSEVDTSGCIYGAPGQYYQSLDFSNYLVKQTNMSGSDYLVPGKQQSVLGKIDNCCRNGTILPKSMDEAQSKSAFQMQVFKMPPDLNRTKLFPPANFKIVGASSLNPDYACGQPVPVSPTAFPDPSGLDSTTLAVATWQVVCNITTTKGAKPKCCVTFSAYYNDSVIPCSTCACGCPANRRGPTCSTTAQSMLLPPEALLVPFDNRSQKALAWAELKHYNVPRPMPCGDFCGVSINWHVSTDYNKGWSARVTLFNWEDVDMANWFAAIVMDKAYDGFEKAYSFNGTAVGKNTIFMQGLEGLNYLVKQTNMSGSDYLVPGKQQSVLSFTKKLTPGLNVVAGDGFPTKVFFNGDECAMPQRIPISTGFSTRLSSGLALVPFLVASAFLLLQQ

SEQ ID NO: 188354 - protein, 218 aa, Zea mays
  unsure (1)..(218): unsure at all Xaa locations
  Clone ID: MRT4577_103371C.1.pep
MEEADKDRNSCKRLRAVGGGGDSADAWRTFRVARAAAGGKDRHSKVVTSRGLRDRRIRLSVQTAIQFYDIQDRLGVDQPSKAIEWLIQAAATAIDGLPSLDCSFALPVASPAAEDAAEVSTSETSKGSVLSLANGPADNDNATHQANAYNGGSANGTFAELLHCSNAADKPMQHQHQQPTLAYYAXAPGSHIAPMSFEMIPRSPSPRTTKRHTHTTCL

SEQ ID NO: 188355 - protein, 104 aa, Zea mays
  Clone ID: MRT4577_103372C.1.pep
ILDFKKELRTLNRELQLHILELADILVERPSQYARRVEDITLIFKNLHHLLNSLRPHQARATLIHMLESQIRHRKEAIEDIKHFLFACIHLPSTSTTSSVKNIH

SEQ ID NO: 188356 - protein, 73 aa, Zea mays
  Clone ID: MRT4577_103373C.1.pep
GSSGNALFSFTDAVRWKSYYTQLSRSPWSCNKLYNSVSSLCLLQHKFRIAVVQIAHHADLANALASHERSIAR

SEQ ID NO: 188357 - protein, 83 aa, Zea mays
  Clone ID: MRT4577_103374C.1.pep
PGPPLVPSSNLLWLQPLLNLIFAPGRSIRVGLGNWARVRVGKVFGPFGAKKKKKLSFSLPKNLLNQSHSSLIKFSTQGNGLPV

SEQ ID NO: 188358 - protein, 89 aa, Zea mays
  Clone ID: MRT4577_103375C.1.pep
DQLDPLDAACDRGVIGRSEHVLGNAKVELEFTNAGHPACLPRGGSRPASVGPRRRPRCMQRVQSGSQPGGPPFSVDSNPASASLRFAER

SEQ ID NO: 188359 - protein, 86 aa, Zea mays
  Clone ID: MRT4577_103376C.1.pep
GIWHEGATRNGRAFGMAPHAHLAIYKVCTRSRCFILDIVAGLDAAVRDGVDVLSFSIGATEGAQFNYDLIAIATFKAMERGIFVSA

SEQ ID NO: 188360 - protein, 90 aa, Zea mays
  Clone ID: MRT4577_103377C.1.pep
YNIFNNHNTNEFLFCYDNINFSTKKKPRGFILGTLKRLVCPPYKKYYLCAKYFREKIILFNGFERGLLLFIKRSPKKKLLLLKHQNPHVT

SEQ ID NO: 188361 - protein, 89 aa, Zea mays
  Clone ID: MRT4577_103378C.1.pep
GKDITSMISLPVWIFEPMSFLQIICEPMQFEELLRQASTNEDSALRLAYLASFAIAGYNCAIRTKKPFNPLLGETFEFLSPEGKYKYFA

SEQ ID NO: 188362 - protein, 74 aa, Zea mays
  Clone ID: MRT4577_103379C.1.pep
PRIYAGFKLHPLDNARICITHILVISITFNYILIHSNAIPSNLLVLYSYCTLHSYNKIHRHVFRHIDTHTTSYM

SEQ ID NO: 188363 - protein, 47 aa, Zea mays
  Clone ID: MRT4577_10337C.1.pep
KGAALNCYLRAHSALSVSGFGTREYCLTCLTSIGESQSLRIGTESEA

SEQ ID NO: 188364 - protein, 78 aa, Zea mays
  Clone ID: MRT4577_103380C.1.pep
ARASGGGELAVSWRVYGPYNFAHWYRAQAVTLDSLQVRGGVCLCQLGRRLPMLTRMRTPCLKATAVVEASADAWANAW

SEQ ID NO: 188365 - protein, 79 aa, Zea mays
  Clone ID: MRT4577_103381C.1.pep
CLTLFYLTNLPTLIDELCKLFKACKWAPSSTSNIDFVGTLHVLAETLSSMNITLQVSALLVCFCAFSATSCLNKFSTLQ

SEQ ID NO: 188366 - protein, 100 aa, Zea mays
  Clone ID: MRT4577_103382C.1.pep
LGTSRPAGTIAPQLLYADQHARHTPKLCYHVCKGARMSSELPVQRRRHHRSCSLATMSKEKHHRHWILRCCCRSIAPMDHRRIALCADSSRHVPPRRRSL

SEQ ID NO: 188367 - protein, 178 aa, Zea mays
  Clone ID: MRT4577_103383C.1.pep
AAEAQSRRPAPRPCGDQSGRTGASGTRSTGRPRACAPTASATASRTSPRPPRRPPPRARPRPRRPRPRAPPAARPRRPSTAPRSPRTSAPSTSSLPGPPSPTSPPSPSRSCRPPPTRSRRPRARTSRPGGRARRRGGRAARRRRSGGSCPGSSARRGGGTPGTGTATATAPSSSTPKP

SEQ ID NO: 188368 - protein, 52 aa, Zea mays
  Clone ID: MRT4577_103384C.1.pep
LLSDVRDPPSRGEVTGQPHMAQRTRKRRRKARETNHDNKQKGTGPRPSTRPH

SEQ ID NO: 188369 - protein, 116 aa, Zea mays
  Clone ID: MRT4577_103385C.1.pep
RPRARTNRPGERASRKGGKAGKRRRSGGSCPGSLARKACGTPGTAAATATAPSFSTPEPLRRRRRPNGCFFESPRQIKCQPHAAHTRALEGRFPRSVGMEFFPPHFKYSCASIRCS

SEQ ID NO: 188370 - protein, 77 aa, Zea mays
  Clone ID: MRT4577_103386C.1.pep
GGNPRGPPKVAFATQEENFRSTQVRPGPPMSPKKSKTPPFLPGRGPPDSPWGQSFTTPRFEPQNGPSCRYSGSPPMK

SEQ ID NO: 188371 - protein, 123 aa, Zea mays
  Clone ID: MRT4577_103387C.1.pep
GRFFFFFFALFFFFFFFFFFLGFFFFFLFFFVKKKHSPPRKPGAPSPGRPTWGPSQQAGAPRKGGGGPKNLPQKFSLTAPQAPPTGPPKKIPLLTHHHGSPDRGPPTGGPRPKKGRGRATPPG

SEQ ID NO: 188372 - protein, 76 aa, Zea mays
  Clone ID: MRT4577_103388C.1.pep
HLQILSSERSCVCVCSLNSNLCIRTVSSISDRRLPGSNYLSQISTNKKRVLKKNAAGPSYTGDMEDGRDKDGPSEV

SEQ ID NO: 188373 - protein, 98 aa, Zea mays
  Clone ID: MRT4577_103389C.1.pep
PDDPHSTADQQMLLLVRAPSGISPAVHVAPSCLSRRLAQGTGRESMPRCIALPSPSATTWSTEREATRAEILHAEVSDEDVINMTVRVNLHDLYAIYA

SEQ ID NO: 188374 - protein, 109 aa, Zea mays
  Clone ID: MRT4577_10338C.1.pep
GATKKGFEISGGAKSGGGSPRPAWGREKKAAGYKSFFYRAGGIPQPGPKHFCPGGHCLFRVIRGGLFCHYEQAFPPKSFTWGGNATLKSSSPGLGGKGKKFFFAPHKRG

SEQ ID NO: 188375 - protein, 98 aa, Zea mays
  Clone ID: MRT4577_103390C.1.pep
GRSPRCESPPPPMWRPTLLFPLGNLLIPNKIFPTGNPLYPPKNSQIVERLGPRLFREFLFAPAFVIVRFFKTQVRPCWKGFSLGFPLPSGCFLGKGGL

SEQ ID NO: 188376 - protein, 98 aa, Zea mays
  Clone ID: MRT4577_103391C.1.pep
SHEPKSWDQPVFNEELFFPSHPGYEGLHASKRTMDMYLFMNSKVLFKTVRKDANLRTLKPVIVHLNSHPDKSDRMKAVIEFYVDGKQNALERFPDGSE

SEQ ID NO: 188377 - protein, 226 aa, Zea mays
  Clone ID: MRT4577_103392C.1.pep
IKHQGTSSYQFVKCCACSRFFHAHATVKHGRNTIALLSDDSGSIFSEHDLKANLLWNVFKCRLGSSDFVENVFDLPSLLLFHSDLHWLDEPFSKQEMYSIVAALPSDKSPGPDGFNTNFIKKCWPIISQDFYDLCDQFYHGDVCLRSINGSYIVLIPKKDNASLVGDFRPISLLNNSMKIITKLLANRLQTVMTSLVHKNQYGFIKGRTIQDCLAWAFEYIHLCHI

SEQ ID NO: 188378 - protein, 93 aa, Zea mays
  Clone ID: MRT4577_103393C.1.pep
TSFHSRKPSQASSVEYKDPVEIPYEQARDPVAWSTGGGRQARAGPWSRAKLDVAAAVGGQRFVAVAAGGRRGRMPRPWGNMPGVAARGPGPAG

SEQ ID NO: 188379 - protein, 134 aa, Zea mays
  unsure (1)..(134): unsure at all Xaa locations
  Clone ID: MRT4577_103394C.1.pep
PRGRPGTGHFCPSNQITGSSCAVPSTDHVSPRLHAGLLAAGAALAVLVAALAVFVVRDIKRRKRRLALAEEPWKLTAFQPVDFGEASVLRGLADENLIGKGGXGARVTYTSRSSGXGEAAGTVAVKRIWARGRS

SEQ ID NO: 188380 - protein, 118 aa, Zea mays
  Clone ID: MRT4577_103395C.1.pep
DANRSSLFFYCRSSTDTPDGNQTVLADLVTRITGEWRKWRAAAATAISKPKGSDAKRKSERRSPHPKKLGHEEEKQSKRTWRGRFCHAAGTFGSFPEHRSRLPWGERRGRERCLVPKV

SEQ ID NO: 188381 - protein, 76 aa, Zea mays
  Clone ID: MRT4577_103396C.1.pep
LPALAPRHVCVHQVYHFRSGGPSSVQKEVLKEGLAVGCMNASVVVHRNDAPVSRIGTSTPSQSKAQTIARRLTTRR

SEQ ID NO: 188382 - protein, 129 aa, Zea mays
  unsure (1)..(129): unsure at all Xaa locations
  Clone ID: MRT4577_103397C.1.pep
MKRQSKRPTASRDSPETGTVDKQLALAESLTARKTEPDELGEKKRRLAPDQVRALERCFEADNRLDPDRKARVARDLALNPRQVAVWFQNRRARWKAKALHRDFAALRARHDALXXDKDALAAEIRELR

SEQ ID NO: 188383 - protein, 134 aa, Zea mays
  unsure (1)..(134): unsure at all Xaa locations
  Clone ID: MRT4577_103398C.1.pep
IRLELHRWCLGRKQLAPGRLFMPIFAHLHLEKTPSHSGMRRLGVXHGPGISMTMGWRRASVVSSADRARACLTEHEQTFCNRSCCASMTVVTFNGGMLSASSYEAXWPTVVRVRDLQVLSTHGVNGMPPTICAQ

SEQ ID NO: 188384 - protein, 96 aa, Zea mays
  unsure (1)..(96): unsure at all Xaa locations
  Clone ID: MRT4577_103399C.1.pep
LQCFLSLTNSISGDNNFGDDRLLYAHGQLWLQQHHIMGRAVGXFTLYSTHLSFPPLRSSSADLMFXDNSYLPYVGWVTIIMTEKPFIKVCSFLSKY

SEQ ID NO: 188385 - protein, 52 aa, Zea mays
  Clone ID: MRT4577_10339C.1.pep
LSQSIYLSVCEKLIHPLSLSLSFSFFGQVSSSSSNSESIQSCDVLVQLCNVV

SEQ ID NO: 188386 - protein, 37 aa, Zea mays
  Clone ID: MRT4577_1033C.1.pep
IHYTIILLTYLTLNKYLFTNPVHKHLSKPNIICHLYL

SEQ ID NO: 188387 - protein, 91 aa, Zea mays
  unsure (1)..(91): unsure at all Xaa locations
  Clone ID: MRT4577_103400C.1.pep
THSYXIRAAELKDVGGSTESNYLCIYFDDRTIRIWDNQPVLTVGAQAVVVFNANCYIRVLKGLTNFDYSANFNPHTISQIAFGGFYCSVRI

SEQ ID NO: 188388 - protein, 105 aa, Zea mays
  unsure (1)..(105): unsure at all Xaa locations
  Clone ID: MRT4577_103401C.1.pep
HPPPPXXHXNPILNPYQYLHLYHNIYLLHSPHSNPSSTIISHTSPHSHHLNXLQIIPKSLXLLTLSYNLLQLTPSLHTTLNSLLYYSIINLXQNLLYQKKTHSFF

SEQ ID NO: 188389 - protein, 118 aa, Zea mays
  Clone ID: MRT4577_103402C.1.pep
ALPPDGAYRSASCWCRSPSSWFVQFCVPWCKHCKNLGTLWEDLGKVMEGADEIEIGQVDCGVSKPVCSKVDIHSYPTFKVFYEGEEVVKYKGPRDVESLKNFVLNEAEKAGEAKLEAD

SEQ ID NO: 188390 - protein, 77 aa, Zea mays
  Clone ID: MRT4577_103403C.1.pep
ESLPICMPDHCMLLLLLLRDLLMLPQSHLLLLLVLLAWHGLHHHEHVVMTPHPPTEYNACTYMHPRQKCISDCPMRP

SEQ ID NO: 188391 - protein, 103 aa, Zea mays
  unsure (1)..(103): unsure at all Xaa locations
  Clone ID: MRT4577_103404C.1.pep
MNHRLGPFLLVEATLLAQAGACPYGRTPKPRPLPPPXVVNAVPSPALLAVAXSTRPVKCPVTTLKLFGCVAALNGLGHAVMGTKASDTCCRLFSGLADLDAGL

SEQ ID NO: 188392 - protein, 113 aa, Zea mays
  Clone ID: MRT4577_103405C.1.pep
ARSSAEVITLTEETFSDKIKEKDTVWFVQFCVPWCKHCKNLGTLWEDLGKVMEGADEIEIGQVDCGVSKPVCSKVDIHSYPTFKVFYEGEEVVKYKGIHCFTSSPYFLGECSN

SEQ ID NO: 188393 - protein, 53 aa, Zea mays
  Clone ID: MRT4577_103406C.1.pep
KKLELPPGGAAFLFFFFQDRLSIIHLTHDWLLIQSCVYKLQKLTFSNDGKTDL

SEQ ID NO: 188394 - protein, 274 aa, Zea mays
  Clone ID: MRT4577_103407C.1.pep
PRFRPRVRPRVRPRVRTGSPVVDNGIQYTNVFDANFDTLVSALAAAGVGGLPVVVGEVGWPTDADKHATAAFAQKFYAGLLRKLAASAGTPLRPGQYIEVYLFSLIDEDAKSVAPGNFERHWGIMRYDGQPKYAMDLSGQGRNTALVAARGVQYLPRQWCVVNPNAQDTSKIGDSVTYACTFSDCTSLGYGSSCNGLDAAGNASYAFNMYFQVQNQVEGSCYFQGLAVPTAQNPSTDACNFTIQITPSAAGRRRAAAATALLLVVLLTAVHVAP

SEQ ID NO: 188395 - protein, 46 aa, Zea mays
  Clone ID: MRT4577_103408C.1.pep
LRPAGAADSFCLSHMSLTTTISSSLFTSITNFLNQTSPDTIHHDAL

SEQ ID NO: 188396 - protein, 142 aa, Zea mays
  Clone ID: MRT4577_103409C.1.pep
MDSNNLLAAWPVLGPGVAGAVFGAGWWFWVDAVVCSAAAVPFLHYLPGFFASFAALMFNCVNREDIGDGYYSPYDDSEWRVKLWLFISYVVSFVSLAGAVGFLVQDALTDTGPSAWTGTAGILQCVFVLVSGLIYWTCHSED

SEQ ID NO: 188397 - protein, 80 aa, Zea mays
  Clone ID: MRT4577_10340C.1.pep
PPGVVIIIGYAVAQQYPTIAGPPRLFTGPDSLCYLSSLLVSTQGGISHGVSQSVDFIWAVPSGGSNLVKTVGPNKSKPEL

SEQ ID NO: 188398 - protein, 150 aa, Zea mays
  Clone ID: MRT4577_103410C.1.pep
MDLGAPARRRLPIRLLLVSLTVLVVLTARSSAEVITLTEETFSDKIKEKDTVWFVQFCVPWCKHCKNLGTLWEDLGKVMEGADEIEIGQVDCGVSKPVCSKVDIHSYPTFKVFYEGEEVVKYKGPRDVESLKNFVLNEAEKAGEAKLEAD

SEQ ID NO: 188399 - protein, 94 aa, Zea mays
  Clone ID: MRT4577_103411C.1.pep
ELVLLHLCNTISVLTCMRAIECVPYSHYYRFMICKNILLEQIQLPPSTSPFFLECTTSILLHGLPLCLTQYIISFRLSGLQTRRAALTRHIITP

SEQ ID NO: 188400 - protein, 150 aa, Zea mays
  Clone ID: MRT4577_103412C.1.pep
MDLGAPARRRLPIRLLLVSLAVLMVLTARSSAEVITLTEETFSDKIKEKDTVWFVQFCVPWCKHCKNLGTLWEDLGKVMEGADEIEIGQVDCGVSKPVCSKVDIHSYPTFKVFYEGEEVVKYKGLRDVESLKNFVLNEAEKAGEAKLQAD

SEQ ID NO: 188401 - protein, 70 aa, Zea mays
  Clone ID: MRT4577_103413C.1.pep
RNRPTLPAILKVCNVPFFSFFLRGSNFSSTINPSLTRAMANTMLKAISWSDTKGGSSQRVANFVTICPNQ

SEQ ID NO: 188402 - protein, 55 aa, Zea mays
  Clone ID: MRT4577_103414C.1.pep
MQSISKAVALCGAHLLHYRWIDTRLVQACHKHLPYRVTFAMVYMINIFVHLPTRC

SEQ ID NO: 188403 - protein, 89 aa, Zea mays
  Clone ID: MRT4577_103415C.1.pep
TQCSWMRLYKKIYSTPLAVVSMNDRFLSGYESADRVFRHGNDYIILHWVWPQLYRSVVVRRRDEVSSFMDNRKVLHGDVATSGVGRSGG

SEQ ID NO: 188404 - protein, 99 aa, Zea mays
  Clone ID: MRT4577_103416C.1.pep
MRRKQNMHENGTIMIQFGQQVPNCESSASDSPQEVSGMSEGSFNEQNDQSGNRDGYTKSDEGKMTSALSLGNSETAYTPPKPDRTHPFAISYPYADPYY

SEQ ID NO: 188405 - protein, 38 aa, Zea mays
  Clone ID: MRT4577_103417C.1.pep
MIGRGHGGGNSLLASFIYGGSGELASQERSVMRLLPPP

SEQ ID NO: 188406 - protein, 150 aa, Zea mays
  Clone ID: MRT4577_103418C.1.pep
IGYLEAGRGPLCTQLENESPPHAAPSNFITHPRQSLLKRTASRHHMAPARYSAARPCSGPPLPDAMRSSLLRFPRSSATSAMSRYITNPRSHLPLASARELQGATAGTSDAHIASWLLIARIYDHAREPERVQMDPLHAPFILLGYEAET

SEQ ID NO: 188407 - protein, 93 aa, Zea mays
  Clone ID: MRT4577_103419C.1.pep
GAAAGCYISGGGTFTTRAVGRCWPGTALALSLREREFGGDVEVRRQPSRRPQDLATTGVQGRKARSVMAMKQVKTPICLEAMPEARLDDERAS

SEQ ID NO: 188408 - protein, 111 aa, Zea mays
  unsure (1)..(111): unsure at all Xaa locations
  Clone ID: MRT4577_10341C.1.pep
RXGXQEAGQTGLFFNDVIGFPXASTCHXGWIHEDXLGGGGYKADSXXGXQRDGGGGCAPSQQASIXXRENGXLGGTQSSXXYTLXXLRLGPXCCGLTSRLAKLLWKEGTPS

SEQ ID NO: 188409 - protein, 110 aa, Zea mays
  Clone ID: MRT4577_103420C.1.pep
KKKKKKKKKKKKKKKKKEKGRKKKGGGAPFLGSQLSAPLFRRPIFFFGPPNSYLPGGGFSPCLLWKPFRFPPFWLSRASPFFPVWYYIKVPPLSPFPTRAHPLWRMGPPL

SEQ ID NO: 188410 - protein, 100 aa, Zea mays
  Clone ID: MRT4577_103421C.1.pep
PSARSFHGRVVRCSKATHRASATLISAARRLIAAALLDDPANRFFAQLPHSCVSLRPFPALHRALAADPNHRSFIEVLGAAPTLRDRYSACGDGAMVPEV

SEQ ID NO: 188411 - protein, 43 aa, Zea mays
  Clone ID: MRT4577_103422C.1.pep
VSLLQRFWLNPCILPDKVLRWCNLGLAFGLRIHHERAGDAEDP

SEQ ID NO: 188412 - protein, 197 aa, Zea mays
  unsure (1)..(197): unsure at all Xaa locations
  Clone ID: MRT4577_103423C.1.pep
TCTGQIELXKQIHSLSIKXGFESDMYVSGVLIDMYSKYGCLDKARKIWKCLKXKNVVSWTSMIAGYVQHDFCEEALATFKEMQDCGVWPDNIGLASAASACAGIKAMRQGLQIHARVYVSGYAADISIWNTLVNLYARCGRSEEAFSLFREIEHKDEITWNGLISGFGQSRLYEQALMVFMKMGQAGAKYNVFTFIS

SEQ ID NO: 188413 - protein, 179 aa, Zea mays
  Clone ID: MRT4577_103424C.1.pep
MPTMHALRLCPLLSTIRSTPPRATAAARQGALFVARCSSAGTPSAAQALKVKVFQQENYLANWIQALFNSLPPEDYVGATLVLGGDGRYFNKEAAQIIIKIAAGNGVQKIIVGRNGLLSTPAVSAVIRKRKANGGFIMSASHNPGGPDNDWGIKFNYSSGQPAPETITDQIYGNTLSIS

SEQ ID NO: 188414 - protein, 605 aa, Zea mays
  Clone ID: MRT4577_103425C.1.pep
MPTMHALRLCPLLSTIRSTPPRATAAARQGALFVARCSSAGTPSAAQALKISSIPTKPVEGQKTGTSGLRKKVKVFQQENYLANWIQALFNSLPPEDYVGATLVLGGDGRYFNKEAAQIIIKIAAGNGVQKIIVGRNGLLSTPAVSAVIRKRKANGGFIMSASHNPGGPDNDWGIKFNYSSGQPAPETITDQIYGNTLSISEIKQQDIPDTDLSSVGVVSYGDFAIEVIDPVSDYLELMENVFDFQLIKDLLSRPDFRFIFDAMHAITGAYAGPIFVEKLGADPDCILNGVPLEDFGNGHPDPNLTYAKELVFTMFGTHAPDFGAASDGDGDRNMILGKRFFITPSDSVAIIAANAQTAIPYFQFGTKGLARSMPTSGALDRVAEKLNVPFFEVPTGWKFFGNLMDAGKLSICGEESFGTGSDHIREKDGIWAVLAWLSILAHRNKDKKVGERLVSVEDIAMEHWKTYGRNFFSRYDYEACESHSANQMMDHLRDVMANSKPGEKYGNYTLQFADDFSYTDPVDGSTVSKQGLRFVFTDGSRIIFRLSGTGSAGATIRLYIEQFESDISKHSLDAQTALKPLIDLALSVSKLKDFTGREKPTVIT

SEQ ID NO: 188415 - protein, 73 aa, Zea mays
  Clone ID: MRT4577_103426C.1.pep
EAFYLICRRPFRVMGLIDPFFKGLDWGRGFVYFGLFKLNLNPVKSIKPELDRLLCLGLSRNLKKPLYWGGLFP

SEQ ID NO: 188416 - protein, 88 aa, Zea mays
  Clone ID: MRT4577_103427C.1.pep
SHYSRTTGSLHHYIQDRRSDPADSHGDEEGAMGTASTSRLGHSRAELARLRGTIRGAHRLGRRCGWLLAIAERAATSCYPPEHLQLHH

SEQ ID NO: 188417 - protein, 335 aa, Zea mays
  Clone ID: MRT4577_103428C.1.pep
MKGGKSNAAGRSLGEETPTEDCGADTMQRKLMDLPGPRWKKGKDCKGFAALAAANPMSSIVAELQASLRDSEAVAILAAHARDAILEVGPRQAALLNGAAFGRAVEGAGAESQWFQLGPEEVFFLCHALKCLRVESNNKTRIGAPELWGLLASGSEQFPEMYRAYQYLRLKNWVVRSGLQYGADFVAYRHHPALVHSEFTVVVAPEGKAFGTRCARMEVWSEVLCALRASGSVAKTLLVLTISTKSCELGSLDCLEQMIVHERTITRWIPQQCSEQQDKPCREETNRDGQRQKSCIEVSSNEEQEHTSGGVVFSYWPVVLSYTILFSVLVYKLKS

SEQ ID NO: 188418 - protein, 62 aa, Zea mays
  Clone ID: MRT4577_103429C.1.pep
HNATATRKPSASSPPSLPSNPRNERAGEEDPRRRMEAAARVLRGSLFLMSTAAGAQGVGRRD

SEQ ID NO: 188419 - protein, 136 aa, Zea mays
  unsure (1)..(136): unsure at all Xaa locations
  Clone ID: MRT4577_10342C.1.pep
EQPSPFQEHTTRGWPCARTEKVGVNGSRRRGRLVTRAARELWXEDIVARKDPYGDLDYRGMLFVXQETTLRMHXASKGRXGKLVITGXAITICQERDPAGMRRGEAGATCGVATSGALTTTENAGGQSKGGAKRGR

SEQ ID NO: 188420 - protein, 51 aa, Zea mays
  Clone ID: MRT4577_103430C.1.pep
WDLEPAGSVRPESRRLLPCTTISRHETRSLPVLCTSDRISRTRTLLPCGLD

SEQ ID NO: 188421 - protein, 61 aa, Zea mays
  unsure (1)..(61): unsure at all Xaa locations
  Clone ID: MRT4577_103431C.1.pep
EFLGNVLSTPGAFQVGQKTRFQLSQKHAGLVKAHSLPKIKKKKKXGGRPIREEASYAACMV

SEQ ID NO: 188422 - protein, 60 aa, Zea mays
  unsure (1)..(60): unsure at all Xaa locations
  Clone ID: MRT4577_103432C.1.pep
SGHASADAWADAWVVLLVVGELGKTQRXVCCARGVVVLPTRTSGIGACMGLTNFILTEVG

SEQ ID NO: 188423 - protein, 130 aa, Zea mays
  unsure (1)..(130): unsure at all Xaa locations
  Clone ID: MRT4577_103433C.1.pep
SQGIRVGAVRLRKNSRTGAAVIHRPPXAAVVGKNGXDRDVYFDLDDIGNTTGQWDLYRSDASSPXYNPVQSKVFQTLATPCTKTXLLIKVLLLGGRSLLAYVRASGXSPHVLAIKNGPHESPHPGPRGEI

SEQ ID NO: 188424 - protein, 106 aa, Zea mays
  unsure (1)..(106): unsure at all Xaa locations
  Clone ID: MRT4577_103434C.1.pep
FLVFKQSIYTVPLAVFSREILLYLLIIPYFLFYFFLYFLIKIFFLIFFKFFLTNFIEIIFSVYFLYIFFIIFFCFIIFSYHLFFHNIFYTVIFFFXIYFYYYLFFI

SEQ ID NO: 188425 - protein, 65 aa, Zea mays
  Clone ID: MRT4577_103435C.1.pep
KRHSRRAAETAARGRRETARWSDEAEAAANRPGMSRRAIVAPPLGEDGKHGGMGRIRDPGNLRFR

SEQ ID NO: 188426 - protein, 84 aa, Zea mays
  Clone ID: MRT4577_103436C.1.pep
AFSLFFFFYITGEICLKIHVIPSSFVYRLLLLRLHFCINLSKVRGGGPYDSIFYYFLPSGTNGWGEHANTPLIFYWVLRAVSKP

SEQ ID NO: 188427 - protein, 575 aa, Zea mays
  Clone ID: MRT4577_103437C.1.pep
MAARRQHRRGFPLVPLLLSLLAAAAYGRLISDGGPSAQLLSVIRLSGSSPAAGAANKAEEKCEQSYGFLPCTTTVLGNLFLVLTYGYLMYKAATYLSAGSELLLEIMGPGLVGGLLLPILGALPDALLVLVSGLSGSKEEAQSQVLIGMGLLAGSTVFLLTLLWGTCVVVGKCDLGPSREAVDVTDTKGFSLTGTGITTDVQTSYAARIMGLSVIPFIIAQFPKMLKTHHGQRLAMLLALIVSFLLVLAYCLYQVFQPWIQRRKLAYAKHKHVISGILRHAQMQSLGRLLNDDGTPNEHVIRKLFRKIDMDESRSLSRAELHALIVGINFEEVDFDRTDAVDKVMDDFDTSRNDVVEEEEFVQGMRKWLDEARRSVPVGGAFSSKFIHEYHERTRQEHDELVDRSDEAVESVENPGWCIAKAVALLLLGSAAAAAFADPLVDAVHGFSNATRIPSFFISFIALPLATNSSEAVSAIIFASRKKQRTCSLTFSEVYGGVTMNNTLCLGVFLALIYFRNLTWDFSSEVLIILLVCVVMALFTSFRTTFPLWTCLVAYMLYPLSLIIVYILDYVFGWS

SEQ ID NO: 188428 - protein, 568 aa, Zea mays
  Clone ID: MRT4577_103438C.1.pep
MAASRRQHRRGFPLVPLLLSLLAAAAYGRLISDGGPPAPLLPVIRLAAPPAEAECEQTYGFLPCTTTVLGNLFLVLAYGFLMFKAATFLSAGSELLLEIMGPGLVGGLLLPILGALPDALLVLVSGLSGSKEEAQSQVLIGMGLLAGSTVFLLTLLWGTCVVVGKCDLGPGREAVDVTDTKGFSLTGTGVTTDVQTSYAARIMGLSVIPFIIAQFPKMLKTHHGQRLAMLLALVVSFALVLAYCLYQVFQPWIQRRKLAYAKHKHVISGILRHAQMQSLGRLLNDDGTPNEQVIRKLFRKIDMDESRSLSRAELHALIVGINFEEVDFDRTDAVDKVMDDFDTSRNDVVEEEEFVQGMRKWLDEARRSVPVGGAFSSKFIHEARGAARRQHDELVDRSDEAVESVENPGWCIAKAVALLLLGAAAAAAFADPLVDAVHNFSNATHIPSFFISFIALPLATNSSEAVSAIIFASRKKQRTCSLTFSEVYGGVTMNNTLCLGVFLALIYFRNLTWDFSSEVLIILLVCVVMALFTSFRTTFPLWTCLVAYMLYPFSLVLVYILDYVFGWS

SEQ ID NO: 188429 - protein, 63 aa, Zea mays
  Clone ID: MRT4577_103439C.1.pep
ASVRMESVRPARYVRGKGMVQALSLADNHRYRLMLKGMPSLNDALAVGEFVKQLQYPDSSRLL

SEQ ID NO: 188430 - protein, 69 aa, Zea mays
  Clone ID: MRT4577_10343C.1.pep
MAPPSRDYWLGFFRGAGDNVFDAIDAAITVAASDHPAALRERRDGIAERLFTALLVTGAAGAGAAAVQG

SEQ ID NO: 188431 - protein, 57 aa, Zea mays
  Clone ID: MRT4577_103440C.1.pep
NISSHLGGIYMVCLYQLIQIGFLRVVGPYVKCSKKPPAQWARQPLQKTCAQQLEPNY

SEQ ID NO: 188432 - protein, 94 aa, Zea mays
  Clone ID: MRT4577_103441C.1.pep
HHLLREKGPLFTPSSQKRKAGAHLIKPGPRWGPCPKNVTGGIFWLKFSGGPQGEKFGGGKKHFPRFWPKKKHFAPPPFRGVPQGPEIWPLVKKK

SEQ ID NO: 188433 - protein, 143 aa, Zea mays
  unsure (1)..(143): unsure at all Xaa locations
  Clone ID: MRT4577_103442C.1.pep
MRPALVKFRDELLRRMQRDGSSANPERIVSVLETSAGVKHSVYLIMKLTSLLYLIYFYDIDGTXGVTPNVGHFYSHIVVTGPMLYYQLGEALXPYEVMLIHVRMLGKTSVTTDHLFYKGAXLPKVLCTVIHFTAQCCCQYEHQ

SEQ ID NO: 188434 - protein, 212 aa, Zea mays
  Clone ID: MRT4577_103443C.1.pep
MLQWMSHNQRYLLSDSKRLKVLQAFIMSSPPDIAQFILKAVAQNCTRLAYQPDGLSLLQNCLERVSRKQKDDIFTQLSYQSLFLAQNSRGNWIVQDVLRKGDPSHVEIIASCLRNHYVTLAKNKYSSNVVEWCLRVFHEGERSVIICEFINYPHFRDLVTDEFANFALSTALQTCEIPLRNVLANAILSQNITVRNQHCMKIFSTLAKYGFM

SEQ ID NO: 188435 - protein, 67 aa, Zea mays
  Clone ID: MRT4577_103444C.1.pep
DGCATAVQPWWVSKISYGELFRVGFFLKTVAFPESMNYLVFGGCVFQQLPYHTTWNGCRAYCLFPCL

SEQ ID NO: 188436 - protein, 32 aa, Zea mays
  unsure (1)..(32): unsure at all Xaa locations
  Clone ID: MRT4577_103445C.1.pep
KKKKKKKKNKXKKKKKKKKKKKKKKKKKKKKN

SEQ ID NO: 188437 - protein, 126 aa, Zea mays
  Clone ID: MRT4577_103446C.1.pep
TNGTPQSTTGFNLVPPLGGRKIKVGLRVLTPWAKKFNHGTRVFFNTPNFLFKVNFGKGALTLNPKMKFRGLNKNFPFGKKNFIGGLREPKVFFTKLAKGKKFSPTFLKRKGWGRLTPPKFWGVYKV

SEQ ID NO: 188438 - protein, 93 aa, Zea mays
  Clone ID: MRT4577_103447C.1.pep
LCRAVAVALCFAGCRVPTVRVGLPDRLHAPPGPLLRIRASCKTSLVPPMSKASSKPRAPQDLSTQLCCPCCWAVPVLRGDSLKARERVLISRT

SEQ ID NO: 188439 - protein, 614 aa, Zea mays
  Clone ID: MRT4577_103448C.1.pep
MPGCGVAGRGGVGVSSAARRTPPQGKSRPCLWMTIARGYGRQHELKYCTSPQSKSVLLEARFGRHVTRSTAYLLQNSRSTAMTRLQKSGKFLQPVLDSSRNYLTSTFYNASLKRRVLSRVECFVSSDPINNGWLKPRRSENFTSLESACVQPEYKLPVRTRADCKAEQYEITGSPLSPSDVPADAVMIGDTNEISPWWQEFPKRWTVVLLCFFAFLLCNMDRVNMSIAILPMSSEFSWNPATVGLIQSSFFWGYLLTQILGGIWADRFGGKVVLGFGVVWWSFATVLTPLAAKIGLPCLLTMRAFMGIGEGVAMPAMNNILSKWIPVSERSRSLALVYSGMYLGSVTGLSLSPLLISRFGWPSVFYAFGSLGTVWFALWQSKAHSSPDDDPELSKAEKRHILGGSALKEPVTSIPWRLILSKAPVWALIISHFCHNWGTFILLTWMPTYYNQVLKFNLTESGLLCVLPWLTMAVFANIGGWIADTLVQRGVSVTNVRKIMQSIGFLGPALFLTLLSKVRTPAMAVLCMACSQGSDAFSQSGLYSNHQDIGPRYAGVLLGLSNTAGVLAGVFGTAATGYILQKGSWDSVFKVSVVLYIVGTVVWNVFSTGEKILE

SEQ ID NO: 188440 - protein, 247 aa, Zea mays
  Clone ID: MRT4577_103449C.1.pep
SPTARSLPLVRFFLFRGSNVVSEAAAAVLHCCCGGPSRPAESTRLIPPRFILLLASSFTCSRIRPGLRMPGCGVAGRGGVGVSSAARRTPPQGKSRPCLWMTIARGYGRQHELKYCTSPQSKSLLLEARFGRHVTRSTAYLLQNSRSTAMTRLQKSGKFLQPVLDSSRNYLTSTFYNASLKRRVLSRVECFVSSDPINNGWLKPRRSENFTSLESACVQPEYKLPVRTRADCKAEQYENTGSPLSPS

SEQ ID NO: 188441 - protein, 161 aa, Zea mays
  unsure (1)..(161): unsure at all Xaa locations
  Clone ID: MRT4577_10344C.1.pep
PPPPKSLGPLPLGPPPXPGAXGLSKPLDLKGVPPMWGRPPANPLXPGXSRKPPCQKPPXPWLTGPPPLGTLNPKKLPYPESPNFGXSPPFCRKISPPGGPCPQKIFGGGVSPPGKAPPQGARQPPXPEFPGSPPPGGRKRGPFLGFFFFPLEGGIYWGFLT

SEQ ID NO: 188442 - protein, 124 aa, Zea mays
  Clone ID: MRT4577_103450C.1.pep
GPSGRRTVFYQTEFVARTELLGGWTARGGGWLRLTEMRLFDKVRHDTVRGPGSDTGVGRLRKEPVRAAGVKIRDPSVDAEAFEPPCPGYDSIGDPREGDAQHHDQAPRGVPAVCRGARYARRRT

SEQ ID NO: 188443 - protein, 83 aa, Zea mays
  Clone ID: MRT4577_103451C.1.pep
SSGKASCAPSLIGGGSLTDQRACSVQPEHNIQAAWAPDLPYPRLGVHLPQSSQRSKQTYFGFLRACFFPWTGVTYTAAAMLWG

SEQ ID NO: 188444 - protein, 79 aa, Zea mays
  unsure (1)..(79): unsure at all Xaa locations
  Clone ID: MRT4577_103452C.1.pep
FYAFLILKLDLFCCFLFIYKATVSMFSKVPSSLIFEKNPCSPRTLDHMNTKFNHTSTLLHSPVDHXGLHXHLXPPPPXP

SEQ ID NO: 188445 - protein, 218 aa, Zea mays
  Clone ID: MRT4577_103453C.1.pep
APASLCRLIPPRFILLLASSFTCSRIRPGLRMPGCGVAGRGGVGVSSAARRTPPQGKSRPCLWMTIARGYGRQHELKYCTSPQSKSLLLEARFGRHVTRSTAYLLQNSRSTAMTRLQKSGKFLQPVLDSSRNYLTSTFYNASLKRRVLSRVECFVSSDPINNGWLKPRRSENFTSLESACVQPEYKLPVRTRADCKAEQYEITGSPLSPSDVPADGRM

SEQ ID NO: 188446 - protein, 135 aa, Zea mays
  unsure (1)..(135): unsure at all Xaa locations
  Clone ID: MRT4577_103454C.1.pep
AALEAAGIADQFREGVNVKIMQSIXFLGPALFLTLLSKVRTPAMAVLCMACSQGSDAFSQSGLYSNHQDIGPRYAGVLLGLSNTAGVLAGVFGTAATGYILQKGSWDSVFKVSVVLYIVGTVVWNVFSTGEKILE

SEQ ID NO: 188447 - protein, 204 aa, Zea mays
  unsure (1)..(204): unsure at all Xaa locations
  Clone ID: MRT4577_103455C.1.pep
NPFTQVXEFNLTESGLLCVLPWLTMAVFANIGGWIADTLVQRGISVTNVRKIMQSIGFLGPALFLTLLSKVRTPAMAVLCMACSQXDALQKITLIWIYKXSDMTTIGXLCYKSLLVSLSISQVSDAFSQTGLYSNHQXDIGPRYAGVXLGLSLLIVLAGVFGTAATGYILQKGSWDSVFKVSVVLYIVGTVVWNVFATGEKVLE

SEQ ID NO: 188448 - protein, 76 aa, Zea mays
  Clone ID: MRT4577_103456C.1.pep
ISTETWLSRMINPVCSAIRLHMPTLAAETKSVKLGRRYLQWFICAVRQPLGDQLISQHAGSHWRSIVVNLTCTWLI

SEQ ID NO: 188449 - protein, 58 aa, Zea mays
  Clone ID: MRT4577_103457C.1.pep
YFFFFSFLFFFKDKISLYLYSYSKGGALTCREILGQYVQHTFISTEWNQHRLRLQSIH

SEQ ID NO: 188450 - protein, 143 aa, Zea mays
  unsure (1)..(143): unsure at all Xaa locations
  Clone ID: MRT4577_103458C.1.pep
KHHAEDKGEIEYTVIRPVQRAIDAVVGCRSSSESHLRSTLGCVXGWSRAWSRPAQCQAVGSANDLRGPPFRECRRGPPRSEEEDDVGGGWRASPPSSSAPRPRRRIPGRAMSSGAGAGRPTSSTWAFGAARGASGPARSATPS

SEQ ID NO: 188451 - protein, 102 aa, Zea mays
  unsure (1)..(102): unsure at all Xaa locations
  Clone ID: MRT4577_103459C.1.pep
VAAPGPDHVHDHGRRPRXQRLFXVVGLLRLAPIGGFLLPNKGLQSLSWSGRMGNTRMLVSLSTTEVRRSXYRVLSPFXVVSFXLVFRXEVVHSIMVTQPRDG

SEQ ID NO: 188452 - protein, 58 aa, Zea mays
  Clone ID: MRT4577_10345C.1.pep
RGLSMGPGGRSSRASDQFRGVGAGRAHSACGAAHTAPPGEPLPPRHGCPAWAGRRRRL

SEQ ID NO: 188453 - protein, 74 aa, Zea mays
  unsure (1)..(74): unsure at all Xaa locations
  Clone ID: MRT4577_103460C.1.pep
GPRSRSTPRPPRVXXAFGERVGGRVVGRVGLPVSYVPVPAGVLAVYMVRRVSVNKVAYGGPCYRPLFRGGGGVF

SEQ ID NO: 188454 - protein, 59 aa, Zea mays
  Clone ID: MRT4577_103461C.1.pep
FYNLLIRKHHRLGHIIHGTGHNHPHLLRSGSLRPNPTLTHNSLKRYRLTLPLLYLSIYI

SEQ ID NO: 188455 - protein, 72 aa, Zea mays
  Clone ID: MRT4577_103462C.1.pep
GAGPAGTLMICEGRSDSMQDSAAVTYPGSALYEGAPPGRAGGKNARGLSKGVVSMARGREQIRGGASERHSA

SEQ ID NO: 188456 - protein, 51 aa, Zea mays
  Clone ID: MRT4577_103463C.1.pep
APIIPSVMRSNRVLIIAPGPAKEFDRPANLIESPTLFAALVQENASRSSPV

SEQ ID NO: 188457 - protein, 67 aa, Zea mays
  Clone ID: MRT4577_103464C.1.pep
LCGDLPPPVCFLLTPYYSWGSCSDSLKWGPYPNQIRCGMIFTPCEPPDPLRAKDIFEWVLWPLAQEP

SEQ ID NO: 188458 - protein, 41 aa, Zea mays
  Clone ID: MRT4577_103465C.1.pep
MSAAPAQTHPRITVRAVSIEQILAPRFHTPPALGEEVAAAR

SEQ ID NO: 188459 - protein, 148 aa, Zea mays
  unsure (1)..(148): unsure at all Xaa locations
  Clone ID: MRT4577_103466C.1.pep
FLCEEDCRTALGQFKRLAWXEXLQLATDDFSEXNGLAQGGSGKVYKGALPYGTKIAGKRVTDHXSPGGEDGFLREVELISAAVHRNFLRAIALCSTQTERLLAYPSMQNLSVVYRLPESKPWEPILDWTSRKRVAIGTTCRLGYLHEH

SEQ ID NO: 188460 - protein, 188 aa, Zea mays
  Clone ID: MRT4577_103467C.1.pep
RLPGVQYFAWLCRDPAQQRRPSPWSLPRLASMQAITNPLLVGTCSHTWLLDMAVCRRSAVPCALIPTRRRRPCLISAVVDFVSANNFALHLRSRCRENPTSPAHHPRFVVLAFTVKSSNPSSFVRPPPHQLAPNTISSSFFAPSRNPKKSGEDEASSAIFPKRSTNCLDRKIATDLADSCQLWKWYEN

SEQ ID NO: 188461 - protein, 42 aa, Zea mays
  Clone ID: MRT4577_103468C.1.pep
PPLKKKNPFFYPPKTNRGGSVPFLHLQIVSIINGNKYYLDRG

SEQ ID NO: 188462 - protein, 69 aa, Zea mays
  unsure (1)..(69): unsure at all Xaa locations
  Clone ID: MRT4577_103469C.1.pep
RIHRGPVSGIXIKVQGDHVQLCMDFVQDKSAFEXSKRSASXETMDMLSALGMPDLPGVELQAQVSSVAA

SEQ ID NO: 188463 - protein, 52 aa, Zea mays
  Clone ID: MRT4577_10346C.1.pep
SPGLNLIRCFWGNSTGAPPKLLNLLRCKGWTFGVFSPKRTIFFSAPKPMGDV

SEQ ID NO: 188464 - protein, 60 aa, Zea mays
  Clone ID: MRT4577_103470C.1.pep
SNPCTLARPSAPKQKTATVEPLEGFEALIDATMSVLMTESRSFQSMRRVSTPPLGLPPTC

SEQ ID NO: 188465 - protein, 155 aa, Zea mays
  Clone ID: MRT4577_103471C.1.pep
MGTGPLTSGVRAGGGNTGWLWMSSCNLGSPVLPISFLFWLLLAAPGARAAGYKTCPPTKPGMLNVHLLPHTHDDVGWLKTVDQYYYGMDLDFLNFMPTVLSDVQHASVQYILDSVVSSLLEKPTRRFIYVEMAFFSRWWKQQTSATQDAVRNLVR

SEQ ID NO: 188466 - protein, 174 aa, Zea mays
  unsure (1)..(174): unsure at all Xaa locations
  Clone ID: MRT4577_103472C.1.pep
MERGAVVLPLQGAGVGRVLLPVQVRVRSFLRSRRATERRRRLASTAAPARCSKMYVPGFGEGSPERKAAINLQHFFNYIAVSIVLAQPESYNREAYLELKEFISRTSLNDAEIFCEKLMRESPRLKGLXVRSAYVKNEFEWDNLKKLSFKMVDEANTKLMRDYVVEVSHIEDEN

SEQ ID NO: 188467 - protein, 38 aa, Zea mays
  Clone ID: MRT4577_103473C.1.pep
EQGQTIRSTHNKTTEHLLMSRLVNKGKKVRPTVAVTGK

SEQ ID NO: 188468 - protein, 39 aa, Zea mays
  unsure (1)..(39): unsure at all Xaa locations
  Clone ID: MRT4577_103474C.1.pep
HHSFGCYHNSHHLSSCSHLSSHHFYSSXKHISARRHAWR

SEQ ID NO: 188469 - protein, 61 aa, Zea mays
  Clone ID: MRT4577_103475C.1.pep
MCGFVSWKQTALRILEVRSAYVKNEFEWDNLKELSFKMVDEANTKLMRDYVVEVSHIEDEN

SEQ ID NO: 188470 - protein, 221 aa, Zea mays
  unsure (1)..(221): unsure at all Xaa locations
  Clone ID: MRT4577_103476C.1.pep
FLIRTTIASPSLLPSRPVSLSLSLCLSLPDASISQQHTRATKCRLYHTISADAAPASNNLLVSFLEMLIDFXPYVIGLSLAESGGFAQAPGVAATNFTCTITQLGGSSAFLSEIGHHDVTDMLHNILNXNXANSKARLXLPSRIRRSMVFMTLXQTGERDXMFYMNPTAVMXLLTDAELXLLLVRRTRCSSYSCISIISETCRSAHMFXMLSLKDTFVLCS

SEQ ID NO: 188471 - protein, 89 aa, Zea mays
  Clone ID: MRT4577_103477C.1.pep
QQLLPFHLQVVANIAVFLQPQQQLPPFSPQVGGNINAFLQQQQLLPFYPQDVANNVPFLQQQQLPPFTHLALTNPPPLLQQPPIGGAIF

SEQ ID NO: 188472 - protein, 110 aa, Zea mays
  Clone ID: MRT4577_103478C.1.pep
TSFNGLPFFFKRYAPGVDCPKTLAGFTFGSTIFGDPKRDFCFSQTHWALKDMPPNWGLNLGNKTGANALSRGEPQGALLSPGGALDQPPFLGGGGLWFLWLTPPLRMGGP

SEQ ID NO: 188473 - protein, 74 aa, Zea mays
  Clone ID: MRT4577_103479C.1.pep
VRPQYSAAWVPPFVFHYLPPIVPSGGVVARGEHRAVAKSHVLWQEAGTCGRGQRPCGSGGPPVRNRHGITAEDG

SEQ ID NO: 188474 - protein, 55 aa, Zea mays
  Clone ID: MRT4577_10347C.1.pep
VPFRRLPKLLAGGHRTGQGSTYSGDLSELPGWCHTDPARRAYSRSGPPTRAPSRR

SEQ ID NO: 188475 - protein, 128 aa, Zea mays
  unsure (1)..(128): unsure at all Xaa locations
  Clone ID: MRT4577_103480C.1.pep
MKNPLQKMSTEEKAXEYNHCEEERARASXGVLKKVKYKAKNSGEMYKIYIFKVLKEVHPDIGISCMVMSIMNSFSNDIFEKLAAEAVKLARYNKKPSITSREIQTSVXLVLPGELAKHSVYEDTKVAT

SEQ ID NO: 188476 - protein, 63 aa, Zea mays
  Clone ID: MRT4577_103481C.1.pep
VDDELRAENVEVYYDPGELLGGLLKGPKVASSEEDPREAASVSASGAVPPPLACPFLNPGKPQ

SEQ ID NO: 188477 - protein, 75 aa, Zea mays
  Clone ID: MRT4577_103482C.1.pep
QILFDALVMAVDSPEVKKALLQKGYSNLLIQMGRGTYVPSKVSGDATLQVDHFTFSPSIADNMRTASLVISHAGS

SEQ ID NO: 188478 - protein, 69 aa, Zea mays
  Clone ID: MRT4577_103483C.1.pep
DLLPLLRCTAVCFSVRFVLRPASPARPASVPSSSRGVASVGPAPSRVAAGPRRGFPCSLIRTRGQEQEP

SEQ ID NO: 188479 - protein, 94 aa, Zea mays
  unsure (1)..(94): unsure at all Xaa locations
  Clone ID: MRT4577_103484C.1.pep
GXCAVFSFQAGKGTAYTIQLLSYIKDINRAQKANTVGTTTAATQLTVLLWYYCKKRRLVHVTLFGLELVNLVTALAPSETAGLASSPGRSRRTG

SEQ ID NO: 188480 - protein, 134 aa, Zea mays
  unsure (1)..(134): unsure at all Xaa locations
  Clone ID: MRT4577_103485C.1.pep
RSVKTGLQFFFARMGCYVKKSRYAQCVGTGTSVCLTSVMXNLPAXVMQLTSFSAKSTNKASIVSGHVVFAIHNAEQLGNLVTSVPVALGGVLPNIHSVILPKKTSEKASTGGSKXTKSPKKFFKFLSYKAEGFK

SEQ ID NO: 188481 - protein, 64 aa, Zea mays
  Clone ID: MRT4577_103486C.1.pep
PPFLFRERLFYLKHHFLSMTRPTSLKGRGDVISSLAIPFALAASRMFFFGRGVYFMSHGIGKKK

SEQ ID NO: 188482 - protein, 200 aa, Zea mays
  Clone ID: MRT4577_103487C.1.pep
SERVVTETKPRRHLVRFLLSLVVHGYATTTSSRFIGNRGQIPKRGPPMSELADIRQEFGPNYFYYLYGRCINNLHLICTAKSVVWMLVHKADGHAAAAEPNSGRGGSVHLLPLQEPQHGLELKGFKLHSLPPPPPTSYSTWDCYAMVASFSPPSRVLAGLPMYVCCRAFLLRLVYIYRSASRQLSTDDPWTPRTLRCYHC

SEQ ID NO: 188483 - protein, 43 aa, Zea mays
  unsure (1)..(43): unsure at all Xaa locations
  Clone ID: MRT4577_103488C.1.pep
RTRGLAKRFXVGGAPRVIGGCLRTFGKDHVDVAGTSKGAESKL

SEQ ID NO: 188484 - protein, 70 aa, Zea mays
  Clone ID: MRT4577_103489C.1.pep
EVPKAKLDVEQEAGRGARARRGNHRCTALHPSMLRAQQQQQQRLARGMTPSMSGKIYLVGRTSYCAYPKH

SEQ ID NO: 188485 - protein, 116 aa, Zea mays
  Clone ID: MRT4577_10348C.1.pep
ASIWLKLKQITQLLLGHATQETVASKKDKKTGRCCRGPYSSADTHPAGGDESSSEECDEHAYNNVLQQPGSERAGTTPSMSSRPPLEGDAIGSFTMPPAWHDANQGRGAFEEWEGR

SEQ ID NO: 188486 - protein, 132 aa, Zea mays
  unsure (1)..(132): unsure at all Xaa locations
  Clone ID: MRT4577_103490C.1.pep
SLPQXFRLRGRVSFKFRVAATSITPQHFPRRRRLDSHRMVWVGPLATPRASRSHCGSPAALGAPSGCGTLIAKWRGASSGNQHLYNFLTKTMHSGWPLAWKNRTQQPRPLNKVLCMSVQQASISKVAVMPVE

SEQ ID NO: 188487 - protein, 100 aa, Zea mays
  unsure (1)..(100): unsure at all Xaa locations
  Clone ID: MRT4577_103491C.1.pep
MRPPRLNDHRRPTFAAALSSPAPPLAPDTPPVLPQECCPPLSGWRICSCRLVLVVFEXFVPPLAKAFIGFFEPATLFIQRWLSLXYVPTLVVLPLAVGDI

SEQ ID NO: 188488 - protein, 262 aa, Zea mays
  Clone ID: MRT4577_103492C.1.pep
MAATAMIGITNLRCRHDPLSSLPRATSSAARSCTLLPPRCRRHSSCCSPSSSVSPCRARVRPTAALKRIPAADTGFMGPANNEATTLKRSSSADLRRRLIVPSSTAGTGHAASASTGVLPAIIGVAHLLVSLGILLAMDKFLKQAFVAASIKFPSALFGMFCVFSVLVVFDTFVPPLAKAFIGFFEPATLFIQRWLSLFYVPTLVVLPLAVGDIPAASGIKILAITFGGWFATLTVAGYTVLAMRKLVKTELLAPSEPTKKP

SEQ ID NO: 188489 - protein, 51 aa, Zea mays
  Clone ID: MRT4577_103493C.1.pep
NMPSYNISPFRRGCFLQLGELLVDSPTLFCKHAFEPITVIKCCSPFLKNLL

SEQ ID NO: 188490 - protein, 58 aa, Zea mays
  Clone ID: MRT4577_103494C.1.pep
FYIFFFFFFFFVFFFWKKIAIICHSLLFQSMLLSNNVSLRKLLKHNLAQMDTFKSRLQ

SEQ ID NO: 188491 - protein, 40 aa, Zea mays
  Clone ID: MRT4577_103495C.1.pep
SVVVTASRSAAASSHNEINITDHNRLCVPAATAVWPPVRQ

SEQ ID NO: 188492 - protein, 83 aa, Zea mays
  Clone ID: MRT4577_103496C.1.pep
LITSKSSTSGLADYYNNPCQSAVVTQTQWLLHCWALFLFFSTHPFHVLIGISPFGPLQWPRACCNCGCSSTSLSPPPPPVFVV

SEQ ID NO: 188493 - protein, 42 aa, Zea mays
  Clone ID: MRT4577_103497C.1.pep
VMMSMSPTKITFHYLHHALKSKMLAPNLVICAHNPSKKQYLL

SEQ ID NO: 188494 - protein, 86 aa, Zea mays
  Clone ID: MRT4577_103498C.1.pep
PKRQPAGAQQQHCRLQQSERDEILVVGKEDEGRVSVCIPPRNALLLMRCRSDPVCMVALATRFWGSSTAATMDQADSEVDWVPHRH

SEQ ID NO: 188495 - protein, 37 aa, Zea mays
  Clone ID: MRT4577_103499C.1.pep
WVIFFFHIFNWFVYFLLSFKCYLASASPLEEVLASFV

SEQ ID NO: 188496 - protein, 45 aa, Zea mays
  Clone ID: MRT4577_10349C.1.pep
KSNFSIKVPLDSLYKFISWVCAKSSHLFESPLCTFWNCIIELGYF

SEQ ID NO: 188497 - protein, 45 aa, Zea mays
  Clone ID: MRT4577_1034C.1.pep
QELQVVISLCKGPGWCQPVYVNPGSESMFRPLSISLRLGLTLRPG

SEQ ID NO: 188498 - protein, 46 aa, Zea mays
  Clone ID: MRT4577_103500C.1.pep
GWEPQFYKILKPTLLGKRATVFFTVSYPKSKNGFHPTNYRGPSQRK

SEQ ID NO: 188499 - protein, 83 aa, Zea mays
  Clone ID: MRT4577_103501C.1.pep
AEARMLCLRVRLEEEASNFRSNFGYNIPLKHLAYRVLMYVHAYTLYRAARPFGCWFMLGPYSVNDGAQLYMIDPSGVSYGYCG

SEQ ID NO: 188500 - protein, 41 aa, Zea mays
  unsure (1)..(41): unsure at all Xaa locations
  Clone ID: MRT4577_103502C.1.pep
SLPPPDKIPRAEQHXGTREGVLERNSHTDFSHKKGNINGNY

SEQ ID NO: 188501 - protein, 46 aa, Zea mays
  Clone ID: MRT4577_103503C.1.pep
KGVPPRVFDSLLFVGPYSSYLIPDFGRVLPKGRPLASFYRVAAALS

SEQ ID NO: 188502 - protein, 135 aa, Zea mays
  Clone ID: MRT4577_103504C.1.pep
GGGPIALSQGPQEQNLMVGIHQVVGARKKLRKVVARDMPRGSYTLEWGSMFPALPARWVCFKSPARPPMKDWVKELQFFMYANMKICSLSGGQTGGGFFLLLKRGRGMRTMLLDCKQLQVPSFCLVNETNCLKRL

SEQ ID NO: 188503 - protein, 68 aa, Zea mays
  Clone ID: MRT4577_103505C.1.pep
LSFLSFVLISLSDSVQCPCLCFQPQRITMCALYVGSGKNKTPVWLGYSQRDLTGLCAPADGPINCTTL

SEQ ID NO: 188504 - protein, 179 aa, Zea mays
  unsure (1)..(179): unsure at all Xaa locations
  Clone ID: MRT4577_103506C.1.pep
MYAKEDDTRLSANDLSQRQCILTGKHVTHDKNYKEPPSWTFFKTAQMKIWTFXRVEMDELVATFLFLYISHHFSDVGVSKGNSKSSTPSXIAEQSYWTILVMMCVLVYCTAEISXDHSKPGTICHMVLVRKWTLTRCXFYSIVHSPIRSLRLVKSMGWYSAGSLGAKGILRIPVWRGNG

SEQ ID NO: 188505 - protein, 134 aa, Zea mays
  unsure (1)..(134): unsure at all Xaa locations
  Clone ID: MRT4577_103507C.1.pep
MDSHSSPSAAPPAAAEKARYTYSPRLRWQPEVEEYFNTAYGRDHFARISEALEHPSCYSCIRVNTLKSSTDAVMHKLLDLVCKNELSAVINGLEVVELNGGDQSQEGCSLVHKCPYAGLENVXFVQGSGPHVLH

SEQ ID NO: 188506 - protein, 57 aa, Zea mays
  Clone ID: MRT4577_103508C.1.pep
PSPTNDPNLPIYLHSATPLTWRALTPGGWAPTPPSFTSSNHFTGLIKLSSTNLNHNH

SEQ ID NO: 188507 - protein, 33 aa, Zea mays
  Clone ID: MRT4577_103509C.1.pep
LNYKFPYVSVDCSNDPDPINCLNWVCYPSYNYR

SEQ ID NO: 188508 - protein, 87 aa, Zea mays
  unsure (1)..(87): unsure at all Xaa locations
  Clone ID: MRT4577_10350C.1.pep
GVGSLSDEEFWLVCRECGHIGWLYVGEMSXQLWEWLVLSLNHDVPCTFFKLSRAFCVSGKVXLVEAVVAFVSCQLDEVVGSVGTVRS

SEQ ID NO: 188509 - protein, 212 aa, Zea mays
  Clone ID: MRT4577_103510C.1.pep
MDEEEHEVYGQEIPEDGDMDGADVDMAASGDDAAKLQELDEMKRRLKEMEEEAAALRDMQAKVAKEMQGGDPSASTAEAKEQVDARSVYVGNVDYACTPEEVQQHFQACGTVNRVTILTDKFGQPKGFAYVEFLEQEGVQEALNLNESELHGRQIKVAPKRTNVPGMKQRPPRGYNPYHGYPYRSYGAPYFPPYGYGRAPRFRRPMRYRPYF

SEQ ID NO: 188510 - protein, 175 aa, Zea mays
  unsure (1)..(175): unsure at all Xaa locations
  Clone ID: MRT4577_103511C.1.pep
FLAAVCWAGFLFVVSWVASLLRLXSXLSLVWGLLLGXALAASXXLXAXPFGVASXLXFRVXXCFXXXXXLXXXXXCXXWXXVXLXXXXXXXXGXXCGXXXXPPRSXRXXLSGSWVXGAGGXRGWGSGARSWCGWRLLFVRGGGAVFLGVLVPSPPAPLVARSRGGVGVWWAGVGG

SEQ ID NO: 188511 - protein, 51 aa, Zea mays
  Clone ID: MRT4577_103512C.1.pep
IIIKLAFTLLFHTRLFFFLNLYYDTFFIFLTLFSFLIKLLTLQFFSTVSIK

SEQ ID NO: 188512 - protein, 212 aa, Zea mays
  Clone ID: MRT4577_103513C.1.pep
MDDEEHEVYGQEIPEDGDMDGADVDMAAAGDDAAKLQELDEMKRKLKEMEEEAAALRDMQAKVAKEMQGGDPSISTAEAKEQVDARSVYVGNVDYACTPEEVQQHFQACGTVNRVTILTDKFGQPKGFAYVEFLEQEAVQEALNLNESELHGRQIKVAPKRTNVPGMKQRPPRGYNPYHGYPYRSYGAPYFPPYGYGRAPRFRRPMRYRPYF

SEQ ID NO: 188513 - protein, 212 aa, Zea mays; identical to SEQ ID NO: 188509
  Clone ID: MRT4577_103514C.1.pep

SEQ ID NO: 188514 - protein, 69 aa, Zea mays
  unsure (1)..(69): unsure at all Xaa locations
  Clone ID: MRT4577_103515C.1.pep
XGAXXVALAFSWXARCEXXRLLVQGRRLVGCLDTXTVSIYPXXPFYLCRXXRSNFCRXXSSKPRSPMLQ

SEQ ID NO: 188515 - protein, 405 aa, Zea mays
  unsure (1)..(405): unsure at all Xaa locations
  Clone ID: MRT4577_103516C.1.pep
MADGEPSLTRWTFEDFVVHYEARFGLRREADGDGDGDGDDAPPPRGSDHGASRPATARANGGADLAVFEQFERMERKVEISNGAIEDGPLQKSLLPSFESAEMRNLAETLLRDIIRGSPDVKWESIKGLENAKRLLKEAVVMPIKYPKXLHRSIITLERHITVWSTWNRKXTMLAKAVATECKTTFFNISASSIVSKWRGDSEKLVKVLFELARHHAPSTIFLDEIDAIISQRGEARSEHEASRRLKTELLIQMDGLTKTDELVFVLAATNLPWELDAAMLRRLEKRILVPLPEPDARHAMFEELLPYTPGTMEIPYDVLVEKTEGYSGSDIRLVCKEAAMQPLRRVMAVLEGRKEEVPEGELPEVGPVTTEDIELALRNTRPSAHLHAHRYEKFNQDYGSHVHG

SEQ ID NO: 188516 - protein, 212 aa, Zea mays
  unsure (1)..(212): unsure at all Xaa locations
  Clone ID: MRT4577_103517C.1.pep
MDEEEHEVYGQEIPEDGDMDGADVDMAASGDDAAKLQELDEMKRRLKEMEEEAAALRDMQAKVAKEMQGGDPSTSTAEAKEQVDARSVYVGNVDYACTPEEVQQHFQACGTVNRVTILTDKFGQPKGFAYVEFLEQEAVQEALNLNESELHGRQIKVAPKRTNVPGMKQRPPRGYNPYHGYPYRSYGAPYXXXYGYGRAPRFRRPMRYRPYF

SEQ ID NO: 188517 - protein, 83 aa, Zea mays
  Clone ID: MRT4577_103518C.1.pep
FVRLCVPPTEMYRRVRNFPIHPWGGVLCITAVLCFGSLKVWNLGPIIFLHFCNMLPILMDASVFGSHFLSWFRCNDRKNGVFI

SEQ ID NO: 188518 - protein, 97 aa, Zea mays
  Clone ID: MRT4577_103519C.1.pep
HQQVCSFISGPSLLGLIEINIMEREREREREREREREREMPIHSVIMPERHVRLVGRKMPRWMCARMNHRLSTRRPAGRAILSISIPSIANKLTCYC

SEQ ID NO: 188519 - protein, 47 aa, Zea mays
  Clone ID: MRT4577_10351C.1.pep
MAKAKNQAALGLGCSGIFCIAAEEAGYDAEDNGVYLNGRVHIVSLKL

SEQ ID NO: 188520 - protein, 108 aa, Zea mays
  Clone ID: MRT4577_103520C.1.pep
YRVIIKHVKIALGIYLQQVSVVSMNVLTTQLETYVHRIGNNSSLATNSVSIKFVHLNIQSMLFAIQQLSHVLSWEKPPVGTFPSVISINKCSSYKMRQCPVMLSKACV

SEQ ID NO: 188521 - protein, 81 aa, Zea mays
  unsure (1)..(81): unsure at all Xaa locations
  Clone ID: MRT4577_103521C.1.pep
MRAICQKQGAHAPQERNSPRAGAGASKPRNPDEILXXXYAEHPAGGFSGSFGGGAALACGGPCSGGTGTYQRMVCGRDHIY

SEQ ID NO: 188522 - protein, 97 aa, Zea mays
  Clone ID: MRT4577_103522C.1.pep
SGSLSVQFVREGEISEVEWCGPKPSQLDRVVKKVGEEREMGKQAAVVLAVNGKRYEAAGVDPSMTLLEYLRTETPVRGPKLGCGEGTCPPYVTMEWI

SEQ ID NO: 188523 - protein, 237 aa, Zea mays
  Clone ID: MRT4577_103523C.1.pep
LGTSRPAGQTFVIINCGALPALLSLLSSTKDGIRKEACWTISNITAGNSTQIQAVIDANIIPPLIHLLQNGDFKTRKEACWAISNATSGGLQKPAQIRYLVQSGCIKPLCDLLACPDNKIIQVALDGLENILKVGEMDKEAGEGGAGGEPINRYALFIEEVGGMEKIHECQNNANEEIYMKAYNIIEKYFSDDEGEAENMAEGGPQVNQEGHFGFGAAGQQQQQNFNFANGGDSMDM

SEQ ID NO: 188524 - protein, 156 aa, Zea mays
  Clone ID: MRT4577_103524C.1.pep
SRPPNRDCYAFVVGSRSSLTTSRTSSGVASTSRRRRTRAWARLWVFCARAILRRLARPQDGVRRVFLCPHFPRETRSNRNRIPEITVLRRGRFSRVCYGGGRRVWRPGPARQRVTQRAREVKAADKRDPHVGASFRCGLRGWEAGAGRNDGWAAAD

SEQ ID NO: 188525 - protein, 320 aa, Zea mays
  Clone ID: MRT4577_103525C.1.pep
MASSSVSSCLLLLLCLAAVASAQLSPTFYDSSCPNALSTIKSAVNAAVQKENRMGASLLRLHFHDCFVQGCDASVLLADNAATGFTGEQGAAPNAGSLRGFDVIANIKAQVEAVCKQTVSCADILAVAARDSVVALGGPSWTVPLGRRDSTTASLSLANSDLPPPFFNLGQLITAFGNKGFTATEMATLSGAHTIGQAQCKNFRDHIYNDTNINQGFASSLKANCPRPTGSGDGNLAPLDTTTPYSFDNAYYSNLLSQKGLLHSDQELFNGGSTDNTVRNFASNSAAFSSAFAAAMVKMGNLSPLTGSQGQIRLTCSTVN

SEQ ID NO: 188526 - protein, 488 aa, Zea mays
  unsure (1)..(488): unsure at all Xaa locations
  Clone ID: MRT4577_103526C.1.pep
MKLCTRDLVQKYLANRTYPXVKWLGMPKMKETKKKHELVRLAYRFKFEKQFKKPCKEWLDMTETMCNEILGNYTKKEDQLMTISFNTRPKRRLNRVMDALKFEYPNYEKLDGGAEGVKRKRIVSILSRQDARMLLSPLGLELTKLLLKKDEPSATKKKADGQKKRRIVTVMQAIERTPPLASTSKITPIASAEAVAEADTSTEAANLESTMSGIDKMLSDMTAEETAAATEKPGAMLFGGIDEGALGCIRDRAGANIIGTLSKSVGFPKLEADISGYRQQHIVGSLFYSNFKSMLMSKALRMQQDLEDKKNEIIIEGLENKIKDYEASLEKKDFLLQATEGSLVELQTKNARLNEELLQAQVTLKKNSEHFEQEKQELQAKCKVEADNNTRLQESLKELQNKCLEFGSRCVQRLKKVFNSVGASFEDITPSAEDISNTFDHIENEVDALDEVIAGHSDFCALLASRGTAAAFLKAGCTHAKTDGGAEG

SEQ ID NO: 188527 - protein, 105 aa, Zea mays
  unsure (1)..(105): unsure at all Xaa locations
  Clone ID: MRT4577_103527C.1.pep
ALRPRCLCLLAFSAXSRVGSRSPAGPFGGALXLVGSFGLSPLCXRPAXXLLVGVASCLLLCFLWLRPARXWFSFFRVPPGVLXLXPFXXLXVGXRCGPXRVRRPG

SEQ ID NO: 188528 - protein, 85 aa, Zea mays
  Clone ID: MRT4577_103528C.1.pep
YPLAFSPIVYVVPPQSKLGIEFMAENLHRMVLSSTGEVPIPLGIDGTCPASIPFSAAFNIAWLTFSSPDMAPFSKHPRPTWPFPT

SEQ ID NO: 188529 - protein, 88 aa, Zea mays
  Clone ID: MRT4577_103529C.1.pep
SDRRKDYFVHSEQPHRFSSHKLQKSRRDVEWLIPCSSSRENKTFLSISHSSKGVAGCLPWRSLKSRRRLIVPATIPSSKQAFVCAVSK

SEQ ID NO: 188530 - protein, 87 aa, Zea mays
  Clone ID: MRT4577_10352C.1.pep
AARFFLYPHADGVDYYLAGMIGPKLQSFDPCPASLSMLFSGVNLAALSGLEFRLCSRGLLYCFVQATLEPCDLLVSRGPLYFILFFV

SEQ ID NO: 188531 - protein, 80 aa, Zea mays
  unsure (1)..(80): unsure at all Xaa locations
  Clone ID: MRT4577_103530C.1.pep
GADDASEWLFSSVLLRFSAXXCSSXTRTISMQCAAPSATYNSGRTWVPPCAAPISPCRLPCRHQAPATATTPPLAASAAR

SEQ ID NO: 188532 - protein, 85 aa, Zea mays
  unsure (1)..(85): unsure at all Xaa locations
  Clone ID: MRT4577_103531C.1.pep
GHNQAPKTPNTGASSALPPTRNGQPISKAPPPQRPKQKGGKGGPQPPKKQRGRKEMTGMFXGXGGDRQFYALFLVDRPCDPVMLN

SEQ ID NO: 188533 - protein, 71 aa, Zea mays
  unsure (1)..(71): unsure at all Xaa locations
  Clone ID: MRT4577_103532C.1.pep
QHDHVPLPSQQKGGCMEXISDHIYPHLVTPSXPERLQXPPPPPSKGSSKGMDPTIEWXKSDFQKLKTDVYD

SEQ ID NO: 188534 - protein, 64 aa, Zea mays
  unsure (1)..(64): unsure at all Xaa locations
  Clone ID: MRT4577_103533C.1.pep
RNRPPGGGGXPXPGGPPQGPRAGRGTPRRSNPPGRGPGPGPEPXGGPGARAKKGAGKGGAPPPP

SEQ ID NO: 188535 - protein, 94 aa, Zea mays
  Clone ID: MRT4577_103534C.1.pep
LKLVRRQHSPQVTNFPRAEVAIRHEVQAKHNLRSSYLVSFMGPRPKVVSYFCTLQMEQKLMCCVQAFILLVMLIPLGMRECLLYLEGVKWTSPV

SEQ ID NO: 188536 - protein, 82 aa, Zea mays
  Clone ID: MRT4577_103535C.1.pep
HAPTPFIKAHRRRPPSPGVLHALRLTLCHRASVSVTRPWRPRSVGCSRASRAPSSSFPAAGPTLHEPAEDDDVVGKASCYSS

SEQ ID NO: 188537 - protein, 97 aa, Zea mays
  Clone ID: MRT4577_103536C.1.pep
MALLPRTARLAFLSTPRSYSAAAAAGASPTSPAPYGGAPPPAMSKTAEFVVSKVYDQMPEPRWVISMGSCANGGGYYHYSYSVVRGCDRIVPVDIYV

SEQ ID NO: 188538 - protein, 200 aa, Zea mays
  Clone ID: MRT4577_103537C.1.pep
MALLPRTARLAFLSTPRSYSAAAAAGASPTSPAPYGGAPPPAMSKTAEFVVSKVDDLMNWARKGSIWPMTFGLACCAVEMMHAGASRYDFDRFGVIFRPSPRQSDCMIVAGTLTNKMAPALRKVYDQMPEPRWVISMGSCANGGGYYHYSYSVVRGCDRIVPVDIYVPGCPPTAEALLYGVLQLQKKINRRKDFLHWWTK

SEQ ID NO: 188539 - protein, 120 aa, Zea mays
  unsure (1)..(120): unsure at all Xaa locations
  Clone ID: MRT4577_103538C.1.pep
QGSLAPSASIPQVIPPVTSGXLEHPAAQAYKLQLALACSAXLHLPIAQLQQQSLAHVTLHTIATHQQHQLYLPSLSHLTAVNPVTYXQQQVLASNPLALANVAAYQLQQQLQQFMPLLSQ

SEQ ID NO: 188540 - protein, 200 aa, Zea mays
  Clone ID: MRT4577_103539C.1.pep
MALLPRTARLALLSTPRAYSAAAAAGASPTSPAPYGGAPPPAMSKTAEFVVSKVDDLMNWARKGSIWPMTFGLACCAVEMMHAGASRYDFDRFGVIFRPSPRQSDCMIVAGTLTNKMAPALRKVYDQMPEPRWVISMGSCANGGGYYHYSYSVVRGCDRIVPVDIYVPGCPPTAEALLYGVLQLQKKINRRKDFLHWWTK

SEQ ID NO: 188541 - protein, 75 aa, Zea mays
  Clone ID: MRT4577_10353C.1.pep
PPGGALWFLIKPSFPLCNEKHHLFSAPGRAGDKQFLNRVKRLYFFHRERKRLNKKKSKRPKKTKQTTKKKKKKNK

SEQ ID NO: 188542 - protein, 99 aa, Zea mays
  Clone ID: MRT4577_103540C.1.pep
RTRGVTRGLGTVPRLGLVDLSRNRLTGAVPDTHSNLNQLRELVLSHNRLSGAIPPSLARCVDLQNFDLSHNALQGENPADLSALSGLLYMNLSGNQLEG

SEQ ID NO: 188543 - protein, 178 aa, Zea mays
  Clone ID: MRT4577_103541C.1.pep
MSYMRGDLLTKTRKLVKGLAKPAPAWLKAMEQAPPVTFPRTDGKIEKIELPEDVYVKRFFRRHPDSLYHDAIKISGFDPPPARVFAWRVLELKEQGVNEDDAMAVADMEYGAEKKAKKLAYKELKQIARREGKPPPPNPYPSAIKEIQAEEKKYVRDRFHNPKVLEIVNKMKEDRQMF

SEQ ID NO: 188544 - protein, 119 aa, Zea mays
  unsure (1)..(119): unsure at all Xaa locations
  Clone ID: MRT4577_103542C.1.pep
AAYAQQLPRLLATAAAAAAVAAAPLPALAEQMEKAELVDFNLTLPESRPTAGVMVALDKLYFTSIGMPRDERDANIRGELGHEKGPSAEXQQLEDQAAAIMKAARAEIVPVLNKTNNET

SEQ ID NO: 188545 - protein, 74 aa, Zea mays
  Clone ID: MRT4577_103543C.1.pep
YVATHHESSKSLASKPPELQGYGGADKRERTSTSKSTWSYDHELPEPEIKETAVPEPDSYADASAVVLRAICEG

SEQ ID NO: 188546 - protein, 74 aa, Zea mays
  Clone ID: MRT4577_103544C.1.pep
FDSRLHACRMWIPVAVPTVVVSGVATCSYCVRTHHQRLLWPIHTLDCLTKPPWGSSLGRQSSRNPGRASSRIPS

SEQ ID NO: 188547 - protein, 98 aa, Zea mays
  Clone ID: MRT4577_103545C.1.pep
AQRDVIMKEFRSGSSRVLIATDLLARGIDVQQVSLVINYDLPANRENCIHRIGRGGRFGRKGVAINFVTADDVRMMREIEQFYSTQIEEMPMNVADLI

SEQ ID NO: 188548 - protein, 118 aa, Zea mays
  Clone ID: MRT4577_103546C.1.pep
TRVRLALLIFIVLLSITFNMADSRPLVEVNKRGDDRVVGVNLPWIYTMDLLTGKKGTGLGINVLSGFVRVDVDTRNKSTDGRRPVRVSLLGSKIYDSFPAEEHPDEPEQPDASEPPKK

SEQ ID NO: 188549 - protein, 121 aa, Zea mays
  Clone ID: MRT4577_103547C.1.pep
VCSVLGVRRHFQGAGGPPGRRDPPPPPRKVPQVQQKRPHDVPHLPLIALHARFVSIGFHGSDPKMKRILFKPRSFPQLPFFLNPVRRTWVQPNLAGPLLKEMGIWKCKLDPPYACCPNVWL

SEQ ID NO: 188550 - protein, 89 aa, Zea mays
  Clone ID: MRT4577_103548C.1.pep
WCHLPIRAHIMEYKIGKQAITMWPHREKQLSRKQSYRIIHIARKFRPRQKKKSAKHAVFFQLFDLHFSKSTSRTSASSTNILYTSKLAA

SEQ ID NO: 188551 - protein, 46 aa, Zea mays
  Clone ID: MRT4577_103549C.1.pep
LIARRRRLRRQLDEGKRSLQTSTLRRWRRDESLRTNPMQQRPSSRG

SEQ ID NO: 188552 - protein, 36 aa, Zea mays
  Clone ID: MRT4577_10354C.1.pep
ISIIMWNRALPLKLVNGPMRHPFIQANQLHSLTQKW

SEQ ID NO: 188553 - protein, 575 aa, Zea mays
  unsure (1)..(575): unsure at all Xaa locations
  Clone ID: MRT4577_103550C.1.pep
GRVDGGESRRKGAGLAEXLAWEEMERKVGFWWSPDSKHLAFTEVPCREIPPCCFRHEGRSTARPDAQEDTAYPFAGAATVKVRLGVVHSHGGEVAWMDLLCGDPNGPHSDEEYLARVNWMHNSALAVQVLNRSHTKLKLLKFDISTGEREVLLEEQHDVWITLHDCFTPLDKGVNNKHPGGFIWASEKTGFRHLYVHGNDGACLGPLTQGDWMVEHIAGINESNGLIYFTGTLDGPLETNLYHTNLFPXGAFPCKPLKGLTRGTGRHSVILDHQLLKFIDVYDTAKSPPVILLCSLLDGSVIIPLFEQPLTIPPLKKFQQLSPEIVEITAKDGTNLYGALYLPDERKYGPPPYKTLVNVYGGPSVQLVSDSWMCTVDMRAQYLRSKGILVWKMDNRGSARRGLHFEGQLKYNIGRVDAEDQLEGAEWLIKKGLAKPGHIGIYGWSYGGFLSAMCLARFPDTFCCAVSGAPVTAWDGYDTFYTEKYLGLPAEHPDAYEYGSIMYHAKNLKGKLLLIHGMIDENVHFRHTARLINSLMAEGKPYEILLFPDERHMPRRLGDRIYMEERIFGFFERSL

SEQ ID NO: 188554 - protein, 187 aa, Zea mays
  Clone ID: MRT4577_103551C.1.pep
MMLDREPAVGRAAEARLRAAEAELERARRRGADLEERLRQLAGEGQAWLGVARSHEAVAAGLRATLDKVLQQPAVAAAGGGECGVAEDAQSCCFVASPSGLVAGDAVSTGSSPSCKACGVVLLIIIACGSDGREVGLLERSHGGRCTHLRNEIRSRLIPWRLREPVSSLGRRERVRTGEMGERRWME

SEQ ID NO: 188555 - protein, 54 aa, Zea mays
  Clone ID: MRT4577_103552C.1.pep
TNCSRSFLQCLRAGGLAGPTAPRPRILRRHLETVPTQRRSPESFWGPLRAITQP

SEQ ID NO: 188556 - protein, 52 aa, Zea mays
  Clone ID: MRT4577_103553C.1.pep
KLRKIGSKNILNHHCRAQNKRRAAPTPLDDDYKLDDDFEANQSTKKRVHPTS

SEQ ID NO: 188557 - protein, 46 aa, Zea mays
  Clone ID: MRT4577_103554C.1.pep
DPHHMHAYLHTIVMFIVQMFFHSLLYIIDHIIVLHILFLELLLVFL

SEQ ID NO: 188558 - protein, 87 aa, Zea mays
  Clone ID: MRT4577_103555C.1.pep
SGSKGGKPHGQCHGKPREKRRPFTGWTGHNEGGAIGEGPLRMRPRAKRGVVLKGIKLGKTRVFPNTVFVKQRPGNCSPIHLKASRAN

SEQ ID NO: 188559 - protein, 65 aa, Zea mays
  unsure (1)..(65): unsure at all Xaa locations
  Clone ID: MRT4577_103556C.1.pep
VHSAWWQDAIYQIVGDANAKNMKFTETVELHIVLKNYDSHNDKRFNXSVKVPHIPSPKMNVFILG

SEQ ID NO: 188560 - protein, 157 aa, Zea mays
  Clone ID: MRT4577_103557C.1.pep
FLLGSAMELATTPAVLPTCARPSTRACHRLALALACLLVVTAARSLFVHRVSRVLAFALSRRTHHPLLDCQANPLIRVLLAVNSRLTSSFSLVHISTDSVSSRVCVIELVVDFISRRLILDLDEKVRQVRLASARGSTKCLNWTTVIVLAVIESIRF

SEQ ID NO: 188561 - protein, 469 aa, Zea mays
  unsure (1)..(469): unsure at all Xaa locations
  Clone ID: MRT4577_103558C.1.pep
MAGVYSVAIDVDNHKVSVTGDVDSETLIRKLTRGGKHAELWSQPKGGGNQGHKGNNGQQQKQQQPQNQNQNHQQKQKQGANLSKDGHSKSSNNNGGQKKDQGKQGGGGGXWGALVQGPKAFKNQHGGNKQHHQLPELLSSEDDDGMFEDDVDGEFDDDYEEELRFXLGDKMSQLGLXTATATATTSTTIXNKNGNNVVAVNSNHSNGNGKKGNGGGGANNHHQNNNHHHHQNQKNVNVINMAAANANKMGGGGGGGVQNHQKNAAAINMAAAAAAAANAKMGNGAQRNAGAMGGIGMLGLSHGLGAGGAAAPAPPPPPPPGFQGYAGFNHPPYAAAAGYGGGLQQQHLQQQQHLQHHQQQQSNSLMASMQGYHHHQYPAATAAVVNNLRGLNGNMVMMHQHQPQPQPQAQMMYHSSPQISSPYTGYYNPYNYYYHHHPHPGSAGYPATASNGDVESMFSDENTKGCVVM

SEQ ID NO: 188562 - protein, 129 aa, Zea mays
  Clone ID: MRT4577_103559C.1.pep
PPRFPRWKTGRWPPPHKVGEPPPGGPPGLPFLRSAPLLGGLVWGFQFPPGNPVWPCFRPTWFPGGVPLSRPPRGWDLPLLPAPRAGVPGFWSFKGAPPTGLKTPTPWIGGKPGFLKSPQLFVPPTPVGL

SEQ ID NO: 188563 - protein, 78 aa, Zea mays
  Clone ID: MRT4577_10355C.1.pep
YHCTRSHLGSTIVQFRGIRCMLSIVNMHVLGSEIDVYEYKKKKKGKNYDKYVTFILKEIMTYLINHVTFTCINKRGQE

SEQ ID NO: 188564 - protein, 68 aa, Zea mays
  unsure (1)..(68): unsure at all Xaa locations
  Clone ID: MRT4577_103560C.1.pep
GPTPHTPSLTSHTPQTPGSTSRGGAEGATFRGDQLLRPAGNGNGRWQGDFXRLEIELAEVEMPVLMTT

SEQ ID NO: 188565 - protein, 82 aa, Zea mays
  Clone ID: MRT4577_103561C.1.pep
PGFHLFPTYFLNLSSITDTPARTSSRGKLSTHKHHRSPVRLRTPTVLTACLPTTSISVTIQHIPMTCHASLMLPAIADVMLC

SEQ ID NO: 188566 - protein, 104 aa, Zea mays
  Clone ID: MRT4577_103562C.1.pep
LSPLRRRQVSNPLPVPTNGSPAPPPPIRVRRPSMANPRRAIALHIQTQPPPLPSTAAALPPHTLASSLLHFLKRPASFPFLLSLFVLLTWLSLRFHHPSPPPSL

SEQ ID NO: 188567 - protein, 44 aa, Zea mays
  Clone ID: MRT4577_103563C.1.pep
PLAGRKMTAQMSATAGWSSFTESLRWPPASSLRTLLSTNLANSG

SEQ ID NO: 188568 - protein, 79 aa, Zea mays
  Clone ID: MRT4577_103564C.1.pep
GSKYHMQNLFWVALYCTKCVHNGPRIKQSTCLLLELNCYYGTPLLQYLFGIHNVFEGVQMCNRSSHPYSEQVGVVQELH

SEQ ID NO: 188569 - protein, 147 aa, Zea mays
  Clone ID: MRT4577_103565C.1.pep
VRIPRGYQRPRVRVRQSGERPRGPGMSAPTDPQRVNSPAEHRQVWRPYHSLASASTASRHATAGVALADAGRHQSQQRCRPPPTDGAVTEGTRARRAYGVRQPRRPAVTGAPVGLGDPRHAPKQWARAAHPAPIQARRANRTLVDPG

SEQ ID NO: 188570 - protein, 186 aa, Zea mays
  unsure (1)..(186): unsure at all Xaa locations
  Clone ID: MRT4577_103566C.1.pep
FPSCPFFPRVGXCPSFPAPVVPLGVGGAGRSVLPGRWFLWGLRALGWLSPGXLRGXSRRGXRPXWSLLXXALRXARXXGRSLSGSLXVWPRGXAPFXPXSXXLXPLXLXALPASLXXXXFVXXXSVGSGSPPPPXALCVXXXXXVCLXXCGXCLXFSLRALFSXCXVVVXRXLPPLFFLCVPPPPP

SEQ ID NO: 188571 - protein, 69 aa, Zea mays
  Clone ID: MRT4577_103567C.1.pep
VHLKTSQVLWFSLYLKLKERRQTALYEKGYRCTGWKVNSFSRKRLLCWQIATSFMSLKDIVQCPNAENN

SEQ ID NO: 188572 - protein, 60 aa, Zea mays
  Clone ID: MRT4577_103568C.1.pep
GLKKPRTILPWAGILALNICTFLGWSGHVGQSQTPCLFASPTLARYCVTVCAIELSSIDT

SEQ ID NO: 188573 - protein, 241 aa, Zea mays
  Clone ID: MRT4577_103569C.1.pep
PSAVSELGPEDSGRNIVEIIFKSSWQKRDRPICHIDRILKVHNAPRTVARFETYRDAVRSRCRAVVAARAAADGNELLRFHSAPLACALGLGGATALCCAAADADAPAPPCGVCTAIRHGFAPWLGAHPLGVRTTASSARAHDCGCSASPSSVQQTQQPANDAAACRAMLVCRVIAGRVRRGGGGGATSNAADEDQEGPFDSVAVEDAVSSSMYGNLEELFVANPRAILPCFVVIYRVLDS

SEQ ID NO: 188574 - protein, 68 aa, Zea mays
  Clone ID: MRT4577_10356C.1.pep
PPPPPPSPLAKTLPTLFSPSLSFHIHSNGGPTRPSKLLNIASTIFMSHFQERTSTCTREPFRGGVTHH

SEQ ID NO: 188575 - protein, 65 aa, Zea mays
  Clone ID: MRT4577_103570C.1.pep
GRPWAKGPAAPGGGFSLGYLFGGNLFPSPSYPPPLSPQAFFESGTPVVISWGPKPPVPRGPVNCA

SEQ ID NO: 188576 - protein, 63 aa, Zea mays
  Clone ID: MRT4577_103571C.1.pep
RSHLCYSKTYNLHAYLVSPRDVVLPPFPPLCAFHTVTYPHVLPISIYIPTIHTYDFPPTSSGA

SEQ ID NO: 188577 - protein, 56 aa, Zea mays
  Clone ID: MRT4577_103572C.1.pep
QCMDELKEIKKAYNLIETLHLETTMIDKEVGCILCIGVFLSPSSHVKQVHLLTKNG

SEQ ID NO: 188578 - protein, 156 aa, Zea mays
  unsure (1)..(156): unsure at all Xaa locations
  Clone ID: MRT4577_103573C.1.pep
ALPSTLRPENRRSNALPSFSDAFALASGRVPLXLAWLYVVGRLWRDVQXRTIVSGLLEKSSSNIXKVLLMEDKLRNLGCKVIGKKTIEVEMDLTKAKSERYLWGNNTAAMNSDKKQXVYTGFGSSLKRNVCFSKLMVGHPKDPLSIFINVNILKTG

SEQ ID NO: 188579 - protein, 122 aa, Zea mays
  unsure (1)..(122): unsure at all Xaa locations
  Clone ID: MRT4577_103574C.1.pep
MAANVGESAAVGGSSSDAAGGSFECNICFELPQEPIVTLCGHLFCWPCLYRWLHMHANTPECPVCKAIVEEDKLVPXYGRGKDRVDPRSKNTPGVDIPQRPAGQRPATAQQADPNNNFGNAH

SEQ ID NO: 188580 - protein, 156 aa, Zea mays; identical to SEQ ID NO: 188578
  unsure (1)..(156): unsure at all Xaa locations
  Clone ID: MRT4577_103575C.1.pep

SEQ ID NO: 188581 - protein, 116 aa, Zea mays
  unsure (1)..(116): unsure at all Xaa locations
  Clone ID: MRT4577_103576C.1.pep
CPTLASGRVPLPARLVLRGRLWWDAIVSSLLEKSSSSXKSIQKVLLVEDKLRDLGCKVIGKKIVKVEMDLTKAKSEGYLWGTXAAVNSDKKQQPFVVIGVYTGFGSRLKETSVSVS

SEQ ID NO: 188582 - protein, 56 aa, Zea mays
  Clone ID: MRT4577_103577C.1.pep
MVSRSPGFSGFIRGGRISTPFEHCSPLLGFVSFPVPSQVWGAWALTQSKVSCSDFN

SEQ ID NO: 188583 - protein, 144 aa, Zea mays
  Clone ID: MRT4577_103578C.1.pep
MSEPNKLVPQGQEEYDSNWDEVIDKFDDMNLREELLRGIYAYGFEKPSLIQQRAIVPLARRYDIIAQAQSGTGKTATFTIGILQQIDVTLLECQALILSPTRELAQQINKVVGHIGEYMNIRCHACVGGTRVADDRTELQRGVY

SEQ ID NO: 188584 - protein, 147 aa, Zea mays
  Clone ID: MRT4577_103579C.1.pep
MGVVYYQYKSEKEICSMPVPHAFISVSELKQLIVTSGRHGRGRTRGRATEDIVISNAQTGEEYADERASIPQNTTVLVRRIFIPGQLSEKIVLSPRRKVTEECSVPCKSVVTDSSSKSCSSTVVQDEDAAIAAVIDAAELHWSPSLV

SEQ ID NO: 188585 - protein, 220 aa, Zea mays
  Clone ID: MRT4577_10357C.1.pep
MAEGETLVEAKRRRTGPPEAHELEECLDSLRDKIATARIVAGSRFGEEQRQSLLREWLRLASAKLDLDLSGMSELDRSTEALPWLMPPEEADKRTTHTILAKEELGAAADEFLLCLTMRQRALTREYSRLTNLKRPSDLSGMTEADRAAEAERLREERLQKARQLQDQGDMSGARECEGLARIIDFDVKQGGRYLNCICYVDDIYTFDQTEECKFLRQSQ

SEQ ID NO: 188586 - protein, 98 aa, Zea mays
  unsure (1)..(98): unsure at all Xaa locations
  Clone ID: MRT4577_103580C.1.pep
YRARDRIDYSMIIYPDDKGMITPGVSVLIXPTMRNTGIGLTFIAGAKGYKFTLTMTASMIMKSRIILKAFAPELDLTDPLLPKKGTAKKALELREITP

SEQ ID NO: 188587 - protein, 110 aa, Zea mays
  Clone ID: MRT4577_103581C.1.pep
WLRTFGLIYVHGLATSAHIDPLPVDVKRHVRDAHALTSVWLLNSARCAFCLFGSYLHYWYWCYSCVAFPCCCDPYLVLRSCRLSHSSDWYSYWSPVGRYSLLGDYLGNFA

SEQ ID NO: 188588 - protein, 60 aa, Zea mays
  Clone ID: MRT4577_103582C.1.pep
QPIMCRPQSRHEPGVLPLTMLSIHRLLRSAAERSVAQLTEMTLRPWKCHARRLQRVQQRQ

SEQ ID NO: 188589 - protein, 107 aa, Zea mays
  Clone ID: MRT4577_103583C.1.pep
TCPGTSSQHLTVREASLIADSPQLRGRPPAPAAAGDTNRVVGVGVAGVAEPAGGGALALSPKKSVAEHRRRDLGAGAHTSARCYALLLSPKPEVVADNCLSIATPPP

SEQ ID NO: 188590 - protein, 215 aa, Zea mays
  unsure (1)..(215): unsure at all Xaa locations
  Clone ID: MRT4577_103584C.1.pep
GRVGGRVGGAMPEPRFSARAPWRTPCFQPRRKAERPCRPSPRAXCRFPCVPPCPSLKTCTLGSVSFHTLGLSLFSSSCPSLRFRPVRHGEPLVFSPDARPNGPTARRRVPPCRFPFVPPCPSPKTYTLASVSFHTLGLSLFPRPWPNRCFRPARHGERLVFSPNARPNSPAARRRAPPCPSLRSSRASVLFSLRSSVPFTKDIHIMFGVFPHAWT

SEQ ID NO: 188591 - protein, 247 aa, Zea mays
  unsure (1)..(247): unsure at all Xaa locations
  Clone ID: MRT4577_103585C.1.pep
MVLVVKQHRCTHSASCVCIKGHLSEDALFLVFRHMNWNPRLIAILSCVCKWFDEVAKQVLWKEFCHARAPKMMLDLHSGGSHIVDGNWKALGKLLIYCNGCTKGGLFNNIHVPGHFVFRTRFSRTAGRSFLPLPCKSDVLYVSDPCEHLDQGEEGDIGFFRGIFMSFATSRVKKMLIEKRARFHPRELCPYCKAKLWNMCSXNMIPRSASARLGAYDDXCVXYSGCLNGFGRVLGTLREMVLNLGCD

SEQ ID NO: 188592 - protein, 159 aa, Zea mays
  unsure (1)..(159): unsure at all Xaa locations
  Clone ID: MRT4577_103586C.1.pep
MVLVVKMHRCTHSASCVCIKGHLSEDALFLVFRHMNWNPRLIAILSCVCKWFDEVAKQVLWKEFCHARAPKMVLDLHSGGSHIVDGNWKALXKLLIYCNGCTKGGLFNNIHVPGHFXVFRTRFSRTAGRSFLPLPCKSDVLYVSDPCEHLXDQGEESDI

SEQ ID NO: 188593 - protein, 248 aa, Zea mays
  Clone ID: MRT4577_103587C.1.pep
MVLVVKQHRCTHSVSCVCIKGHLSEDALFLVFRHMNWNPRLIAILSCVCKWFDEVAKQVLWKEFCHARASKMMLDLHSGGSHIVDGNWKALGKLLIYCNGCTKGGLFNNIHVPGHFVFRTRFSRTAGRSFLPLPCKSDVLYVSDPCEHLDQGEEGDIGFFRGIFMSFATSRVKKMLIEKRARFHPRELCPYCKAKLWNMFQENMIPRSASARLGAYDDSVEYFVCLNGHVIGLGTLLPLSDSEEAADE

SEQ ID NO: 188594 - protein, 124 aa, Zea mays
  unsure (1)..(124): unsure at all Xaa locations
  Clone ID: MRT4577_103588C.1.pep
MGDREEDEELQMALRMSLQGSPPAQPEPKRSKPPPPAAESPEAEARRKQRELMAAAAEKRRRGAASPASVSVARSPLQPVVVEPAPAPEVTXRAGGGVSKAVLAQWSNQGIRFSSDPETTMGLV

SEQ ID NO: 188595 - protein, 235 aa, Zea mays
  Clone ID: MRT4577_103589C.1.pep
MGDREEDEELQMALRMSLQGSPPAQPEPKRSKPPPPAAESPEAEARRKQRELMAAAAEKRRRGAASPASVSVARSPLQPVVVEPAPAPEVTKEQVEEPEQAGVSMEEAKEVVEEEEEEKREELPPDVAENLWAMVFGRGVSKAVLAQWSNQGIRFSSDPETTMGLVQHEGGPCGVLATVQAYVLKYLLFFSDDLSNPEISNPLYTLGQRRFYQSSFAAGDDFSSLTNALVFPTAT

SEQ ID NO: 188596 - protein, 84 aa, Zea mays
  Clone ID: MRT4577_10358C.1.pep
ILQSIPVLHYIFTPRKRGAELSSLPCDGGIYEISSTSCVSLLSSPARCSALDQRRRALSPVRGIPSTEECAWHIIDEGVLIIQC

SEQ ID NO: 188597 - protein, 84 aa, Zea mays
  unsure (1)..(84): unsure at all Xaa locations
  Clone ID: MRT4577_103590C.1.pep
RCTGLPPEDTCLPSSCWSPRGPRWIRGTPWASHPCITPLGKATWRLPAACWTGVPRWMLPAGSARPPYTWLQSEGLXGVPWGFC

SEQ ID NO: 188598 - protein, 72 aa, Zea mays
  Clone ID: MRT4577_103591C.1.pep
RPGPVPFSNITRANYLDISILQLLISKRSIRQTFTASIPTSNQNQTNFYPQVPHYISLPLDLILPHLLYLLT

SEQ ID NO: 188599 - protein, 45 aa, Zea mays
  Clone ID: MRT4577_103592C.1.pep
AILFATVMFTLFQMVYLASCRGWCCPSEALIAKSLLCQLLKKKKI

SEQ ID NO: 188600 - protein, 63 aa, Zea mays
  Clone ID: MRT4577_103593C.1.pep
RGQSKKRVHTNKMASLYCQFKLTYSYLQLLRSHLVYPKLNSLAAFLQLSDWENSGVTKLNRFE

SEQ ID NO: 188601 - protein, 94 aa, Zea mays
  unsure (1)..(94): unsure at all Xaa locations
  Clone ID: MRT4577_103594C.1.pep
LLDEVGEPLSAHYQNNLKXLMNELAGGSCEGNDAILDALAXWVRCCHVTITEXDSNSPRAILNIVCAACTRKSKLYLXNMFLVLXKVITAFRDP

SEQ ID NO: 188602 - protein, 47 aa, Zea mays
  Clone ID: MRT4577_103595C.1.pep
FVHAFGHAFGGFFVWAHPGFRRVMLSIYRIGVPFRFVTVLVAVLPLD

SEQ ID NO: 188603 - protein, 83 aa, Zea mays
  Clone ID: MRT4577_103596C.1.pep
SSWPSSSALMLPFCSFDGVFKGKLTTITSTGSSPYLSAGSTSTPSFLKDYQFSAKQKFPEMLFFRRNSKQTTKSKAVRRLVSS

SEQ ID NO: 188604 - protein, 114 aa, Zea mays
  unsure (1)..(114): unsure at all Xaa locations
  Clone ID: MRT4577_103597C.1.pep
ESTXAAIFLHRGPADHVPLPDLDMPYRRHRRGRKMAVALGPEWDPRARHGRKPRAAAVLHPGISYAAIPACSAPDSVISLPTDPDRPLADLQLPAGSNEPRLSLGLLEGGRXDA

SEQ ID NO: 188605 - protein, 227 aa, Zea mays
  Clone ID: MRT4577_103598C.1.pep
DVACRSGHVQRRWRCPSWRVVEYGGARDDVLDDGAGWVTTWSSALAASYDLAAEGTKAKSAAASSESPGNNSSVTFQEPAGVTDPPGVGTAVVQVQQPLATGYADWTHPYMSRGATTLHGFLQDGHQQDMSSATEQSSMTASSLMNPSSNNLALALQGHHHHHQEHEHQQQMLSSFGSELLLSPTTSPYGFQSSLLRSLMEPAAATKHAFAGYQQQQYDQYQQQMGM

SEQ ID NO: 188606 - protein, 241 aa, Zea mays
  Clone ID: MRT4577_103599C.1.pep
EIEKDKGYKELYGALESIILTLDNTLYNKYGIDYTEDVVNSEGLTDDGQLDVLQMTINNRSYGRFRVVFQYTFACAGFFLGLANLLSIISRTKRWTWSATTYHLAIFLLALGISLVAAVSQNDEYLMNYQFTPWILPTLLFAYILILATNHVSGWLAASRDKKETRKADMEARDRSGDSITFGSNGQPNTTLGTDKTPMYSYVPEDDQRTSHPDTPAEGVLSVPRRPVPYSSANYASDNAV

SEQ ID NO: 188607 - protein, 138 aa, Zea mays
  unsure (1)..(138): unsure at all Xaa locations
  Clone ID: MRT4577_10359C.1.pep
YVQNDLWVKXRQGHCKQFSKGIVRIPGTANQVFDKCEPETVSLATRLSTVDVTYDVVECAVEATVAAEVTQGEFFGAMTAHTTRSKRRIVLFDSQVGGDKCHGIEVTPRWNGGHEFVLTLGDATICVKVTWSMVDPRL

SEQ ID NO: 188608 - protein, 368 aa, Zea mays
  Clone ID: MRT4577_1035C.1.pep
MVMGASGSKLEKALGDQFPEGERYFGLENFGNTCYCNSVLQALYFCIPFREQLLEYYANNKTPGDVEENLLTCLADLFMQISQAKKKTGVIAPKRFVQRVKKQNELFRSYMHQDAHEFLNFLLNELVDILEKESSAAKDSPQSSSPEKAPNGPVQPLANGVKKEPPVTLVHKNFQGILTNETRCLRCETVTARDETFLDLSVDIEQNSSITSCLKNFCSTETLNAEDKFFCDKCCSLQEAQKRMKIKKAPHILVIHLKRFKYIEQLGRYKKLSYRVVFPMELKLSNTSDDVDTEYSLFAVVVHVGSGPNHGHYVSLVKSHNHWLFFDDENVEMVEEQTLQTFFGSSHEYSGNTDHGYILFYEGLGGKS

SEQ ID NO: 188609 - protein, 101 aa, Zea mays
  Clone ID: MRT4577_103600C.1.pep
GEHAGEARGALSPRKDHLARLVEEREVRGVDLSIPPPPGQLAEQGPSGGEGSQSAHSRKGYTYQIMAPRETHALTRRPCRYYKTGIAGPYSRIFWRHKVPT

SEQ ID NO: 188610 - protein, 53 aa, Zea mays
  Clone ID: MRT4577_103601C.1.pep
LVLHTQSTNPSHQPSSHAQPIPTRSTSTPHLTPTSPHPMSLPTPLQSPLTSPI

SEQ ID NO: 188611 - protein, 85 aa, Zea mays
  Clone ID: MRT4577_103602C.1.pep
CMGVLKPRMNTGLTTEQRGTLQSKTQMGNIPLHKRGLAVWTRVHIPVGNRITWPCGPHPSPPPVQEKNCQILGTKITPLYNTTTT

SEQ ID NO: 188612 - protein, 63 aa, Zea mays
  Clone ID: MRT4577_103603C.1.pep
AKGGIWVKPVVVIVSSVLFLITPISRGLASYYFLHSKQPITFATTTTSLAVVYLQPYNFSKST

SEQ ID NO: 188613 - protein, 147 aa, Zea mays
  unsure (1)..(147): unsure at all Xaa locations
  Clone ID: MRT4577_103604C.1.pep
QSFEDALEYAFGQICRYPEEGXYSQCVITGTCVYLXSILKYLAAYVMELAGNAARDNMKTLIIPRHVLVTIRIDYELGXLLASVTIFHRGVLGNIQCVLMSKNAAEKAVSAVSKEPKCPKKGAISNKKAYKVGTVFALCAVACSRLD

SEQ ID NO: 188614 - protein, 108 aa, Zea mays
  unsure (1)..(108): unsure at all Xaa locations
  Clone ID: MRT4577_103605C.1.pep
KNSDLKSFFGVDWIRIHNTKFELEAMRCARAXWNHVIAYLNAEGLCAAGDTDSRTTIMEKIKHVNPSFVEAYRVQTACAWPXDDQLRDDVRISISLQAIQAYRTFAGR

SEQ ID NO: 188615 - protein, 128 aa, Zea mays
  unsure (1)..(128): unsure at all Xaa locations
  Clone ID: MRT4577_103606C.1.pep
QRIAELDPXMRLYAGGSSFEPLGMSSDRDKKQCFHLTEIKHEHFTMFAFHGFSVQTAASDKXPVKEWSTHLSEPLSSAIFATLWRVLLNPSLVRPVHRPDRVLGLITFDSLCRLRMASALRAWYSFCV

SEQ ID NO: 188616 - protein, 136 aa, Zea mays
  Clone ID: MRT4577_103607C.1.pep
TIQMTDRNHSQSVTSIPFVEGCFTSVNLPLISNSRTPEWPSCKTSALLYCTVIRLQYQQKNIYIQSSGGWRGRKNFTGTALSSLYLPPQVPLTAAASCSEACACTVQNLEGSLELRSRISLNLEQVPLCPARPALS

SEQ ID NO: 188617 - protein, 90 aa, Zea mays
  Clone ID: MRT4577_103608C.1.pep
RLSNTSKILCVQMWPYLVAGTTDQINNLYNHRTIIIPQATANRIYIQDKISEYASCYQRISCTKNPQKRKREEKKTYHLNRQHSPPTTLT

SEQ ID NO: 188618 - protein, 49 aa, Zea mays
  Clone ID: MRT4577_103609C.1.pep
NLLLLNCSAYLMWLRAFGDRAILCLHVSLYYDPIGHLYKSYGHCLIFYT

SEQ ID NO: 188619 - protein, 62 aa, Zea mays
  Clone ID: MRT4577_10360C.1.pep
GYKDDTPGHHSRIIQEQERCLHVTSTHVKHVNCISVSEKVYPRQPPCYKGTKWSAVRKRSDT

SEQ ID NO: 188620 - protein, 63 aa, Zea mays
  Clone ID: MRT4577_103610C.1.pep
NTIHRGSAKSNRSKTNSERVLTSSMYKPNNSHYTQHIARLYMRPDELLLILLGSYYLIEHNSG

SEQ ID NO: 188621 - protein, 108 aa, Zea mays
  Clone ID: MRT4577_103611C.1.pep
MSRLFLACLLAIFPVVSMKSPIFGPEEVSSVEGRSVSIKCYYPPTSVNRHTRKYWCRQGAQGRCTTLISSEGYVSDDYVGRANLTNFPESGTFVVDISRLTHKDSGHY

SEQ ID NO: 188622 - protein, 909 aa, Zea mays
  unsure (1)..(909): unsure at all Xaa locations
  Clone ID: MRT4577_103612C.1.pep
ASVPPLPPRAAWVFCDDCQKWRCIPAELADVIGETNCRWTCKDNGDKTFADCSIPQEKSNAEINAELDLSDASADEADNGGSNSKACKPPSWTLVRSNLFLHRNRRTQSIDESMVCNCKPPQDGRMGCRDGCLNRMLNIECVKRTCPCGEQCSNQKFQRRSYAKLRWFHSGKKGYGLQLQEDVTEGRFLIEYVGEVLDITSYESRQRYYACKGQKHFYFMALNGGEVIDACTKGNLGRFINHSCSPNCCTEKWMVNGEVCIGIFALRSIKKGEELTFDYNYVRVSGAAPQKCFCGTAKCRGYLGGDISIVDTIITQDDTEADHFEQMVVDKDSKELLGPNESDSDGSHPNISEPEFSIQGEDLHDCSAAKVELDLLEGTRGTSLETSEPEHPLEAWSPPEDEDVIRTPVHVSRTFESSLQKFSVHDTQSSDLLRKTANSMEGSKAPNITNGSTLGSDFRGNLVPTFRPXREKNLKQHKNQKRQPSSPIDNEHILGVEGTLNSLLDVDGGISKRKDATKGYLKLLVVTAAEDGSAGGTSKSLRDLSLILEALLKTKSHSVLLDIINKNGLQMLHNILKQSRGIFHRRPIIRKLLKVLEFLAQKGILTSEHINGGPRFAGVESFRDLMLSLTRHSDIQVQQIARSFRDRWIPPNNARSEPTEYPHTSTFVXISREPIQSGVXRRKRKSRWDYQPDEHYKMPGLKIQKVCSGHGEFDVQFGFMKNKLKRNQGANNYHNDVLGMGSSTEGEDDEAPPPGFESQLDRRPAQLSIGSEVAPGLCMERYQSSLSISYGVPVTLVQHFGTPESEGGQCHKKWKVAPGVPFSPFPPLPPYPRGNPCPSTSSSQMFQHDGTPQVKHNNSGQRGRIMGRDGRVHRSWRNESRTKWQYHHQGRRFSSTHHRFERSEPARPQ

SEQ ID NO: 188623 - protein, 54 aa, Zea mays
  Clone ID: MRT4577_103613C.1.pep
QCLHECQGSCHRAIVRTGQIALAKYARIACTKSCLFLCKLIKKDALCTRQATAR

SEQ ID NO: 188624 - protein, 91 aa, Zea mays
  Clone ID: MRT4577_103614C.1.pep
RVDRVTQLVACERSGLDLGGIMEAYFLGDSVEGVRVLVRGVGGRHWLALGFRTVILVHEQGVRGLLRHSSTTTTATTASAPARTASRTSYS

SEQ ID NO: 188625 - protein, 247 aa, Zea mays
  Clone ID: MRT4577_103615C.1.pep
MPPPPLLEPRDYLGAGATSSCCSSSCSSGREGAGPHLALRLGLPGSDDSPGRGADTEHARAHVDAALTLGPGPGPAPPRGSAKRGFADSLDRSAKLDGVAADDAAGGVTRVAGAAAGAPPAAKAQVVGWPPVRSYRKNTLAASATKTNGGDEGRSEAGCCYVKVSMDGAPYLRKVDLKTYSSYEDLSLGLEKMFSCFITGQNSSCKTSRRDRLTDGSRVDALQDQEYVLTYEDKDADWMLVGDLPWE

SEQ ID NO: 188626 - protein, 359 aa, Zea mays
  Clone ID: MRT4577_103616C.1.pep
MVCPLLILLSATSTTPPPARTENSPRPSPLVLLLPHRVSSTPGTRPLSVCPLPSSPPMPPPPPLLEPRDYLGAGATSSCCSSSCSSGREGAGPHLALRLGLPGSDDSPGRSADAEHAGAHVDAALTLGPGPAPAPPRGSAKRGFADSLDRSAKRDGVAADDAAGGVTRVAGAAAGAPPAAKDLFMIAFSAMDRAQVVGWPPVRSYRKNTLAASATKTNGGDEGRSEAGCCYVKVSMDGAPYLRKVDLKTYSSYEDLSLALEKMFTCFITGQSGSCKTSRRERLTDGSRADALQDQEYVLTYEDKDADWMLVGDLPWDLFTTICGKLRIMRGSDAAGMAPRSPEQIVGTRIRNVARHAES

SEQ ID NO: 188627 - protein, 95 aa, Zea mays
  unsure (1)..(95): unsure at all Xaa locations
  Clone ID: MRT4577_103617C.1.pep
HASDGVVGLELAGGRAPAGVGFVACGLDLHSAAGAGGRWRVHPWQVGGSCMCCGTGLSSLPPLPYLNGLATGNGGHHRAAVRSEGSGXSMGGVWP

SEQ ID NO: 188628 - protein, 191 aa, Zea mays
  unsure (1)..(191): unsure at all Xaa locations
  Clone ID: MRT4577_103618C.1.pep
MPPPPPLLEPRDYLGAGATSSCCSSSCSSGREGAGPHLALRLGLPGSDDSPGRGADAEHARAHVDAALTLGPAPAPAPPRGSAKRGFADSLDRSAKLDGVAADDAAGGVTRVAGAAAGAPPAANAMDRAQVVGWPPVRSYRKNTLAASATKTNGGDEGTSEAGCCYVKXSMDGAPYLRKVDLQTYSSYEDL

SEQ ID NO: 188629 - protein, 131 aa, Zea mays
  unsure (1)..(131): unsure at all Xaa locations
  Clone ID: MRT4577_103619C.1.pep
KPGRPRXRXTPXAPNQXNSILKNRTPKGNGLKAAWDRLALILIASSPIAKGLLPENSTPKSPLKGLQGRFSTPNFLTNFQPLINRIKEIGESSGRTXTQVGLNCLFSQGNVLPIPAPKNPYQPRKFLGPFG

SEQ ID NO: 188630 - protein, 521 aa, Zea mays
  unsure (1)..(521): unsure at all Xaa locations
  Clone ID: MRT4577_10361C.1.pep
MFIMDRSIMADGETSAEEKRRWTGPPEAQELEETKRRRTGPPEAQELEERLDSLRDKIAAASLVAGSRFGEEQRRSLLQEWLRLASAKLDLDLSGISEFDLSAEALPWLMPPEEADKRTTHTRQEAQELEERMTCLRLLFEDAADDRILARRELGAAADEFLLRLTTRQQALTREYSRLANLKRPLDLSGMTEADRAAEAERLREEKLQKARQLQDQGDMSGARECEGLARIIDFDVKQGGEYLNSICCVGNIYTFDHTEESPVGPMRFTNRPWQDKMCVNCASINILSVKIACSDIDFPIQVYGTVVARDCIDYKCVYLFRRDNDHCQLISSNEESLILTGPKRGLALWYGADYVQTDLWVKDRQGHCKQFSKGIVRIXHSNQVFDKCEPETVSLATRLSTVDVTYDVVECAVEATVAAEVTQGEFYGAMTAHTTRSKRRIVLFDSQVGGDKCHGMIQLMRPVVSVSVMDKLKIFVTTAAGVSTGIEVTPRWNGGHEFVLTLGDATICVKVTWSMVDPRL

SEQ ID NO: 188631 - protein, 48 aa, Zea mays
  unsure (1)..(48): unsure at all Xaa locations
  Clone ID: MRT4577_103620C.1.pep
PTLPLTLFXTLSHTLFPTHPPXKSSLPFPHSFLLTTNLTLIFSFRPPY

SEQ ID NO: 188632 - protein, 104 aa, Zea mays
  Clone ID: MRT4577_103621C.1.pep
KQKVLRIFGNLSPVINKRDPIPLVSNVRYFYHFMIVLPIVYNYNDHPAQMVQSTTILSIGPTTTLEPALTEQTTLRPQVLYNRWHQCCVCFLIASYLMPHIPMR

SEQ ID NO: 188633 - protein, 325 aa, Zea mays
  Clone ID: MRT4577_103622C.1.pep
CFSFVIFHGKSSVSKFLFQSADQDFRELVQKVPEGCLFTIVSDSCHSGGLLDSAKEQIGNSTKQNKTQSREPDEPRHSGSGSGFRSFLKETVRDVFESEGIHIPHSRRHGDDDQDDGYAQPTGNGRTKNRSLPLSTLIEMLKEQTGKDDIDVGSIRMTLFNIFGDDASPKIKKFMKVMLGKFHQGQSGEQGSGGGGVFGMVGALAQEFLKAKLEGKEEEAFKPALEQEVHSVDEVYAGSKAWAPNNGILISGCQTNQTSADATTPQGVSFGALSNAIQTILADKHGKVTNKDLVMKARELLSKQGYTQQPGLYCSDEHVHVAFIC

SEQ ID NO: 188634 - protein, 104 aa, Zea mays
  Clone ID: MRT4577_103623C.1.pep
RSFVRLPPLPTALIDSTPKSTRRHKESLNCGSGDDSDRLGSSSRKCNRQCRPSSQTAMCSSRVFYNRSSRATEQCFLLPFLVSRHLHLRVYKIGELKLTQYHIS

SEQ ID NO: 188635 - protein, 97 aa, Zea mays
  unsure (1)..(97): unsure at all Xaa locations
  Clone ID: MRT4577_103624C.1.pep
LLGLRTQASAIAHGLLWAHDGRLHHVLPLVLQPLLGVWQLLPLRLHGLLRVGVHALLPFGGRLAGPWGTPCSSSASFVSXRGNATTVVKCPYVSALA

SEQ ID NO: 188636 - protein, 423 aa, Zea mays
  Clone ID: MRT4577_103625C.1.pep
MVNILDVLETIKSSSSTPGKTAEASKTQAKTKLTEADATKSQAETKADPSKPAKEKSLETGEKEMEKEAAKQILLERTVTSTPEASSEVLDYIVRHASGKSREEDSLYCLLDSKEISVCREMGKSFGFPTLEDGLSVLLKDELADILAYNSLKGLILSNALMAQKNAEDKGCTIALNNLRSELVEAKLKCSIAEADRDASDYWKNYWETTVVELRSSKERCYEKSVACVKKIKTSFANVGAYLNEDNFVLGDPEGPIEWISSEADAFEEILNGRGDVCAFSGARGVAAILEKAECEHVKILAQAEAAFFIDDTKDPSAEASLVGGKFFTNIWENGGRGTTHEIIKKSEKDTHDAREATKAAEKAAELERRIAELSPPPEPFEPLAEAEAKESSEIISMAETIMDEVVTQLLTEAADKVLREEE

SEQ ID NO: 188637 - protein, 123 aa, Zea mays
  Clone ID: MRT4577_103626C.1.pep
PPCLKSPPGLSAWGAPLFPGKSPGGGFFSPLDLFPSFPTLVFGGPPLGPGALGLSRGSKQKKGQFFSGTGSLSPPPPGFCFFVLGFYLRARIGFVTMFLGFFPNSFFLPPDKAPLKLGGQKDP

SEQ ID NO: 188638 - protein, 70 aa, Zea mays
  Clone ID: MRT4577_103627C.1.pep
LVFYVPQGLKTLKPNRKDKMIKKLRGLYPYCPCCDMGSMRSTQLHMLQKKAERFTGEGDKIIVLAIYAHA

SEQ ID NO: 188639 - protein, 89 aa, Zea mays
  Clone ID: MRT4577_103628C.1.pep
VKRFQKTLHVEAVVPSVIEPSFGLGRIMYTILEHTFHVREGDESRTFFIFPAVVAPFKCSVLPLCQNQEFMPFVKELSEALTRNGVSHK

SEQ ID NO: 188640 - protein, 132 aa, Zea mays
  unsure (1)..(132): unsure at all Xaa locations
  Clone ID: MRT4577_103629C.1.pep
KHQKQHKXTFLNQHRYYDLIKTDNMLIRTCCRPLTAPDIQLRSRSGLGVNDRRSRNRLQLLRHQLLLGVVQPVPPLHLLSEDPLLKKKWPSSSAPCPCLGLLARNRGVWCVXLSGSPGTALPGRTGSGSAYQ

SEQ ID NO: 188641 - protein, 252 aa, Zea mays
  Clone ID: MRT4577_10362C.1.pep
TRPPRVRGRVGAKGGGALSAVAATKSPVIFIGTGEHIDDFEVFDVKPFVSRLLGMGDWSGFMDKAGEVIPTDQQPDLLQKLSEGSFSLRLMYEQFQNLLKMGPIGQVFSMLPGFSAELMPKGHEKESQAKIKRYMTMMDSMTDAELDSTNPKLMTESRIIRIARGSGRPVRDVMDMLEEYKRLAKIWGKMKGLKLQKKGDMSALTRNMNVQQMSKALPPQMLKQIGGMGGLQSLMKQMGSKEMSGMFGGMGG

SEQ ID NO: 188642 - protein, 108 aa, Zea mays
  unsure (1)..(108): unsure at all Xaa locations
  Clone ID: MRT4577_103630C.1.pep
MVQLRSSLSMTRARTRSDSDDADDRGWSQLHVAARKGNLKEVRRLLNEGMNVNAPTWGPKSPGATPLHLAAQGGHVKIMDELXXXRGANIDARNKGACGWTPLHICCK

SEQ ID NO: 188643 - protein, 42 aa, Zea mays
  Clone ID: MRT4577_103631C.1.pep
FYPGLLRGGHTQGKEQRNINNEHDSATCMGIAVTNFGALLDF

SEQ ID NO: 188644 - protein, 101 aa, Zea mays
  unsure (1)..(101): unsure at all Xaa locations
  Clone ID: MRT4577_103632C.1.pep
VHLXPHLRLRRAVLRNGLHQARPDGGPTXTRRELIVDVQTERASSQIHDEWCEVNQNPWTNRKPVVMFRDNIRRCNDVLRAYNDGHGSVWLANKQELLGML

SEQ ID NO: 188645 - protein, 64 aa, Zea mays
  unsure (1)..(64): unsure at all Xaa locations
  Clone ID: MRT4577_103633C.1.pep
HLGCTDEGLRKELMDIEDSGLEIXRLRVLXGHQPQSXVHSFEIRECILWLSIVVVTILCTPQLT

SEQ ID NO: 188646 - protein, 63 aa, Zea mays
  Clone ID: MRT4577_103634C.1.pep
AKICIGYSVWISFRLLAQISETVSVRTSETNAVPLLAPRNTSLQSRRTTPAMNSIHTHTKKRW

SEQ ID NO: 188647 - protein, 90 aa, Zea mays
  Clone ID: MRT4577_103635C.1.pep
PKQVPHGSALLLEVPLRRQTGLANIIIGAKQDMIGCLIDNYFDVSILINTMFFLDKGLNNTPPGLFFLSRFSSNMNYRMPNIQDQGYPAP

SEQ ID NO: 188648 - protein, 232 aa, Zea mays
  Clone ID: MRT4577_103636C.1.pep
MLLMLHETLPFVRPSSCRDPKLSEKSASALHGKLGCSAVCSSAEGHRVQKPHIVHSYKVSFTRTSHHLCKSLNERTTRHCLHRFHVNASPDDDDFRSSRNIAISLFKRYKNVIDRGGGENLNEFVSAGVTAYALGCTDEGLRKELMDIEDSGLEIEGLGSLGGTSLKFKVHSFEIRECILWLSIVFVTILCTPQLTVIRWSPNPPVSADVLHQWKGFCALIANAYYVKGMAW

SEQ ID NO: 188649 - protein, 58 aa, Zea mays
  Clone ID: MRT4577_103637C.1.pep
NDILHGDARVWKIIMIDRRPAISLAIAILSYMKFGSYPAFWLLTSHFLLTLDGDFLQL

SEQ ID NO: 188650 - protein, 270 aa, Zea mays
  unsure (1)..(270): unsure at all Xaa locations
  Clone ID: MRT4577_103638C.1.pep
MLLMLHETLPFVRPTSSCRDPKLSEKSASALHGKLGCSAVCSSAEGHRVQKPHIVHSYKVSFTRTSHHLCKSLNERTTRHCLHRFHVNASPDDDDFRSSRNIAISLFKRYKNVIDRGGGENLNEFVSAGVTAYALGCTDEGLRKELMDIEDSGLEIEGLGSLGGTSLKFKVHSFEIRECILWLSIVFVTILCTPQLTVIRWSPNPPVSADVLHQWKGFCALIANAYYVKGMAWLPVKTLQLEQMAVTGSSEKPSVVASRMXVVSPQWPRV

SEQ ID NO: 188651 - protein, 293 aa, Zea mays
  unsure (1)..(293): unsure at all Xaa locations
  Clone ID: MRT4577_103639C.1.pep
MLLMLHETLPFVRPSSCRDPKLSEKSASALHGKLGCSAVCSSAEGHRVQKPHIVHSYKVSFTRTSHHLCKSLNERTTRHCLHRFHVNASPDDDDFRSSRNIAISLFKRYKNVIDRGGGENLNEFVSAGVTAYALGCTDEGLRKELMDIEDXGLEEGLGSLGGTSSSSXLQGYSFMQILECILWLILLFVTLLCTPQLTVIRWSPNPPVSADVLHQXKGFCALITNAYYVKGMAWXAASASNVALLLSHNSDTRTXTDTXLPEKTLQLEQMAVTGSSDKPSVVASRMQIVFSTL

SEQ ID NO: 188652 - protein, 152 aa, Zea mays
  Clone ID: MRT4577_10363C.1.pep
PFRPLQARPAGDKPGFPPKVFFCENEVPNGVYPSQIFPGGFLNAPGGAFFVPLPVAGPFGFFLEPPPRAGIVGQIPVHLRLVSLSSLLICLFSPPRREKPPFFLVFPPRSPIYSPNLVRSWGGKKKKKGKKKKKKKKKKKKKKSKKKKKKGP

SEQ ID NO: 188653 - protein, 102 aa, Zea mays
  Clone ID: MRT4577_103640C.1.pep
PTPPSASGHTTRFSRGTGDMEATEVHLTHRTRSAAAFVAAMVSPLPDPGTKKCAGGVTFTEGMYTYMALKGVNNVNMIRLRARPPTTPSFEGGGDRISSTSM

SEQ ID NO: 188654 - protein, 276 aa, Zea mays
  Clone ID: MRT4577_103641C.1.pep
MLLMLHETLPFVRPSSCRDPKLSEKSASALHGKLGCSAVCSSAEGHRVQKPHIVHSYKVSFTRTSHHLCKSLNERTTRHCLHRFHVNASPDDDDFRSSRNIAISLFKRYKNVIDRGGGENLNEFVSAGVTAYALGCTDEGLRKELMDIEDSGLEIEGLGSLGGTSLKFKVHSFEIRECILWLSIVFVTILCTPQLTVIRWSPNPPVSADVLHQWKGFCALIANAYYVKGMAWLPVKTLQLEQMAVTGSSEKPSVVASRMQLVFSTLEVVSPQWPRV

SEQ ID NO: 188655 - protein, 141 aa, Zea mays
  unsure (1)..(141): unsure at all Xaa locations
  Clone ID: MRT4577_103642C.1.pep
YTATTRETSPTFIIEKLNGILGTGFAEASVRRPSTIXRSLIQQKLGAEVVLCFXLNRDPNAHCAXANLTTGXVDPKHYTGDHTYIPVTRXGYWKSDTPDHNIGGHYTVFSTRSLTAMVDSCTXLLAGATXVGPQVNHALAA

SEQ ID NO: 188656 - protein, 133 aa, Zea mays
  unsure (1)..(133): unsure at all Xaa locations
  Clone ID: MRT4577_103643C.1.pep
FIKHCFFSTYGAFASTSDHGAGGCCLHQQLPESMIELISQDNPLPEKGKLLQAVMKAGPLLQTLILAXPLAQWRHPPPPVESFEIAPVTILLPPPHQQLRQESFITFNLWRVSGRRVFFEGTDSSTQNKVHRI

SEQ ID NO: 188657 - protein, 58 aa, Zea mays
  unsure (1)..(58): unsure at all Xaa locations
  Clone ID: MRT4577_103644C.1.pep
VEDILRETAKLHAHXGRYNSPYEHPFFAKELSEPREPPMRYPRALHSMADDINANKCM

SEQ ID NO: 188658 - protein, 168 aa, Zea mays
  unsure (1)..(168): unsure at all Xaa locations
  Clone ID: MRT4577_103645C.1.pep
MAGGDEEATTALLPPPAGSAEAERPPPPPADRLGVGYLIFFTLGAGFLLPWNAYITAVDYFSYLYPGAPVDRVFSVSYMLSCLLPLLLIVLVFPKSSAPARINTGLTLFTLALLVVPVMDAVYVKGTPRLYGAFDVTVAATVMCGVADALVQGGVIGFAVELPXERYM

SEQ ID NO: 188659 - protein, 38 aa, Zea mays
  Clone ID: MRT4577_103646C.1.pep
TSNNFSQGQHVVRELTTPPPNSPTSSWNAPTHFPTPLY

SEQ ID NO: 188660 - protein, 33 aa, Zea mays
  Clone ID: MRT4577_103647C.1.pep
GQQQTLSYDDGTVPLLSWSNDLAIALVNSASVC

SEQ ID NO: 188661 - protein, 159 aa, Zea mays
  Clone ID: MRT4577_103648C.1.pep
TPLNKLKLVTMVLYETLRLYGAVPLIASRATAGADLSGVKVPKGTLLLIPIAMLHRDEEVWGADAGAFNPFRFRDGMGRAATHPNALLSFSLGPRSCIGQDFAMLEAKATLALILRRFTFRVAPEYVHAPADFLTLQPSKGLPVVLKLLEPAVLVTSSG

SEQ ID NO: 188662 - protein, 78 aa, Zea mays
  Clone ID: MRT4577_103649C.1.pep
LSRTMSANLQGIYARQDHYSLHSSSTPNDGYQHEPCRLSDSHLHSSCRHCIRGLLIVDMARDTSEMGTPSTARTDDEA

SEQ ID NO: 188663 - protein, 58 aa, Zea mays
  Clone ID: MRT4577_10364C.1.pep
QQTTVPLLVLLYVFSQQSTRVRTDLPGLRLEPDSSGARSRPAVPSASAPKHNILALLD

SEQ ID NO: 188664 - protein, 56 aa, Zea mays
  Clone ID: MRT4577_103650C.1.pep
PTRSSSTQPPSLKRPPPPSLPRAFQLASPSQPWLIDLSTHGFISTCSRFPDPFRQF

SEQ ID NO: 188665 - protein, 88 aa, Zea mays
  Clone ID: MRT4577_103651C.1.pep
FCTLERRLFFFFYADRACGVSFLFGRVRTLLHFVVRGFRAYFNCVPCHARLYIGGGGQITIFLRVQFTSPCECRAYSGRSRADGDLVV

SEQ ID NO: 188666 - protein, 258 aa, Zea mays
  Clone ID: MRT4577_103652C.1.pep
RGRPGAFASLLGQANFSGVRSHDNCDSTPNYSKPLISSQCRASMAYLDDLGSGRKRKRSPGNYYENIRVDGNARAHLGDTYHIGTNNPLHDLLYARDAHFNAYEKQHELTCLKNTRVDLLHEIYSWADGQDERCIFWLSGLAGTGKSTIARTVARSYYYDKQRLAASFFFSRGSGDVGHAGKFVTSLAVQIADNVLASQQHMHDAVVERSNIASQSLRNQWHHLVLRPLSKLHEPEAGQTYIIVVDALGECDNDSNIR

SEQ ID NO: 188667 - protein, 97 aa, Zea mays
  Clone ID: MRT4577_103653C.1.pep
PTGRTGQRFTALKRTTEHPSQQARGGLDEWSFARGTRLVIRQKVSTFIPFRKSFEVQASWLPTSQIASSVFTLGTAAVLPFYTLMVFASKSELTKKS

SEQ ID NO: 188668 - protein, 585 aa, Zea mays
  Clone ID: MRT4577_103654C.1.pep
MDESACRSTAPVGFLRRGSGISLRNQSNEDRSNQYNKQPGKSSNPNPVKLRFTENKEKPRYFQGTFHSSGSRASSVSSSKAPARKYCDERQKQPFLAETDIAESSNRRTEVRRLQSGKKASVFGDGHPYTQKSISEASSSSTITGGLPEEHDLGALYVSGSSGSSAHPVNPRNAALNASAHMQKDKEEMSSGRPQGAPTFVRRHTLPQSFSTGVKSPTAPGTGAQRRGLKNLGCTSISDVLPSGCSSSDSARDRRIEVTKKRTSGAGSSSRSRISEQSNFSQPRASYPGSTGPRARAAEQSASQQTARTNSRNIPDHTDSIRTRRPFTLRARERMMPGEREDSVFALHETVASIHPECGHFHMDGTPPERLGRPFYAELPHAIYSSNRQGSSSQTARRRSTSRTEESPQRMFHGMFWERDGYRGINMEGIAQALLALDRIEHDVELTYEQLLLLETNLLLSGLDLHDQHEDMRLDIDNMSYEELLALEEHIGSVTTALTEEQFTKCVNQSVYEARNSYRDVSKIAADDVKCSVCQEEYVDGEEIGTMQCEHQYHVRCIHEWLKQKNWCPICKASAIPSEMTKGDA

SEQ ID NO: 188669 - protein, 57 aa, Zea mays
  Clone ID: MRT4577_103655C.1.pep
VSKWDRVWQIASGSGFKCSSAVCKSVRDMPFLKHWRGNPWDDSINNYPVHLPSASSN

SEQ ID NO: 188670 - protein, 62 aa, Zea mays
  Clone ID: MRT4577_103656C.1.pep
QDIHINCGQTLQTGAIISSQQSCNVCGIFFFKKNSGIYYKYEIQVSIIGASNANRSSHVTFP

SEQ ID NO: 188671 - protein, 46 aa, Zea mays
  unsure (1)..(46): unsure at all Xaa locations
  Clone ID: MRT4577_103657C.1.pep
PPILASYLPTPHTTRLLQKPTHDPPTRPMPSATALKDSFLPXKPKR

SEQ ID NO: 188672 - protein, 47 aa, Zea mays
  Clone ID: MRT4577_103658C.1.pep
FLISCSLTAYMTKPPSSREAPYVPPHPLCWKQAICHPTHSVVKQDML

SEQ ID NO: 188673 - protein, 132 aa, Zea mays
  unsure (1)..(132): unsure at all Xaa locations
  Clone ID: MRT4577_103659C.1.pep
GGADRRKAPRPLHVGDGGWVRVVGRRAHRRSSCLSKPSSSPVHVDMSGKCFNCFSPSHRAALCHSLVWCFLCRLLGHHVRVCPRRRTAPHSPRRAWGDARFXREPSPVEASICAMEGNXRVGGAGDGGLKKH

SEQ ID NO: 188674 - protein, 497 aa, Zea mays
  unsure (1)..(497): unsure at all Xaa locations
  Clone ID: MRT4577_10365C.1.pep
MVLAQLGGSISRALAQMSNATVIDEKVLNECLNEISRALLQADVQFKMVRDMQANIKRIVNLEALAAGTNKRRIMQQAVFTELCTMLDPGKPSFTPKKGKPSVVMFVGLQGSGKTTTCTKYAYYHQKKGFKPALVCADTFRAGAFDQLKQNATKAKIPFYGSYMESDPVKIAVEGVERFKKENCDLIIVDTSGRHKQEAALFEEMRQVSEATKPDLVIFVMDSSIGQAAFDQAQAFKQSVSVGAVIITKMDGHAKGGGALSAVAATKSPVIFIGTGEHIDEFEVFDVKPFVSRLLGMGDWAGFMDKIHEVVPTDQQPELLQKLSEGSFTLRLMYEQFQNILKMGXPIGQVFSMLPGFSAELMPKGHEKESQAKIKRYMTMMDSMTDAELDSTNPKLMTESRIIRIARGSGRPVRDVIDMLEEYKRLAKIWGKMKGLKIPKKGEMSALSRNMNVQHMSKVLPPQMLKQIGGMGGLQSLMKQMGSKEMSGMFGGMGGER

SEQ ID NO: 188675 - protein, 77 aa, Zea mays
  Clone ID: MRT4577_103660C.1.pep
TTLHQFEDLQLLPCKNLAATRLTCFVTHPHLLTCYHNEEANPDRLLQLQHMLTFERTASADAALLLPTTHDCARPDR

SEQ ID NO: 188676 - protein, 146 aa, Zea mays
  unsure (1)..(146): unsure at all Xaa locations
  Clone ID: MRT4577_103661C.1.pep
HTPTHNTAQRAGGGSTHRAKEDRERAPATERKTAHEREARETEQADKKKRGGGXXGXDXGPTRXXXAQKXPDXEXDEXDNTKPRXEAGNSDTXPSNEPGXXEXXKQXRGRNHNXSTEEEQXHTTEADXRNDPANTPTKTPGHGAGK

SEQ ID NO: 188677 - protein, 51 aa, Zea mays
  unsure (1)..(51): unsure at all Xaa locations
  Clone ID: MRT4577_103662C.1.pep
HPXIXEXIYSXVXNSEHKFVXXKXKKKPIIFSXAXLXXVKNMTGLVXMXGK

SEQ ID NO: 188678 - protein, 122 aa, Zea mays
  unsure (1)..(122): unsure at all Xaa locations
  Clone ID: MRT4577_103663C.1.pep
SCWNEYXTTRIEQNLVVNCTCRIADCRAQPTGAFIRAIVSSPEVISKYEKALMXGYVESFSNLTXCTNPQGCDRILCRHGLGCGTTCCKCGXASCFNCSFSDAHYAASCGHMSQWVDDGCYY

SEQ ID NO: 188679 - protein, 260 aa, Zea mays
  Clone ID: MRT4577_103664C.1.pep
MPQGDHIELHQKRHGKRLDHDERKRKREAREVHRRSKDARNLIGAKGKRFAKKRYAEKAQMKKTLKMHDESNKRQKVDDDVQEGALPPYLLDRDQTQRAKVLSNTIKQKRKEKAGKWDVPLPKVRPVAEEEMFKVLRTGKRKTKQWKRMVTKATFVGAGFTRKPPKYERFIRPTGLRFTKAHVTHPELKCTFNLDIISVKKNPNGPMYTSLGVMTRGTIIEVNVSELGLVTPAGKVVWGKYAQVTNNPENDGCINAVLLV

SEQ ID NO: 188680 - protein, 99 aa, Zea mays
  Clone ID: MRT4577_103665C.1.pep
VPCGRGFPGPAFGKLAPIRRSCPFACGLRYAAGWVVSPQRVAGDVGRQLARQSLPVETWLPNVPPVWVKIPRPLGVQVVVVQMHTRGRIASTRPGKFRA

SEQ ID NO: 188681 - protein, 106 aa, Zea mays
  Clone ID: MRT4577_103666C.1.pep
HLRMHPPGVLSFVHDVLHRVLSGQCRALLFSLVLELNPCRVRSITFVLHSLRVILLRGHAVCPVCTNVWRMHSSSSVVAGFLMICNDSLLPALCCAVCPLKNQKLV

SEQ ID NO: 188682 - protein, 260 aa, Zea mays
  Clone ID: MRT4577_103667C.1.pep
MPQGDHIELHQKRHGKRLDHEERKRKREAREVHRRSKDARNLIGAKGKRFAKKRYAEKAQMKKTLKMHDESNKRQKVDDDVQEGALPPYLLDRDQTQRAKVLSNTIKQKRKEKAGKWDVPLPKVRPVAEEEMFKVLRTGKRKTKQWKRMVTKATFVGAGFTRKPPKYERFIRPTGLRFTKAHVTHPELKCTFNLDIISVKKNPNGPMYTSLGVMTRGTIIEVNVSELGLVTPAGKVVWGKYAQVTNNPENDGCINAVLLV

SEQ ID NO: 188683 - protein, 260 aa, Zea mays; identical to SEQ ID NO: 188682
  Clone ID: MRT4577_103668C.1.pep

SEQ ID NO: 188684 - protein, 55 aa, Zea mays
  Clone ID: MRT4577_103669C.1.pep
MFGRAPNKSDNTKYYEILRVPKSASKDELNKAYRKAAIKNFLFFFFLPREEQGRT

SEQ ID NO: 188685 - protein, 69 aa, Zea mays
  Clone ID: MRT4577_103670C.1.pep
LKPGTPSVFRFTSSPCHAGPGPQPRAIHARSGHARHMMTYPPAPMAALSRQAHQTPSPTTKVKPPTLSL

SEQ ID NO: 188686 - protein, 56 aa, Zea mays
  Clone ID: MRT4577_103671C.1.pep
PPPPTPTMKDIHVLGSGDGCSDGCSPDSDSRVVYAGMKLADTESDAPASAPGPSSG

SEQ ID NO: 188687 - protein, 104 aa, Zea mays
  Clone ID: MRT4577_103672C.1.pep
MERQTRFVLLVFAIGALLASSAAADLSAAAGSLHALPLRRVEDDDASSFVEEAAYPPRRALYGGGSISYGALTANKAVCYGSCAARGQAYTRGCLAIYGCRGGR

SEQ ID NO: 188688 - protein, 103 aa, Zea mays
  Clone ID: MRT4577_103673C.1.pep
PRRPLIAQHDRSDRTKGMTGGARAITLSSGLGGGAHLLNGHCLACTAKGELSSINTAGPSVRYASTDITMSGLLPICNAAITYCLDQLSKTMSGRNRRMDRCL

SEQ ID NO: 188689 - protein, 109 aa, Zea mays
  unsure (1)..(109): unsure at all Xaa locations
  Clone ID: MRT4577_103674C.1.pep
IAGGSHASYNITDVLHTAGKDSMLXTAKGDHKRAXTYYNLVHTTFTRIGGNTISGVREVNIFNADFLIQFHNPKVQASIPSYTLVGRGVPHTKRVGSPSSINYQPPPPC

SEQ ID NO: 188690 - protein, 74 aa, Zea mays
  unsure (1)..(74): unsure at all Xaa locations
  Clone ID: MRT4577_103675C.1.pep
KRAFFFSHKIRMPILNNQGSRRKKITNKQLLPSARLFAEHLFVXNXYXPPLNTXTKFXXXPXTPXHHHHLQPST

SEQ ID NO: 188691 - protein, 54 aa, Zea mays
  Clone ID: MRT4577_103676C.1.pep
AYPCRRRWCACLYLARLYLPGSTPGEDGSTHVYQLSLCGLQGPSVAYEQTCRHL

SEQ ID NO: 188692 - protein, 111 aa, Zea mays
  Clone ID: MRT4577_103677C.1.pep
LLMWVDTGLVPEAAARGFGPKLSPEAGARVGADARLAPGGLEHKLHVVERRVRQLVGGEGIANCSSRDSVWRFHQNDQQVFHWRCTEYKYAAEEVSVWGSPLRTSSLLQEH

SEQ ID NO: 188693 - protein, 221 aa, Zea mays
  unsure (1)..(221): unsure at all Xaa locations
  Clone ID: MRT4577_103678C.1.pep
SEFGSRTRNAVSGNVYTFTALISGFCKDGNMDEATRLFHKMMESSLVPNEVTFNVMIEXYCRVGNIRKAFQLYDQMLDRGLTPDNYTYRSLISVVCLTLGAMKAKEFVADLENNCAVLNSFSLTALMHGFCKEGRLTETYQVWDEMRARGVKLDLIRFTVIAYAAQKLHDWEKISIVFXEMKAKGVKPDNVFHTCMIHVHSKEENIVQALNCWDKMIDDGC

SEQ ID NO: 188694 - protein, 97 aa, Zea mays
  unsure (1)..(97): unsure at all Xaa locations
  Clone ID: MRT4577_103679C.1.pep
GRVGWGDHCREYKPERWXRDGLFVGESYYNITAFNGAPDLCLDKDFSYYHMNFTAASILTRFXLRIIECYLVRPKIALTMYMKHCLQGTLTKTGTAH

SEQ ID NO: 188695 - protein, 69 aa, Zea mays
  Clone ID: MRT4577_10367C.1.pep
RPTGPSYIVILRCTTIKKKLMNVAMRRGDVKLVILLKPARPFFFFLIFFFFFFFFFFFFFFFFFFFFFF

SEQ ID NO: 188696 - protein, 46 aa, Zea mays
  unsure (1)..(46): unsure at all Xaa locations
  Clone ID: MRT4577_103680C.1.pep
IRSSIFHAKAGIALNAQFIKLVSWXDNKWGYNNRVVDVIRHMFKVQ

SEQ ID NO: 188697 - protein, 211 aa, Zea mays
  Clone ID: MRT4577_103681C.1.pep
MALQIPTVTVDDLLAFHAQHFPHASTPEHILYGVHHEAETAEEYYDEEDDGLGYYPDGTKRTLTDEQIAMFRHSEIQAILRKRRLQKENGESSDCKSTSEKPSPDVASPAQESSSHVVDDSQQAQSKEPGQANKQQWATTSAKSKAKAKRKRDRYAKRRKEVRLQKGLPRRRSGRNGPGSDYSDDESDEWDPWHQANGPDAQKDDTLDLDY

SEQ ID NO: 188698 - protein, 47 aa, Zea mays
  Clone ID: MRT4577_103682C.1.pep
EHLRPMSVLLRARTTTGWASFATSGISTSPAQPTSSTSTATYMPRYA

SEQ ID NO: 188699 - protein, 68 aa, Zea mays
  Clone ID: MRT4577_103683C.1.pep
ITNNPFLLSIHATLSPKRLLAASSLLTPAYLYYNKNHNTRHFFINELLLQTQINYPHNVIDILSSHLF

SEQ ID NO: 188700 - protein, 46 aa, Zea mays
  Clone ID: MRT4577_103684C.1.pep
FDCGIGLELKCLVGKLGRKVVVGYYRRCVLVLVNCLVWPDFKYSRA

SEQ ID NO: 188701 - protein, 111 aa, Zea mays
  Clone ID: MRT4577_103685C.1.pep
DLLVILVNGAILMVCEVYSISVALILYCRLRCTTGPVLHGPQFCFSQCVREVAHFSHEGSVKVLRGEPRWVLPHLQAVCACARSPPSCSSRTRRCRWRVPTSVSEYRWYGG

SEQ ID NO: 188702 - protein, 70 aa, Zea mays
  Clone ID: MRT4577_103686C.1.pep
MTTSRRLADRKTAKFQKNITRRGSVPETAVKKGKGNGYAAGPVVLGFFVFVVIGSSLFQIIRTATSGGMA

SEQ ID NO: 188703 - protein, 39 aa, Zea mays
  Clone ID: MRT4577_103687C.1.pep
HLRPTDVSALVAYSDACWAGCSDTRRSTCGYAVFLGDNL

SEQ ID NO: 188704 - protein, 67 aa, Zea mays
  Clone ID: MRT4577_103688C.1.pep
LILFGGQTTSRRLADRKTAKFQKNITRRGSVPETAVKKGKGNGYAAGPVVLGFFVFVVIGSCTSLGR

SEQ ID NO: 188705 - protein, 71 aa, Zea mays
  Clone ID: MRT4577_103689C.1.pep
PGEDEDKSSGNPQSGKALYDFTAGGDDELSLNSGEEVEIEYEVDGWYYVKKRRPGRDGKMAGLVPVLYVSS

SEQ ID NO: 188706 - protein, 37 aa, Zea mays
  Clone ID: MRT4577_10368C.1.pep
CMRGCILCNIVIETPVSHSNQTTARKRQASHHPPLYG

SEQ ID NO: 188707 - protein, 173 aa, Zea mays
  unsure (1)..(173): unsure at all Xaa locations
  Clone ID: MRT4577_103690C.1.pep
MGTSPVIPGTMLFVALLAAVCFGATAARTRHTRHTDANEAIHLPRRFGAGARPRNCCYSDIQDASLPVRCCNDYENKSSGYCXHCEETTGGDSVRSNDFILSLTEPTDCTTKSSNCCHIAACSRDYVRNCVSLDQGKSRSSNGKXATFCIYSDASAVECRDVFHGYRGPECGT

SEQ ID NO: 188708 - protein, 95 aa, Zea mays
  Clone ID: MRT4577_103691C.1.pep
VSIPNKSKSFIMFPISFNPHGIGITEQALIYLSFFLFPIETNEAYQAIPIVITASFFKIKHIIGAFGCNDRTRWDETIPQIRLFGSESRVETGLF

SEQ ID NO: 188709 - protein, 101 aa, Zea mays
  unsure (1)..(101): unsure at all Xaa locations
  Clone ID: MRT4577_103692C.1.pep
WWLVLPCPWCSLLPCCSLVVSVVLVSPCRLLPRXVPAAAAAGGVGPAWGRLPAXXRWGXPGLPSFLLWGGAVGGGGGGGGGRRRMQETLARSLWAYTMDSK

SEQ ID NO: 188710 - protein, 152 aa, Zea mays
  unsure (1)..(152): unsure at all Xaa locations
  Clone ID: MRT4577_103693C.1.pep
MDENRKSTDAKRPCTVPLVSRKNSIAPADEINTEPVNKSCSWCCSSEDDSAGACEEPIVLKQSTSSRGPTRFSKDSQSLYAKRRRERINEKLRTLQQLIPNGTKVXLCFVCGHPQLLRYRIVDMSTMLEGAVEYVKFLQLXIKLLSSEETWM

SEQ ID NO: 188711 - protein, 171 aa, Zea mays
  unsure (1)..(171): unsure at all Xaa locations
  Clone ID: MRT4577_103694C.1.pep
GPPRLGTSRPAGSHSYSXARHPCFRYRRSSYLLEHSDCCAPPRRRRARRCRCTATYRTHARTGDHTTTTRCPAWPPRLCAAASAPQAPGPQAPQPERIRRPPASTTHRSAVAALLQQVRLHGVGRHDVEDAPRGARDRKAPDESAMHLEIREPQVLLPIGAPRCRTFHPRN

SEQ ID NO: 188712 - protein, 122 aa, Zea mays
  Clone ID: MRT4577_103695C.1.pep
RPVKESCASQQITSDKLEACLLVYTLKLKLESSAATSGTYVEDEEQEQHSVGDPSSPGPSALCGCGQRTGECTSWSGVWTCDDLLTKCAATCKNCVPVSTGKGATKYRCRDFLPENCGCKIH

SEQ ID NO: 188713 - protein, 33 aa, Zea mays
  Clone ID: MRT4577_103696C.1.pep
RKGHTIKVDKRYYKSRFWYVNRTLPPLPIYGEL

SEQ ID NO: 188714 - protein, 83 aa, Zea mays
  Clone ID: MRT4577_103697C.1.pep
SGHVHLSSTSSDKLEACLLACLHPKTKTRVGECTSWSGVWTCDDLLTKCAATCKNCVPVSTDKGATKYRCRDFLPENCGCKIH

SEQ ID NO: 188715 - protein, 89 aa, Zea mays
  Clone ID: MRT4577_103698C.1.pep
MKSRSSTLLVILVLQALLLSAAVAKGPAGPKKQCWCGECTSWSGVWTCDDLLTKCAATCKNCVPVSTGKGATKYRCRDFLPENCGCKIH

SEQ ID NO: 188716 - protein, 121 aa, Zea mays
  Clone ID: MRT4577_103699C.1.pep
RMEKNRTKFLIHNLTGGAGTSCGGERAWGRKSKANFLLGLHPLGDGEILLGEGNQNLGDVEYKHGNPRQEGPGVLPGHILEHRRELKRLNFTCQRLVHKSPDQGCGNPKPGIVGGPPFPLG

SEQ ID NO: 188717 - protein, 111 aa, Zea mays
  Clone ID: MRT4577_10369C.1.pep
WDPRAGRATRPQAIPPARRSREILQPPRSAPLAAARSAAFDAAAVDNHGDTSPFTLWPLAGPEETAAVTSGAVGPSAALCCYAGTPPCERWGATTRLLLGQSGAGGGHSPS

SEQ ID NO: 188718 - protein, 368 aa, Zea mays
  unsure (1)..(368): unsure at all Xaa locations
  Clone ID: MRT4577_1036C.1.pep
MVMGASGSKLEKALGDQFPEGERYFGLENFGNTCYCNSVLQALYFCIPFREQLLEYYANNKTPGDAEENLLTCLADLFMQISQAKKKTGVIAPKRFVQRVKKQNELFRSYMHQDAHEFLNFLLNELVDILEKESSAAKDSPQSSSPEKAPNGPVQPLANGVKKEPPVTLVHKSFQGILTNETRCLRCETVTARDETFLDLSVDXTSCLKNFCSTETLNAEDKFFCDKCCSXLKIMXLQEAQKRIKIKKAPHILVIHLKRFKYIEQLGRYKKLSYRVVFPMELKLSNSSDDVDTEYSLFAVVVHVGSGPNHGHYVSLVKSHNHWLFFDDENVEMVEEQTLQTFFGTSHEYSGNTDHGYILFYEGLGGKS

SEQ ID NO: 188719 - protein, 89 aa, Zea mays
  Clone ID: MRT4577_103700C.1.pep
MKSRSSTLLVILVLQALLLSAAVAKGPAGPKKQCWCGECTSWSGVWTCDDLLTKCAATCKNCVPVSTDKGATKYRCRDFLPENCGCKIH

SEQ ID NO: 188720 - protein, 67 aa, Zea mays
  Clone ID: MRT4577_103701C.1.pep
TSPGGFNPHLYPFHKGSLGTAKQDANERQRLDHSAGLDPIAPVAPRRPAPRPEQPVRTWRNATPNCN

SEQ ID NO: 188721 - protein, 149 aa, Zea mays
  unsure (1)..(149): unsure at all Xaa locations
  Clone ID: MRT4577_103702C.1.pep
MLCAGGEPDPAARAFCDAPASRADAGANGTPSPQDHAEKDPPNVLDVAIVGGGMMGLAVACAMCRDCCSCALTCXANMPLTKHLRVAIIDSNPALKSRSYLGKNSIPDSRVSTVTPATISFFKGCSSPQLTFFYALLAGDIQFCLLVSL

SEQ ID NO: 188722 - protein, 362 aa, Zea mays
  Clone ID: MRT4577_103703C.1.pep
MEALAGAASSSVLPARHPPSRVAAQSLALRPSRCGPLRAVGAGGVSGKDDAHAANGSPVLKLNSDSSLNGVLPIAADKSQKASSTNVSTDSSGSRAGLFRTPISGGVQSATFAHGLPPPALAVRNLMEQARFAHLCSVMSGMHHRRTGYPFGSLVDFANDSMGHPIFSLSPLAIHTRNLLADPRCTLVVQVPGWSGLSNARVTIFGDVYPLPAEQQEWAHKQYVAKHQQWASQQWGNFYYYRMHNISDIYFIGGFGTVAWIDVKEYETIQPDKIAVDGGDLQSLKELNAIFSKPLREVLSSEGEVDDAALISVDSKGIDIRVRQGAQFNIQRLAFDVPHKVETLEEAKKALHKIIKDKQQIK

SEQ ID NO: 188723 - protein, 165 aa, Zea mays
  unsure (1)..(165): unsure at all Xaa locations
  Clone ID: MRT4577_103704C.1.pep
RRRCQWQGRRPRRQRVSRPQDPIFSLSPLAIHTRNLLADPRCTLVVQVPGWSGLSNARVTIFGDVYPLPAEQQXDIYFIGGFGTVAWIDVKEYETIQPDKIAVDGGDLQSLKELNAIFSKPLREVLSSEGEVDDAALISVDSKGIDIRVRQGAQFNIQRLAFDVP

SEQ ID NO: 188724 - protein, 27 aa, Zea mays
  Clone ID: MRT4577_103705C.1.pep
MDAAKNKDPIDDLNMLKQSKDYYERVG

SEQ ID NO: 188725 - protein, 87 aa, Zea mays
  Clone ID: MRT4577_103706C.1.pep
SSRAGLCLSLALWELGSLTNYLTNYSDIYFIGGFGTVAWIDVKEYETIQPDKIAVDGGDLQSLKEVNAIFSKPLGEGLSSQGEADDA

SEQ ID NO: 188726 - protein, 65 aa, Zea mays
  Clone ID: MRT4577_103707C.1.pep
IPASRPPSLFIRSLRLPRSCHPVRPLRPSVEGDSLPGGNLRADLKTAGKDPSRRRRFHPESRHPA

SEQ ID NO: 188727 - protein, 60 aa, Zea mays
  Clone ID: MRT4577_103708C.1.pep
RVDPRRPPTRPAGAGSTHFSGGVRFHCNRTKDYVMVAGSMIQVKTMAVFLNRESLALQLW

SEQ ID NO: 188728 - protein, 164 aa, Zea mays
  unsure (1)..(164): unsure at all Xaa locations
  Clone ID: MRT4577_103709C.1.pep
TGGKTEIYSFLPPRLKQNILFPINKGKHFSLTNFKNRGGGLKLFFFPSFPXIQKKEGEIGGNPLFFKGGQATLFLDNICLKKKFGNCFPKANIKSNRGLGFKFKGSNGGKLNDRLEIFPGVHPNLWFGHTFFSTHSCLQNKGMGGPGHHLPVGFGPPIKPQSGP

SEQ ID NO: 188729 - protein, 59 aa, Zea mays
  Clone ID: MRT4577_10370C.1.pep
CVRIGICCLITILFFDESIAVCIVTKGSLFPSVMTNGILVFRPRLILSNCLPILFPINN

SEQ ID NO: 188730 - protein, 131 aa, Zea mays
  unsure (1)..(131): unsure at all Xaa locations
  Clone ID: MRT4577_103710C.1.pep
IQQQQLLASSPLXAVGNAPTYLQQQLLEQIGPALTQLAVANPAAYLQQLLPFNQLVVRNSAAYLQQQQQKLKALTRANPXLVVTFLXQQQQLLSYNQIFLMNPCLQHPIIEGAIFYITYEMYSQLGPYTDM

SEQ ID NO: 188731 - protein, 66 aa, Zea mays
  Clone ID: MRT4577_103711C.1.pep
VTVWERERVKRDLAYVASSIESRFFGTEPQETNRSCLCVNLALRFDSYSLLSLVLLLAIDLNWLPK

SEQ ID NO: 188732 - protein, 226 aa, Zea mays
  unsure (1)..(226): unsure at all Xaa locations
  Clone ID: MRT4577_103712C.1.pep
MEALAGAASSSVLPARHPPSRVAAQSLALRPSRCGPLRAVGAGGVSGKDDAHAANGSPVLKQLNSDSSLNGVLPIAADKSQKASSTNVSTDSSGSRAGLFRTPISGGVQSATFAHGLPPPALAVRNLMEQARFAHLCSVMSGMHHRRTGYPFGSLVDFANDSMGHPIFSLSPLAIHTRNLLADPRCTLVVQVPGWSGLSNARVTIFGXDVYPLPAEQTEWAHKPYV

SEQ ID NO: 188733 - protein, 51 aa, Zea mays
  Clone ID: MRT4577_103713C.1.pep
NLMFSLCPYLLIINKFFEWWILACLLPILDFILFFGIRHFSDSFVSTVIYR

SEQ ID NO: 188734 - protein, 100 aa, Zea mays
  unsure (1)..(100): unsure at all Xaa locations
  Clone ID: MRT4577_103714C.1.pep
MHACMQEISINNACTVQVQRCAEDKAVLITTYEGTHSHQLPPQAAAMAKTTSAAAAMLLSGPAVSRDAGALFAGHHXPAPLFAQYXPYASAATLSATARN

SEQ ID NO: 188735 - protein, 158 aa, Zea mays
  Clone ID: MRT4577_103715C.1.pep
AFGHLAPGTCLALSADSSYLVTGSRDTTVILWRIRQVGSAHKKNAPEPPPSTPTTPTSPLATGSSSDSSPSKTLETYRRRRIEGPMHVLRGHLGEVTCCSVSSDLGLVGSSSSVSGVLLHSLRTGRLIKKLDVPEAHSICFSSQGIVLVWNEVENRLS

SEQ ID NO: 188736 - protein, 97 aa, Zea mays
  unsure (1)..(97): unsure at all Xaa locations
  Clone ID: MRT4577_103716C.1.pep
CGKRSMEASGGWRGIXTPRILAPLDGGCIYSICDSIIIIPPALALAIALDHARYPRGRGPVKKPRPCRTNWEGSPPLHIYTPSCSPDSCILFLTPLV

SEQ ID NO: 188737 - protein, 67 aa, Zea mays
  Clone ID: MRT4577_103717C.1.pep
KNPYNNSPFSAVLVREGKMGVVLTNMPSFCFVLLAKCLKHLPFCPLLWFVPFQLLILIRSSHTLHLD

SEQ ID NO: 188738 - protein, 45 aa, Zea mays
  Clone ID: MRT4577_103718C.1.pep
FPRPFLYLCAGVLSWCSLDREALLLLARSPASNGASIGARPLPCV

SEQ ID NO: 188739 - protein, 125 aa, Zea mays
  unsure (1)..(125): unsure at all Xaa locations
  Clone ID: MRT4577_103719C.1.pep
QPADKYPSIFSQTSIFGRFPYFLPCLCISILAVIALIACIWFPXETVEESLAGTDTEENGGGGCLKLFTNWPLMSAITLYCIFSLQDVAYAETFSLWAVSDRSFGGLSFTTTDVGNVLAMSGMSK

SEQ ID NO: 188740 - protein, 102 aa, Zea mays
  unsure (1)..(102): unsure at all Xaa locations
  Clone ID: MRT4577_10371C.1.pep
GCLILPHLFVFRFCFLGQGEDIISSDFEXRCFVGGLSWATDDHSLNNAFSTYGEFLESKIILDRETHRFRVFGLITFSTEDTIRISIEGINFXDLDGRNITL

SEQ ID NO: 188741 - protein, 141 aa, Zea mays
  unsure (1)..(141): unsure at all Xaa locations
  Clone ID: MRT4577_103720C.1.pep
LAETAGRXRVLVEFMEIVPRXVDSEELXVESEPLSVAYKNVIGALRASWRIICYIVHIEEGRGNVDPLTLIKDYRGXIETELTKICDGILMLFETTLEPXSMAANAKXFYIRMEGDGYIYLDEFKTGAERKDAXENTMVKF

SEQ ID NO: 188742 - protein, 197 aa, Zea mays
  unsure (1)..(197): unsure at all Xaa locations
  Clone ID: MRT4577_103721C.1.pep
HPPHPSHPLSIVVDNGSTLSVTSVGVSFYLNDVLVAPGLTHPLLSVRRFTSDNHCSTDPWGLTIRHLPTRVVLARCDSSGPLYSLHLPSTSPTTIAPLLLXTTTSVVWHRRLEHPRPDVMSQLSSXQISPIPEAHLSXLCHASQLGRHTRLPVSTSTSQAAHTLCNEAGPTSINKFISVSTLVRVTGFSNQQKENLI

SEQ ID NO: 188743 - protein, 108 aa, Zea mays
  Clone ID: MRT4577_103722C.1.pep
LGKTLQAIAIACCFKDEGSILIVCPAVLRYSWAEELERWHPSFMPKDIHIVFGRQDSLEHLNATPRAVIISYQMLSRLRESMVNRTWALMIVDESHNIRCTKKLEEKI

SEQ ID NO: 188744 - protein, 89 aa, Zea mays
  unsure (1)..(89): unsure at all Xaa locations
  Clone ID: MRT4577_103723C.1.pep
LLVWGRYGSLLWEAVXAFFANKEMRILMVELDASCKTTILYKLKLVXIVTTILTIGFNVETVXYKNIIFTVCYFCCHDMIMPLLKHYFY

SEQ ID NO: 188745 - protein, 99 aa, Zea mays
  Clone ID: MRT4577_103724C.1.pep
FQGVPPYGPGGGSHRGAFLPKKIFFRPGLGVGGFPKNYGGPPRKGFPPPPFFKSRGGLFRNILPQVPEKGLLYVGPQGGGGLPPPGKGYFGPGGGKGSF

SEQ ID NO: 188746 - protein, 64 aa, Zea mays
  Clone ID: MRT4577_103725C.1.pep
SINTNDLHRSLVRFCPPRPLRPHSEFALAPTPSRRGLLPFRALYLMRSLEHSSLFSLVIQTPKP

SEQ ID NO: 188747 - protein, 180 aa, Zea mays
  unsure (1)..(180): unsure at all Xaa locations
  Clone ID: MRT4577_103726C.1.pep
DLRXEELETALMEMVEHDNRRMLSAKVEKLEAEVYELRKXXXYKQEQEQITLQILLRMEQEQKVAEDARIVAERDAAEQTCAAHLLQEKYEATMAALSQMEKRAVMAETMLEATKQYQAGQVKANQSFTSSSPRAEHVLGKINQEPNQDTSNRRIGLLSRGXXXXXXXKGMQNSTETSGG

SEQ ID NO: 188748 - protein, 55 aa, Zea mays
  Clone ID: MRT4577_103727C.1.pep
HWFICTDADSSSSCRSDESLLARHPCMGYIIHRPAEQHASYKLVITHHDAHSDFD

SEQ ID NO: 188749 - protein, 130 aa, Zea mays
  Clone ID: MRT4577_103728C.1.pep
SLCSAIFVECLQLSSSPVSFNPQLSGVALPCLGRYMSSSPKQPHDTVTNLTQFFLFPCVSEVGFFSFSYLETLTIDDLNETNKRKFTPMTCSSLSDLPTKLYPTTELNMVQDTLPAKLHRKYQLNLPEKT

SEQ ID NO: 188750 - protein, 106 aa, Zea mays
  Clone ID: MRT4577_103729C.1.pep
SLQWFRHFGRDIRSSTKQPHDTVTNLTQFFLFPCVYEVGFFSFSYLETPTIDDLNETNKRKFTPMTCSSLSDLPTKLYPTTELNMVQDTLPAKLHGKCQLNLPEKT

SEQ ID NO: 188751 - protein, 138 aa, Zea mays
  Clone ID: MRT4577_10372C.1.pep
MAEKEGAKVGAEEMEEREQEGEAEEVEVKFRLFDGSDIGPVRCNAATTTVAALKDRVVADWPKDKQIIPKTASDVKLISGGKILENDKNVAQCRAPFGDLPSSAITMHVVVQPSSAKSKPDKKANKLPKTTRCSCTIL

SEQ ID NO: 188752 - protein, 195 aa, Zea mays
  Clone ID: MRT4577_103730C.1.pep
MGSEELETALMEMVEHDNRRMLSAKVEKLETEAYELRKAFSDKQEQEQILLRMEQEQKVAEDARIAAERDAAEQKHAAHLLQEKYEAAMTALSQMEKRAVMAETMLEATKQYQVGQVKANQSFTSSSPRADHVPAKINQEPNQTAPIRRIGLLSRGLGWLDKGKALRPYMSLSETLFLTSFNFTSKISDVLGHNV

SEQ ID NO: 188753 - protein, 75 aa, Zea mays
  Clone ID: MRT4577_103731C.1.pep
LPTTNRAARTFTNTITFKSLTSTITSLPSPHYNKNALQDNKNITLISIPPTILEQYTTLESLLSHTINTPCHAIT

SEQ ID NO: 188754 - protein, 221 aa, Zea mays
  unsure (1)..(221): unsure at all Xaa locations
  Clone ID: MRT4577_103732C.1.pep
MVKICCLGAGYVGGPTMAVIALKCPDIQVVVVDITKSRIDAWNSDTLPIYEPGLDEVVKQCRGKNLFFSNDIEKHVSEADIIFVSVNTPTKTRGLGAGKAADLTYWESAARMIADVAKSDKIVVEKSTVPVKTAEAIEKILTHNSNGINFQILSNPEFLAEGTAIQDLFNPDRVLIGGRETPEGQKAVQTLKAVYAHXVPEDQILTTNLCPAELSKLAANA

SEQ ID NO: 188755 - protein, 108 aa, Zea mays
  unsure (1)..(108): unsure at all Xaa locations
  Clone ID: MRT4577_103733C.1.pep
FLDQQASYFVVSSSNNRAAGAINIFTLLMLHALFACVANSTIFPQCSQAPIAFLLSPYLPLMIASVCENPALXSYRLQHSNLIXNIPFSPLFQQLSALFLVHSLLHTI

SEQ ID NO: 188756 - protein, 39 aa, Zea mays
  Clone ID: MRT4577_103734C.1.pep
SCQPYCLKFHEKVLAAREGSLRLQEMITLTTSIEETDAN

SEQ ID NO: 188757 - protein, 90 aa, Zea mays
  unsure (1)..(90): unsure at all Xaa locations
  Clone ID: MRT4577_103735C.1.pep
NCYFFXLMLSVPYFLVLFYFLYFHLFFFSLLIFLLISSIFLFXGGVVAFYFSLIIFFLYISFYYFLLYFFSFFFIIFFXFFFLFYYNIHF

SEQ ID NO: 188758 - protein, 266 aa, Zea mays
  unsure (1)..(266): unsure at all Xaa locations
  Clone ID: MRT4577_103736C.1.pep
MAAPESECGGSDGYRDLRGVRVDLDTGAARADGGGGFAVSFWLYLSVSARPSSVILHQITAGDDTKLPFLALGEGNKLLLFPLMRLHREAPTPSSSYPWTDTTNLSSTSGCPLEKWFHIGCEVTENVMCLHVDGFLTAEAPLCSLFDEPDSQDDSNQISLVGNDGKLEGYIYNIEVSYVLGXLKYQYPKNSPFKLSIDYSCSDGIEEGDDGIWSIVGGKASCRRNFILEVVLTNTFGEPVKDKEVVASLVYADDGTVVAKSRDDSE

SEQ ID NO: 188759 - protein, 51 aa, Zea mays
  Clone ID: MRT4577_103737C.1.pep
GWFLSFVSGLLFPLPVPCLCGLWWAFLFFWRGSVRGSFFRGLAAVPRFRPG

SEQ ID NO: 188760 - protein, 76 aa, Zea mays
  Clone ID: MRT4577_103738C.1.pep
INGTDPRQASNTSNHAAYLPAPPPQAKMNALAIPMQQQVCPPLLCTNHRNTQPNKTVNKRSRVLQKKKIKTHPPPP

SEQ ID NO: 188761 - protein, 57 aa, Zea mays
  unsure (1)..(57): unsure at all Xaa locations
  Clone ID: MRT4577_103739C.1.pep
ASFSAGRFVVTPSRXAKEPEKKEEKKDGGGEKKDGGGGEGKKEEGDGKKDGGXFFRQ

SEQ ID NO: 188762 - protein, 70 aa, Zea mays
  unsure (1)..(70): unsure at all Xaa locations
  Clone ID: MRT4577_10373C.1.pep
SPVAESITSLRSDPSSMGHVESRVNQQGPPCKAKYSWVTDSERSKPPKKKKKKKKKKSTLRCYHFLXXXF

SEQ ID NO: 188763 - protein, 113 aa, Zea mays
  unsure (1)..(113): unsure at all Xaa locations
  Clone ID: MRT4577_103740C.1.pep
RDVALEPAYLLSRHLTVVVVCGGTGFTTLCILNHVNPENVTLIYQSEKEIDMARFXVALKGVTIMDGDSXDLSFLTDFFYRYISHSMMLYWPYPQRGIKEAYRVLRFDGLAFV

SEQ ID NO: 188764 - protein, 205 aa, Zea mays
  unsure (1)..(205): unsure at all Xaa locations
  Clone ID: MRT4577_103741C.1.pep
TPRPPAAVCPHRGGPGXQAGQSSNRAPGAPGSGPPTRPPPGPGTGGGHSKPPKHHHGKPPKRPPRTPPNXPPTPRPTPPNXPPXXPPTPRSSPPPDGPPXGPGPPTXRPXPPDGPPDGPGPPTXRPXPPNXPPTPRPPTPPDGPPTPPXGPPTXRPXPPXGPPXXPPTXRAXPPDEPPXXPPTPPAERTSPNDTRKPNARGGPGG

SEQ ID NO: 188765 - protein, 574 aa, Zea mays
  Clone ID: MRT4577_103742C.1.pep
DSLPPTAKIGIITYGRTVSVYDFSEGAAVSADVLPGNKSPTHESLKALIYGTGVYLSPIHASLPVAHTIFSSLRPYQLSVPEVLRDRCVGAAVEVALGIIQGPSVELSRGIIKRSGGNCRILVCAGGPSTFGPGSVPHSAKHPNYAYLEKTAMKWMESLGHEAQRHSTVVDIFCAGQCPVRVPVLQPLAKCSGGVLLAHDDFGEAFGVNLQRASTRAAGSHGLFEIRCSDNMYVTQVIGPGEEASPDSHETFKHGSSFCIQMHSVEETQSFSVSMETKADIKSDFVFFQFAVHYSNIYQTEITRVITMRLQTDDGLSAYLASVQEDVAAVIIGKRTVLRARTASDAIDMRLSIDERVKDIALKFGSQAPKSKLYRFPKELASLPECLFHLKRGPLLGSIIGHEDERSVLRNLFLNASFDLSLRMLAPRCIMHREGGTFEELPAYDLVMQSNAAVVLDHGTDIFIWLGAELAAQEGQSAAALAACRTLAEELSEKRFPAPRILSFKQGSSQARYFVSRLIPAHKDPTYEQESRFPQLRTLTPEQRARLKSSFIQFDDYSFCEWMRSLKLVPPEPS

SEQ ID NO: 188766 - protein, 377 aa, Zea mays
  Clone ID: MRT4577_103743C.1.pep
MGRDKSRRLYGSRHFRQRLVLATLTSTAVTIEDIRSGDASPGLRPYEVSLLRLLDKISDHHTIDLNETGTKLRYRPGVIIGGKGLEHDCGVHRGIGYFLEPLILLGLFSRAPISIRLKGITNDTKDPSVDTFRTTTLHMLKHFGVPLDGFDLNIDSRGSPPLGGGEVFLRVRNINSTLTAANWVDEGMVKRIRGVSFSTRVSPQLENRIIYAARGIFNRFIPDVHIHTDHRSGSAGGRSPGYGVSLVAETTTGCLLSVDVTVSYPSVDEINEESEKPELTSPEDLGVQAASMLLEEVAQGGVVDSTHQGLLFILCALCPPDVSKVRVGQLTPYGIETLRNIRDFLDVKFIIKPDPNSNTVTLKCVGAGVKNLARKIS

SEQ ID NO: 188767 - protein, 67 aa, Zea mays
  Clone ID: MRT4577_103744C.1.pep
CIVSIHIVSLYYSLFAVDMLCLPEISPHALYHVLQARAVNAVPLDGHIYCVCMHPVRASSEQILKSH

SEQ ID NO: 188768 - protein, 196 aa, Zea mays
  Clone ID: MRT4577_103745C.1.pep
PGRALFPVPLLRVDQGCPARSNASSDGAAGRRWIWRGARVFLVYIRAAVVLVCLGFMPWSGVMPWGCKPLELSSGVWWWPPSFSFLPPWWWKVEDAGSGKIPLNKLVLVLWCSLIWRASNCYCLFSQATMVVDEKQDSCRILKFIGRVRAYQQRSLWWSDGAHRWLPVFVGALFLLAEWRLTIFLPACVPDGRQFQ

SEQ ID NO: 188769 - protein, 58 aa, Zea mays
  Clone ID: MRT4577_103746C.1.pep
KKLVQAFFFFFFFFFSFFFFLFPFVSCSVFIFFVCALLLPVNPQSKAGGPWGVGVGSS

SEQ ID NO: 188770 - protein, 117 aa, Zea mays
  Clone ID: MRT4577_103747C.1.pep
PTRPPTRPSTRPPTRPQRGKMWSYSRRNEHGLNPLQSICSQTSQRVFGAGAMCSNNLINRFFCCSYGIFCAHLSMLSVLNYKTLCYVYICGLYYVSNTIYIYRCYKRYRCRKAKLYG

SEQ ID NO: 188771 - protein, 75 aa, Zea mays
  Clone ID: MRT4577_103748C.1.pep
GRAFLLLHAMNVVVGAKEDRHLMTGLHTVDDIYCTDCREEYGWKNGRAYEEPQNYKEGKLIFQKLKIVKENWLSP

SEQ ID NO: 188772 - protein, 113 aa, Zea mays
  Clone ID: MRT4577_103749C.1.pep
KPFTDYSNKSTYTVVKRRSKKGKKNRRKIFSLPRRRRPPKPQMESAHPSNQNDQIQILMRTLHFASVGVNFPPPPPPEEEEEEDVRTTDRGDRPRPRPRAGAGSASGAGAGAG

SEQ ID NO: 188773 - protein, 60 aa, Zea mays
  Clone ID: MRT4577_10374C.1.pep
LGKKKKCARPKNRPAGEKQKKCFPASEASVTQRLKVLSPLGRFYTHLPICGGETDQNMNV

SEQ ID NO: 188774 - protein, 57 aa, Zea mays
  Clone ID: MRT4577_103750C.1.pep
TLCYLAFVFHTLCYLTDVKTLLYIVLFMRKSKIASFSFFSRGNALIFCRIFCMPLQR

SEQ ID NO: 188775 - protein, 101 aa, Zea mays
  unsure (1)..(101): unsure at all Xaa locations
  Clone ID: MRT4577_103751C.1.pep
CSPGALCPRVLPRCVCRRGPSPRLGVCSALPPRLLRVVARCPLCPVCCFLCCPALVARLLLXFVCPSPLFLSGCPARVLCSAPFVPPLLVRLAAPPPPGRP

SEQ ID NO: 188776 - protein, 71 aa, Zea mays
  Clone ID: MRT4577_103752C.1.pep
SHLVDHRRGKQRRGHARGIQLRSETSGFVFCEFVTTHLLRLSVTITLNFFLPISLSPYFLSYFFISRSGSL

SEQ ID NO: 188777 - protein, 67 aa, Zea mays
  Clone ID: MRT4577_103753C.1.pep
GNTARALFIEWHCPHSHLWCPMGVAIVFHPPPKTLVLYSWRPVFVKVLYCHDMIHSLEAQRFFQMYH

SEQ ID NO: 188778 - protein, 250 aa, Zea mays
  unsure (1)..(250): unsure at all Xaa locations
  Clone ID: MRT4577_103754C.1.pep
SPCGDAAAAAELTSLRISEGAGIPPLPGRRSVGGNAAEGEEEGDKNKKARKGKAGTQRIAGWGLREFSKIVSKKVETKGRTTYSEVADEICGELKLTLIGQEFDEKNIRRRVYDAFNVLIALRVITKDEKEIKWMGLSNFQYEKIQLEETRKELMIRIKNKKKLLQEIEXQRDDLQNIKFRNQFLQRPAESVNGICLPFLLVKASRKARVEIEISENSKFAGLDFNCVPFTLHDDVSILEAIRCNSVKKS

SEQ ID NO: 188779 - protein, 45 aa, Zea mays
  Clone ID: MRT4577_103755C.1.pep
GSRVAGNLINRVEKYSDLACVTFNKSSDYMRKAKDMVIKGIFRIM

SEQ ID NO: 188780 - protein, 150 aa, Zea mays
  unsure (1)..(150): unsure at all Xaa locations
  Clone ID: MRT4577_103756C.1.pep
MPRLAVPPKGTSILYNLQLEEXIVTTIPTIGFTXVETVEHHQHLASPFDXVGGQEKMRPLXRHYFQNTRGLIFVVESNDRERVDDARDELHGMLNEDDVRDDELLEFVYKRDLPHAYKXAENTDKIGLHSLRQRHWYIQSTCATSGEGLY

SEQ ID NO: 188781 - protein, 180 aa, Zea mays
  unsure (1)..(180): unsure at all Xaa locations
  Clone ID: MRT4577_103757C.1.pep
THVSSEFGSSKSEAQKQSDELALVRQQLSEMKSHVEDGDIAGAPASSPEAPPAEQDPVQLKTQLEWTEAILEDEQTQRQKLTAEFEEAQTSACRLQEELEKLRTAGPLESSETEEASQLKERLEKEKKLTSDLGRAATRLQELLKTTQEQLAREKDTVKKLQEQLEKAEDGSSXKEGTSV

SEQ ID NO: 188782 - protein, 69 aa, Zea mays
  Clone ID: MRT4577_103758C.1.pep
MATRAGRPPTPAPALLLLLTFLFLLRGVLPSRAGDTVAAGRPLSDAQSLVSKRGKFKLEFFRPGTVAPN

SEQ ID NO: 188783 - protein, 90 aa, Zea mays
  Clone ID: MRT4577_103759C.1.pep
APSHGARPPGCLAQLLWSPYCSPCSPAEPTSRSFTAGVLASYPLHARSDCCSSACHADLYLPCSCSVYSSETWAPYLFTLATSSRSALTS

SEQ ID NO: 188784 - protein, 157 aa, Zea mays
  unsure (1)..(157): unsure at all Xaa locations
  Clone ID: MRT4577_10375C.1.pep
MPPIAVGDVLPDGQLAWLHENDQLQHVSEHSVCAGKNDILFDDTGAFTPNGSNQHVPSFVNXQAEQLKAKDXDKNLMIIVNDPDDMXARLETYPNNHYEDVHSDGSGTYTMGIHLNVDDTAESMVRAASKINCLRAEYITFIANHITEWISITICYA

SEQ ID NO: 188785 - protein, 125 aa, Zea mays
  Clone ID: MRT4577_103760C.1.pep
MATRAGRPPTPAPALLLLLTFLFLLRGVLPSRAGDTVAAGRPLSDAQSLVSKRGKFKLEFFRPGTQCLLTSSTRARGGFSVEVRRGLLLVAPVAPLKIQQKWSNCEKNLCETLFGCGGIDHHLSM

SEQ ID NO: 188786 - protein, 73 aa, Zea mays
  Clone ID: MRT4577_103761C.1.pep
ERPPGQVKLFFFYVFFLSWKRNFLFMGGHILQPKNLITLFTTYLHPDGGPPQHSGGGWMPTGLSKLNPQTANI

SEQ ID NO: 188787 - protein, 101 aa, Zea mays
  Clone ID: MRT4577_103762C.1.pep
RADPLVRPRILFYILYYLIPATLIPGRASFKKMKHTPIQSNIIFAHQIPPNINTHNIICTYNLTIYPKNNIFHNYVKSHIHLHLSLPLIYHTHIHQIKIFK

SEQ ID NO: 188788 - protein, 89 aa, Zea mays
  Clone ID: MRT4577_103763C.1.pep
GSDVPTNVTSYTPQLAGHSSENEAQDRISRPKKGKLCPQAQFSLTGFCEADGIPVRDIVKGRLSLFGCRLGQPGLKNPAGPVVFRVTLV

SEQ ID NO: 188789 - protein, 116 aa, Zea mays
  unsure (1)..(116): unsure at all Xaa locations
  Clone ID: MRT4577_103764C.1.pep
MVMATQDYGGTRHLLDGDWAPEAKPRQLTSQLALSSSSSRGPAPVRACTEEAVEAPKGFPAPQLDPSTPFHIFRGSTGGQLPKAQAEEVYVITWTCPKEXVCQMPTRERCIMRGGP

SEQ ID NO: 188790 - protein, 113 aa, Zea mays
  unsure (1)..(113): unsure at all Xaa locations
  Clone ID: MRT4577_103765C.1.pep
APAPGREPRGPRARQANRADERRQRTATGPANPKPXRNNXTGKPGXGKXKXGXEXKXXRGGXDXXRKXQRAXTEEXXXGQXXGNXGEXXTRXNNXXXXRGAPEDAEXEDAEGE

SEQ ID NO: 188791 - protein, 119 aa, Zea mays
  Clone ID: MRT4577_103766C.1.pep
IVHFVLRQHVEAPSMWSIFPLQDLLALKEDYTTRPAVEETINDPTNPKHYWRYRVHVTMESLLNDKDLTKAIKDLVHGSGRFYPQKDLESGHTIGEGSAKLQLQSEHPSQTQKNGLSNK

SEQ ID NO: 188792 - protein, 44 aa, Zea mays
  Clone ID: MRT4577_103767C.1.pep
TPEGPILCMNNCGFYSSAETMIMCFKCHKEMITNQGQAKLAGYS

SEQ ID NO: 188793 - protein, 127 aa, Zea mays
  Clone ID: MRT4577_103768C.1.pep
YQLHWLLNSFQFRNNNVLASLPSAAAPLPLKSLCFIKPWDHPLKVLKRCEEEIYYPHPIVLKDCFPFWPSGMPYIIIPGLKPEFLFGPSILVQARPPTYQNFCQKMGKVPPPCQKLTKRGFILQPLP

SEQ ID NO: 188794 - protein, 70 aa, Zea mays
  Clone ID: MRT4577_103769C.1.pep
TVPVSAAGSANETPEIPDNVGDWLRGVYRFATDRNDFRRNLILNLGLAAAGVWLARNLSDIDLMAPQPGV

SEQ ID NO: 188795 - protein, 50 aa, Zea mays
  Clone ID: MRT4577_10376C.1.pep
WLYVCVVYCVGFLKRWEEEKNILRTFNRSRSPLRFLRQVPPPYLDLFGTV

SEQ ID NO: 188796 - protein, 605 aa, Zea mays
  unsure (1)..(605): unsure at all Xaa locations
  Clone ID: MRT4577_103770C.1.pep
MEATGTRRSLAGGMKKCSGVLFILTLAVVLFLLSPSPSPTPPPNTAPNGPITDLLPTLPGLSDLYPPAPNSTAHLSWGLLRPLLCRSDALPGTSAGVLEAAEAWRNLTLAVTAAASEEXRRVSKDSAAHRPWEGIYAXRATLPCGLSEGAALTVVGVLREGAAKFWVEMLGANGEVVLHVNVSLGAAGVVVEQNSWTPEEGWGEWERCPPVGDVGSSNSSLQLSPVDGLVHCNEKVGARIVQESNNTVVNITGNQPEDWQSQTGHGQLSGRFSIVEGEPFTVTLWAGVEGFHMTVNGRHETSFAYRERSEPWLVAEVMFSGDLELLSFLANELPVSEDIDMENVAVLKAPPLPKKQTFLLVGVFSTGNNFKRRMALRRTWMQYEAVRSGDVVVRFFTGLHKNEQVNMELWREAQLYGDIQLMPFVDYYTLITLKTISICIFGTKIVPAKYIMKTDDDAFVRIDEVISSLKKSNSNGLLYGLISFQSSPHRDKGSKWFISRKEWPFDMYPPWAHGPGYVISRDIAKFVVQGHQELTLQLFKLEDVAMGIWIQQYKNSGQQVNIVTDDRFYNEGCEADYVLAHYQTPRLMMCLWEKLKTEYHAICCE

SEQ ID NO: 188797 - protein, 80 aa, Zea mays
  Clone ID: MRT4577_103771C.1.pep
NLRLLNLPRGTIWNFVQRQTLLSSGPPSGHQPCLNGATGGVGLRFPPGFNRSKNNNQGNFYLQKKKKKRRPILKNPKLRN

SEQ ID NO: 188798 - protein, 62 aa, Zea mays
  Clone ID: MRT4577_103772C.1.pep
QTLLSHCPRALSGKHHEETALPPSHVQSKISELPKLNMTHYTSSTDTSSFHTELSSYAAPAP

SEQ ID NO: 188799 - protein, 54 aa, Zea mays
  Clone ID: MRT4577_103773C.1.pep
ERQIYHTTSQNQCVLSSTNLFQQTSKMNTTLLPTFTYKNQTMHSTFSPAKLAYT

SEQ ID NO: 188800 - protein, 66 aa, Zea mays
  Clone ID: MRT4577_103774C.1.pep
GQASTDIMQIVEAKHYTSSSHQVSIVSGTWAHAGTGILAMHSRGWMLQLALLSFMLLDEDESGHKR

SEQ ID NO: 188801 - protein, 517 aa, Zea mays
  Clone ID: MRT4577_103775C.1.pep
MASHPPPAEPSSKSNKGQSEHEEIHVSSGGVLAYTDDDDCESRRPLLLRTPASAECYSVSAAVFPFLFPALGGLLYGYDIGATSGATISLKSSTFSGTTWYNLSSVQTGLVVSGSLYGALIGSVLAYTIADFLGRRKELILASISYFIGAFLTAVAPNFAIMVVGRFLYGIGIGLAMHAAPMYIAETAPSQIRGMLISLKEFFIVLGMLLGYIAGNLYVEVVSGWRYMYASSTPLCLIMGVGMCWLPSSPRWLLLCAIQGKGNLPETKENATRCLCRLRGQASPDLVSEQIDLILEELSYIDQEKQASFGEIFQGKCLTALIIGCGLVFFQQVTGQPSVLYYAATIFQSAGFSGASDATRVSILLGLLKLIMTGVAVLVVDRLGRRPLLIGGVSGITVALFLLSSYYTLLKDASYVAVIALLLYVGCYQLSFGPIGWLMISEVFPLRLRGRGLGVAVLVNFASNALVTFAFSPLEDLIGTGALFSGFGVIAVASLAFIFWIVPETKGLTLEEIEASL

SEQ ID NO: 188802 - protein, 252 aa, Zea mays
  unsure (1)..(252): unsure at all Xaa locations
  Clone ID: MRT4577_103776C.1.pep
MARKFFVGGNFKMNGSKSSIKEIVENLNNADLDKNAEVVVSPPALYLPLVRETLRKEIEVAAQNVYDKPNGAFTGEISVSQLKDSDINWAILGHSERRTIIGESDEVISSKTKYATENGLKVIWCCGESLETREAGKTIEFVSAQIESLKSQISDWSNIVIAYEPIWAIGTGKVATTEQAQEVHKAIRDLLRSISDKVADETRILYGGSVNEKNCGELSKQADIDGSLVGXLXSQPAFVDIITLPAVTINSK

SEQ ID NO: 188803 - protein, 153 aa, Zea mays
  unsure (1)..(153): unsure at all Xaa locations
  Clone ID: MRT4577_103777C.1.pep
RVRLSEKALLVPSKILSTEVNFAEYSHXASAAXPTAAAQKIVSLYHEKAGQNHETAASSSSSPDVRDEFGKWLPPDRRICLENENLCLXEVRQYLRGXGPAEYAYXTFCSVEQSEALTSQHTYSLIHASXGMLRDAGADVPERCKHCRANCTP

SEQ ID NO: 188804 - protein, 70 aa, Zea mays
  Clone ID: MRT4577_103778C.1.pep
MATAVATSVAYSRGKTPARATSLRLIHAMMHAQTLTLALLLGAVLAHRFYRSYYRRQRRKDLHYDLYYQL

SEQ ID NO: 188805 - protein, 125 aa, Zea mays
  Clone ID: MRT4577_103779C.1.pep
SRSTHASLLLLHPYLIFPLLFPLPESLIKKTIPLPFLINHLLFISLLLYTSAIPPSISKSNSTTKIPFTNNLSHQNSFLILYHSIITHPFFVSSLISTLYFLQTPVNSSTFYSFTTCRQPFFFFS

SEQ ID NO: 188806 - protein, 59 aa, Zea mays
  Clone ID: MRT4577_10377C.1.pep
IYNKIEMQQTVAQSLRTYLSVVLLIKGCLHFLVSAIEILVAIPPVLKNAHQVPLAEVNI

SEQ ID NO: 188807 - protein, 72 aa, Zea mays
  Clone ID: MRT4577_103780C.1.pep
SYFIFFGCWAHGFLKRRGAPRALSSGCLVTRGETFHPLVKGLGGPGCFRAAGAKHTKNLKLLSGVCTGTHGV

SEQ ID NO: 188808 - protein, 71 aa, Zea mays
  Clone ID: MRT4577_103781C.1.pep
VIGYNLAWQHPALLWGNQVSINEFGRQPLSFYLPPFRLCTVASEIFSRIDVSYSYDTVTVVPHLSICRQFS

SEQ ID NO: 188809 - protein, 79 aa, Zea mays
  Clone ID: MRT4577_103782C.1.pep
KVVNPNGEPKERGTKGKQNVGHAELISPKGSCADFLKTNGITYASESSTGITTRMSTVELKSSDQDKEIHGGAMPQATA

SEQ ID NO: 188810 - protein, 156 aa, Zea mays
  unsure (1)..(156): unsure at all Xaa locations
  Clone ID: MRT4577_103783C.1.pep
TFGLVYVLVYVLVYVLGLNKGYWKVRLLFVLFLMFMLMFMLLLDKRFTDVSKSGVRADTSGNEAYTGDVNAKRRLSAKGTVGSLVVVRSRIVTKVKASDTLAHAFTVSEASANRGREALLGHKRIQMILPYPTLLYYVRIVRLXPVSLNVXPERSA

SEQ ID NO: 188811 - protein, 283 aa, Zea mays
  Clone ID: MRT4577_103784C.1.pep
MHIRAVAAAAALVLLLALSVPAPVSAADQDANGAAGNGTGVGADRLDRRTKMFLHHTVRGAAAGAHDTGLGLLDAFFASLSMIVVSEIGDETFIIAALMAMRHPKSTVLSGALSALVVMTVLSTGLGRIVPNLISRKHTNSAATVLYAFFGLRLLYIAWRSDSKASQKKEIDEVEEKLEAGQGKSTFRRVFSRFCTPIFLESFVLTFLAEWGDRSQIATIALATHKNAVGVATGATLGHTICTSIAVVGGSMLASKISQGTVATVGGLLFLGFSLSSYFYPPL

SEQ ID NO: 188812 - protein, 67 aa, Zea mays
  Clone ID: MRT4577_103785C.1.pep
WLGKTQVTNGLHQNKAFLVVYNVCIPALKVIPAFVIIHTCRQHGNTCRGILCPRSVTCLSCLFIVPG

SEQ ID NO: 188813 - protein, 75 aa, Zea mays
  Clone ID: MRT4577_103786C.1.pep
GPSLCAGPCLDSHYSEVKCIICILCLTMTVFGPRRRCMVRVLDLLAVVASLSVLLQACLHAIVCISRVPWVGTRI

SEQ ID NO: 188814 - protein, 143 aa, Zea mays
  unsure (1)..(143): unsure at all Xaa locations
  Clone ID: MRT4577_103787C.1.pep
VGFLALFFLSLPPSGALLFLVLRPCVRVRGAGFRAPWFAVRAPVPFLSGWAXAVLCGSGRALACPVLGLCFVCGPRVPCPWLSLWGPRRPFRVCRRPVSVRRPPVWRCRRRGRSWVSLGRPAWPRAPWCARSSGXCGGFVAVF

SEQ ID NO: 188815 - protein, 256 aa, Zea mays
  unsure (1)..(256): unsure at all Xaa locations
  Clone ID: MRT4577_103788C.1.pep
MGALPRGLLAGICAVLLAAVVALAHGAEQETASMVVGLAKCADCTRKNMKADAAFNGLQVAVKCKNADGVFETKALGEVDKSGSFSVPLPADLLREDGELKQDCFAQLHSAANKPCPGQEPSWIVRPTTDNDDDDKMKNTFVAVAGKVHYPSKECASAFLFYHLXQEAPVAQEAHVDHPSHPQEAHXVPMYRHSPVPEYKPPHPTPTPIYHAAAEHKTQNPETDPEKFKKLLPFIKKNPFFPKFPKFPPGKEENKA

SEQ ID NO: 188816 - protein, 238 aa, Zea mays
  Clone ID: MRT4577_103789C.1.pep
MALPSSASHSSRLRLLTVPALLLLLSSAALLVFLVLPSLSPSSASSSAASGHLCACSSPATHTTTTVTTTTITASPAPVTTSPADVAWLKSQLASNSLLLAAGGGHDAWHRLRKGINPRTREQQLFDINRHHGISHYPDEEATNHTALPCPGELLVEEHHSNYGEPWAGGRDVFEFLANASVLTPTEQVLEIGCGTLRVGLHFIRYLEAGRFHCLERDELSLMAALRYELPAQGLLYS

SEQ ID NO: 188817 - protein, 60 aa, Zea mays
  Clone ID: MRT4577_10378C.1.pep
LIIRLITRYPQNSLEVTLLRQSLSYFSTYLGIILTDILAIKLLFEDILEPQISLDLDFKQ

SEQ ID NO: 188818 - protein, 109 aa, Zea mays
  Clone ID: MRT4577_103790C.1.pep
SRCGRRGRCRSGPSCVAPGRHRCTAASVAPPSAPTASSYCPGCCRLGSASAPCPPYPPLAALLRIHNRPVSRPGALLGSRPSVAVPGRSPIALRSSVSPPLAVCACART

SEQ ID NO: 188819 - protein, 65 aa, Zea mays
  Clone ID: MRT4577_103791C.1.pep
LPFVGWCLFSFLLPFLYALVFWWIFLISACVVCLFCSALSRFRLAPLNLLLLYRYAPLQLVFDLS

SEQ ID NO: 188820 - protein, 67 aa, Zea mays
  Clone ID: MRT4577_103792C.1.pep
HDVRCSDLSEAHHLLTCQTREWLSSTMERGADYYCNAEYIVRQTSHILRRRVLMSHLTMDCAPTTMA

SEQ ID NO: 188821 - protein, 134 aa, Zea mays
  Clone ID: MRT4577_103793C.1.pep
AMTAQSHAVASEFGSSLQPSEGGRPSAPSYAPAADAGAGAIGVGGAGDEIEQDGIQPAVVLQLQVPAAMPLVAVKAAGVAAVEEREPVVEVHTTEVAPVPPDEVDEDYSISRSTWTPRRRGEEPEVAADVETDV

SEQ ID NO: 188822 - protein, 740 aa, Zea mays
  unsure (1)..(740): unsure at all Xaa locations
  Clone ID: MRT4577_103794C.1.pep
TQHGCGDSADTIWERSVDFSLCRCGDVDCIEVCDIREWLPKSKMDHKLWKLVLLLGESYLALGEAYKNDGQLQRTLKVVELACLVYGSMPGHIDGDEFISSMSNSSLSREDLALKTKLVLDEADYCNNKRCFSYEVSSHQLPPNYLFWAKAWMLVGDVYAEYHRLNSHQAKLAPEQKSHGEVRMSNEVALEVKRLKRKLGKDKQNCDTCSLINCSCQSDRASSGSSASSSSSEASKLYSRKKNKKSLGKNLQLQSQYREASKNPNAQEATQGSENKQHDVNDTCIENNSVLNDDIGHYXQARENQSRNVDGVPDKSQASVPTVRDGGIFKFLGGPKPGDVEYNLSSAIHCYGAAKGALFAFPVHSVETSMVLKKRGWGFNELGRCRLENRNLVSAEIAFADAIKAFEEVFDHTNVILINCNLGHGRRALAEECVSRIDEFQKHDLPEGTYMQSFKSAKSEYFQAINYYSAAKRQLKYVNTEADKVLYHEVYTQYAHTYLRLGXLARESFLTDSYEGGLVNESSNRTAVEISASDAFREALSTYESLGEHRKQEAAFGHFQLACYQRDLCLRFLDLVDKEVKQKNEDKYRQKSKWYGSLAEKNWQKALEFYGPKTHPTMFLNILMAQSALSINISNSFHSTAMLDTALTHLLEGRHVVEANEDNSNDMDLDIKPKFWCQLQSLLKRMLAGSLPSSTGRAASVSQASTSSRTETSKLKEMYRLSLKSSTLGQLHALYKLWVS

SEQ ID NO: 188823 - protein, 57 aa, Zea mays
  Clone ID: MRT4577_103795C.1.pep
TRLKELKNGRLAMFSMFGLFVQALVTGKGPLENLADHIADPVNNNAWAYASIFVPGK

SEQ ID NO: 188824 - protein, 80 aa, Zea mays
  unsure (1)..(80): unsure at all Xaa locations
  Clone ID: MRT4577_103796C.1.pep
MSALNRGAXYLQQQMLLPLSQLATASRASFGTQHQVLTVYQQYAANLASLLQLQQLVPFVKIDVTDPGAFYQQHIIGGAL

SEQ ID NO: 188825 - protein, 48 aa, Zea mays
  Clone ID: MRT4577_103797C.1.pep
LNYLLTGPVQIDIPKTHLNNRTVGHDIQQAETYINIRYITINTCLTAY

SEQ ID NO: 188826 - protein, 52 aa, Zea mays
  Clone ID: MRT4577_103798C.1.pep
PLVLSNKWPYFNGIIYHDEIALIRLVYAMIDMYKLTMRDFRPVYVLTHQDVA

SEQ ID NO: 188827 - protein, 68 aa, Zea mays
  Clone ID: MRT4577_103799C.1.pep
MGSCFSSMGEDAAGYGDERRVRRVWPSDDDGGEWDVDNRAAIYIATFHSHQKNDQHQQQQAPAATAAQ

SEQ ID NO: 188828 - protein, 58 aa, Zea mays
  Clone ID: MRT4577_10379C.1.pep
ESARSICRGVVMMDTDDRSRCREARSPRYQRHRKRPFFKRRPQGIGLGYSGALGCVLA

SEQ ID NO: 188829 - protein, 51 aa, Zea mays
  Clone ID: MRT4577_1037C.1.pep
MVMGASGSKLEKALGDQFPEGQRYFGLENFGNTCYCNSVLQVWVHASETNS

SEQ ID NO: 188830 - protein, 122 aa, Zea mays
  Clone ID: MRT4577_103800C.1.pep
MLQHGEEKKGKVKKGWLAVRVGAAEGDGSQQRFVIPIAYLYHPQFRRLLEAARDAYGYDYSAGPLRLPCSADEFLRLRALVEREVQAPSSSSSHHHRVHAGGGSHGGHYSLSSPCTRARVTS

SEQ ID NO: 188831 - protein, 47 aa, Zea mays
  unsure (1)..(47): unsure at all Xaa locations
  Clone ID: MRT4577_103801C.1.pep
DXLISVDAISRNFQLHRXXLQQCVGSQYXVXVSGENSYIDEKPIVKE

SEQ ID NO: 188832 - protein, 177 aa, Zea mays
  unsure (1)..(177): unsure at all Xaa locations
  Clone ID: MRT4577_103802C.1.pep
MASQRIFQLGLRRAAAPGLRVQPAGRMVQRRLAATEHASQSQAAEILAKQRINRPVSPHLAIYRPQITWIASGLNRITGLTLSGSLYLFGIAYLIAPYTGWHLETQSMVAAVAAWPAVVKAGVKTFFALPFFFHCLNGGQHLAWDMGVGFKNQQVIRTGWXVVGLTAVSTLYYAFLA

SEQ ID NO: 188833 - protein, 78 aa, Zea mays
  Clone ID: MRT4577_103803C.1.pep
PLVDVISAGLVQQAEANGSVEGWTSALHSHEPFSYGCSSPDKGTRNAIRRCPGTTGEGVLSPPGRRERAQSVRDKGSI

SEQ ID NO: 188834 - protein, 74 aa, Zea mays
  Clone ID: MRT4577_103804C.1.pep
TTNDIGYNLCNDVCPRRRKNTCLLHDHNINEIRVCTTMDATTIQIMTPFGCTAARYCRYVLSPKQKSASDLKKL

SEQ ID NO: 188835 - protein, 165 aa, Zea mays
  Clone ID: MRT4577_103805C.1.pep
MLQLVHVRVEANKDEGDAEITQLFISYRGYCARKGMHLKELILDGTDISKAIIDYATSNAITDIVVGASTKNTFIRRFRNPDVPTCLMKMAPDYCTVHVIHKAKAIQVKAAKAPAPFATLPPKQHSQPNIESDASRASRGDWKKTPPTSSPLASRNSVDPLSAYA

SEQ ID NO: 188836 - protein, 64 aa, Zea mays
  Clone ID: MRT4577_103806C.1.pep
GKTELDSFVNGVSTVYSCFFLKKMQCHEQTKNYMLDCEAYSHLARYCYVNKMYMPVCMHITIFM

SEQ ID NO: 188837 - protein, 51 aa, Zea mays
  Clone ID: MRT4577_103807C.1.pep
LGDDLNLSRTHHNILHAPHPVVAVLDLEGCEYSKGELTYVHLSTSCGESCA

SEQ ID NO: 188838 - protein, 81 aa, Zea mays
  Clone ID: MRT4577_103808C.1.pep
VATAEARAADSTPPPPSGTPRPAPPQPAPPPQQPAPPQPAPPPQQPAPSPSGSSSPAPSDARAKGRKESREGVNSAPLDLA

SEQ ID NO: 188839 - protein, 40 aa, Zea mays
  Clone ID: MRT4577_103809C.1.pep
LINYRRHMKINVPTSFFKQECNKHCTQMCVILVTFQTFNP

SEQ ID NO: 188840 - protein, 54 aa, Zea mays
  Clone ID: MRT4577_10380C.1.pep
ENTPVAMPQIFSSALSRQPHKMIVILLSLLYTIAHDTLNFSFQPAAAMPTPRPL

SEQ ID NO: 188841 - protein, 59 aa, Zea mays
  Clone ID: MRT4577_103810C.1.pep
IADSSFKEQDSIDLTLDYANTIALSIIKQIIEDKITPINVDISKVASKYHLYTHADVES

SEQ ID NO: 188842 - protein, 79 aa, Zea mays
  Clone ID: MRT4577_103811C.1.pep
LASELLDLNFSPCGLIKYTQIFLLSSQIAFASQLFPIHMDRLTASVCSAPNCAEAMGSCSKDSLTVLLSKLFLIFSLTF

SEQ ID NO: 188843 - protein, 91 aa, Zea mays
  unsure (1)..(91): unsure at all Xaa locations
  Clone ID: MRT4577_103812C.1.pep
REKIFFASQYKFHADTNKLYWKXIFDIIPHEIATIXRSGGRKXVKMPSITFVQCPKPXKPTYLSQMRHILVMLKHAPSSHMMQPSLTSPCF

SEQ ID NO: 188844 - protein, 70 aa, Zea mays
  Clone ID: MRT4577_103813C.1.pep
EASSVVPSSPSVCWASLTLFSQAWTGDGVLFTLRFLGCFSPMLSRSNLDCPAFYVCGGQVIHPFLCIVVA

SEQ ID NO: 188845 - protein, 108 aa, Zea mays
  Clone ID: MRT4577_103814C.1.pep
EKKTEKLKEKGKQPSWAKTVGFGPLDSHVRLGPFLVPAHLPPSSVQPNCTHAGAIYRRGPLDSPSAQLLSTHLRPLPLGPALAYPSFFLPTDYRAWRAWPSRSPCRFD

SEQ ID NO: 188846 - protein, 174 aa, Zea mays
  Clone ID: MRT4577_103815C.1.pep
HPKKPKRGLKVTREFFFPPWGWAPPPTQFFKTPPHSFVGVKVPQKKPKPAPPFFLNPRGGNFHKGGFWFQIFFPGPTPEAVIPKVGPEILPGKFFLEGNPHRPFFFFPGPPVCKGKTNQGAPPNPWPKKWLLFSKKKGGTLKKGGAPPRFGKKKNLLDWKPPLLKNPGISGVFL

SEQ ID NO: 188847 - protein, 52 aa, Zea mays
  Clone ID: MRT4577_103816C.1.pep
IQESKMVFSLLFSTTNVPKHVFAFLKRIYNGLLILNKRPGPVQYQYLYCCDT

SEQ ID NO: 188848 - protein, 90 aa, Zea mays
  unsure (1)..(90): unsure at all Xaa locations
  Clone ID: MRT4577_103817C.1.pep
QRSRQPSDARCSKRAKLSILRLVYCMVIACGAVLLXMPAVIRHSVEMCVHVHVYLLIRCPLWNANYTYGSSIYRREDYLLVHASRWRYLT

SEQ ID NO: 188849 - protein, 60 aa, Zea mays
  Clone ID: MRT4577_103818C.1.pep
SPIRQFPLHLKALPLPHLNPGRWLRRCRSSARCISPTTRRLRASSWRSTGRCCKKTSQTT

SEQ ID NO: 188850 - protein, 152 aa, Zea mays
  Clone ID: MRT4577_103819C.1.pep
FQKLHQEHKHNQALLKQLRALVGGVQQEAKDISFLTQSPAAQALNVAGNPDQQLLTTNTKFAVSQLPALQSLLADLRPKLEALKSSRGNVAVTSAKEEIKEERRGYIEQRTRSHLERNGINPAENSSLLFAKRVDEEEVQALEKVASIFDQT

SEQ ID NO: 188851 - protein, 86 aa, Zea mays
  Clone ID: MRT4577_10381C.1.pep
LWNVMLLFSCLLDCTSLEINSCSELRRHGSKSDLRLEPPFLVAMFLSVLISEHGMVLLSSSSVVFGEQPVHGETRQTGELGSDSSG

SEQ ID NO: 188852 - protein, 120 aa, Zea mays
  Clone ID: MRT4577_103820C.1.pep
PNAWPSEYGFCASGAGRLLPGACLVSNNTVRDACHGEGRLWYTRGCPSRYGWLALLGLALYIIFFSPGMGTVPWIVNSETKGLPIEEVEKMLERRELRLRFWAPRHTQDNGKESGKNAGV

SEQ ID NO: 188853 - protein, 65 aa, Zea mays
  unsure (1)..(65): unsure at all Xaa locations
  Clone ID: MRT4577_103821C.1.pep
MLVSCVPAHLIPNGLNNMRNHGFGWIRRLVAMVALLSDDFELVALNVPFIRTDYMTYMFXFDTAH

SEQ ID NO: 188854 - protein, 176 aa, Zea mays
  Clone ID: MRT4577_103822C.1.pep
ECGFCASGAGRLLPGACLVSNNTVRDACHGEGRLWYTRGCPSRYGWLALLGLALYIFFFSPGMGTVPWIVNSEIYPLRYPGVCGGAAATANWVSNLAVAQSFLSLTEAIGTSWTFLIFGGLSVAALAFVLVCVPETKGLPIEEVEKMLERRELRLRFWAPRHTQDNGKESGKNAGV

SEQ ID NO: 188855 - protein, 381 aa, Zea mays
  Clone ID: MRT4577_103823C.1.pep
MSLPIALVVGIAGGATLLAVAAVLLALWCAARMRARRNRNSDTGSSDPSTLVEWGKGGRSSLAPDLEHQVARQFSLEDLVQATKNFSDTNIIGAGSFGLVYMGLLLDGTVVAIKRRVGAATQVFADEVRLLSEIRHRNIVTLIGYCQEGGLQMLVYEYLPNGSVCGHLYDNRKGSATRLEFKQRLSIAIGAAKGLNHLHSLDPPLIHKDFKTNNVLVDENFIAKVADAGLVRLIRGSDDAGPSRGFSNSVYQDPEVQSMTQFSESSDVYSFGVFLLELITGREAASLIPTESREYLAHWMEAHFSSNELIDPRLAGNFTAEGMKELVGLAFQCLNPSSRRRPRMRLVATELDRILETEMSMTTFMGDGTTIVTLGSQLFSS

SEQ ID NO: 188856 - protein, 70 aa, Zea mays
  Clone ID: MRT4577_103824C.1.pep
SRSMSQENGLSMAPLKMVPCNTSTWSYQIARYDTKYRNKILIHFLNSSPLSASKHKQINYNIITNKQTKC

SEQ ID NO: 188857 - protein, 82 aa, Zea mays
  Clone ID: MRT4577_103825C.1.pep
MEAHFSSNELIDPRLAGNFTAEGMKELVGLAFQCLNPSSRRRPRMRLVATELDRILETEMSMTTFMGDGTTIVTLGSQLFSS

SEQ ID NO: 188858 - protein, 131 aa, Zea mays
  unsure (1)..(131): unsure at all Xaa locations
  Clone ID: MRT4577_103826C.1.pep
WRRGRPPVSPTTXPPRGEHPPQRGHPRHPPPXPTSSRPPSSPRXTRTRTPQXSPARSPPPRQAPASSAAPSDSPNSPPPTPQTPSPRPGPLRCRAAPASPPCSRPPSSSPPRLRHLPRLGRTVSMPGRSSC

SEQ ID NO: 188859 - protein, 89 aa, Zea mays
  Clone ID: MRT4577_103827C.1.pep
CRVRAEFVGILTPHSELDFLMLFFTKAKKAYKKTIKPELSESEGSFTPSGFLLRAPNHIPIVTEVHQQGTMHVCLVAESWRRQGVQTIR

SEQ ID NO: 188860 - protein, 40 aa, Zea mays
  unsure (1)..(40): unsure at all Xaa locations
  Clone ID: MRT4577_103828C.1.pep
PIVHAKLLSTCSFVRAWNFGHLHEVLLVLRXRHLHLEQFF

SEQ ID NO: 188861 - protein, 179 aa, Zea mays
  unsure (1)..(179): unsure at all Xaa locations
  Clone ID: MRT4577_103829C.1.pep
ILALLXLLALFVSVTNEFIIPQCSHAPRAYIHSFLPXPVSSMGLHHLAVQAYRXLTSACGECVXQQAINQLHQQSLAHLTIRTIAAHQQLQFLTALSQLDVVNPVAYLLQQLLASNPLALANVAAYQQQHHVQQFLPALSQLAMVKPAASXQQQHLLSSSPLAVGNAPTYLHQQLMQQS

SEQ ID NO: 188862 - protein, 78 aa, Zea mays
  Clone ID: MRT4577_10382C.1.pep
MLRTYHSKVREKTAYTPGDDNATCNIRAPLLPSQPSILNACIQRGVGHIFAAFDTYTAKSDHYTPSWPNNIWSHDYHS

SEQ ID NO: 188863 - protein, 115 aa, Zea mays
  Clone ID: MRT4577_103830C.1.pep
TSTRMDGSARDSGQCTYPIPTRHALLYCILTSLNTLVHHDILSTGRYDIVLPWEMHITIGLMTHASTFSEYLKRMGEISLELLPVLLLLACIEERNLVSMNKNERQKLILERKNL

SEQ ID NO: 188864 - protein, 82 aa, Zea mays
  unsure (1)..(82): unsure at all Xaa locations
  Clone ID: MRT4577_103831C.1.pep
CLLPELYNPHVRYIAALSVCISCSXSGLNESICLLNPLTSDLLDFLRQDALIFMTIVMIHTNXSYDPRIGAFMHQLENIILL

SEQ ID NO: 188865 - protein, 100 aa, Zea mays
  Clone ID: MRT4577_103832C.1.pep
NGNPVLERSNRVPPIRLAPCPISPLLFTPTWKRTSQQLTPPPTPTFSRSKPSWTPACRRSNPQCTPSICGVLAWIHRSRGSTRRWISSAPKCPRWGFYGT

SEQ ID NO: 188866 - protein, 353 aa, Zea mays
  Clone ID: MRT4577_103833C.1.pep
MVKICCIGAGYVGGPTMAVIALKCPDIEVVVVDISKPRIEAWNSDTLPIYEPGLDDVVKQCRGRNLFFSTDVEKHVAEADIIFVSVNTPTKTRGLGAGKAADLTYWESAARMIADVSKSDKIVVEKSTVPVKTAEAIEKILTHNSKGINYQILSNPEFLAEGTAIEDLFKPDRVLIGGRETPEGRKAVQALKDVYAHWVPEDRILTTNLWSAELSKLAANAFLAQRISSVNAISALCEATGANVTEVAYAVGKDTRIGPKFLNASVGFGGSCFQKDILNLVYICECNGLPEVANYWKQVIKINDYQKSRFVNRVVSSMFNTVAGKKIAVLGFAFKKDTGDTRETPAIDVCKGC

SEQ ID NO: 188867 - protein, 428 aa, Zea mays
  Clone ID: MRT4577_103834C.1.pep
MVKICCIGAGYVGGPTMAVIALKCPDIEVVVVDISKPRIEAWNSDTLPIYEPGLDDVVKQCRGRNLFFSTDVEKHVAEADIIFVSVNTPTKTRGLGAGKAADLTYWESAARMIADVSKSDKIVVEKSTVPVKTAEAIEKILTHNSKGINYQILTTNLWSAELSKLAANAFLAQRISSVNAISALCEATGANVTEVAYAVGKDTRIGPKFLNASVGFGGSCFQKDILNLVYICECNGLPEVANYWKQVIKINDYQKSRFVNRVVSSMFNTVAGKKIAVLGFAFKKDTGDTRETPAIDVCKGLLGDKAQISIYDPQVTEDQIQRDLAMNKFDWDHPMHLQPTSPTAVKQVSCVWDAYEATKGAHGLCILTEWDEFKTLDYQKIFDNMQKPAFVFDGRNIVDSEKLREIGFIVYSIGKPLDAWLKDMPAVA

SEQ ID NO: 188868 - protein, 75 aa, Zea mays
  Clone ID: MRT4577_103835C.1.pep
LSGEHLAGRLSALESIGGGPDPGELSVFCRITLSARRKGLLPNEPPNSNCSRSMFQCHGLSFWQHGHRSMCRRTP

SEQ ID NO: 188869 - protein, 63 aa, Zea mays
  Clone ID: MRT4577_103836C.1.pep
KLWKNSFPVKKTNSHGSLWVKTKTPVKLEVKGVLKKKKKKKKKKKKKKKKHTKKKKKKKKKKK

SEQ ID NO: 188870 - protein, 235 aa, Zea mays
  unsure (1)..(235): unsure at all Xaa locations
  Clone ID: MRT4577_103837C.1.pep
MVKICCIGAGYVGGPTMAVIALKCPDIEVVVVDISKPRIEAWNSDTLPIYEPGLDDVVKQCRGRNLFFSTDVEKHVAEADIIFVSVNTPTKTRGLGAGKAADLTYWESAARMIADVSKSDKIVVEKSTVPVKTAEAIEKILTHNSKGINYQILSNPEFLAEGTAIEDLFKPDRVLIGGXETPEGRKAVQALKDVYAHXVPEDRILTTNLWSAELSKLANALGTEISSVMPSPLSA

SEQ ID NO: 188871 - protein, 59 aa, Zea mays
  unsure (1)..(59): unsure at all Xaa locations
  Clone ID: MRT4577_103838C.1.pep
YHPINGLTXAGTDDLILIHYQESFCYQLALELLVTAQCPLDDAYLMNSEPRILMIYLAL

SEQ ID NO: 188872 - protein, 57 aa, Zea mays
  Clone ID: MRT4577_103839C.1.pep
NFRVDPRVRSTVLLNVVLDGSLLLWVNRMATVMVGRGVSFIMVAGITLPFLCLYLLS

SEQ ID NO: 188873 - protein, 136 aa, Zea mays
  unsure (1)..(136): unsure at all Xaa locations
  Clone ID: MRT4577_10383C.1.pep
IAGPRCQSILFPRASDSVELGAPARDAGAVAGTRNRPWEAIKKWAKDQRPSSPPNLAVVSTKGEEKKCVGRRCCGIRLGTVSGSKFCPGGGRRLVEMXSGNNTARPAVKLKEXLAGGSGPPRNHVLPGAGFRAENF

SEQ ID NO: 188874 - protein, 91 aa, Zea mays
  Clone ID: MRT4577_103840C.1.pep
RHNMNIKEGKAKSNDCSCKFGISVVYYYSILLWLCFCRLLSVDCCGSAFTEMNLGCLHRCVQFGSQANLSRARAEQHFRSSLKNRAEPSLT

SEQ ID NO: 188875 - protein, 624 aa, Zea mays
  Clone ID: MRT4577_103841C.1.pep
GHSEDEGPQHYPRIPKRASLLSVPLGKPPYFDGKYYCMWSDKMRHHLTSLHESIWDIVEFGAQAPQVGDKDYDSDEATQIRHFNSQATSILLASLCREEYNKVQGLKNAKESWDVLKTAHEGDEVTKITKRETIEGELDRFVLNKGEEPQAMYNRLRTIVNQVRNLRSTKWDDHKMVKVILRSLVFRNPTQVQLIRGDPRYKQMSLEEVIGKFVSFELMIKDSKHIVNLKQGATSTPEVQPVAFKAIEEKKEESTPSRLLIDASKLDNEEMALIIKSFRQILKQRKGKDYKPRSKRVCYRCGKFGHFTAKCPYISDRDRDDDKKGKKKMEKKKYYKKKGGEAHMGQEWDSDESSTDEDATNIAINKGLLFPNVGHKCLMAKDGIKKKLHSRDTPKYTTFDDEGSSSENEDDLTSLFANLTKDQNKKINELIESINEKDDLLEIQEDLLVKENKKFVKLKNAYALEVEKCENLSKELNMCNDSISCLRIENDNLTAKFEELNVCKPSTSTVEHVTICTRCKNDNIEAIDDHLAIIKEQNDHIAKLNAKIVEHELENEKFKFVRSMLYNGRRPGIKDGIGFQRGSQSNTKLNAPKNKLSNFVKGKAPMVQDREGYILYPENYPEHK

SEQ ID NO: 188876 - protein, 53 aa, Zea mays
  unsure (1)..(53): unsure at all Xaa locations
  Clone ID: MRT4577_103842C.1.pep
GXXRPXTSSXSXXVHXSWSRKPHWVPTXXVCSAAHAPVXDVRKVXCVXIXLCV

SEQ ID NO: 188877 - protein, 68 aa, Zea mays
  Clone ID: MRT4577_103843C.1.pep
PPISFAALKPEFFFCPLAEKKKLFLQGLGGLPTLIYSYPIPPLLSMKTLKFSPQKKWAGNKSPDAVSL

SEQ ID NO: 188878 - protein, 122 aa, Zea mays
  Clone ID: MRT4577_103844C.1.pep
HATMRSLQAVLVAVLVLLAVAATTDAAWAPIPDRDLNGMVVQQAGRFAVLVHDITRRTTLVFVKVERGEMERPAGGGLGTNYRLVVTAARAPGGSRGRYECVVWGVPGSRTSTWKLLGFKAL

SEQ ID NO: 188879 - protein, 211 aa, Zea mays
  unsure (1)..(211): unsure at all Xaa locations
  Clone ID: MRT4577_103845C.1.pep
TSSLDGHRGSSVGGPLPSPVFTPAKPALPPCRALLEVCRLLPCLFVPVFACQAAVSSAVGMLLLPPVRLRAQGLVSPGXSPFASAAPRILVDMKKRGLSLKQCISKANQXDIVSSKLQSELTNLESRHDCPHMNGTLSLGLSSARAAVXFLSKWTKVDLGLHFLGYARVYSGQFQNLNLWNKGLGLLLFWMGLQLQTSIASFQLSPCTYLM

SEQ ID NO: 188880 - protein, 75 aa, Zea mays
  unsure (1)..(75): unsure at all Xaa locations
  Clone ID: MRT4577_103846C.1.pep
MASLDSESRCFVDRLSLSTDYQLLHNXALSTYGEVLKYMITLDHETQRSRGFCFLTFSTVETMRNAIEGMNGKEL

SEQ ID NO: 188881 - protein, 82 aa, Zea mays
  Clone ID: MRT4577_103847C.1.pep
LTRGGVLMFLKGFGLNGWRLWKAQTGGCIKRGGPINLKGGEIYNFVFGKNQTFFIFWGKAFLRGFLFYPLFFTNGFSYTFGS

SEQ ID NO: 188882 - protein, 105 aa, Zea mays
  Clone ID: MRT4577_103848C.1.pep
SGWPSALASPIALISSASSSLAESKAGYITRSVSFDRRGETGKPGLSVGSIAIIPNSCRHKRAGGFSFGRNELGFTIILAGFVHPITARRSVVRHGRRAQASRGL

SEQ ID NO: 188883 - protein, 211 aa, Zea mays
  Clone ID: MRT4577_103849C.1.pep
MAPLQSCAGDGTRFNGGAAAAQGILERMHKYLLLLAILAATVTYNAGLSPPGGVWADDADGHLAGDPVLQAHYAARYNVFFYCNATAFAASLVIIMLLLSSTFSFHGYRVRALQAAMVLDLLGLMGAFVAGSCRKVRTSAYVVALAAASVAYLVAHLLLHFWVRSNRCPSTRREVSELLNLHRLCHCCCCCGRRDDGAAAQDAPRGTRARV

SEQ ID NO: 188884 - protein, 77 aa, Zea mays
  unsure (1)..(77): unsure at all Xaa locations
  Clone ID: MRT4577_10384C.1.pep
TIFSMNNTTRARKHPSFSYXHNNYSHNTFSRPHPHHTSNTSTNYHPTKNIILSDIFTDKKSKNILFFTYNTHSHFPL

SEQ ID NO: 188885 - protein, 55 aa, Zea mays
  Clone ID: MRT4577_103850C.1.pep
ISIISYYIFLIDLNLHQIILHKQFYRPTLNFFVHKAHLDNINSSYNDLPLSPTNN

SEQ ID NO: 188886 - protein, 78 aa, Zea mays
  Clone ID: MRT4577_103851C.1.pep
PRAGRSSSIRISDVRYVGIRGSSATPVAVNFDCSRSYPCSGISLQDVALTYQNRAAAKSYCRNVQGTALGLVLPPSCL

SEQ ID NO: 188887 - protein, 60 aa, Zea mays
  Clone ID: MRT4577_103852C.1.pep
GTHVPKAVQQLIGTVFIMRVDISHKRVQNCVNHRLPGVMGMVRSPCVVVQTTTKYPSRPQ

SEQ ID NO: 188888 - protein, 91 aa, Zea mays
  Clone ID: MRT4577_103853C.1.pep
APTWRTARPRGQAHHLGPRCLQISRTTTTFLSATAPPTHQSVMNERGRKTKVEAQSRLFSPNTHAVYGSRAAPNKSPPPCILYKPPRPPSH

SEQ ID NO: 188889 - protein, 46 aa, Zea mays
  Clone ID: MRT4577_103854C.1.pep
GLAFGIRERVFPRVARNHQEGRGVLNCDSPSFNFLPGQSKTELYPP

SEQ ID NO: 188890 - protein, 87 aa, Zea mays
  Clone ID: MRT4577_103855C.1.pep
LKVDTCSSLHCSVPCILEKAEHHRPSSLINSSTFLSQNWTLPTIQNCISSQHQDFDPKRQGEQKHPFTKLDPGCSLPGRAPRRIRAR

SEQ ID NO: 188891 - protein, 31 aa, Zea mays
  Clone ID: MRT4577_103856C.1.pep
HSETGKLVKWIIACAVALIRAEAIRHSSMCG

SEQ ID NO: 188892 - protein, 73 aa, Zea mays
  Clone ID: MRT4577_103857C.1.pep
MDHLLNGALTEAKANDLNLVLVCTWPTPHAYCHDPLAARADRLWHLILIGHLHRIWDYCTITLAYYNQRITGT

SEQ ID NO: 188893 - protein, 103 aa, Zea mays
  Clone ID: MRT4577_103858C.1.pep
CPWPVPSGQQLDTLYAEYPSMYSGNSGLCGHTIGKICSGGNSSRQHVHEHGFELVSFYFGLSLGFILGLWLVFCVLLFKKAWRVAYCCLIDKIYDQMYHAHAW

SEQ ID NO: 188894 - protein, 52 aa, Zea mays
  Clone ID: MRT4577_103859C.1.pep
SSVHIKLRQRWRHPAPPLWNKKDDWGGNTGQHGNRGHSGHKGGLSLHLLTLT

SEQ ID NO: 188895 - protein, 148 aa, Zea mays
  Clone ID: MRT4577_10385C.1.pep
KGNKKKKGGRKEELLKKTDKSPSGKKREREKPGIPGANTGFYIWPPPPLARGHRLVSIRLGFPGGKGQKALKPNDALGGNPALGAKSSGARASASASARFIRKGGILDAPRRRPSTLQSSPGEAPGANARSRWSSKRAASSSSEDPDL

SEQ ID NO: 188896 - protein, 61 aa, Zea mays
  Clone ID: MRT4577_103860C.1.pep
ETTPASTLFSYGHPKGFPTPMLSSLFGPTRCGVVFTPRKVREVYLSSTPIRNVYRFLISFY

SEQ ID NO: 188897 - protein, 140 aa, Zea mays
  unsure (1)..(140): unsure at all Xaa locations
  Clone ID: MRT4577_103861C.1.pep
MSNSVRVRPRGNNSPMSLNLPPTATATCCYTAEANNLYIISATAISGPLSRLPSACVDDMHMWTVKKGKPDLRHKAMPSGIGMKRKPCRRKDAGYMYSEYYAGVICEPKGXMKGSAITVPIVKECADLXPKIATALHAIV

SEQ ID NO: 188898 - protein, 94 aa, Zea mays
  Clone ID: MRT4577_103862C.1.pep
MDGQPGAAALSSPGPRVKASLVLGSESFAINSEFGTLSEQLAAVKEKSMAVLKEHIARHNAPNEVPDEAAEGESDSEGEAPLVDNPPKKPKKQK

SEQ ID NO: 188899 - protein, 54 aa, Zea mays
  Clone ID: MRT4577_103863C.1.pep
MCYIRTLILPHCSQAPIVILLTPYLSPTVTSVCEIPILQPYRIQQDVAPDILPL

SEQ ID NO: 188900 - protein, 94 aa, Zea mays
  Clone ID: MRT4577_103864C.1.pep
MDGQPGAAASSSPGRRVKASLVLGSESFTINSESGTLSEQLATVKEKSMAVLKEHIARHNAPNEVPDEVAEGESGIEDEAALVDNPPQKPKKQK

SEQ ID NO: 188901 - protein, 94 aa, Zea mays
  Clone ID: MRT4577_103865C.1.pep
MDGQPGAAASSSPGRRVKASLVLGSESFTINSESGTLSEQLATVKEKSMAVLKEHIARHNAPNEVPDEAAEGESDSEDEAALVDNPPKKPKKQK

SEQ ID NO: 188902 - protein, 200 aa, Zea mays
  Clone ID: MRT4577_103866C.1.pep
MAATKVCNVRFEGNVITTTVTASGAAVESWLDEILSVHRRRLHKLVVGLDVEWRPSFSRAYSKTAIVQLCVGRRCLIFQLLHADYVPNTLDEFLSDPDYTFVGVGVAADVERLENDYDLEVANAEDLAELAAKEMGRPDLRNAGLQGIARAVMDAHVEKPQWVRTGPWDASSLSDEQIEYATIDAFVSFEVGRMLLSGYY

SEQ ID NO: 188903 - protein, 49 aa, Zea mays
  Clone ID: MRT4577_103867C.1.pep
QLNDINFRVALHFLVVQTSDGKITLTTKMMGKLPLNYLGGGLLTFQLPF

SEQ ID NO: 188904 - protein, 76 aa, Zea mays
  Clone ID: MRT4577_103868C.1.pep
GAATPIKVSNWTRKFSFTVQNRKIPAVVFFWPGYFALQCDYIIHRSYFYQKKNAAFLHLKRRYIFNIIWLKVERTP

SEQ ID NO: 188905 - protein, 53 aa, Zea mays
  Clone ID: MRT4577_103869C.1.pep
ANWMDGHGNMRLEGDNRSYGEWFELGERMGSVNTGLRGEKILGNLKHRKFVLI

SEQ ID NO: 188906 - protein, 65 aa, Zea mays
  Clone ID: MRT4577_10386C.1.pep
AEDTEVFLYIIVEEQTQLNMRSCLIFGSEMFHYGMQFPQTVILFKKKKKKKKKKKKKKKEKKIKK

SEQ ID NO: 188907 - protein, 92 aa, Zea mays
  unsure (1)..(92): unsure at all Xaa locations
  Clone ID: MRT4577_103870C.1.pep
HALALFFFFFFFXKKKNISIVLKLPGTQLENKAFLGRSESTQRLINTNPRSHRPCNAAPVERLVLVTLGAILTLVKLTTDLLVALLKRSQIL

SEQ ID NO: 188908 - protein, 62 aa, Zea mays
  unsure (1)..(62): unsure at all Xaa locations
  Clone ID: MRT4577_103871C.1.pep
RDPASSPRSRAAAAGXPVQVACEKVVSIDLGTTNSAVAVXEGGKATIGSNSHGARDTPSVVA

SEQ ID NO: 188909 - protein, 204 aa, Zea mays
  Clone ID: MRT4577_103872C.1.pep
MADSGSIVVTEARKQHPLSQIAASGTHRLLLKQWVKEEDLLARRVALREARLDGARKEIAFLYCAFFAFHAASVLLLFLSSSTAGPASACRRSWIPCLVSLLSSLAMLWALRYKSDTEAVLERLLAREREDALLLARCVSELKRKGLHFDLLKEVDALRRAKSLRVEAKGADRPRRWQARDLAVFALFAVACGVLVLTRFLLCN

SEQ ID NO: 188910 - protein, 58 aa, Zea mays
  Clone ID: MRT4577_103873C.1.pep
MGVLSCNVERVGLLYIESHVVSVAVSNEKFRSIVSNTYEWSEYLCLELYLEAYDRTRS

SEQ ID NO: 188911 - protein, 193 aa, Zea mays
  Clone ID: MRT4577_103874C.1.pep
MAAPTDEAAGSGTPGSTDSFLADWRERIILPAVAAGVLGAAFGLLSRHRARLGAARAAVTYAANLAIVAGCYGGARELARDARATTPDDPMNSVVGGLASGAVLGRIQGGHFGAVKYAVTFAAAGTALDYAALKLAPEWHSLKEQLSEKKDWFTLPEWSPIQVLDEEALAKKKAREEKLFAQRALGKLDKEDP

SEQ ID NO: 188912 - protein, 54 aa, Zea mays
  unsure (1)..(54): unsure at all Xaa locations
  Clone ID: MRT4577_103875C.1.pep
SPPGFIFPPXFTXVICXTVFPNGHXASFPVXQTRRQLNKGSMXLSXQIPGFCRP

SEQ ID NO: 188913 - protein, 107 aa, Zea mays
  Clone ID: MRT4577_103876C.1.pep
MIPTAMGAGYRVISALPIQHQDWTGGKEFKCKVNNKGLSAPIVRIISRSKGPAREPQVYVLDPPKEELSKSTLSVTCMVTGFYPEDVAVEWQRNRQTESEDKYISNL

SEQ ID NO: 188914 - protein, 266 aa, Zea mays
  Clone ID: MRT4577_103877C.1.pep
MATYAELYIARILSLHGIPKTIVSDRGPQFVAKFWEALHKSLGTKLLHSSAYRPQTSGQTKRVNQILEDMLRACALDFPQKWDDCLPLAEFSYNNSYQESIKMAPFEALYGRRCRTPLNWSEPVGDYVYLKVSPMKGIYRFGIKGKLAPRYIGHFPVLEQYGPVAYRLQLPETLFAVHNVFHVSQLKKCLRVPDRTIEVTDIALEPDLTYSEHPIRVLDQKDRITRRKTLKFYKIQWNQHSENEATWETQDFLEKNFLGFLASCNL

SEQ ID NO: 188915 - protein, 116 aa, Zea mays
  unsure (1)..(116): unsure at all Xaa locations
  Clone ID: MRT4577_103878C.1.pep
KKKXXRALXTXSEPGAAQLENRAASPPEXXXGEAXSATFFFPXXSYLVCWDFLFFFSXXXPXXPQSTXNXXXXSPLXPKXXXKLXLXLNTXXKXIXNXYLPXXPLXXXISSXIHHT

SEQ ID NO: 188916 - protein, 127 aa, Zea mays
  Clone ID: MRT4577_103879C.1.pep
HLSNVLYLSTVRHTAPFIVACFIHHSLWILYFVRVGLGVMVLEDPGVLMGALGLGVCDVGPEEGELGFEVAGHLHSCSLDGFAAVDMQILRCAVGGDPGLRMLVWWSCVLRSAREEREHNIVMIGAG

SEQ ID NO: 188917 - protein, 69 aa, Zea mays
  Clone ID: MRT4577_10387C.1.pep
TKNNPISISTGRPDESRRHENRLSCAHEQVAKLYVYNIHALTSYVQDTTDRLLLANTPHPTLLFINNQP

SEQ ID NO: 188918 - protein, 567 aa, Zea mays
  unsure (1)..(567): unsure at all Xaa locations
  Clone ID: MRT4577_103880C.1.pep
MPQPTADSSTMVAGEHQQQQQPATARISSSSTSSGRLVTPFWXKYERDARRYWDIFYRRHEDKFFKDRHYLDKEWGKYFKGRDGEKKVVLEVGCGAGNTIYPLLSTYPDIFVHACDFSPRAVNLVKKHKDFKADRINAFVCDIASEQLTENVEPSSADIVTMIFMLSAVAPDKMPIVLENVRSVLKHGGRVLFRDYAFGDPAQERLMSKGQQISENFYVRGDGTRAYYFSNEYLVDLFSKCGLTLEEICVHNKQVENRSLELVMNRNWIQATFTLNSASPQGPNGQHDLLAYEGEDDKVVTDTSKKKSSGEEIDLSEDFCNMFGTSHSLDEVQIIGVKAKGHDFKIRMLRKEYQHTCRSTGLMLWESAQFMCCLLAENPSIVASKRVLELGCGSAGICSMVAASFTPFVLATDGDEESLDLLRQNISSNMEPNLLSRIMVRKLFWGNEDDMKAVRELHGNGVGFDCIIGTDVTYNPDAILPLFKTARGVISEKANEDSVPALILCYIQRRVDEDSILSNATSQGFRLVDKWINGVHESNGTISSWFSGNDVCSAFRHTVLSVLYFEL

SEQ ID NO: 188919 - protein, 127 aa, Zea mays
  Clone ID: MRT4577_103881C.1.pep
PICPEIWSDEPAKTRTKEIASIPCLIPMGIDQDPYFRLLRDNAHRMRFPSPKPALIHSKFLTALQGAGGKMSSSNPNSAIFMTDTAKQIKTKINKHAFSGGQETLELQRELGGNPDVDVSYIYLTYF

SEQ ID NO: 188920 - protein, 92 aa, Zea mays
  Clone ID: MRT4577_103882C.1.pep
PRVRPNRGIKGGKRGGRAPFIGGGRGYSKGGGPESHSNPGGSNGSGCAPPQKRGILGSPPPRNCFRWAPNIRFCSGSSKRKKKILTHPPFSF

SEQ ID NO: 188921 - protein, 149 aa, Zea mays
  unsure (1)..(149): unsure at all Xaa locations
  Clone ID: MRT4577_103883C.1.pep
MIDELKSMPGXVRTGRNVRVRSNKKAVHDTXTITHDGRLHCTXLKKMSVXSIPDIAEVCIFRDDVVITVENPELXASVGXATTWSASSXPHTKNLLDLLPTIITXLGPDNLHDLRRLVKHLLDQASVGSGEQAVWLRWPLGKITVDVRS

SEQ ID NO: 188922 - protein, 76 aa, Zea mays
  Clone ID: MRT4577_103884C.1.pep
IKGNSTVLQVILLDTRYHRDPLLSDGTILGDPQWQWLERELHGPQSEITIIGSSIQVVSNLSATTGPLFYVESWAR

SEQ ID NO: 188923 - protein, 37 aa, Zea mays
  Clone ID: MRT4577_103885C.1.pep
KVVLTLPTRGYTALGSIPQTLHHDSIQCQDALSCDDS

SEQ ID NO: 188924 - protein, 257 aa, Zea mays
  Clone ID: MRT4577_103886C.1.pep
PNLVKLLGYCWEDRELLLVYEFMAKGSLENHLFRRGCAPLSWELRLKIAIGAARGLAFLHASEKQVIYRDFKASNILLDANYNAKLSDFGLAKLGPTGSKSHITTRVMGTYGYAAPEYVATGHLYVKSDVYGFGVVMLEMLSGQRALDPNRPNGQLSLADWAKPFLADRRRLARLMDPRFEGQYNSKQAFQAAQLTLNCLAGEPRSRPSMKEVVETLEQIESVKSRAREARGGSSRDRHHGRAGAAHQRSPRAGGEP

SEQ ID NO: 188925 - protein, 66 aa, Zea mays
  Clone ID: MRT4577_103887C.1.pep
PICTSYSKPLSQCCVHTGLSPSVIVIEPSGWFGLAPCGYSRVPVILCSSVRSVYIFYYLCPPSSII

SEQ ID NO: 188926 - protein, 80 aa, Zea mays
  Clone ID: MRT4577_103888C.1.pep
PLILRHSICPLPFAPPQCPTLQPALPKHAQHVLPLSYHLPVHMHHHHITTLHSSSSLLHHTLLLLIPLPTLQPQFLPPLL

SEQ ID NO: 188927 - protein, 48 aa, Zea mays
  Clone ID: MRT4577_103889C.1.pep
FVSGRPVFWVVVPLLVGYHGACWRLCPRVLSRGRSGCHRAAWVTPGIP

SEQ ID NO: 188928 - protein, 81 aa, Zea mays
  unsure (1)..(81): unsure at all Xaa locations
  Clone ID: MRT4577_10388C.1.pep
MADQANQPTDLHKLGGQNHLRSNITEGEPDQNKCPSXTQHKKGXATRNYKTQSQSPPHKPDTEDINDPEKQTPHRATAPAD

SEQ ID NO: 188929 - protein, 72 aa, Zea mays
  Clone ID: MRT4577_103890C.1.pep
STHHSDTYIRPHLSSKPSTPQRRRLPPLKHRPVAKLRRRMQADAHTLRDLTYSAEVTTRQNPLPKPKWMNET

SEQ ID NO: 188930 - protein, 114 aa, Zea mays
  Clone ID: MRT4577_103891C.1.pep
QFLYPPVQNHAVNMQLLMFERRCHLEYPPRRDMTLGTSFTERWVYAVPGREGKSGSRHRNRHPGNRAAHWRYPRETRLSAFFVTLTLRCNDVIYEGDCRNRFRRRHRRMTFGST

SEQ ID NO: 188931 - protein, 85 aa, Zea mays
  Clone ID: MRT4577_103892C.1.pep
AGAAYDSLLHAFAAFYSLYSSIMSSSTAVDMSCPRETLWSLKSATFPFTMRNATTRCILFRPFSMASMYFKIALAPNLEFCPPVP

SEQ ID NO: 188932 - protein, 56 aa, Zea mays
  Clone ID: MRT4577_103893C.1.pep
SIGRKKTAVAVANTKPGRRQIKVNSVPIEHIQPEMNRLKAFEPIQQAERTRIKDID

SEQ ID NO: 188933 - protein, 981 aa, Zea mays
  Clone ID: MRT4577_103894C.1.pep
MDDSLYDEFGNYIGPELADSDADDDSDAAGASPSSTASRSPSPAARSPSGSPSRPAALMDVDEDEGDPSQQAVVLAEDKKYYPTAEEVYGPGVEALVMDEDEQPLEMPIIAPPRVVKFEVGTRAAATSTYASTDFLLGLAGNPALVRNVTLVGHLQHGKTVFMDMLVEQTHEVDTFDSEGERHVRFTDTRVDEQERQVSIKAVPMSLVLEGGNGKSYLCNIMDTPGHVNFSDEMTAALRLADGAVLIVDAAEGVMVNTERAIRHAIQERLPIVVVINKVDRLITELKLPPNDAYFKLRHTLEAINDLISSCSTTVGGTQLVDPIAGNVCFASGAAGWSFTLQSFAHLYLKIHGVQFDHEKFASRLWGDLYFHPDSRTFKKKPPKEGANRSFVEFILEPLYKIYSLVVGEQKGNVESKLAELGVTLSNAAYKLNVRPLLRLACRSIFGTGTGFTDMLVKHIPSVKDAAARKIDHIYTGPQDSSIVDAMKKCDPNGPLMVNVTKLYPKSDCSVFDVFGRVYSGTIQTGQTVRVLGEGYSPDDEEDMTVKEVTKLWVYQARYRVAISKAPAGSWVLIEGVDASIMKTATICPMNIDEDVYIFRPLRFNTLSVVKIAAEPLNPSELPKMVEGLRKISKSYPLAITKVEESGEHTILGTGELYLDSIMKDLRELYSEVEVKVADPVVTFCETVVDTSSMKCFAETPNKRNKITMLAEPLEKGLAEDIENGLVSLDSRQKEITDFFRQRYQWDVLAARSIWAFGPDKQGPNILLDDTLSIEVDKNLLNAVKDSIVQGFQWGAREGPLCDEPIRNVKFKILNANIAPEPLHRGGGQIIPTARRVVYSAFLMATPRLMEPVYYVEIQTPIDCVSAIYTVLSRRRGHVTADVPKPGTPIYIVKAFLPVIESFGFETDLRYHTQGQAFCLSVFDHWAIVPGDPLDKSIVLRPLEPAPMQHLAREFMVKTRRRKVRDIVDLWQPYIRNFYRS

SEQ ID NO: 188934 - protein, 995 aa, Zea mays
  Clone ID: MRT4577_103895C.1.pep
MDDSLYDEFGNYIGPELADSDADDDSDAAGASPSSTASRSPSPAARSPSGSPSRPAALMDVDEDEGDPSQQAVVLAEDKKYYPTAEEVYGPGVEALVMDEDEQPLEMPIIAPPRVVKFEVGTRAAATSTYASTDFLLGLAGNPALVRNVTLVGHLQHGKTVFMDMLVEQTHEVDTFDSEGERHVRFTDTRVDEQERQVSIKAVPMSLVLEGGNGKSYLCNIMDTPGHVNFSDEMTAALRLADGAVLIVDAAEGVMVNTERAIRHAIQERLPIVVVINKVDRLITELKLPPNDAYFKLRHTLEAINDLISSCSTTVGGTQLVDPIAGNVCFASGAAGWSFTLQSFAHLYLKIHGVQFDHEKFASRLWGDLYFHPDSRTFKKKPPKEGANRSFVEFILEPLYKIYSLVVGEQKGNVESKLAELGVTLSNAAYKLNVRPLLRLACRSIFGTGTGFTDMLVKHIPSVKDAAARKIDHIYTGPQDSSIVDAMKKCDPNGPLMVNVTKLYPKSDCSVFDVFGRVYSGTIQTGQTVRVLGEGYSPDDEEDMTVKEVTKLWVYQARYRVAISKAPAGSWVLIEGVDASIMKTATICPMNIDEDVYIFRPLRFNTLSVVKIAAEPLNPSELPKMVEGLRKISKSYPLAITKVEESGEHTILGTGELYLDSIMKDLRELYSEVEVKVADPVVTFCETVVDTSSMKCFAETPNKRNKITMLAEPLEKGLAEDIENGLVSLDSRQKEITDFFRQRYQWDVLAARSIWAFGPDKQGPNILLDDTLSIEVDKNLLNAVKDSIVQGFQWGAREGPLCDEPIRNVKFKILNANIAPEPLHRGGGQIIPTARRVVYSAFLMATPRLMEPVYYVEIQTPIDCVSAIYTVLSRRRGHVTADVPKPGTPIYIVKAFLPVIESFGFETDLRYHTQGQAFCLSVFDHWAIVPGDPLDKSIVLRPLEPAPMQHLAREFMVKTRRRKGMSEDVSINKFFDEAMMNELAQQAADIHLQMM

SEQ ID NO: 188935 - protein, 81 aa, Zea mays
  Clone ID: MRT4577_103896C.1.pep
HQHNRLPCPKQGHAQYGPWLIIADGDPVASAFSCATNALLIVARHTSCHRLSAEVGAMICHRSVCIQSPVPACFCRWGCLL

SEQ ID NO: 188936 - protein, 115 aa, Zea mays
  Clone ID: MRT4577_103897C.1.pep
QSGHPQVRFVGGPASQVSGFSPCKQVLAWPGNQGTVRAKVTDHLVAQDRTHRKTYGCIALESVRCKKPPPHKGRGQIFWWGGGGDLFVKNCGGIHCSVGQTGNNYLVLVAKKLNE

SEQ ID NO: 188937 - protein, 64 aa, Zea mays
  Clone ID: MRT4577_103898C.1.pep
CTILISKILIVFPRAPLIHLIFYNCPKNPKSNFTRELMNLDIQQKFVLLFFWIFLQFLASLLIS

SEQ ID NO: 188938 - protein, 102 aa, Zea mays
  Clone ID: MRT4577_103899C.1.pep
GSELPSSPRIPPRKRERSPLPFSAPPPRADLPPPARPVWSHIYLTKCRRSAASELTMPTPQPWPSLPSSAHTLRHASLTSSQPRPELCNTHTLPIYHPALPD

SEQ ID NO: 188939 - protein, 51 aa, Zea mays
  Clone ID: MRT4577_10389C.1.pep
NKITSQLTTPHTRFYKNHDDHGFKHNIEHLTSVTYALHYVHHLALYANHIL

SEQ ID NO: 188940 - protein, 80 aa, Zea mays
  Clone ID: MRT4577_1038C.1.pep
SKKKKKKKKNEKKKKKNNKKKKKKKKKKKKKKKKKKKRGGRPRGPKLTTPGRQRQSPSKGPPKTKPRAAVHQPRDGKNPG

SEQ ID NO: 188941 - protein, 66 aa, Zea mays
  Clone ID: MRT4577_103900C.1.pep
VATGSLPRHYKTSVHYHRSHNPSSLTAIPSQPSFHSITVSSHDSLATSLDTTPRQQLVTHSLTGCC

SEQ ID NO: 188942 - protein, 547 aa, Zea mays
  Clone ID: MRT4577_103901C.1.pep
FSHYPFAVLQLGYNQLTGSIPPQLGNLNKLTVLAMQSNQLAGAIPATLGELTQLRRLDLSFNSLFGSIPSKIAEVPLLEVFDVRNNTLSGSVPVGLRRLNGGFQYMNNKGLCGAGFSLLELCLSSEDGLKPSKPEPFGPDGTVKTRQVPQSANPDGCSGASCSKSANASQGVLIVAVVAAVIGAAFCGLFAFSWYRRQKQKIGSSLEVSDSRLSTDHFQQKEACRRSASPLISVEYSNSWDPLSAGGAGVGSPGQVVGDSFRFNLEEVECATQYFSDMNLLGKSGFAAATYKGILRDGSVVAVKSLSKTSCKQEESDFLRGLKMLTLLQHDNLVSLRGFCCSRGRGECFLVYDFMVNGCLSRYLDVKDGSSGATVLDWPTRVSIIRGIAKGIEYLHSKKGSKPPVVHQNISADKILLDHHLAPRLSVPGLHKLLADDVVFSALKASAAMGYLAPEYAATGRFTDKSDVFAFGVVVLQVLTGRRDVSQLKVGAAAVSDLGGLVDANLDGAFSRTEAARLAAVAAYCTSETPGQRPTMEAVVQQLSSTQ

SEQ ID NO: 188943 - protein, 112 aa, Zea mays
  unsure (1)..(112): unsure at all Xaa locations
  Clone ID: MRT4577_103902C.1.pep
GADNWYTVTHALDVGTRXGFLTACMAIMVXPDGLAVVIVHDPEIVAYSADNVQXSAVGTLLRVASLFIDVTDGMLGFPDRAHYDPIHVYVGLXEIPKXLIDHIKPGCRLVIP

SEQ ID NO: 188944 - protein, 67 aa, Zea mays
  Clone ID: MRT4577_103903C.1.pep
REDQYYFIHAMTMHTYGLSQIHEEFLARNRKIHKANSLTLAAERPCEVRTHTQFYSIDRGRRAGAHV

SEQ ID NO: 188945 - protein, 40 aa, Zea mays
  Clone ID: MRT4577_103904C.1.pep
DSWSDSWEKKKKKKKKKRKRKKKKKKKKKKKKKKKRARPF

SEQ ID NO: 188946 - protein, 92 aa, Zea mays
  Clone ID: MRT4577_103905C.1.pep
STQASTVSHIMSLLRTHASSRQPHCRIPRPSHTPSLVVSPLLTAFSFDSHGNKRPFNISRARKGLILVGKDGRYIVSTEWSGVQERHQLGQR

SEQ ID NO: 188947 - protein, 62 aa, Zea mays
  Clone ID: MRT4577_103906C.1.pep
KKTLNSQQKLKSQHAWGALGIFHPRPRTLSCHRMPLQWRQLKPTKWPHRYNDESEKSRALPK

SEQ ID NO: 188948 - protein, 91 aa, Zea mays
  Clone ID: MRT4577_103907C.1.pep
GPFFFFFFFFFFFFFFFFFFFFFFFFSSMLVIAHISFQSHNHISHIQVFHSTDHRDSIQFILTIIHNRKKHKFKCKETCNVTQAPKPLHGL

SEQ ID NO: 188949 - protein, 75 aa, Zea mays
  Clone ID: MRT4577_103908C.1.pep
APFVVSLLIFGCKIDSLGYYTDKSVEVTIVSSFNHSCTCQNHLLILFLNLDTLRKIQGMHKAKHLCEFDRSINIH

SEQ ID NO: 188950 - protein, 112 aa, Zea mays
  Clone ID: MRT4577_103909C.1.pep
RDLVSKEGKESYCAKRGLRIKSTTLCTFDLFVRNKTLSSIFNCSEEESSVGILAASDTAKHKTLMKHNSQHCTRFLQKKEREKGSNKVPGAVRRRTSPCHVEHCSRCWVQRG

SEQ ID NO: 188951 - protein, 56 aa, Zea mays
  Clone ID: MRT4577_10390C.1.pep
LLAAMLFGTSPSKVFLSWGRLLQRCTRSMYLCLFSLVRYVILKKPPRYEPNERAIE

SEQ ID NO: 188952 - protein, 42 aa, Zea mays
  unsure (1)..(42): unsure at all Xaa locations
  Clone ID: MRT4577_103910C.1.pep
DLLPHTLVLIIRNLPLLEVLTVXPRXCKPWGQQEAGPYCWQE

SEQ ID NO: 188953 - protein, 244 aa, Zea mays
  Clone ID: MRT4577_103911C.1.pep
LMTAAAPLASDLVAPFKRKFPGVQVEEAYGLTEHSCITLTHASGGGEDVGSAVQVAKKKSVGFILPNLEVKFVDPDTGRSLPKNTPGEICVRSQAVMQGYYRRKEETERTIDAAGWLHTGDVGYIDDDGDVFIVDRIKELIKYKGFQVAPAELEAILLSHPSVEDAAVFGLPDEEAGEVPASCVVRRRGAPESEADMMAYVAGRVASYKKLRLLRFVDAIPKSVSGKILRRQLRDEFGKKTAAA

SEQ ID NO: 188954 - protein, 83 aa, Zea mays
  Clone ID: MRT4577_103912C.1.pep
PSATHLFSPLSPTSPISCTVTFLTLQLSTCNGRVSRSLSPHLHILLSSLPLSQTALLHILLLPFPHFFFLNFTFSHLWLPFLS

SEQ ID NO: 188955 - protein, 134 aa, Zea mays
  unsure (1)..(134): unsure at all Xaa locations
  Clone ID: MRT4577_103913C.1.pep
LMTAAAPLASDLVAPFKRKFPGVQVEETYGLTEHSCITLTHAGGXGRGXTVQVAKKKPVGIILPNLXEVKFVDLDTXRSLPKNTPGXEICVQSQAVTHGYLHXQEKEETERTIDAAGWLHTSDIGYISKYFFVN

SEQ ID NO: 188956 - protein, 637 aa, Zea mays
  unsure (1)..(637): unsure at all Xaa locations
  Clone ID: MRT4577_103914C.1.pep
MSMTQPSSTRSKAMTQPILTCTPPFLTPRKNCVATTNMPSPSSRGPMPRPPVVSSNANAAPFLQLHTHNHHHQQQLRMGDAAIAAVHLHESEEEHIFRSRFPPVAVPDDVTVPEFVLAGAEAYADKTALVEAAPGGRSYTYGELVRDVARFARXALRSIGVRRGHVVVVALPNLAVYPVVSLGIMSAGAVFSGVNPRAVAAEIKKQVEDSEARLVVADAVAYDKVKDAGVPVIGIGDVARLPGAIGWDELLAMADRAGAPVVALEPAQQSDLCALPYSSGTTGVSKGVMLSHRNLVSSLCSSMFAVGQELVGQVVTLGLMPFFHIYGITGICCATLRHKGXTVVVMDRFDLRAFLGALLTHRVMFAPVVPPVMLAMVKSPVADEFDLSGLALRSVMTAAAPLAPDLLAAFERKFPGVQVEEAYGLTEHSCITLTHASGAXGRGXAVQVAKKKSVGFILPNLEVKFVDPDTGRSLPKNTPGEICVRSQAVMQGYYRKKEETERTIDAAGWLHTGDVGYIDDDGDVFIVDRIKELIKYKGFQVAPAELEAILLSHPSVEDAAVFGLPDEEAGEVPASCVVRRRGAPESEADMMAYVAGRVASYKKLRLLRFVDAIPKSVSGKILRRQLRDEFVKKTAAA

SEQ ID NO: 188957 - protein, 93 aa, Zea mays
  Clone ID: MRT4577_103915C.1.pep
FDMVPFGSCQGPAILSCLVSYISSNGPCDWIRPSVPAPWCSIIAVSPLWPYVFDRIIGALLKKKKKKGGQLFSLQYPKVIRFLVMSRARGDMP

SEQ ID NO: 188958 - protein, 95 aa, Zea mays
  Clone ID: MRT4577_103916C.1.pep
RIVRRCTHTHTTHRGCKGCGRDELQRGCNGQGRIQGGIAAVPGFGWWPIKAYRPCPGFVASGGRYRRQGQSMDDVASGRGKKKPSPAKNKLTPSS

SEQ ID NO: 188959 - protein, 75 aa, Zea mays
  Clone ID: MRT4577_103917C.1.pep
KNPDLFISRFGWSSHFVTYHRVNLVRGSCYGIITMDVQYYIRGLPHQLRTWNNQLLKDALLVTNPSSKPPPRCTP

SEQ ID NO: 188960 - protein, 100 aa, Zea mays
  unsure (1)..(100): unsure at all Xaa locations
  Clone ID: MRT4577_103918C.1.pep
KXXLRAHTRFGIIIILSYILNLFSSSHGIASLMSYNLTNSSYYRSGLCIHPCIAPQAYGMHHLQLGLPLVQAMIFHRGTYMKQKNHLHKLEYYGYHILWN

SEQ ID NO: 188961 - protein, 47 aa, Zea mays
  Clone ID: MRT4577_103919C.1.pep
WEYKFMSKYVKVGTVKKSVPVEGGSTASTTEADKAPTTEEKPSEGGG

SEQ ID NO: 188962 - protein, 214 aa, Zea mays
  Clone ID: MRT4577_10391C.1.pep
MKLEVMPKQRVLEAEQREEAMEMSGLDLWKHEKPPRICPLPPSLPPPPPACDEAALVPPLNFAMVDDGIFRSGFPETANFRFLKSLNLRSIVYLCPEPYPETNTEFLEKNGIRLHQFGIEGRKEPFVNIPDDKIREALKVVLDPRNQPLLIHCKRGKHRTGCLVGCLRKLQKWCLSSVFDEYHRFAAAKARITDQRFMELFDVSSLKHLTPSHC

SEQ ID NO: 188963 - protein, 215 aa, Zea mays
  Clone ID: MRT4577_103920C.1.pep
MKFLNASCPRSLLAEGTLYHVVSGLFAAPPPPPPRPREEPEAEPLPPPVQMGEVSEEELSQYDGSDPKKPLLMAIKGQIYDVTQSRMFYGPGGPYALFAGKDASRALAKMSFEPQDLTGDITGLGPFELDALQDWEYKFMSKYVKVGTVTKNVTVEDRSSAASTAPGTSEAATEAEKAPTTTTTEEKPREVPAEAVKEKEAAAAAAAAGEGAQEN

SEQ ID NO: 188964 - protein, 117 aa, Zea mays
  unsure (1)..(117): unsure at all Xaa locations
  Clone ID: MRT4577_103921C.1.pep
SXPPALNMLTQRXDRRERXAKTLPHXPLILSIHIGRSKEXEKKKQRQELVNQSYSXSDGXSAMXSSXGRHTPXRAXSAXAGGSXGSPPASPTGXAXXVVLSXAXIXDRXXEAXPXXC

SEQ ID NO: 188965 - protein, 113 aa, Zea mays
  unsure (1)..(113): unsure at all Xaa locations
  Clone ID: MRT4577_103922C.1.pep
MGAYKCVAALWRRKQSDKMRWTQGVRCWXYRQIRXMVRIXRPTRHYKARCMRCKAKHEYGVYRERWKRPDSKRTVRRVIDYGKPKHQGITQVKFQRDMTSVADERAGRQLGGL

SEQ ID NO: 188966 - protein, 95 aa, Zea mays
  Clone ID: MRT4577_103923C.1.pep
GCSRLCSSFSRKWCCLCSLRSRTWCVRPPGRHESARARHRVLALHHSHPERSARPASARLNRRTRGSARPYPLIRTARGWYSRLARWNGKSPRAE

SEQ ID NO: 188967 - protein, 125 aa, Zea mays
  Clone ID: MRT4577_103924C.1.pep
NLIKQVKKTDLGGRDVHQKNLTNSLCKGHRPTYTNGGIHGLFVNKAFGQLFFKHLKKALLLPKPQKDKSPPANTDNLKGGKKGWIHNGRGEKKLGFFFERKNSTKSSAKKKNLASPFLKPRGGGI

SEQ ID NO: 188968 - protein, 95 aa, Zea mays
  Clone ID: MRT4577_103925C.1.pep
ELNCGSGSFTAFLGMRPWPKLGGAVIMASPIAHRSERFTAEPPLLVTRDHRYIIHGQDQVLQDDAHGGCGDEFVRGLGRRLPVNFGLLDCCLLIM

SEQ ID NO: 188969 - protein, 60 aa, Zea mays
  Clone ID: MRT4577_103926C.1.pep
LSVHRASRLIVCVLTRRINCGSAGKRSVPPVVPLLVTHGCVAGSLIHRDALFRLTPPPLK

SEQ ID NO: 188970 - protein, 123 aa, Zea mays
  Clone ID: MRT4577_103927C.1.pep
PNKHRIYEGANRLQAKGRDRKSNRGGAARRWGLLFATCLIFGARGGPGAPGRCLVGLFGRLFLQGFFGPLTGLFRGEPVLGPLAGGVPGRRALKNADTLVAARNVACNTHADPGYRARRPPWA

SEQ ID NO: 188971 - protein, 56 aa, Zea mays
  unsure (1)..(56): unsure at all Xaa locations
  Clone ID: MRT4577_103928C.1.pep
QVFKESLIRAIRRLEKVLHQIIVASKSIGETELXAKLQEAVYKLKRDIVFQASLAM

SEQ ID NO: 188972 - protein, 74 aa, Zea mays
  Clone ID: MRT4577_103929C.1.pep
RFTFACPPKGGGRLFPALVKNKPRAGKKPFLGYKDPPWAGFLPRTMVVVRGFTRFLSSAFFPWAQATCCFIRGL

SEQ ID NO: 188973 - protein, 85 aa, Zea mays
  Clone ID: MRT4577_10392C.1.pep
KILKKNKKLALLSKLSHFFFPNLPPPFSILLFTKFQFTPLLLTPSILIKPFLPLLYSLYIYIPLSLTFLLLIRPFPFPFPNYFPP

SEQ ID NO: 188974 - protein, 55 aa, Zea mays
  Clone ID: MRT4577_103930C.1.pep
ARPTHPIIHHTSNQLFFNLHLLYSPDPLYSLQCLSLLSFYLTSQTFLIKHFTTFT

SEQ ID NO: 188975 - protein, 44 aa, Zea mays
  Clone ID: MRT4577_103931C.1.pep
FFFFFFFFKGDFLPSNNTDSRRSITRCRRSKKKKTFCYYILRGS

SEQ ID NO: 188976 - protein, 35 aa, Zea mays
  Clone ID: MRT4577_103932C.1.pep
YTWRGLPAVKSSAEVARLKQARLASGRESGQYGCF

SEQ ID NO: 188977 - protein, 82 aa, Zea mays
  Clone ID: MRT4577_103933C.1.pep
FQGAFQGGPQGGLWPKGEGFSQAVKKVAQARPLFGKKGSNGAHATATWDVLVFMHPPTQGGSPSIQVLPARSPQLNPPAWGN

SEQ ID NO: 188978 - protein, 579 aa, Zea mays
  Clone ID: MRT4577_103934C.1.pep
MEATDEENALLLRLHPTPQVVASEYASDGSVDINKQPALKHRTGNWRACYPVLGVGFSEGMVFSAIATNLVTYLTTVLHESKVDAAKNISAWSGVCFLTPLLGAFVADSYLGRYWTIVVVLPVYIVAMLVLIASASLPVLFQSDVHPAVVYLGLYLAAIASGGVKPCISAFGADQFDSNDPAELVKKGSFFNWYFFLTTTSSLLSGTVIVWLQDNVGWAVSYVIPTVLMLICFPAFLAGSRVYRFREMGVSPLVSLLQVVVAAVRKWNAKLPDDSSLLYEQASSPCTTEASHKNKHTNQFRFFDKAAIVPPGNESTVQTSPWRLCTVTQVEELKMLLLTLPTWASFVIFYAVTSQMQSTMIEQGMLMDNHVGSFAIPPASMPIIGVLSFLIWVAAYETVLAPLARRFTGNEKGFSQWQRLAIGQALSILTMALAALVETRRLAIAEASGLRHREVPVPMSILWQGPVFFVHGAAEVFGAIGMTEFFYDQAPATMKSLCAAFGQLAVASGSYLNTAVLSVVALATTRGGATGWISDNLNEGHLDYFFWMMAALSLLNLALFVRYSMRHTDRQRKQDLGLS

SEQ ID NO: 188979 - protein, 200 aa, Zea mays
  Clone ID: MRT4577_103935C.1.pep
MEATDEENALLLRLHPTPQVVASEYASDGSVDINKQPALKHRTGNWRACYPVLGVGFSEGMVFSAIATNLVTYLTTVLHESKVDAAKNISAWSGVCFLTPLLGAFVADSYLGRYWTIVVVLPVYIVAMLVLIASASLPVLFQSDVHPAVVYLGLYLAAIASGGVKPCISAFGADQFDSNDPAELVKKGSFFNCWLQGVQV

SEQ ID NO: 188980 - protein, 231 aa, Zea mays
  Clone ID: MRT4577_103936C.1.pep
MEATDEENALLLRLHPTPQVVASEYASDGSVDINKQPALKHRTGNWRACYPVLGVGFSEGMVFSAIATNLVTYLTTVLHESKVDAAKNISAWSGVCFLTPLLGAFVADSYLGRYWTIVVVLPVYIVAMLVLIASASLPVLFQSDVHPAVVYLGLYLAAIASGGVKPCISAFGADQFDSNDPAELVKKGSFFNWYFFLTTTSSLLSGTVIVWLQDNVGWAVSYVIPTVLMLI

SEQ ID NO: 188981 - protein, 153 aa, Zea mays
  unsure (1)..(153): unsure at all Xaa locations
  Clone ID: MRT4577_103937C.1.pep
EALRTWPETEGGSRWGSPSWXXXXPAPATSAEATGPRLHLGWSSPLPMSVAQKVRPCVSSADQCPLAFSSTAEDSTAVSSTTIERLAPHMQKPPRSPPASRLTRSCLQPPPLRRARQKKHGKAATGAHCAVIGEIPGHAYLATNGTRSRPASR

SEQ ID NO: 188982 - protein, 87 aa, Zea mays
  unsure (1)..(87): unsure at all Xaa locations
  Clone ID: MRT4577_103938C.1.pep
RRVQISQSSCSTPLSSSNSAAMSGRGKGGKVLGQGSAKRYRKVLRDNIQGITKLAIXEHAXTGGVXRISGLIYDESRSVLKIFLENV

SEQ ID NO: 188983 - protein, 70 aa, Zea mays
  Clone ID: MRT4577_103939C.1.pep
QSKLAAKQDSIVLWMRITSCCLREALCHTAWTKHYHGSSCTGGHPQGHCTAIPIIHLPIYFNLQEQRSHK

SEQ ID NO: 188984 - protein, 216 aa, Zea mays
  Clone ID: MRT4577_10393C.1.pep
MKLEVMPKPKQRVLEAQQREEAMEMSGLDLWKHEKPPRICPLPPSLPPPPPAFDEAALVPPLNFAVVDDGIFRSGFPGTANFRFLKSLNLRSIVYLCPEPYPGTNTEFLEKNGIRLHQFGIEGRKERFVNIPDDKIREALKVVLDPRNQPLLIHCKRGKHRTGCLVGCLRKLQKWCLSSVFDEYHRFAAAKARITDQRFMELFDVSSLKHLTPSHC

SEQ ID NO: 188985 - protein, 144 aa, Zea mays
  Clone ID: MRT4577_103940C.1.pep
LARGGRRPPIGKSLFPEAGRLPMCAGPFRVRGRNVSCGGRARFLGWHSCWVPPAFGFCWFPLLAPGFLRCLAFWPGERVDSGTGPGLAQAPVGPVLAPRLVGRPLSGVPPAGVLKINQKKKKKKKKKKKNLKKKKKKKEKACTR

SEQ ID NO: 188986 - protein, 24 aa, Zea mays
  Clone ID: MRT4577_103941C.1.pep
PYCVNQRYPLRTSVVLLIAAAGIS

SEQ ID NO: 188987 - protein, 39 aa, Zea mays
  unsure (1)..(39): unsure at all Xaa locations
  Clone ID: MRT4577_103942C.1.pep
VENCKERAISTEVPHQMGKTGWVKPFSEALNRGATXQCL

SEQ ID NO: 188988 - protein, 70 aa, Zea mays
  unsure (1)..(70): unsure at all Xaa locations
  Clone ID: MRT4577_103943C.1.pep
GLLGAVSFWPLPVFFPLKMXIVQRPLPRWSPPWIFPPMVSAGGPLGSVPPPTGSLPEVIGAPKVFPPFTG

SEQ ID NO: 188989 - protein, 61 aa, Zea mays
  Clone ID: MRT4577_103944C.1.pep
GTQILAFAKPLRCDIMSRKNRAVTRSNNHTHTNSIKRFMIFEPINRRCYIFAVQFYDWLTK

SEQ ID NO: 188990 - protein, 97 aa, Zea mays
  unsure (1)..(97): unsure at all Xaa locations
  Clone ID: MRT4577_103945C.1.pep
HXRTHVYIALCQSIRRPNSVAMVKDMHTKSQPISVANHVRDKKQPHLYSLRKQMMFCVSMSMSVTRTINMSLCVMCSFSLENHPFQPPGNMSFRRAL

SEQ ID NO: 188991 - protein, 71 aa, Zea mays
  Clone ID: MRT4577_103946C.1.pep
THDNYDIIHGPCMVLWSTPHVCPTSTAVLGAIVVIIYIDLSVPPLQSRIMHVCLRHDLRGNHLRRKKENSG

SEQ ID NO: 188992 - protein, 78 aa, Zea mays
  unsure (1)..(78): unsure at all Xaa locations
  Clone ID: MRT4577_103947C.1.pep
RGRHVEQSLAXVAAQIESVTEKIIMEEEKVKKWKAENLRRKHNYVPFLFNFLKILEEKQQLKPLIEKAKAKQKSHGPS

SEQ ID NO: 188993 - protein, 321 aa, Zea mays
  unsure (1)..(321): unsure at all Xaa locations
  Clone ID: MRT4577_103948C.1.pep
HFFYIIKNRADILCYLFHYQVDELYSLDLDALNDLQPIYGLILLYKWRPPEKDERPVIKDAIPNLFFANQIINKACATQAIVSVLLNSPGITLSDELKKLKEFAKDLPPELKGLAIVNCASIRMLNNSFARSEASEEQKPPSGDDDVYHFINYVPVDGVLYELDGLKEGPISLGKCPGGVGDAGWWLRLAQPVIKEHIEXFSQNEIRFSVMAILKNRKEMFTVEIKELQRKREGLLQQMGDPNASRHVEQSLAEVAAQIESVTEKIIMEEEKVKKWKAENLRRKHNYVPFLFNFLKILEEKQQLKPLIEKAKAKQKSHGPS

SEQ ID NO: 188994 - protein, 92 aa, Zea mays
  unsure (1)..(92): unsure at all Xaa locations
  Clone ID: MRT4577_103949C.1.pep
LPFFPDRKKCSPKYIKWTECLQDGAAPNPEPQPAHVGQTKPNAPLSVAMDILGAYLVSSVPLAGALRNGQTXLAPVTGDLRAGLTAGGFAPR

SEQ ID NO: 188995 - protein, 144 aa, Zea mays
  unsure (1)..(144): unsure at all Xaa locations
  Clone ID: MRT4577_10394C.1.pep
PEFAPRGSRTSSSPPRGGRPSPSEESLCPCPDTSGSCLRQHCRCPCSRQLSLRWRDIVQPMALDPSNXSKLPSPPLLTGLYPTXSVPASAFRWLSQHIASEKQALFAFASAGYHWSKLQLRQNIPLRSWHACDMLTGSIMAICP

SEQ ID NO: 188996 - protein, 175 aa, Zea mays
  unsure (1)..(175): unsure at all Xaa locations
  Clone ID: MRT4577_103950C.1.pep
SRXXXXXXXXXXXXXXXXXXTARKQLIHXXAAKITGLLKLAIFLSPLRQSHSHPIPNANTTCSLPPQLYSTTGSWTTKQFKHITGFPPPRWISRCACPCTPRRTCHVSSAAHCLALNRESAVEPAAGGTAGFPPPPWRXXXXXGKQGPKSHGRRRLGXXXXXXXXXAXGLGFGFA

SEQ ID NO: 188997 - protein, 302 aa, Zea mays
  Clone ID: MRT4577_103951C.1.pep
MAIISDFKEDEAPQQPAAVGPGVEETLVAALERTGGALPFLQAAIDVAHRRSGLFRDPSAVSKVTAMAAAVRAQVETEERAAREVKRKAEEAERKAAAEAQKADMEAATATAEEKLEKDRMDADKAEEGNVRQPNAGNGLDLEKYSWTQQLPEVNITIPVPQGTKSRFVVVDIKKNHLKVVLKGQPPIIDGELYKPVKVDDCFWSIEDGKTLSILLTKHNQMEWWKSVIKGGPEVDTQKVEPENSKLSDLDPETRQTVEKMMFDQRQKQMGLPTSDEMQKQEILKKFMSEHPEMDFSKAKMP

SEQ ID NO: 188998 - protein, 265 aa, Zea mays
  Clone ID: MRT4577_103952C.1.pep
IRTTVSLGDGQVFDGESLFQPRNNTAGRPLPLVFPGRNGDPEARDCSTLVEAEVRGKVVLCESRSITEHVEQGQMVSAYGGAGMILMNKPAEGFTTFADAHVLPASHVSYAAFFKIAACVRSTSMPTEYIAYLCGLGIGDDGVKEITGRRVACAKLKAITEAELNYPSLVVKLLSHPITVRRTVTNVGKANSVYKAVVDMPRAVSVVVRPPVLRFARANEKQSFTVTVRWNGPPAVAGAEGNLKWVSSEHVVRSPIVIPPAKAAA

SEQ ID NO: 188999 - protein, 39 aa, Zea mays
  Clone ID: MRT4577_103953C.1.pep
HSRHGPVGVGSTVHRAEHATPDIRRLAQRAVRAGHQVLR

SEQ ID NO: 189000 - protein, 764 aa, Zea mays
  unsure (1)..(764): unsure at all Xaa locations
  Clone ID: MRT4577_103954C.1.pep
MRTQRNLLPLLLLLSAALLAVADAQERKNYVVHLEPRDGGGGAASVEEWHRSFLPEATLDSAADDGPRIIHSYSHVLTGFAARLTDAEAETLRRKEGCLRLYPEEFLPLATTHSPGFLGLHMGKDGFWSRSGFGRGVVIGLLDTGILPSHPSFGDAGLPPPPKKWKGACQFRSIAGGGCSNKVIGARAFGSAAINDTAPPVDDAGHGTHTASTAAGNFVQNADVRGNAHGTASGMAPHAHLAIYKVCTRSRCSIMDIVAGLDAAVKDGVDVLSFSISATDGAQFNYDLIAIATFKAMEHGIFVSAAAGNDGPAAGSITNGAPWMLTVAAGTMDRAIRTTVRLGDGQVFDGESLFQPRNNTAGRPLPLVFPGRNGDPEARDCSTLVEAEVRGKPRAVSVVVRPPVVLCESRSITEHVEQGQTVAAYGGAGMILMNKAXEGYTTXADAHVLRASHVXYRGAKIAAYASNLLDAQAHGSIAFRGTVMGSSPAPSVAFFSSRGPXKASPGILKPDITXGPGMNILAAWAPSEMHPEFADDVSLPFFVESGTSMSTPHLSGIAAIIKSLHPSWSPAAIKSAIMTSSGTADHAGVPIKDEQYRRASFYSMGAGYVNPSRAVDPGLVYDLGAGEYIAYLCGLGIGDDGVKEITGRRVACAKLKAITEAELNYPSLVVKLLSHPITVRRTVTNVGKASSVYRAVVDMPRAVSVVVRPPTLRFDRVNEKRSFTVTVRWSGPPAVGGVEGNLKWVSRDHVVRSPIVIPPAKAAA

SEQ ID NO: 189001 - protein, 525 aa, Zea mays
  unsure (1)..(525): unsure at all Xaa locations
  Clone ID: MRT4577_103955C.1.pep
GAEVLASSTCWGRFCCARRGVCGCTQRSSCRWRPPTLRASSGSKLPYKDGVDVLSFSISATDGAQFNYDLIAIATFKAMEHGIFVSAGSITNGAPWMLTVAAGTMDRAIRTTVRLGDGQVFDGESLFQPRNNTAGRPLPLVFPGRNGDPEARDCSTLVEAEVRGKVVLCESRSIXRSTSGQMVSAYGGAGMIRRIRXATGTTSTASRCPATEQHRGAPAAARFRAARRPQARDCSTLVEAEVRGKVVLCESRSITEHVEQGPNKASPGILKPDITGPGMNILAAWAPSEMHPEFADDVSLPFFMESGTSMSTPHLSGIAAIIKSLHPSWSPAAIKSAIMTSSGTADHAGVPIKDEQYRRASFYSMGAGYVNPSRAVDPGLVYDLGAGEYIAYLCGLGIGDDGVKEITGRRVACAKLKAITEAELNYPSLVVKLLSHPITVRRTVTNVGKANSVYKAVVDMPRAVSVVVRPPVLRFARANEKQSFTVTVRWNGPPAVAGAEGNLKWVSSEHVVRSPIVIPPAKAAA

SEQ ID NO: 189002 - protein, 41 aa, Zea mays
  Clone ID: MRT4577_103956C.1.pep
NEEKHAMYCTLLAPKHWARRYIAFKYNYKEENRTPNLFTLL

SEQ ID NO: 189003 - protein, 156 aa, Zea mays
  unsure (1)..(156): unsure at all Xaa locations
  Clone ID: MRT4577_103957C.1.pep
MSGSPGFVGWKKGRGPPGFSPPGPLPQNPDPRAAPSPSRGPTPQXNFPQTPPQRGKSVWAPGPPSPQSPPRSTPASXPGPEGPPPQNLAVHTALPEKGLCGAPLNPPPPQILARKLFPQGFPTGPPPVTSFPGXPPPPLVPPNSRPPPGAPLSPGG

SEQ ID NO: 189004 - protein, 754 aa, Zea mays
  Clone ID: MRT4577_103958C.1.pep
MGMNKSRWCRATLLLLLSLALRGAAFLQERKNYIVHLRPREAADGSVDEWHRSFLQQAAAGLDSAADDGPQIIYSYSDVFTGFAARLTDAEAEALRATDGCVRLYPEVFLPLATTRSPGFLGLHLGNEGFWSRSGFGRGVVIGLLDTGILPSHPSFGDAGLPPPPKKWKGACQFRSIAGGGCSNKVIGARAFGSAAINDSAPPVDDAGHGTHTASTAAGNFVQNADVRGNAHGTASGMAPHAHLAIYKVCTRSRCSIMDIVAGLDAAVKDGVDVLSFSISATDGAQFNYDLIAIATFKAMEHGIFVSAAAGNDGPAAGSITNGAPWMLTVAAGTMDRAIRTTVRLGDGQVFDGESLFQPRNNTAGRPLLLVFPGRNGDPEARDCSTLVEAEVRGKVVLCESRTITEHVEQGQMVSAYGGAGMILMNKAAEGFTTFADAHVLPASHVSYAAGSKIAAYIKSTPRPTATITFRGTVMGSSPAPSVAFFSSRGPNKASPGILKPDITGPGMNILAAWAPSEMHPEFADDVSLPFFMESGTSMSTPHLSGIAAIIKSLHPSWSPAAIKSAIMTSSGTADHAGVPIKDEQYRRASFYSMGAGYVNPSRAVDPGLVYDLGAGEYIAYLCGLGIGDDGVKEITGRRVACAKLKAITEAELNYPSLVVKLLSHPITVRRTVTNVGKANSVYKAVVDMPRAVSVVVRPPVLRFARANEKQSFTVTVRWNGPPAVAGAEGNLKWVSSEHVVRSPIVIPPAKAVA

SEQ ID NO: 189005 - protein, 130 aa, Zea mays
  unsure (1)..(130): unsure at all Xaa locations
  Clone ID: MRT4577_103959C.1.pep
APLKPGGLPPYGVALGGKKKTPPAQKGYFGGQRFRPPLREXKKSPPVPRKLLKGKEGRTXLAPPFRDXFGRGRVLACLFFPPGQGGPAYGGLLXGKSFXFFLKKLPRKKGQSAVALSLFLGCLAPKRGFR

SEQ ID NO: 189006 - protein, 67 aa, Zea mays
  Clone ID: MRT4577_10395C.1.pep
GRFSANGIQEAARKYFQVGFPTVPPSWGKLSSLEKDQVCKIRWRTGRQSRSLKANRRAEQTEARQRG

SEQ ID NO: 189007 - protein, 106 aa, Zea mays
  unsure (1)..(106): unsure at all Xaa locations
  Clone ID: MRT4577_103960C.1.pep
PFPGVPLVTALVSLFCSRKVKPDSVMTGEMPLRGPLFPVGGVKDKVLSAPRYGIKKVIFPXRNLKGLSKVPFPIFSPKEILLFKPLQEELAPAFKGRCPLRSPPQL

SEQ ID NO: 189008 - protein, 74 aa, Zea mays
  Clone ID: MRT4577_103961C.1.pep
GSKEVLYMLISRKRDIIYGPRKRRLSDPLLAVLPPLVPVAVRRGRPPLPAPSKALRTRTRQAIISGRDNLFRTS

SEQ ID NO: 189009 - protein, 301 aa, Zea mays
  Clone ID: MRT4577_103962C.1.pep
MANNMPSSQIHSRLRCSCSWLLLLVLHFSSSASRAAGGKVPALIVFGDSTVDPGNNNFIPTVARANFPPYGRDFDRGVATGRFSNGRLVTDFLSEAFGLPSSVPAYLDPSYTIDQLATGVSFASGGTGLDDLTANIPSVIPMSQQLEYFSEYKARLKVAKGESAANEIIAEALYIFSIGTNDFIVNYLTFPLRRAQFTPPEYVAYLVGLAEAAVRDAYGLGARKMEFTGLAPFGCIPAARTLNYDDPDECNEEYNRLAVRFNAALQEALRRLNAELVGARVVYAETYSVLSDIVANPSDYG

SEQ ID NO: 189010 - protein, 107 aa, Zea mays
  Clone ID: MRT4577_103963C.1.pep
LFVFFFVWGFLLPTHKKRLNWLIGLQHHARGRKIGLNMNGLGQLPFVCSCRPNVMPLDNLQTDRFYTSYLPMKNLKCLHIIAKNGSLKTSRGEPDFQGCSEGQKRLT

SEQ ID NO: 189011 - protein, 71 aa, Zea mays
  Clone ID: MRT4577_103964C.1.pep
GFSTCLVLSDSSYVASWLSIVFGSPVEARIYLNGFPLEYHLIAHWHHLCSLEDDHLLCWLLTLRTVLVRNC

SEQ ID NO: 189012 - protein, 51 aa, Zea mays
  Clone ID: MRT4577_103965C.1.pep
RPGRRARSTYRKAYDARLREVTKLEHSLSVDPYDAPIVHLSYSKRISICFH

SEQ ID NO: 189013 - protein, 218 aa, Zea mays
  unsure (1)..(218): unsure at all Xaa locations
  Clone ID: MRT4577_103966C.1.pep
RRLRPSTAPSRTDHICSLIRQSGSNQNAINATAPYSATYDLQLXERCCVYYIEATSYLSSARAWAHVLSETDTMDXTHSYSYAQIFRPDNNVFTTAGEPNNCCKVHYTKGXTSHLTHMLDVVLKEAENCDCXLQRFLDCHSLVGSTESAMGTLLISDIXSEYPDRMMLTFSVIPSTNVSXTVVEPYNETLPVHHVADNAHVRMVHANEALDDICFPTL

SEQ ID NO: 189014 - protein, 65 aa, Zea mays
  Clone ID: MRT4577_103967C.1.pep
DRNSLAIYNADRTFLKSFLNPALRSPEMTARFADARTLFPSCKQIRKNLDAIWYLPTLHRPWTSD

SEQ ID NO: 189015 - protein, 98 aa, Zea mays
  Clone ID: MRT4577_103968C.1.pep
MATVRGQLIWEIVKTTNCFLVKQFGRGNSKVQFSKETNNLTNVHSYKHSGLANKKTVTIQAADKDQAVVLATTKTKKQNRPKLSVNKSFLKKEFPRMS

SEQ ID NO: 189016 - protein, 46 aa, Zea mays
  Clone ID: MRT4577_103969C.1.pep
VRLNLLNPVDKIPPNFYGPAKAWNFVKKFPKSIFWGKNRYIIKCRG

SEQ ID NO: 189017 - protein, 220 aa, Zea mays
  Clone ID: MRT4577_10396C.1.pep
MDQNFGNLGTGAGSSGGCGGSNSNSKAVAAVSSSSFLQLPLSTAAAASPAYYGAPLALLHHGTTAGPSSSQQQQHQSPYAKHGAEMSAAEADAIKAKIVAHPQYSALLAAYLDCQKVGAPPDLLERLTAMAAKLDARPPGRHGPRDPELDQFMEAYCNMLVKYREELTRPIDEAMEFLKRVEAQLDSIAGGGSSSSARLSLADGKSSEGAGSSEDDDMDP

SEQ ID NO: 189018 - protein, 84 aa, Zea mays
  Clone ID: MRT4577_103970C.1.pep
GTACRYRSGIPGSTHASGEMGVGGTVGGAVSRRAATTLSAAAPREGRALGLGGPCTALGLGSMCWLRNHSRVCFPLSLPTLPHV

SEQ ID NO: 189019 - protein, 242 aa, Zea mays
  Clone ID: MRT4577_103971C.1.pep
MPGDGKRKRSKHSPTPSSEFFGNSEYSVEEYSESRSGSPSSSLSISTDNSMGLTPVERAYAKAIEHASLVDYNESDEEEESSDSEDGDKDQGDDDGKSKGGSSKGDGSSEGDNGGSGEGGAMCHRRSSFFVFLSSLVKSAMAPERKKLGSLLDAIPPINPNSQLPFYGNYRSVVSEFELLRMEFAIIFAVSSTDLFRVSGTVALAIVAGVHGVAVGGLLSWVCPPRVEEEPPTVGSYPDAPD

SEQ ID NO: 189020 - protein, 66 aa, Zea mays
  Clone ID: MRT4577_103972C.1.pep
TSSRVMFTHSIFLYPWLSMTDGSFDHPYLVDGWTAARDHLPMSITCGPSVLPATCLLFGSDVPAAL

SEQ ID NO: 189021 - protein, 53 aa, Zea mays
  Clone ID: MRT4577_103973C.1.pep
KMKLLPQDHMVQDRHEIKTWIHRLCYSEGIIGVLRIATRRCQNDTKYRIPVPV

SEQ ID NO: 189022 - protein, 45 aa, Zea mays
  Clone ID: MRT4577_103974C.1.pep
MASLLLVPRLTRSPCSNPGPSAGHKPRPVSITCGPRDNRGPLQRG

SEQ ID NO: 189023 - protein, 98 aa, Zea mays
  Clone ID: MRT4577_103975C.1.pep
EMLFLLPLDVAATQKKTSSTPPPSHAHAVASWIPSASTSIGTNDGGEFLALIGARSCTLSRAGALVRACVAVASVDETVRTTASSLSEVQRLLRRKKF

SEQ ID NO: 189024 - protein, 94 aa, Zea mays
  Clone ID: MRT4577_103976C.1.pep
MASAAARSGLRSLAVRAAPLRRRMSSSVHDDAYETAKWEKITYAGIVTCTLLAAYNLSKGHPHFDEPPAYPYLHIRNKEFPWGPDGLFEKKDHH

SEQ ID NO: 189025 - protein, 81 aa, Zea mays
  Clone ID: MRT4577_103977C.1.pep
HAFGQAFRGPKKPRQVIGSGKGPLSNHQQQQANRFDDMAGFGAGAVLALLVAVAAVAAFLAVPASAKSGELIAMGLLAAKG

SEQ ID NO: 189026 - protein, 102 aa, Zea mays
  unsure (1)..(102): unsure at all Xaa locations
  Clone ID: MRT4577_103978C.1.pep
ISFFNRAKVGLKPDGFFVLKENNSRKGFVLEXGENNGPRLNPYLKEPIKKCXIKNPNVKDXQEESPKEQFPAKMYPLVTIHPKIQNSGKRTRPRNTPRKIRS

SEQ ID NO: 189027 - protein, 94 aa, Zea mays
  Clone ID: MRT4577_103979C.1.pep
MASAAARSGLRSLAVRAAPLRRRMSSSVHDDAYETAKWEKITYAGIVTCTLLAAYNLSKGHPHFDEPPAYPYLHIRNKEFPWGPDGLFETKDHH

SEQ ID NO: 189028 - protein, 94 aa, Zea mays; identical to SEQ ID NO: 189027
  Clone ID: MRT4577_103980C.1.pep

SEQ ID NO: 189029 - protein, 76 aa, Zea mays
  Clone ID: MRT4577_103981C.1.pep
PDIPSSDLRSHPHISSFNLLFYSSNFRKPSILPYLHILNAIPNYHEKPTYAPNIIDPSLPLKKPKFQIAPPFNSFQ

SEQ ID NO: 189030 - protein, 57 aa, Zea mays
  Clone ID: MRT4577_103982C.1.pep
GPGVGPFDQILLQEGALRPPRVAWTEMSFGGGILFFFFSFQLVSVLVEKRCCVAPMT

SEQ ID NO: 189031 - protein, 748 aa, Zea mays
  Clone ID: MRT4577_103983C.1.pep
MADPDDLGRRLAAVAVSESPTAAAAALESSNNNLFQVMRAVEDAEATIRQQLEENSRLKDELMLKTRELHRIRSEATDQASSHGIRIHQDRALGAHTDTSSTAPIRTTATAAEAFEWGAGDAGINHKYLEANQANGIPRKSPSAPDSAFPSQLSTPSSRSLSPTRHHKETDYDSRLNLSGQGALPVSDLNSNVVIWKQDLLVKVKEQGEEIAQLRRHLSDYSVKEAQILNEKHVLEKRIAYMRMAFDQQQQDLVDAASKALSYRQDIIEENIRLTYALQAAHQERSTFVSSLLPLLSEYNLQPPVLDAQSIVSNLKVLFKHLQEKLIITEEKLKESQYQITPWHAESSNNTSAAAQSPSHPPGNALIKANLDIVPQQAYSHVHSPVSSPVQTRRDWDLLGNENRQVIRSEVATTSAEHDNVGRTSPSTSSHNMKDAPQRTDHDSRAVRFNIESKDQNPSFKDLIKSDASESLEGAEAQIPQELSAQQDSGGSPNLTSGLDDANPPYPYLPTVLEEPSSSFSEVAEDDPLPAIEGLRITGEAFPGRELQASGYSIHGTTSCNFEWVRHLDDGSINFIEGARQPTYLVTADDVDFVLAIEVQPLDDKKRKGEIVKVYANDQRKITCDPETKEHIKKILSLGHVSYEVLLPVRFLDMWEPAILAIKREGYSVKCNGQRGVVVMEKFQQAMTINIPFGRPTEFSILSADGAEYNLKPAENAPSRDAIVLILRLFRMKAVEKSKGKRKGIFFK

SEQ ID NO: 189032 - protein, 112 aa, Zea mays
  Clone ID: MRT4577_103984C.1.pep
PLLKRPCFAPRPLGRPRPGPPPRQGGRPLRVPPQGHHVNPLRLRFLNRGGGPRPVPGNGQYRRLGCTTRPAGRGAFLFEYPKLGSGGSRLFVCLFVCFPRGFLLRLFDRGLI

SEQ ID NO: 189033 - protein, 84 aa, Zea mays
  Clone ID: MRT4577_103985C.1.pep
ARGKGAPSCEVVGACTRPPPRTTAPVLQRYAGVQNSPTGTTLILIFPYVKYFLSSFSCTNISLLMRIEIISASDWECQAYCFMH

SEQ ID NO: 189034 - protein, 139 aa, Zea mays
  Clone ID: MRT4577_103986C.1.pep
QSFQNQYVFVDEEYRTAADFVRQKLDSSAADEVDESACVIKKCSEYAERYFNETAQDVVVLESESTDESEVCDCETIACTFSNLDNHAGKIETPGLHRKRLPRVFPGDTTTTHDIIKLHGKEKLPVQYLPQRRRNGEKE

SEQ ID NO: 189035 - protein, 72 aa, Zea mays
  Clone ID: MRT4577_103987C.1.pep
FVVKHFFFYEQAYGHRNQGRDRNDHVSRCDLKASDGGYDHELYKYVMSGRKGTTGDNSKEHGYKHETKYTVC

SEQ ID NO: 189036 - protein, 153 aa, Zea mays
  Clone ID: MRT4577_103988C.1.pep
MRHPWKHPTARHGAAELCFREVGDLLPRRFARRAAASEELVMRLQIHRKLNKHTGCVNTAGFNAAGDTLISGSDDQRVMLWDWDTGAVKMQFHSGHGDNVFQARFMPYTNDRTIVTCAADGEVDVLISLSYTPSVPKCKSFYRFQQGTTYGTK

SEQ ID NO: 189037 - protein, 50 aa, Zea mays
  Clone ID: MRT4577_103989C.1.pep
FVVVRDFMFLNKYSLVHFRGWCLGRVVLRESYLVNRLVHIICLVVSKRFG

SEQ ID NO: 189038 - protein, 151 aa, Zea mays
  unsure (1)..(151): unsure at all Xaa locations
  Clone ID: MRT4577_10398C.1.pep
MLCVKKKRKNMRMKEKKKKIVKIXEKWRKMKKKMKKKKKKXKKKKKRREEIKKIKNANKKIKKKKXKEIKRKKEKMNKKNKKKXKKNDXNKKIKXKKKMKKXXKKNKSENKXXKXNKXNKKKKXXXXKXXXEKKKNKKKNKXXINEKXEXX

SEQ ID NO: 189039 - protein, 124 aa, Zea mays
  Clone ID: MRT4577_103990C.1.pep
QRLLRAEQGFPRFSATFRLGGPPLRGPVRSAPPPRRFGRGRALPFFYPRRGGGFPALVSGLVLPSAGWGFLSSALFFFFPPFPLGGPFLGSVFFCETINLARKGGNHKKNIKKPKKKFNKKKKN

SEQ ID NO: 189040 - protein, 229 aa, Zea mays
  unsure (1)..(229): unsure at all Xaa locations
  Clone ID: MRT4577_103991C.1.pep
MSDSFCPDCKKHTEVAFDHSAGDMVCTECGLVLEAHSVDETSEWRTFANESNDNDPVRVGGPTNPLLTDGGLSTVIAKPNGAQGDFLSSSLGRWQNRGSNPDRSLILAFRTIANMADRLGLVATIKDRANEIYKKVEDLKSIRGRNQDAILAACLYIACRQEDRPRTVKEICSVANGATKKEIGRAKEFIVKQLXEVEMGQSMEMGTIHAXXFLRSFWSTLGMNNQAGR

SEQ ID NO: 189041 - protein, 204 aa, Zea mays
  Clone ID: MRT4577_103992C.1.pep
LPLLNGGSNYLFLSLLFKDRANEIYKKVEDLKSIRGRNQDAILAACLYIACRQEDRPRTVKEICSVANGATKKEIGRAKEFIVKQLEVEMGQSMEMGTIHAGNFLRRFCSTLGMNNQAVRAAQDAVKHSEELDIRRSPISIAAAVIYMITQLSEDKKPLKDISLATGVAEGTIRNSYKDLYPYASRLIPNTYAKEEDLKNLCTP

SEQ ID NO: 189042 - protein, 312 aa, Zea mays
  Clone ID: MRT4577_103993C.1.pep
MSDSYCPDCKKHTEVAFDHSAGDTVCTECGLVLEAHSVDETSEWRTFANESNDNDPVRVGGPSNPLLTDGGLSTVIAKPNGAQGDFLSSSLGRWQNRGSNPDRSLILAFRTIANMADRLGLVATIKDRANEIFKKIEDLKSIRGRNQDAILAACLYIACRQEDRPRTVKEICSVANGATKKEIGRAKEFIVKQLEVEMGQSMEMGTIHAGDFLRRFCSTLGMTNQAVNAAKEAVQRSEELDIRRSPISIAAAVIYMITQLSEDKKPLKDISLATGVAEGTIRNSYKDLYPYASRLIPNTYAKEEDLKNLCTP

SEQ ID NO: 189043 - protein, 227 aa, Zea mays
  unsure (1)..(227): unsure at all Xaa locations
  Clone ID: MRT4577_103994C.1.pep
MALLLKRNHHLSTTSRPLLRRLCTTEATTEPAPASPPPPAPDSPPPMTPAEAKLLESLHAAILDHSRAHPSTALTASPPFEPLPALSSTLAGLLPSPPAPHLALQLLGRLLALRRGVPFPEALTFFHXTSSRRILRTRSPRXYAAMIDLLAKHHHFPLARHLLDEMRERSIPVSSQVILAIIRRYVRXAGMSAEASELFRRMEEYGARVPDPVVLASLLGALSKKRL

SEQ ID NO: 189044 - protein, 79 aa, Zea mays
  Clone ID: MRT4577_103995C.1.pep
PPAALSQRSRSWTKRFVVSHKRPAAAVGPSCCRDLWYSVEAQCTLKLYWCWYGALVAAIFFVPTLIVDSCHVVMSAGYH

SEQ ID NO: 189045 - protein, 61 aa, Zea mays
  Clone ID: MRT4577_103996C.1.pep
RPSRGPPQRPGVRLSLKQVGPPPPPCQPPGGWLPLSLPTTSINPARLVLQRLNDQCLVPPD

SEQ ID NO: 189046 - protein, 81 aa, Zea mays
  Clone ID: MRT4577_103997C.1.pep
PAVTPNISLTLFPVTVATSLHLIISPGCAVDSKHDGCHALTDLRHGYYTALDASSMLRYQLGPAAVPGATDGELCKAYDVK

SEQ ID NO: 189047 - protein, 179 aa, Zea mays
  unsure (1)..(179): unsure at all Xaa locations
  Clone ID: MRT4577_103998C.1.pep
MSESKDIQPLVCDNATATSKAGFAGYDAPRAAFSTITXRPNXTGATAXMAQKDALCSRSRHSPDTFTPDVLKHPIDYAIGTLWNDLEKIWHHNYXYNELXVTPKEHPDLLTHVPLNPKDNRIYMTQIKVETFSVPAMYDAIPAVLSLYARVRTTDIVLHSGDXVIHTVXIYESYGLPHV

SEQ ID NO: 189048 - protein, 77 aa, Zea mays
  Clone ID: MRT4577_103999C.1.pep
KMLLNLGAGHYINIVRKHSNTVSGGKSELNGSRYWEMTFFSVVNELHCIDEICNSSSDLIFVMSWKGFLKTLWSFFF

SEQ ID NO: 189049 - protein, 143 aa, Zea mays
  Clone ID: MRT4577_10399C.1.pep
MDQSFGNLGAGAGSSSGGSNSKAAAAAVSSSSFLQLPLSTASPAYYGAPLALLHHAATAPSSSQQQQQHHHQYARHGAEMSAAEAEAIKAKIVAHPQYSALLAAYLDCQKIHRLSYPDPGWRHRPSEKPHLYFYILIREARFA

SEQ ID NO: 189050 - protein, 76 aa, Zea mays
  Clone ID: MRT4577_1039C.1.pep
ARVPCPSSLRICPHHLLTLEGWRSTSQESRTRIASWFQASARGRRPVSASCTARDACTRPWQACRSSSSRQPRGPP

SEQ ID NO: 189051 - protein, 33 aa, Zea mays
  Clone ID: MRT4577_103C.1.pep
IYITKKAIYDISPDGTSQGMMGFMVGLLANTKT

SEQ ID NO: 189052 - protein, 67 aa, Zea mays
  Clone ID: MRT4577_104000C.1.pep
ARARAGFGPPPQPPGQATVMRSSSCPRSVAILTVHKARTAAKHLSTATPNRCINLQSYGVCICSIHR

SEQ ID NO: 189053 - protein, 47 aa, Zea mays
  unsure (1)..(47): unsure at all Xaa locations
  Clone ID: MRT4577_104001C.1.pep
ILADPSRXWSAPCRXQCXQALWPXWRPGIQHXKRXXAXAQQEXAGVE

SEQ ID NO: 189054 - protein, 260 aa, Zea mays
  Clone ID: MRT4577_104002C.1.pep
MKMVTVLKINLHCDACSEEIKRRILKITGVEEAMPHLKSSQVAVKGKVEPATLVGFIHKCTGRRAAIIRAEPLDDALLPQPPNPPAAPPSKAESKKDEPPAENPPAKVEDEENRGGGGKDNADDDNPKTEKPASDGHGAAEEHGAHATTEAPDRDNDDDAGDGLVLENHTKAAVDRLFAVPTPAGGVVTVVAPEMALGSRSYCYPAYPCAQYYYPYQPHLYPPQPYPAASAYSPVAMYGYPAGYPPEAFSEENPNACTIV

SEQ ID NO: 189055 - protein, 185 aa, Zea mays
  unsure (1)..(185): unsure at all Xaa locations
  Clone ID: MRT4577_104003C.1.pep
EVFFLPLILQELSCSANGEKGHSKFYPSKATXPDVYFHIPKFVAXSGNGXKTDNTKAVQEACTIDCGATGKQTILIPKDDFFVGALDFRCPCIGDVTIQGNGHLLATTGLSQYKDHGNWIDILLVHNLLITGKGKLDWQGPXVWSKNSCVKKYHCKILPNSLVMNFLNNGEVSRIPLLNSQFFPM

SEQ ID NO: 189056 - protein, 80 aa, Zea mays
  Clone ID: MRT4577_104005C.1.pep
FGSCPGLLIQNLFPGLPTVGPEGVHKTIGRGGRTGDLDAKGRRLVIARSQNEAGIGDSKASQRSIPRQSRRPMAQQLHRI

SEQ ID NO: 189057 - protein, 85 aa, Zea mays
  unsure (1)..(85): unsure at all Xaa locations
  Clone ID: MRT4577_104006C.1.pep
PLHPQKIDKVRVIFVRAKHNSALKXDGILRAXNNNYFGQLLTGDTQPKTHPIPLERLSEISLLDIAAGGLHSTTLTIQGEAYKWR

SEQ ID NO: 189058 - protein, 80 aa, Zea mays
  Clone ID: MRT4577_104007C.1.pep
KSEFGKKTPARGVPILSKGKGIRALLYKRGEVTLFDHPPGVAVYLAKVKVFSRRKPQRALTFPFPKRRALFPQKRMDGLV

SEQ ID NO: 189059 - protein, 68 aa, Zea mays
  Clone ID: MRT4577_104008C.1.pep
LPTPIKELMMSVNACRSQPYTHELCSRCNRFVWSYVLRRPYKSAMSGWCRDASQCAASHESVLTRCPS

SEQ ID NO: 189060 - protein, 47 aa, Zea mays
  Clone ID: MRT4577_104009C.1.pep
GRANWHLAPFTTDQTYNLGQHYVSVVKSASLGEYIPSWHLLHTSPLG

SEQ ID NO: 189061 - protein, 114 aa, Zea mays
  unsure (1)..(114): unsure at all Xaa locations
  Clone ID: MRT4577_104010C.1.pep
PVRIQRRRKHEHXXRNKERXSSSRREXAEKQHEEPKRRRKRGRNNDQRRQPRRNRRNRRRQHSEQGRQETRERRGQEETHRTXKRXPEQTAXQDEXQRATKRGRKKACNSIQWK

SEQ ID NO: 189062 - protein, 38 aa, Zea mays
  Clone ID: MRT4577_104011C.1.pep
PHIDEAICASRSLEGCNLPRMRTCLVILGQLHHGHLKA

SEQ ID NO: 189063 - protein, 61 aa, Zea mays
  Clone ID: MRT4577_104012C.1.pep
NNQFAWTNFKPLPLLVKSFPQLNFKPKVPISKKKKKKKKKKKKKKKKKKKKKKKKKKKKKN

SEQ ID NO: 189064 - protein, 92 aa, Zea mays
  Clone ID: MRT4577_104013C.1.pep
MALGPHAARVVCHKEYKSVRRPRAHEHTWPYPMVERLVLPSPDGPFLRKPPLADPPSLAYKRRGATRSWIVLDTRADYWIPEDMMDARIYPR

SEQ ID NO: 189065 - protein, 78 aa, Zea mays
  Clone ID: MRT4577_104014C.1.pep
ILWPDGLPLTPPPFFWVSLGIAPLWLPPKFFFFDCPKTKKPPFGPKKKKKKKKKKKKKKKKKKKKKKKKKKKKKKKKN

SEQ ID NO: 189066 - protein, 108 aa, Zea mays
  unsure (1)..(108): unsure at all Xaa locations
  Clone ID: MRT4577_104015C.1.pep
MSPSPDLGSCLLVVSESVRLREKRWWAWGRLRRERRVPVLASFSLHACINCVQXKKKKKKKKKKKKIKKKKKKKKQKIKNNKKKKKKGGAVLKKQSLQTRACKRITFL

SEQ ID NO: 189067 - protein, 99 aa, Zea mays
  Clone ID: MRT4577_104016C.1.pep
FFLILSLSAEQPLRGALEILSDLLCEKARFYKKLLSGSSPLAGLWLMGGKSQEPTGIPNTHCSWTRWFLIPGPERQFRSNRSSQRNTISVRTNDSANDT

SEQ ID NO: 189068 - protein, 133 aa, Zea mays
  unsure (1)..(133): unsure at all Xaa locations
  Clone ID: MRT4577_104017C.1.pep
GPPARGAICLLVVSSSIVVLSTAGGLGSDATSRSAAAYLSLDDDYGEEDESGDSSFSFPDPETSSASTGLVFGFYDDKCPDAEEMVSSMVRKXYHADPNVAAALVRLFFQDCFIHGCDASVLLGPRRRPEIAR

SEQ ID NO: 189069 - protein, 396 aa, Zea mays
  Clone ID: MRT4577_104018C.1.pep
GHIRYEIIKGICHGLHYLHTDCQIVHLDLKPENILLDDNMEPKITDFGMSRLFGLQQSKIITKTCGGTLGYMAPEYLLKGLISVKADIFSLGVIIIEVMTGGRNYPTCEKSCEQFAVDVVGRWRKRLLEEAGRYTPLEKYVEQVETCILIGLMCVDDDPNKRPTTLDIIERLTKVDVTNTDRGPPKTLEAATGLTGHPNLATRSFLDRFRRTIVIGMLKKALKIQDVSQLEQLLAKEVLLELHKIGTNATGNRSFLERLHASITMATLVQALHSLDLDPSAALRMEVLFLALENMRGKNNSRRRSEDVLELEERPEQIRSVLEAGTRARLSDEEHMPSVSVQAEDQAFPKPKLAKVRATAPVCVSAVWLAAGIGFLCGFTLGEMRGLRRTRVHERT

SEQ ID NO: 189070 - protein, 89 aa, Zea mays
  unsure (1)..(89): unsure at all Xaa locations
  Clone ID: MRT4577_104019C.1.pep
SILREFLLTRTKEETIGHLILWKEDNNVFLQKSDVQKRFYRTMLQQPDIQILINKDVHCSLRSPLPKXECCKTTEPDRGIMIYLDRENP

SEQ ID NO: 189071 - protein, 157 aa, Zea mays
  Clone ID: MRT4577_10401C.1.pep
MASSASRFIKCVTVGDGAVGKTCMLICYTSNKFPTDYIPTVFDNFSANVVVDGTTVNLGLWDTAGQEDYNRLRPLSYRGADVFVLAFSLVSRASYENVMKKWLPELQHYAPGVPIVLAGTKLGTTGYASSFILRLERCWCSTPCTPSLRPIQNSSAS

SEQ ID NO: 189072 - protein, 111 aa, Zea mays
  Clone ID: MRT4577_104020C.1.pep
ICCIFYAIFGEARVEPMALSEPTNCQPNREKCIRHLPKPMMQIFSLTLGKIPIERDSVELYGYMAVRDDQDLLLNYIVNRSMDEAILLQKDSLIEMTGPKPGISMTSSVHA

SEQ ID NO: 189073 - protein, 171 aa, Zea mays
  Clone ID: MRT4577_104021C.1.pep
PSISFHSMVIPIQQLCTATDYTFSGVAPHDRKIHINKQNSTYSDLRSVLVPRRGPPCPSRRRGRSGRCGGLPLWRHHRRRPSGGCRSLLSLRRRPSGGCRSLLPRRRPRRLGRTRLPLLLHDQLVLLLRGDAVELVAELPRAPLLGGGDDSSEGLVLLLPLRLVGPVRVHV

SEQ ID NO: 189074 - protein, 68 aa, Zea mays
  Clone ID: MRT4577_104022C.1.pep
KSCRTYPTVLPFDRPGRMLYTVSLIMSGDQCMSSVCKSILQYIFIIYKLMLNFPVSHQSMGSPSLVKL

SEQ ID NO: 189075 - protein, 201 aa, Zea mays
  Clone ID: MRT4577_104023C.1.pep
YDPSLHYVPYVGTHHSEIYTHGTGNHSMVDAIHTVMHIDFSRLQAQIHFNPQKISKLSIHLKHIICCVFKLQICVGYAQCLFLGEVLLAPATDEGATAGAAAFLFGDALVGAPAAGAESCFLTGMAAPAFRFFSTTSWCCCSAAMRSNSSLSFLVRLFQALVDDDVDLDRSDESEGEEEWDSRLRPRGGAMVRPNRTTETW

SEQ ID NO: 189076 - protein, 412 aa, Zea mays
  Clone ID: MRT4577_104024C.1.pep
MRADLCRNSFNSPADVTNSPSLSGRRHGLSMERLKSAVPPDLRRAVGEGTAADLANTTSRLFAFFDSLPLFHQVMQELTDPELALCRKDKVKAVELKGHGNACFSRREFGKALRFYSQALRHVPINSGGMDVNLVSSLYVNRASTMHKLGLFEESLRDCDRAITISPNYSKAWYRKGMVKTALKNYSSAIHDLEVALSQEVTSSGKSNIEQELKLILEKHESVNEAGTSNCDSKDRDLPLAGQPHKIVIESISTPNKGRGMISTDDIPPASLIHVEDPLAAIIMKSSRVSHCHFCFSETPADVVFCPSCTIPIYCSKRCQEQSAGHISRDEDTNLGYSTNVANLSITSSCKSPRSKLFAEHRHECGGAHWAAVLPADVVLAGRIIAHSIVKRMPSGKSFAFSGPNLDLVHHY

SEQ ID NO: 189077 - protein, 64 aa, Zea mays
  unsure (1)..(64): unsure at all Xaa locations
  Clone ID: MRT4577_104025C.1.pep
SYWQALFAKLMEKRTLEDLVLSVGSXDRGAAPVAASAPAGGAAAAAAHAAEEKKQEPKDESARR

SEQ ID NO: 189078 - protein, 92 aa, Zea mays
  unsure (1)..(92): unsure at all Xaa locations
  Clone ID: MRT4577_104026C.1.pep
YGLTSTNNVSSMVSLAMFLWIVGGPQSFSQAENRFTRSLWTVHTKFHEVLKCLRKLXKDNIKPRDPTFKTEHDRITEERFWPYFXGAIGAIR

SEQ ID NO: 189079 - protein, 108 aa, Zea mays
  Clone ID: MRT4577_104027C.1.pep
MHVRGSKQEYIHVALHCPPSWFGLVSFFSQAPRAGDIEMADWGPVVVAVVLFVLLSPGLLLQLPAKGGRFVEFGNFQTSGASIFVHAIIFFALAAVFLIAIGVHITTD

SEQ ID NO: 189080 - protein, 67 aa, Zea mays
  Clone ID: MRT4577_104028C.1.pep
LCQVVLIGRPSSFGHLFCCGDFSRYPIPEGWSCGPGNRLRKAVFGAGKNGALPRPALSMACEWEQSN

SEQ ID NO: 189081 - protein, 49 aa, Zea mays
  Clone ID: MRT4577_104029C.1.pep
KVPPAQKNPHFLSSRGVKFQKKLKGLPLPDVKKKKNPPFGGPPSLACPN

SEQ ID NO: 189082 - protein, 116 aa, Zea mays
  Clone ID: MRT4577_10402C.1.pep
TNRLHPDSGGQVTSPPNRWPCDGSTPTRAQAVAPPRPEPRWRLHRQAADPSRRRPSDGSITEVAVAAAQRIHPDGGQAASPSQRSRSRLPRIDGQGALRPRPFPDPHRLMTRKCLI

SEQ ID NO: 189083 - protein, 52 aa, Zea mays
  Clone ID: MRT4577_104030C.1.pep
TPCPGAGGDYNPARPTVRPTILGHRAFQLLPFFRKSSAFCLSRYTRPNNSNV

SEQ ID NO: 189084 - protein, 72 aa, Zea mays
  Clone ID: MRT4577_104031C.1.pep
FAISSLTYATYKQHCSIASPFYHATKRWAFLPKKQGLGTANESGAREKPPQQKSRQKEKDASTDYNSGGEAA

SEQ ID NO: 189085 - protein, 49 aa, Zea mays
  Clone ID: MRT4577_104032C.1.pep
HISADSIIFSDSNRGRALHHRYCPKPGAFDIFYKGRHCSRLYYRRQIDD

SEQ ID NO: 189086 - protein, 56 aa, Zea mays
  Clone ID: MRT4577_104033C.1.pep
GSSECNRCLRALPTQPTVNVYCRAYAIYAMNVRDVKVVLAPANPYDDYQHWIKDMR

SEQ ID NO: 189087 - protein, 92 aa, Zea mays
  Clone ID: MRT4577_104034C.1.pep
RGHYAARGALHTSTHLPPSLSSPPFSILAAKYVTPCITNKTHALSSNKDSISIFFPPPTTTILSLPLPIILVPNNNLNLRNSQPHITNFFMH

SEQ ID NO: 189088 - protein, 278 aa, Zea mays
  Clone ID: MRT4577_104035C.1.pep
MRVESSGGLPLPELERQQAGAKRRRRRARAAAAAAAPRTMAAPATAVQRLFEACREVFTGAGPGAVPPPAGVERIKSVLDSITAADVRLTSSMPYFRRVDPYGTPKITYLHLYKCEAFSIGIFCLPSRGVIPLHNHPGMTVFSKLLFGAMHIKSYDWAASQQDTPDVQLQAGPRLAKVKVDGILTAPHETAVLYPEDGGNMHCFTAQNACAVLDVLGPPYDDGSGRHCQYYNVRSSAISVGSTILPGGDRYEWLEESEPSRDFYLVGSTYMGPKIWDH

SEQ ID NO: 189089 - protein, 79 aa, Zea mays
  Clone ID: MRT4577_104036C.1.pep
NGRSWRPQHYRIRPSPRRPGGAVWVPWWPWRLCYRVARRDGGCPTAVAAASVGRRYRVVAALRRWNRGGATELRRELMN

SEQ ID NO: 189090 - protein, 594 aa, Zea mays
  unsure (1)..(594): unsure at all Xaa locations
  Clone ID: MRT4577_104037C.1.pep
PAAFGEMSFDEHHLRVENARPREEIDRISAIAAKYVGKPMVSFPVLSSPLAGARPSPLDIXAVAYWGVLPXGGAADIFGGGGVAACGAARDCDKPMIVELAVTAMEELVRMAQLDEPLWNAPAGGHDGSAETLNEEEYARMFVPAGGLGLKKQYGFKSEASRDSSVVIMTHASLVEILMDVNQYATVFSSIVSRAATLEVLSTGVAGNYNGALQVMSVEFQVPSPLVPTRESYFVRYCKQNXDGTWAXVVDVSLDGLRPGAVLKCRRRPSGCLIQEMPNGYSKVTWVEHVEVDDRSVHSIYKLLVSSGLAFGARRWVGTLDRQCERLASVMASNIPTSDIGVITSTEGRKSMLKLAERMVTSFCGGVTASAAHQWTTLSGSGADDVRVMTRKSVDDPGRPPGIVLNAATSFWLPITPKRVFDFLRDESSRSEWDILSNGGVVQEMAHIANGRDHGNCVSLLRVNQSTNSTQSNMLILQESCTDASGSYVIYAPVDVVAMNVVLNGGDPDYVALLPSGXFAILPDGPSGSSSMQGGGGGGVGSGGSLLTVAFQILVDSVPTAKLSLGSVATVNSLIARTVERIKAAVSGESITQQ

SEQ ID NO: 189091 - protein, 81 aa, Zea mays
  unsure (1)..(81): unsure at all Xaa locations
  Clone ID: MRT4577_104038C.1.pep
MGFVSFVGRVLFVAAFLLFGYPEFNEFGAGGGPTAXGLRAKFNGVGKKGSGHLGRTGAHHEVKPXMAAPMGLKGLESLLLF

SEQ ID NO: 189092 - protein, 75 aa, Zea mays
  Clone ID: MRT4577_104039C.1.pep
MSAYCEKYKDELIKNAAYIGTPGKGILAADESTGTIGKRLSSINVENVEENRRASRELLFCCPGALQNIIVVILF

SEQ ID NO: 189093 - protein, 96 aa, Zea mays
  Clone ID: MRT4577_10403C.1.pep
DQCTGFDSGPLDGLAVEAIEQCAAAAEGDSLCQTRLVVRGRTVAVHRAVRGGPAATHVGACNHALPRTLAHRRLFFLGPGDTLLCPIGSSCTKRET

SEQ ID NO: 189094 - protein, 171 aa, Zea mays
  unsure (1)..(171): unsure at all Xaa locations
  Clone ID: MRT4577_104040C.1.pep
PPLGRGKPVLPPLSKGNPPTPTKPPNPXVSGREKESPPQTPPPSPGGGVHSXSPRPVRFPDRQPXSPPPHLFGFSHSAPPPXFLFLRPACLLXKLGPKIPFTQKPAPPMPTPGLEARPHPPPPPPLGMNPPQREDPAQKNKKKKKKKKKKKKKKKNKKKIKKKKKKKKKAC

SEQ ID NO: 189095 - protein, 39 aa, Zea mays
  Clone ID: MRT4577_104041C.1.pep
SQLELCALLAQRVACPLRDRAEPPASGSVSVVVVGSCRG

SEQ ID NO: 189096 - protein, 72 aa, Zea mays
  Clone ID: MRT4577_104042C.1.pep
QSARDTDRHMMTEVCRISAIVRVSSLTSGVRTTSLALLGGGGISDLHSRQTQQRGKDSFCLGTERVPPAGSR

SEQ ID NO: 189097 - protein, 120 aa, Zea mays
  Clone ID: MRT4577_104043C.1.pep
RWVMHLGMERWPPWVSSCSCCPRSGRPRRATVFLSMAMKKRPQIWCSEKRYSSSERCPRAPKESPCPVAPCGLVHTSDGWTQLIVLYVPEGGELLLSVFSPSPFSVLLVHRRKIKKFLLT

SEQ ID NO: 189098 - protein, 79 aa, Zea mays
  Clone ID: MRT4577_104044C.1.pep
EGRLKEGDGVVEEHMKLYTVALYRRHFLRTILARAQRTRLLMVALMRTTHSIQLVDVMVTMHMLTTKRMMMKTMGRLTL

SEQ ID NO: 189099 - protein, 163 aa, Zea mays
  unsure (1)..(163): unsure at all Xaa locations
  Clone ID: MRT4577_104045C.1.pep
LEFLSLILGPLQLQHHQYRITGPQPRGLGALLLLAAAVLALVLDPLEPLRHSLFHLPHAGGRSRLGLLPHVAAGEKLAGAVEFASGGEDVVVAADAQQLLVSRLRHRRSAASHLSLAPPLLFFVSPASDLFPGPXEXVAPXXSTNHLGEVXLTXLVXPLGTTE

SEQ ID NO: 189100 - protein, 97 aa, Zea mays
  unsure (1)..(97): unsure at all Xaa locations
  Clone ID: MRT4577_104046C.1.pep
LLFFNDSTXKAQELMLLASTGSLPSSTPVARKPKAPILAPAKVTMPEGLHATQMLVQKPQHVFSPVTVIFKPIPGILQAASLPKSASSSNLGFPFSK

SEQ ID NO: 189101 - protein, 85 aa, Zea mays
  unsure (1)..(85): unsure at all Xaa locations
  Clone ID: MRT4577_104047C.1.pep
GADIQMMLGRGGHVGTKKCDFQMERYGFKRRTDGVYIINLGKTWEKLPVAARVXVAIENPEDIIVQYVRPYGQRASLKIAQYTGA

SEQ ID NO: 189102 - protein, 67 aa, Zea mays
  Clone ID: MRT4577_104048C.1.pep
SRASPFLGWCGCFPACFMILALSCIPSFSLYCACAFVPFLSSCFSYLFLSLCFSGWSPLRFCFKPNQ

SEQ ID NO: 189103 - protein, 72 aa, Zea mays
  Clone ID: MRT4577_104049C.1.pep
NCDRDNSFSQRPAMLFIPPSCNTPDYRESWCACWKVSGMYYWVDGLTSWSPPYSFFFFWASPRHSNPSCLLW

SEQ ID NO: 189104 - protein, 123 aa, Zea mays
  Clone ID: MRT4577_10404C.1.pep
CSPSIANSTSDLRGIAGTMPIAPDMMRGESRMMVPLGALTSKPEDLTSEESLILRTRRVKARDYMLHLMLFNCLGRTELTPDRHLPTVTAHVSKPPGSALTDREVSDRRHWCLPQQTKYTATS

SEQ ID NO: 189105 - protein, 80 aa, Zea mays
  Clone ID: MRT4577_104050C.1.pep
GYLLSTTYAVSGLGNLRLCSFLRCESVYGGCLSRIQHLLFCIGDLPWRHSSVPMKVYRAAMLNACVRQASKVRAISPVIH

SEQ ID NO: 189106 - protein, 77 aa, Zea mays
  Clone ID: MRT4577_104051C.1.pep
KPRYWAAREGRGRIDKAFLRRLCGEVCTVALGHLGRDQQDRRGSRQLKDHEHIQVRSVFTTTTLTNCSTYCPILSVY

SEQ ID NO: 189107 - protein, 158 aa, Zea mays
  unsure (1)..(158): unsure at all Xaa locations
  Clone ID: MRT4577_104052C.1.pep
IYSRSFLWSPRKKRGRRGGMQKRAKTLTAKTMTLEEENADPRDNXQANIQDGDGHPPHQPGTXLAGEEXEVFFSLPGYNIQNDSYLEMVLRLRVGMQIXVNTLTGMTLXLXEKPADTFAHGKAVHPDPGGDPPDQIRLIFAVQRLDVWRTVVAYNIEK

SEQ ID NO: 189108 - protein, 256 aa, Zea mays
  Clone ID: MRT4577_104053C.1.pep
MASRKFFVGGNWKCNGTGEDVKKIVTVLNQAEVPSEDVVEVVVSPPFVFLQQVKGLLRLDFAVAAQNCWVRKGGAFTGEISAEMLVNLQVPWVILGHSERRALLGESSDFVADKVAYALTQGLKVIACIGETLEQREAGTTMDVVAAQTKAIAEKISDWTNIVLAYEPVWAIGTGKVATPAQAQEVHDGLRKWLHSNVSPAVAELTRIIYGGSVNGANCKELAAQPDVDGFLVGGASLKPEFVDIIKSATVKSSSA

SEQ ID NO: 189109 - protein, 431 aa, Zea mays
  unsure (1)..(431): unsure at all Xaa locations
  Clone ID: MRT4577_104054C.1.pep
MASRKFFVGGNWKCNGTGEDVKKIVTVLNQAEVPSEDVVXSRLTSHGIISPRVCSCGPVSVVVWFLTRPIYVLISWLAGTRGGXEVVVSPPFVFLQQVKGLLRLDFAVAAQNCWVRKGGAFTGEISAEMLVNLQVPWVILGHSERRALLGESSDFVADKVAYALTQGLKVIACIGETLEQREAGTTMDVVAAQTKAIAGNFYSFTCCYILIILCFXLFLLLFSIGFRMHMLSXPFFTLLNNKNFGGGVDVFVCLCVNWTQKXSEAIVILKKNYAIHDTYICTXPFFNTSNFLASCAHSSCCFEFYSFTQKXGLLNFSNSLFTASPFVXEKISDWTNIVLAYEPVWAIGTGKVATPAQAQEVHDGLRKWLHSNVSPAVAELTRIIYGGSVNGANCKELAAQPDVDGFLVGGASLKPEFVDIIKSATVKSSSA

SEQ ID NO: 189110 - protein, 63 aa, Zea mays
  unsure (1)..(63): unsure at all Xaa locations
  Clone ID: MRT4577_104055C.1.pep
FRSTEKIKDLRTXEIKNGRLDMLGIMLAWLQAEYTVSGPIDNLFSHTIDPGQPTIFQAFTPKS

SEQ ID NO: 189111 - protein, 95 aa, Zea mays
  Clone ID: MRT4577_104056C.1.pep
SHKLICNIASVTCSTPAAPIFISPRPEEEPSPAPLPQPPDAAAITAAPASDRPRPAPPAISRWVLPRRAPVEGCCHARARERGRVVERKREVEGE

SEQ ID NO: 189112 - protein, 41 aa, Zea mays
  Clone ID: MRT4577_104057C.1.pep
LQHRPRSLCHQRLSKQSARPSGGPLNSGPSTRRMPQLFHRK

SEQ ID NO: 189113 - protein, 145 aa, Zea mays
  Clone ID: MRT4577_104058C.1.pep
MPPKKIATLGAVLAPLDTNQDGILLRKARSQKRKATSPTPQDKELYQEINNLEAIHQHVEKIRENMLRLAELQKKVDEAAEEMRHTAQDTEQGHKPQQRDLRQEGPNHDDMWYDDFHHDNIAFDDASPLAIELQAVPWPPSYKPP

SEQ ID NO: 189114 - protein, 115 aa, Zea mays
  unsure (1)..(115): unsure at all Xaa locations
  Clone ID: MRT4577_104059C.1.pep
PPSQWGGALVAPRRSGSLSARLSPALSGGLAPAPPAVEEKVEVNSAXIFPKGPPVPLPVQKMARPIDPPEVSKGPDDLPGYWVVPGAKLCMEGGKVALKVKYSLLIPVQKDPEGP

SEQ ID NO: 189115 - protein, 64 aa, Zea mays
  Clone ID: MRT4577_10405C.1.pep
MPQTGHLINILTPEGTLYHEEASNYIGIKGALFMVHQPMHGHCAGSDALHGAGTSGDPELLERL

SEQ ID NO: 189116 - protein, 87 aa, Zea mays
  unsure (1)..(87): unsure at all Xaa locations
  Clone ID: MRT4577_104060C.1.pep
ALGPAVMADLAKTTTTIAITTTMIDGVSEITTKIAMLEDSDSLAHLLQQPGTEDVEAXALGLGLSDYPSTGKVVLDDEDSYNKELHT

SEQ ID NO: 189117 - protein, 92 aa, Zea mays
  Clone ID: MRT4577_104061C.1.pep
EGVMKHLNGGGAFLGKMGLTLVLLQDTFYYATRRSPTLFYCQIKLRNVFWEIRLPDPLRGVLLTTGARFFMRAPKQGVVLRLHRGRHQQLRF

SEQ ID NO: 189118 - protein, 45 aa, Zea mays
  Clone ID: MRT4577_104062C.1.pep
TTMARYKICEIGPLLLERCPPLKLVLASGKCVFLGRTNRERREYL

SEQ ID NO: 189119 - protein, 172 aa, Zea mays
  Clone ID: MRT4577_104063C.1.pep
MALPVAKLGTLALRTLSKPIASRLKSQAAVHPKFRNFIIAIAQANHQITTKIQRRIYGHATDVAIRPLDEQKAVQAATDLIGEAFIFSVAVAALIFEVQRNARSEARKEEARRQELEELKRREESIAKELEDLKLKLSEIEQLAKGRGLTGILNLKRVHGTEVGKAAAPLRE

SEQ ID NO: 189120 - protein, 237 aa, Zea mays
  Clone ID: MRT4577_104064C.1.pep
MAKYFQSAPVSNEALKHKEILLDGLYMHQDLDGSPNQNQKTIVNPNLPLQFGCTVANDWTIYDGLGPDKKLVARAQGPHMGAGVAKGSWFICFNMVFVDDRFAGSSLKVLGHFEEPVEGEWAILGGTGEFAYAQGVVTFKKLQDGSTRVRQLQIRAICLSFPSSLSMPTKMGPWGGNGGSIQDITTGTPMRLQSVTLSSESSWIVSLAFTYIDKLGKRRNEGPWGPDKGNSQTIEFG

SEQ ID NO: 189121 - protein, 36 aa, Zea mays
  Clone ID: MRT4577_104065C.1.pep
QWHALVHSIAGHHCWTIRLVHLAVAVTCEIHSFQSV

SEQ ID NO: 189122 - protein, 134 aa, Zea mays
  unsure (1)..(134): unsure at all Xaa locations
  Clone ID: MRT4577_104066C.1.pep
MGGPGSFYCRGSLLSGFLKGSGPFFFSLWPVFLPRKNPWLKTQGPGNDQXLKEFEGLXSIFFQGLKGNWAIVCTQIGGNXGENLLGNLEGFFKXGFLSWLGRGQGEIFFGESXGSGFLGGILRPFGGNLQKFSV

SEQ ID NO: 189123 - protein, 117 aa, Zea mays
  Clone ID: MRT4577_104067C.1.pep
VCVFVFNTHPSLLGKKKKGNKNTQQRNTQKKKGTRGTREQEDSIPWRAGRRALKRTRARTNTKRTAPYTPGAPLGRGIHRPPPQSAKSQGKPRGVCPPPPAGKARAPPQGREPDPPL

SEQ ID NO: 189124 - protein, 283 aa, Zea mays
  unsure (1)..(283): unsure at all Xaa locations
  Clone ID: MRT4577_104068C.1.pep
MAGLEELKKKLQPLLFDDLDRVGASTRVPLPEDTCDSYAEKRQQILNEMRTLCEACCYPGLVEFQGAFYMPDSGQISIALEYMDGGSLADVIRVKKSIPEPVLSHMLQKVLLGLRYLHEVRHLVHRDIKPANLLVNLKGEAKITDFGVSAGLDNTMAMVCYFLAIVITNVLLVLLNCATFVGTVTYMSPERIRNENYSYAADIWSLGLTILECATGKFPYDVNEGPANLMLQILDDPSPTPPVDTCSLEFCSFINDCLQKEXDARPTCEQLLSHPFIKRYAGT

SEQ ID NO: 189125 - protein, 561 aa, Zea mays
  Clone ID: MRT4577_104069C.1.pep
MSFPSLLIYLSHLSYPVIQTAPQGTAIQKQGPWPQRTWMAGLEELKKKLQPLLFDDLDRVGASTRVPLPEDTCDSYAVSDGGTVNLLSRSLGEYKINEHGFHKRSAGPDELDSDEKAYRCASHEMHIFGPIGNGASSVVERAIFIPVHRILALKKINIFEKEKRQQILNEMRTLCEACCYPGLVEFQGAFYMPDSGQISIALEYMDGGSLADVIRVKKSIPEPVLSHMLQKVLLGLRYLHEVRHLVHRDIKPANLLVNLKGEAKITDFGVSAGLDNTMAMCATFVGTVTYMSPERIRNENYSYAADIWSLGLTILECATGKFPYDVNEGPANLMLQILDDPSPTPPVDTCSLEFCSFINDCLQKDADARPTCEQLLSHPFIKRYAGTEVDLAAYVKSVVDPTERLKQIAEMLAIHYYLLFNGPDGIWHHMKTFYMEQSTFSFSENVYVGQNEIFDILSNIRKKLKGDRPREKIVHVVEKLHCRANGETGVAIRVSGSFIVGNQFLVCGEGIKAEGMPSLDELSIDIPSKRVGQFREQFIMQPGNLMSCYYISKQDLYIIQS

SEQ ID NO: 189126 - protein, 93 aa, Zea mays
  Clone ID: MRT4577_10406C.1.pep
TVNPLKTTGTDHVGMCQSTSLSASTKSTAVTALQSIYADPRHSAILRSVRRIARGGERPDDRATDRLICTSHQVAVARRIGIEGASSSADGQF

SEQ ID NO: 189127 - protein, 48 aa, Zea mays
  Clone ID: MRT4577_104070C.1.pep
QKWNRLLSWITTGEVSIVYFDYLINCFSHTVHNRTAFTCRCSLPRGII

SEQ ID NO: 189128 - protein, 57 aa, Zea mays
  Clone ID: MRT4577_104071C.1.pep
NGQHHPSASRIPRRSTRPKSIGASGSFTSPRTHQWRPLITSICVTSPGLMGKEGRDL

SEQ ID NO: 189129 - protein, 46 aa, Zea mays
  Clone ID: MRT4577_104072C.1.pep
SWVGQLIWCTQIVLTIQWRWNSPILRCSVRSSMVYASEVNRFSLGV

SEQ ID NO: 189130 - protein, 78 aa, Zea mays
  unsure (1)..(78): unsure at all Xaa locations
  Clone ID: MRT4577_104073C.1.pep
CCRVFTMEAYDLLDGDACNAQIYSVASAVSRRVEKVERDYLSYDEPXNVFSGEACNDLGGEFCDASYHVDVFRELAHT

SEQ ID NO: 189131 - protein, 137 aa, Zea mays
  unsure (1)..(137): unsure at all Xaa locations
  Clone ID: MRT4577_104074C.1.pep
MAVTFPSPTLRSPRRPDAIVAPDPSSADMPPSLDFGDPTSLTALRVLTDGGAATRLLHECVAYQRALDARLDALLARRADLDRAAASLLRSAPPLLSLAASDAAXLKESSSSTAALADALSSRXXHLDAAHSRADAA

SEQ ID NO: 189132 - protein, 69 aa, Zea mays
  Clone ID: MRT4577_104075C.1.pep
LSYGLDEDHVGPLRPRVDAVEAAVKGVNSPDYHRFIDLSLDNLVFNHRNVYDTVHEVDNDLPDALNVDV

SEQ ID NO: 189133 - protein, 57 aa, Zea mays
  Clone ID: MRT4577_104076C.1.pep
KLRVPEAQEVRSCSHRNLVGPHPLLSPHKETRSVSLRVRSIFILGAGQEKHRKWGYL

SEQ ID NO: 189134 - protein, 48 aa, Zea mays
  Clone ID: MRT4577_104077C.1.pep
SCFRRWCLFQSVVVLRYFCPHGRQYGIDDPFPLLCAYVSGYQGLIQSL

SEQ ID NO: 189135 - protein, 60 aa, Zea mays
  Clone ID: MRT4577_104078C.1.pep
FILFCMITVKKSQRVRTDPRERKTRFMRCDSYHTGELTNPFGNGTTPPLTKGGDPETATP

SEQ ID NO: 189136 - protein, 120 aa, Zea mays
  Clone ID: MRT4577_104079C.1.pep
LFVSATNAFIIPQCSLAPSAIIPQFLRPVTSMGFEHLAVHAFWLHHALAACVFHHPIFQLHQQSLAHLSIQSIASHLLHQFLPALIHLDVVNPVAYLQQQVLAFNPLALANVAAFQQQQQ

SEQ ID NO: 189137 - protein, 292 aa, Zea mays
  Clone ID: MRT4577_10407C.1.pep
MRYANVTYLINICKKEIEDDNKPMGVFTRTGWKNLVTKYEEKTGLKLTKKQLKNKLDNMKKEYTWFMEFKNATTGLGWNEAKQTVDCSKDWWDEHLARCNNPDKGIKCNHVRFRKQGPKHLDDLHMLFDKIHVSGTSASCPGDISSDDSSDDVLEIERTPENDEVKVVVSKRSKPVKRKRKASCTAAEEKEEKSPFFRLYKNTCLKIETTAEKISTSVEASSTHPTSQVPSIAETMKMVKDCGVKEKIALMHTTTFLIVKPEFREVFCMLETNEGRFDLLEREHAKEMMRHM

SEQ ID NO: 189138 - protein, 71 aa, Zea mays
  unsure (1)..(71): unsure at all Xaa locations
  Clone ID: MRT4577_104080C.1.pep
ITTSLXLDYLSTPXENRAAHTIHRSQHCSQXPTATTTPLDTXXXKHKKXNTRKAXSMLSGXKAPHLNGHXT

SEQ ID NO: 189139 - protein, 140 aa, Zea mays
  unsure (1)..(140): unsure at all Xaa locations
  Clone ID: MRT4577_104081C.1.pep
GTRAFWLKNKNKSKSVQXDXRALDQGGQAKPGSTXTGGKKNKGGENAREKELNGLVKGGGRQAKGPGGGGPXAILGGVFKGGQGQKGFKGKFSHDLDGXREGGKVGIYTDKGGGETMEGWDQETLEKGGGSKKRGDQENK

SEQ ID NO: 189140 - protein, 111 aa, Zea mays
  Clone ID: MRT4577_104082C.1.pep
LCGAQAAVGIATRGACQCRPFLYCARTTPYGGGRRNDLPPTATRLAMRARKEDYDGDEGCRRRWPRMWPWLHALGGLERRGRRAANPPRRGRGHGLPASSTRAPPKLLFLL

SEQ ID NO: 189141 - protein, 57 aa, Zea mays
  Clone ID: MRT4577_104083C.1.pep
PDRAAGGRPLHELARSAPCDASTKYSEVSDGQAALHRGLWNLNLIRLLCGRVSLEDA

SEQ ID NO: 189142 - protein, 69 aa, Zea mays
  Clone ID: MRT4577_104084C.1.pep
TLVYRLKETHIPYVNRTGLEIFCRYDTGQIPSLRCLVFVKRLLIFFALWGKQLLFRTKTDFFRLGRCIK

SEQ ID NO: 189143 - protein, 92 aa, Zea mays
  Clone ID: MRT4577_104085C.1.pep
SDTIHCGFRRHAKVGACPYCRGGVPSLLIDFHSPPCSLLDSSLPPICGPSPSDLPSLLRALEKRKRSSLHQPRATTAWYQGRPEKIRDPVRN

SEQ ID NO: 189144 - protein, 92 aa, Zea mays
  Clone ID: MRT4577_104086C.1.pep
SSKLNQKKTIYNVHVKNLARAGQRCRSANALLLHPRNRNRHQGHCSLLRHRRRIPHSCNCNRHRPSHRQHCPAQTVRRTPSLLHCLRCQLHL

SEQ ID NO: 189145 - protein, 76 aa, Zea mays
  Clone ID: MRT4577_104087C.1.pep
YPQSRRLGHQTPSGSAFFLLPPLLPRLDDESHRKASLMLPQGTRNGARLLKQPGRWMSPSTQILLQQSRAKFAWSM

SEQ ID NO: 189146 - protein, 69 aa, Zea mays
  Clone ID: MRT4577_104088C.1.pep
ETSINNGLTATTHTNNLIRLRFPIPLLRRAPCGRHTELSPTLTPNCSAGAAAKSTERSRRWEIRSSSCG

SEQ ID NO: 189147 - protein, 39 aa, Zea mays
  Clone ID: MRT4577_104089C.1.pep
ATVVVYIRGINSGDLYVTGSALVIDKYRGIRLIKHYQSH

SEQ ID NO: 189148 - protein, 68 aa, Zea mays
  Clone ID: MRT4577_10408C.1.pep
QFGAPAFGFFPPNVLKTPSGGGKKKKKKKKKKKKKKKKKKKKKKKKKKKKKKKKKKKKKKTREGAACT

SEQ ID NO: 189149 - protein, 139 aa, Zea mays
  Clone ID: MRT4577_104090C.1.pep
LKKQSSFDNKFLIKSWLRLGSVIVRVKVDMLLLPSFPACIKYLYRKFGQIPKYDPEIHHLGFLVFFLLPPSKLPWKTRTHTTDTKRGGSTLERMRWGRLGLRGGAAITWGIRRGIGAAARVEERKRERGGQRGGAQPGR

SEQ ID NO: 189150 - protein, 158 aa, Zea mays
  unsure (1)..(158): unsure at all Xaa locations
  Clone ID: MRT4577_104091C.1.pep
RETKTKNKTKKNNKKKKKKKKKKKNIFKKKIKKKKKNIFSLGPPPPWANFCKFPSPWGPFELPFRGPNSPFGGPFYISRAEVLHRWVWXNPLVPHLKALAAHPFFAGWLYGWEAPPDRPSPFSPPWWGFAPPCPPLYPRGGGVSPLGPFFCRALRPSS

SEQ ID NO: 189151 - protein, 64 aa, Zea mays
  Clone ID: MRT4577_104092C.1.pep
MDPPGEFNQGNNQVFVFIWKGKLVVQPGNVSLHSKYYFCYGEASVKKTAALWLPPYSSPVKQGL

SEQ ID NO: 189152 - protein, 109 aa, Zea mays
  Clone ID: MRT4577_104093C.1.pep
KWTCCYSPHSQHVSSTFTGSSGKSLSTIGESTTLGSSFPPSFLPSSSLQTPMEDSHPHDGPQAGRLHLDEEEVGGGLGLRGGAAITWARRRGIGAAARVEERGEGRPKG

SEQ ID NO: 189153 - protein, 147 aa, Zea mays
  Clone ID: MRT4577_104094C.1.pep
LVRTTSKKQTSFDNKFLIKSWLRLGSVIVRVKVDVLLLPSFPTCIKYLYRKFGQIPKYDPEVHHLGFLLSSFLSSFFLPPNSNGRLAPTRRGTKRGGCTMERRRGGRLGLRGGAAITWGGKRGRERERGWRPQRGIGEGVAAATKGE

SEQ ID NO: 189154 - protein, 108 aa, Zea mays
  unsure (1)..(108): unsure at all Xaa locations
  Clone ID: MRT4577_104095C.1.pep
TCCYSPHSQHVSSTLTGSLGKSLSTIRKSTTLGSXLLLLFFLLPLSKLPWKTRTHTTDTKRGGSTLRGRGGGGARVEGWRCNHLGKKETDWGGCKREERKREGGRHKG

SEQ ID NO: 189155 - protein, 78 aa, Zea mays
  unsure (1)..(78): unsure at all Xaa locations
  Clone ID: MRT4577_104096C.1.pep
PKNKGGHVVQGDFIQSNSGPWEPMPKSWGPLWRVGPPRPVGGPFSMGIPKKSGRQLVAKKVFPANXIPEVDYRSFVQE

SEQ ID NO: 189156 - protein, 253 aa, Zea mays
  unsure (1)..(253): unsure at all Xaa locations
  Clone ID: MRT4577_104097C.1.pep
MEAAGGGAEDEQVMSEVHLGCPPHFSGLLVSHFSFSSRPLGPYGHKGGGGGGGGSELVAATSGSVAVDEDGDLVLDRRRRNKYARGDRHLFTIQHGVTSSLKSVGXAVQVWKAALLLSDFILHESFSSPNFDGVTAIEIGAGTGLVGLALARVARRIFVTGXDEAKVCVRELDWKMAWPPPVGTYDPSDPSRYLWSASEVEEAEKATVLFAADVIYSDDLTNXFFNTVKIDVAVRAILGPGTSVSFFFFFPPP

SEQ ID NO: 189157 - protein, 316 aa, Zea mays
  unsure (1)..(316): unsure at all Xaa locations
  Clone ID: MRT4577_104098C.1.pep
GHKGGGGGGGGSELVAATSGSGDSPDAVAVDEDGDLVLDRRRRNKYARGDRHLFTIQHGVTSSLKSVGXAVQVWKAALLLSDFILHESFSSPNFDGVTAIEIGAGTGLVGLALARVARRIFVTDRGTDILDNCLANLHINSGMLRFDEAKVCVRELDWKMXASTCXTYDPSDPSRYLWSASEVEEAEKATVLFAADVIYSDDLTNLFFNTVKKLMSVGAKKVLYLALEKRYNFSVDELDVVANGYTHFRSFFTAQDEHGDPSNRSGPGFVGKQIDPAEIPQYIREYERGKDLEMWMIMYSPEEKQHSNSTKTVFSF

SEQ ID NO: 189158 - protein, 54 aa, Zea mays
  Clone ID: MRT4577_104099C.1.pep
LLFIRCLCIRHLKLVRRRSKYCDAIDASYMQQEVYTIISRPYEGNTHCKFYPPT

SEQ ID NO: 189159 - protein, 43 aa, Zea mays
  Clone ID: MRT4577_10409C.1.pep
LVFFLRKTPFSYTANKRHEKSTGERTTLLREYMLRVPGGRSSS

SEQ ID NO: 189160 - protein, 121 aa, Zea mays
  Clone ID: MRT4577_1040C.1.pep
RDLLACLHAYSSRSHMGTPFPFLQDITLHNRAYMNRPYTFPHYAYAEAKGTEIRIYSGIPITHYTDASWLISSYLNWHSLACYYAYPEAKGNEIGLPGGLAIPHFAYLWKHNCTHTTRNDT

SEQ ID NO: 189161 - protein, 71 aa, Zea mays
  Clone ID: MRT4577_104100C.1.pep
FYHGLKKNKSLVPGKISYLLWGQVFVKYYIKPHGCPDEIFFFEVCLKKKSPKIRLLVKAQNCYLSDIRKGG

SEQ ID NO: 189162 - protein, 74 aa, Zea mays
  Clone ID: MRT4577_104101C.1.pep
MWRRNNRTSPKLCDNPEKYGSWDGFHPSESAYRAIAMGLLLGSYTRPSITSTTTSCPQLMELGSSAEYKPLYDL

SEQ ID NO: 189163 - protein, 65 aa, Zea mays
  Clone ID: MRT4577_104102C.1.pep
GKVHGSLARAGKVKSQTPKVEPQEKKKKVTGRAKKRLIFNSRFVNVTSAPGGKVQRNKQPQGKSG

SEQ ID NO: 189164 - protein, 31 aa, Zea mays
  Clone ID: MRT4577_104103C.1.pep
LSILDGVGTGSYIATNLLNLTCERTVYRSHC

SEQ ID NO: 189165 - protein, 55 aa, Zea mays
  Clone ID: MRT4577_104104C.1.pep
IVVISHEAAAEIKRVSCQKIVSSGGRLVLQLKGIRSPSICEKASSPGLSELQHER

SEQ ID NO: 189166 - protein, 110 aa, Zea mays
  unsure (1)..(110): unsure at all Xaa locations
  Clone ID: MRT4577_104105C.1.pep
HQPSGANTIIMGQXTXXHSLNKTHSTSNFTSPPPAPPLQPTINQSPSIRTLTLSLSTIIISTKHINSKQSYPTTMTNTTLTSPSSSHSPTATQSHHHKKSNKPHFLHTHN

SEQ ID NO: 189167 - protein, 59 aa, Zea mays
  unsure (1)..(59): unsure at all Xaa locations
  Clone ID: MRT4577_104106C.1.pep
PRSKSSLLVRLVMCGRRPGRWWEKHAGRRRLIVFRWALSRCHLCXNHVSHHMEQSNNII

SEQ ID NO: 189168 - protein, 43 aa, Zea mays
  Clone ID: MRT4577_104107C.1.pep
KPSGNHHQFGNTTFLRPQLHYSSPPVNRVPRIEGAQLVVGEQE

SEQ ID NO: 189169 - protein, 63 aa, Zea mays
  Clone ID: MRT4577_104108C.1.pep
LLSSDLLPPIGVCLRHCCCCMELWISVLLTILSYLPGVLYTVYDICSVDPHRHLDNDDYVYVP

SEQ ID NO: 189170 - protein, 433 aa, Zea mays
  Clone ID: MRT4577_104109C.1.pep
MPLKKASATGAATLQPLDPNQDVLSLREARSQKRKAASPTPPEDDLDQEIQNLEILQQQVQRKKEKMARLTDLQRQIDEASEEVRHLVQDDHNRRPPRRELHQEGFYNEDDWYEDFHHGNFAFDDASPLSTELQATPWPQSYKPPQLPMYDGHTDPKQFLMSYEATISSYGGNTAVMAKSFVMAVKSVAQTWYSSLRPGTITSWQKLKDMLITSFQGFQTKPVTAQALFQCTQDHEEYLQAYVRRFLRLRAQAPTVPNEIVIEAMIKGLRPGPSAQYFARKPPQTLEKLLQKMDEYIRANNDFRQRREEAFRFSEMTRGFGGRFHPRHVRSIHNSTQSDDRGSQQQRPQYSSQASGQQQSSFRPPAPRGRGARGFGGRFGDQPRKIYCLFYGFNITFSLGCTKLFNIYFQMIGPLITKLLFCLFKYTFFFSSS

SEQ ID NO: 189171 - protein, 131 aa, Zea mays
  Clone ID: MRT4577_10410C.1.pep
CWRLLGAPCAFLAVGVGARRVRFFSLLRCFWRLCSFFFRTSCLSGGGGAFCRRRSSSCQRLRCWGVGSLCSPCLGLRVAFLPSQCSPAATPSGSTRSQPLRCGDPCRLLASGLFCVSPRRSGWCCCLSCTT

SEQ ID NO: 189172 - protein, 125 aa, Zea mays
  unsure (1)..(125): unsure at all Xaa locations
  Clone ID: MRT4577_104110C.1.pep
TPEGPPRFRRARRDRREXRAPGXRRRRRXXXPXXGRAPRXTQTXXASAXTXXXPREHXXGXXHXAGGGNQXXKXXEKXKEDXDKXXERARPANEQRXXDXXEXXPRXXXQRPGXXXQQGTGQDGP

SEQ ID NO: 189173 - protein, 505 aa, Zea mays
  Clone ID: MRT4577_104111C.1.pep
MPPKKASATGAGTLQPLDPNQDVLSLREARSQKRKVVSPTPPEDDLDQEIQNLEILQQQVQRKKEKMARLADLQRQIDEASEEVRHLVQDDQSRRTPRRELHQEGFHNEDDWYEDFHHGNFAFDDASPLSTELQATPWPQSYKPPQLPMYEGHTDPKQFLMSYEATISSYGGNTAVMAKSFVMAVKSVAQTWYSSLRPGTITSWQKLKDMLITSFQGFQTKPVTAQALFQCTQDHEEYLQAYVRRFLRLRAQAPTVPNEIVIEAMIKGLRPGPSAQYFARKPPQTLEKLLQKMDEYIRADNDFRQRREEAFRFSEMNRGFGGRFHLRHVRSIHNSAQTDDRGSQQQRPQYSSQASGQQQSSFRPPAPRGRGARGFGGRFGDQPRKIYCLFCGEDKGHTTRMCHVTIQKQKEIAEAAAQQSQPKQVMHTASYHSPYIPEYVGNHSAASVASASQPQASWQQPPPPPPIQRGQQLEGSQHSHLQRDFREQSEARTVNSTVPESKHIY

SEQ ID NO: 189174 - protein, 55 aa, Zea mays
  Clone ID: MRT4577_104112C.1.pep
PKAREIVVCLDHVGGRDTDACDTVRHYDEPNVITSANLCFRHAVKADAPHNASLL

SEQ ID NO: 189175 - protein, 35 aa, Zea mays
  unsure (1)..(35): unsure at all Xaa locations
  Clone ID: MRT4577_104113C.1.pep
KLXMSTNRACISVVRMPILLSYRVNGTDRSLCSFT

SEQ ID NO: 189176 - protein, 96 aa, Zea mays
  unsure (1)..(96): unsure at all Xaa locations
  Clone ID: MRT4577_104114C.1.pep
DDAIDSTEPCKEVEMEMDQEEMQLDEEGMRADEIEENDGQHKIXPRYDYVPMMIVNNYKRXPEDRIPAXRDPTNFVVCSITEELNLIRXIAEHMRI

SEQ ID NO: 189177 - protein, 70 aa, Zea mays
  Clone ID: MRT4577_104115C.1.pep
QSWPLGFSPPRKGGFQAPRGAISLPSPGVVSPGGGWQPFKRTLNFWLWGLEWARGPWVFFFPGGGVKGGV

SEQ ID NO: 189178 - protein, 114 aa, Zea mays
  Clone ID: MRT4577_104116C.1.pep
CIWAQKNISFGFPSVLKACIRWFWVGFPCSPKIFPGIGFCFHPPLKTFLSPPFGSVLYPPLGRSFLGAGFVASHFCSFCPVYPTAPFGTCSGGSFGLPCLGRVCFFFTPSFSPR

SEQ ID NO: 189179 - protein, 136 aa, Zea mays
  Clone ID: MRT4577_104117C.1.pep
NININLVRPTGNKTNRGQQFHIEQGVQGPNRSKPPGGNKRARGGPRGGLFKAPPGGYQRGENCNTKQKELVGEKFFKKAKVPKTFDPKLGTRPFWANKNCPKKRRGCFAWSTMVVNSPAAVNKSLSTTLGGGTFWF

SEQ ID NO: 189180 - protein, 104 aa, Zea mays
  Clone ID: MRT4577_104118C.1.pep
MADNAKAAAAHARPESSQEEEEDWKEAEGDVAEVDRAATNGAGEGGVPTDRPIRVYADGIYDLFHFGHAMPLNGDGHQGEDPGEAHQGTIQRLWQPPTVRQLRF

SEQ ID NO: 189181 - protein, 103 aa, Zea mays
  unsure (1)..(103): unsure at all Xaa locations
  Clone ID: MRT4577_104119C.1.pep
APAGNGKAGTSSGGGEGAEPWGGKRDALGWLEWCXGWMXIVGEXLXQXIVXSHLXNPVGLXXFDGVFIXXXGGXRGFGVEIVRXFVFVGXHVVMGVWSIMVVY

SEQ ID NO: 189182 - protein, 116 aa, Zea mays
  unsure (1)..(116): unsure at all Xaa locations
  Clone ID: MRT4577_10411C.1.pep
NPISPRPCATPPPPSPLLPPPRTSQAPPTSRPPPPPPCTAQAPPTSRPPLPPPAAADNLSXPPPPAAGPATPRSQPTRRPRRRIPTPAVSRRESPPTPRSRTPQRCPRRWPRGESS

SEQ ID NO: 189183 - protein, 145 aa, Zea mays
  unsure (1)..(145): unsure at all Xaa locations
  Clone ID: MRT4577_104120C.1.pep
PPGGQKKNPPLPPICKRPYPRCCPIFSPRSPPSFPTPXRPVSSPQGPPGLSPLRPRRXPVGEGGRKPIPTRNRIPPCPRHPLSPLLPGALGPPPGAGPGTPGGPRPPPPGWPPRPLLLSAKPPVLEANKALVKKTKKTKPKKKMK

SEQ ID NO: 189184 - protein, 548 aa, Zea mays
  unsure (1)..(548): unsure at all Xaa locations
  Clone ID: MRT4577_104122C.1.pep
MATTGTTSMPAPVFHPTVWGDYFIKFVPEPLQVSDETMAERIRHLREEVSGMFQACKNVVDKTNLVDVVQRLGIDHHFEEQIATALASIHSAGLFNSSSLHEAALRFRLLRQQGFWVPADELVKFIKNEDGSFIDGITNDPKGLLSLYNAAHLVTHDEGTTTLEDAIAFARQHLEAARRCSLKSPLAEQVGRALGIPLPRTLKREEAIAFIPEYSXQQDQQVYSPVILELAKLDFNLLQRLHQEELKEISQWWKDLSGEIGLGYVRDRIVECYFWSYTVHYERGQARARMILAKVFMLTSLLDDTYDVHATLEEARELNKAIQRWDESDVSLLPEYLKKFFVKVISNFREFEDELESHEKYRNVYNIKGFQTLSKHYLQEAEWFHHGCTPSFKDQVNVSVITGGAQVLSIGLLVGMGHEATREAFEWAIGDTDAIWACGEVSRFMDDMXSLXNGRNKMDVASSVECYIKEHNVPSEVALARINSLVQDAWKTINQAPFKYPALFPVVQRVTSLAKSMTLLFLDKRDAYTYSKDFQTTLETHFVRHIPL

SEQ ID NO: 189185 - protein, 125 aa, Zea mays
  unsure (1)..(125): unsure at all Xaa locations
  Clone ID: MRT4577_104123C.1.pep
GYVATAWQAEPRLVYLSEAGGDNLTTVSIQSSNHMLRIPYNYPELVADLTNQEKQGQIKLERINDARSRILRVKLAMGPFEDLFLDPCLTKVLGAQEHQSLSRKAIRXSFVLLKNSTNGQAKPML

SEQ ID NO: 189186 - protein, 54 aa, Zea mays
  Clone ID: MRT4577_104124C.1.pep
LLMRHQQSIHPCHSSCNVSLSHVAALIQQHKAIYFDNQHQLCTHDQGYHEMGTS

SEQ ID NO: 189187 - protein, 66 aa, Zea mays
  Clone ID: MRT4577_104125C.1.pep
QVVEVAKTVQYIIKHVPPKFFHLYATMQPRQQDSLPLYSLFRHGSPYIFPLSFTLHIKYTYHSNYH

SEQ ID NO: 189188 - protein, 78 aa, Zea mays
  Clone ID: MRT4577_104126C.1.pep
FFKKFKNLSFHPMFQPFLSSPTAHITLLLKSLFCSLHHLFIIFFQSNTTTPFKHGYQNNSCTFPPTFLHPFLFSKYST

SEQ ID NO: 189189 - protein, 202 aa, Zea mays
  unsure (1)..(202): unsure at all Xaa locations
  Clone ID: MRT4577_104127C.1.pep
ADYVSSDQDLLRCRVRTSGIFETKFQVDKVNXFHMCDVGGQRDERRKWIQCFNDVTAIIFVVASSSYNMVIREDNQTNRLQEALNLFKSIWINRWLRTISVILFLNKQDLLAEKVLAGKSKIVDYFPEFARYTTPEDATPEPGEDPRVARAKYFIRDEFLRISTASGDGRHYCYPHFTCAVDTENIRRVFNDCRDIIQRMHL

SEQ ID NO: 189190 - protein, 70 aa, Zea mays
  Clone ID: MRT4577_104128C.1.pep
PLRGDVVTQSMSHASSSLCLFMMFWVEFKSSVFSTRSLQLCAISILYAILLSSYFPVHVLNVIQLHTFVL

SEQ ID NO: 189191 - protein, 55 aa, Zea mays
  Clone ID: MRT4577_104129C.1.pep
IYCFFYVSRQITFGMHLDMHYVWIHRKNTISRQITFGMHLDMHYVYGRVVDPESD

SEQ ID NO: 189192 - protein, 84 aa, Zea mays
  Clone ID: MRT4577_10412C.1.pep
RAFSSSRQKIPPACWEPLVKPRKNNLDAPIKKTFALLAAQKDLQRPSPKALTTFLEKGSLFADSLPRFVPVMDVHTYFRGAGPK

SEQ ID NO: 189193 - protein, 114 aa, Zea mays
  Clone ID: MRT4577_104130C.1.pep
KAPVNPRKKMMKTILSEIEMKCRLRLLKSSNLPGKRSSDISPETERCYSIFLIPLNSDVFCTTAICDGCNYVALWLSIPWFSMSLEKQSQMGFWFTLYMLYSHRPICKTSIRLV

SEQ ID NO: 189194 - protein, 69 aa, Zea mays
  Clone ID: MRT4577_104131C.1.pep
HQMRVHVYRVLPIYYGRYERYISYTSYSLLSQVTRLAIEYTHSVSYDVTHAHYTFRILLGHHQRGQQTL

SEQ ID NO: 189195 - protein, 274 aa, Zea mays
  unsure (1)..(274): unsure at all Xaa locations
  Clone ID: MRT4577_104132C.1.pep
GVTVRNWNDKDYSVVTIRCKDRSKLLFDTVCTLTDLQYVVFHANIDAKDNQAYQVSVLFRMSLASHRRRLSTPIEIMGSKENCVTLMDAAACSVXEFYVRHVNGSPMNTETERLRVIQCLEAAIERRVSEVITIPRAHLKPHHRRKNSKNCSSFKLKTMSFWPSQGVKLELCTNDKVGLLSEVTRIFRENSLTVTRAEVTTRGRMAVNTFYVRGSAGEAVDQKAIDSIREAIGHSLQVKGQAEPPEPQKKESPTWFLFANLFRPRSLYSFGFMR

SEQ ID NO: 189196 - protein, 105 aa, Zea mays
  Clone ID: MRT4577_104133C.1.pep
GDKGQCPRSSSGPLFITQMAVPSITQTRRHWLYISPYKAAHNSNTAKLDNDFLFPPLQLGPFLTQMVSIPILPLTPLCSDLTGVKSPLYPRTIHDSSKSLPRPFG

SEQ ID NO: 189197 - protein, 64 aa, Zea mays
  Clone ID: MRT4577_104134C.1.pep
FLHILFDTGGAGPIMGDLWALKGITEEDNEAPGWTQLKLPGQSPSPRCGHSVTSGGPYILFDSS

SEQ ID NO: 189198 - protein, 55 aa, Zea mays
  Clone ID: MRT4577_104135C.1.pep
NVGLRHTENYISNTEEKVNDLISALMQNQYFRLFNFPKKARNSEFVLKISIFRYL

SEQ ID NO: 189199 - protein, 117 aa, Zea mays
  Clone ID: MRT4577_104136C.1.pep
AEWSSTPPSRALPLPQLPRGAPMARFLQRRPESSAGHPASLCVAPSHPSVCSPVPWTARSRYAAGILVTISKPPSRRAGCPSLILALTSSCPCNACLVLAKTPESGPIVVLAIIELA

SEQ ID NO: 189200 - protein, 129 aa, Zea mays
  Clone ID: MRT4577_104137C.1.pep
WVPRAGREPSGLPLLPAELSLSTQLPRGAPMARFLQRRPESSAGHPASLCVAPSHPSVCSPVPWTARSRYAAGILVTISKPPSRRAGCLSLILALTSSCPCNACLVLAKTPESGPSSFSRSSSWLRYVN

SEQ ID NO: 189201 - protein, 354 aa, Zea mays
  Clone ID: MRT4577_104138C.1.pep
AGRAASVQLNASKLPQQVQPINELAKGSLSCNQLDVIINQQELKQEVGNQQRQQQPVNQAIPLSQAQTNLVQAQVIIQNQMQQQQQQQQQSPTRCQKGTSVQQLLLSQQQQDQNFQLQQQQQLLLQQLQQQNQQQQQQQQNQQQLNKLPAQLVNLAGQQAQLSDQELQLQLLQKLQQQSLVSQPTVTLSPLQVIQEQQKLLLDMQQLSSSHSLAQQRILPQQDSDVSLQASQAPPPMKQEQQKPPQKQFVLADVSDVVYPHISSTNVLSKAGTQLMTPGATQSVLTEEIPSCSTSPSTATGNHLAYPIIGRNEHCKVTIEKVPQSSSLMSIPTAGEAVTTPIMAKELSKLNHNL

SEQ ID NO: 189202 - protein, 52 aa, Zea mays
  Clone ID: MRT4577_104139C.1.pep
RPARNNAPVEIGTQSQLIVYFTRSIKCILNFRFHCRIIYLPVNAPTLQYNNC

SEQ ID NO: 189203 - protein, 80 aa, Zea mays
  unsure (1)..(80): unsure at all Xaa locations
  Clone ID: MRT4577_10413C.1.pep
LSGKVTMCLAETPLVGCARPRRPCRKEEALARTLSNWQPRFVQSRFQNMFASDNKFFGQISFVSLGLISXXWAERTDGSF

SEQ ID NO: 189204 - protein, 104 aa, Zea mays
  Clone ID: MRT4577_104140C.1.pep
RADPRVRSVHLTNTSINSVSPAIMGSVSSSSKTNMVAAATVLEDMLLLLAAGPNTDIPAASYAYGTSVSGTNPRQRYGQRGILFQQCLQWSELLQQNKSLWIHT

SEQ ID NO: 189205 - protein, 108 aa, Zea mays
  Clone ID: MRT4577_104141C.1.pep
PSLTLGPSPSPPQPLPATGRLLVLYASQTGNAMDAAERVGREAERGGCPAVDVLSMDSFDPSCLPGERSVVFVVSTTGQGDPPDSMKGFWRYLLKKDLGARWLEGLRF

SEQ ID NO: 189206 - protein, 60 aa, Zea mays
  Clone ID: MRT4577_104142C.1.pep
AAQALSKSWKILGKLFAEGVALGKLFVEHSHTSCRLVLKETVTCVNNLISFLHSLKKKKK

SEQ ID NO: 189207 - protein, 235 aa, Zea mays
  Clone ID: MRT4577_104143C.1.pep
MACFLLQAYDFTRILSSFYFKGYTLLTKIQRIEWNNRGMSSAHAIFITAVSLYIVTSTDLFSDCVKGPITFRNSIISTSALGVSVGYFITDLEMIFWLYPSLGGMEYVLHHTLSLVAIAYTMLSGEGQFYTYMVLISETTTPEINLRWFLDTAGLKKSSAYLVNGILMFVAWLVARIFLFMYVFYHIYLHYSQIMQMHAFGYYLTFVVPSVLFVMNTMWFMKILKGVMKTLAKWS

SEQ ID NO: 189208 - protein, 62 aa, Zea mays
  Clone ID: MRT4577_104144C.1.pep
WAPCPLLKINCWGLLPPFSGPKPWEPSRIPFLKIQLVRAPKSWWLITSKKRRLGPTGKSGTG

SEQ ID NO: 189209 - protein, 86 aa, Zea mays
  unsure (1)..(86): unsure at all Xaa locations
  Clone ID: MRT4577_104145C.1.pep
IYMAPVVGTIIXAVYYTFCSGIPISLTGLLLYFIFVKGDNACGFFLYVNLAYQGVTVSILMNFKGKWDSLGFILPVNITIFIGFLY

SEQ ID NO: 189210 - protein, 267 aa, Zea mays
  Clone ID: MRT4577_104146C.1.pep
MAAMTAYKYQAQALMRDYLLADPLIPYTSVLIGIVLCKMAYDFTRILSSFYFKGYTLLTKIQRIEWNNRGMSSAHAIFITAVSLYLVMSTDLFSDRVKGPITFRYSIISTSALGVSVGYFITDLAMIFWLYPSLGGMEYVLHHTVSLVAIAYTMLSGEGQFYTYMVLISETTTPEINLRWFLDTAGLKKSSAYLVNGILMFVAWLVARIFLFMDVFYHIYLHYSQIMQMHAFGYYLTFVVPSVLFVMNTMWFMKILKGVMKTLAKWS

SEQ ID NO: 189211 - protein, 66 aa, Zea mays
  Clone ID: MRT4577_104147C.1.pep
FILCFYIQKAKVKLRLAQLLVTNNDSTRRSDACLLSVSHYSGPFNQHPHHTKLQTKQQSHSTRDIF

SEQ ID NO: 189212 - protein, 267 aa, Zea mays
  Clone ID: MRT4577_104148C.1.pep
MAAMTAYKYQAQALMRDYLLADPLVPYTSVLIGIVLCKMAYDFTRILSSFYFKGYTLLTKIQRIEWNNRGMSSAHAIFITAVSLYLVMSTDLFSDRVKGPITFRYSIISTSALGVSVGYFITDLAMIFWLYPSLGGMEYVLHHTVSLVAIAYTMLSGEGQFYTYMVLISETTTPEINLRWFLDTAGLKKSSAYLVNGILMFVAWLVARIFLFMYVFYHIYLHYGQIMQMHAFGYYLTFVVPSVLFVMNTMWFMKILKGVMKTLAKWP

SEQ ID NO: 189213 - protein, 104 aa, Zea mays
  Clone ID: MRT4577_104149C.1.pep
LYLCPMQPRGGEPIRSGDSFKTIIMNKKSKRGKSNPAELYGQVTNASNHTHHNLNRPSFNSEDPQYHASLNECAASPIPNAFRKYQARNTLRFLKGIKTIRLVG

SEQ ID NO: 189214 - protein, 119 aa, Zea mays
  unsure (1)..(119): unsure at all Xaa locations
  Clone ID: MRT4577_10414C.1.pep
CVGXLVVFLXVLXFSXXASSPFGPRGXRWXXPWLXLXWAXXALLAXLXSSPXFLXCXFXXPXXWXPSXXXXXPFPFPLXVXXXXXARFSLXXPPPPXVXSSVXXXCXXXFCAPAAGSXG

SEQ ID NO: 189215 - protein, 59 aa, Zea mays
  unsure (1)..(59): unsure at all Xaa locations
  Clone ID: MRT4577_104150C.1.pep
QXHLKNRLVISGGEGYIDCRIRDEGGESELLGDDLPLEPADINADMSHFIVRQVMYGHE

SEQ ID NO: 189216 - protein, 39 aa, Zea mays
  Clone ID: MRT4577_104151C.1.pep
STPHSHADAHTRRRLSPMTRPRASSRRRLRARTTTRATP

SEQ ID NO: 189217 - protein, 160 aa, Zea mays
  unsure (1)..(160): unsure at all Xaa locations
  Clone ID: MRT4577_104152C.1.pep
AGPLCWGAYPSRVWFTIDTNGFLNVHGEDNTAXQQNNITVSTDTGGLCREENEGVGHDAVQVGGRDAQHEGKSPRHXAGEHNSTTLRYTIKARXITSKLTAVDQTKNXDAPDSAISWXLDANQLREAERXFETRMKDLESLXCNPIIPNMYXGAGARMGK

SEQ ID NO: 189218 - protein, 63 aa, Zea mays
  Clone ID: MRT4577_104153C.1.pep
SSEDASRGLLWMSLDGGRVTRTWCSSKIIDFLGSVAYSIRVYKYDKRVPNSRVGRSSIVPTTT

SEQ ID NO: 189219 - protein, 52 aa, Zea mays
  unsure (1)..(52): unsure at all Xaa locations
  Clone ID: MRT4577_104154C.1.pep
TRSADSQVLCSARPLASPAPSVPLRFLLVALCLXRCGRCGLPGSPCLNRPLF

SEQ ID NO: 189220 - protein, 120 aa, Zea mays
  unsure (1)..(120): unsure at all Xaa locations
  Clone ID: MRT4577_104155C.1.pep
HSSGHTHPDLSCFQAIAPPPPPSPTRRRRRRXACRPPMAKTRMPAYPPPAETPTPQRRRKKKGRPPLLDLQRRRLRLQAQNPSPAPSPTRLEPNPFDDDEDGTGSGRLRQKRLRASYRRC

SEQ ID NO: 189221 - protein, 62 aa, Zea mays
  Clone ID: MRT4577_104156C.1.pep
CKRLSQSQVTVLSYRVKRISGVFITCKYERYSSMMKMGDQTDGICTFCATDSSLSLSQRGVG

SEQ ID NO: 189222 - protein, 292 aa, Zea mays
  Clone ID: MRT4577_104157C.1.pep
MHRVLPPSEPPDGEHSCRFRLVLVGGKQLRGSWYLSAIVRLQGFSSGSPAASPRRWSPKTVTTSLLVGRSKPGCDLCLALSFKDLHHPSWGGGRTEPELYLPRGFVGHLLPQHSGERALTGLAGGSDFNNAGLVGGERCQLQRVELAGSAGSGSALGAPSRRESGRHAARTGGPLKMSRAARAAFVFLGCPAFALVRCLYVEDPSGDLPVGRWLPSPALRWWRLKKSSSPTGSPPPSALRASGSLALIACPRPSSGDMGEGLMAASSALRSPLLLFGRSERRSLSLLLFGRR

SEQ ID NO: 189223 - protein, 108 aa, Zea mays
  Clone ID: MRT4577_104158C.1.pep
LFIVSLAFIPARQAEYSLQQTNTSPFKVTQKQGVEYFVSKQDFDQQFPQGSQSRENLERHVLMDYKSMLGRYCHVELQRRQWAKDYPTPRCDKLRELSVAQNVHMPSV

SEQ ID NO: 189224 - protein, 69 aa, Zea mays
  unsure (1)..(69): unsure at all Xaa locations
  Clone ID: MRT4577_104159C.1.pep
XXRXLPXXCYXXLXRXPLACIRHILSXTVXVXLMIICCSTDHHRVVITRGVXXDXSGCNESHXSAHIAK

SEQ ID NO: 189225 - protein, 64 aa, Zea mays
  Clone ID: MRT4577_10415C.1.pep
LCPRAPTFGKTSLMITVDFLMIQDFPLNRLKFEVEIQKHCEFFSFRGRPPPFYLKGYPTKCQQH

SEQ ID NO: 189226 - protein, 105 aa, Zea mays
  Clone ID: MRT4577_104160C.1.pep
CSPSFVGRLFHHALDESRPKSVLVHSLSVCISLLDPKRLASVSYQAFRSNLTHGTLVTASPETVDGILESLGDLLKLLDITSSQNVFPTTYGCLCPPLGKHRLKI

SEQ ID NO: 189227 - protein, 108 aa, Zea mays
  Clone ID: MRT4577_104161C.1.pep
MCLIGCLYPNTQAPVALANLIRQFSAYKWMQSNGYKITFLHPLKQLGSPCVDNQTGAQTKSTHTMVQDETVRVTKHMECKPRHPMRGFVLPFREPCQQFILAPGGPLT

SEQ ID NO: 189228 - protein, 858 aa, Zea mays
  unsure (1)..(858): unsure at all Xaa locations
  Clone ID: MRT4577_104162C.1.pep
MSEDKKAAAEMKLSLSEEKNLGFLIAMSKTNTEKITKEILEGLSEDTDDSDSYDADSGGEDSEDRPWRPSHAVFGKSSIKESHLVNMRGRYFRDLSILIPEAIIRMNIFVWAVRSQGLEPDAKSFCNIHELLYETKPWGKEQYHNNFGCYSFGSRSGSSCPVPTFRKRWPGDWMTEWFYVKNDLKTREDIKGIIMRPIWQSFGLRRPKVEMNEAAEECQRAFGVICSFIGTRDLVQEHIAFRVWPLVDNWEMPQEIIKETDESGLVRLKYTFKYGDKFVEPDDDWLKSIETVSDELLGAYSKAEDTALSAAFGGRKRKRLNRVFDAIGFVYPDYRYPIREQKRKVTTSAKEEAAAVPSEPAPKRKRIKPRCLSSPKRPLXTEAEEPTLLPEVAEMAEAXQQQNWRNQRFLLPETKEMAEAPSTEKMEEAKGSTKGSKISEILSPSVEIEVAGIKKGPTVTPKRKRMVNVLDVLETIKSSSTTPKKTVETSEAETEFFDTKAPKKQTEAEAGPSEPTKVKSLKTEEEKMTEPILVEEISAIAPEASPKTLDYIVRHASGKKLSEKEKQEAQFYAQKLKYPKGALIFNGSGEEDFLYCLPDSKEISVCREMSKSFGFSTLEDGLSVLSKNELADSLAYNSLKGLILSNALRAQKDVEDEGCVMALSNLRSEVKLRLRSVKLKIFEKQLARAKEERILEETKRELSDQWANHLEGTVEELRSSKKICYVKSMECVKKMKASFASVGAFSSVENFTRGNPEGLIEWINHEAEAFEEILNSRRDICAFSGARGIATILEKKGCEHVKILAQSEATLSFEDAKDPSAEASMAGGKFFTDVWDNGGREMAREIIQKSEKGIHDAR

SEQ ID NO: 189229 - protein, 89 aa, Zea mays
  Clone ID: MRT4577_104163C.1.pep
LEAGRVSKVTQKQGVEYFVSKQDFDQQFPQGSQSRENLERHVLMDYKSMLGRYCHVELQRRQWAKDYPTPRCDKLRELSVAQNVHMPSV

SEQ ID NO: 189230 - protein, 39 aa, Zea mays
  Clone ID: MRT4577_104164C.1.pep
LPSSLSTSKTTSSLSPYFITTTLIYLSNHSSNNITQLTY

SEQ ID NO: 189231 - protein, 837 aa, Zea mays
  Clone ID: MRT4577_104165C.1.pep
MSEDKKTVAEMKLSLDEEKNLGFLIAMSKTNTEKITKEILEGLSEDTGDSDSYDVDSGGRYFRDLSIVRADEGEKTCPHPEENEVVVYRSFLKAGLRFPLSSFVVEVLKIFEVYLHQLTPEAIIRLNIFVWAVRSQGLKPDAKSFCNIHELSYETKPWGKEQYHNNFGCYSFVSRSGSSCPVPTFRKRWPGDWMTEWFYVKNDLTVREDIKGIIMRPIWQSFGLRRPKVEMNEVAEECQRAFGVICSFIGTRDLVQEHIAFRVWPLAEKWEMPQETIKEADEGGLIRLKYTFKFGDNSLSQMMTETKEKAEAPSTEKMEEVKEAIEGTKTSEVLSPAANIEAVKNQKVPAVTPKRKRMVNVLDVLETIKSSGTPPKETAVIPEEKTEISDTKVPEQETEAEAGSSEPTKIKSLEFEEEKIAEPTFVEEISAAAPEASPKVLDYIIRHASGKQLSEKEKQEAQLYAQKLKYPKGALIFNGSGEEDFLYCLPDSKEISVCREMSKSFGFPTLEDGLSVLSKNDLADSLAYNSLKGLILSNALRAQKDTEDEGCTIALSNLRSEVIELRNEGLEKDKILHSLINKIKEDEAIFKGQAEAHKRELEDLRKQLARAKEERILEETKRELSDQWADHLEGTVEELRSSKKRCYNKSIECVKKLKASFAKVGAFSSEENFTRGNPEGPIEWIDHEAEAFEEILNSRGDICAFSGARGIATILEKKGCEHVKILAQSEGAFSFEDAKDPSAEASMVGGKFFTDIWDNGGREMAREIIQRSEKGIHDAREVAEAAEKSAEPEDSAKAPSDTQPKGDDEIKKMAEAIMDEVVNRLLNEAAEVVLREN

SEQ ID NO: 189232 - protein, 162 aa, Zea mays
  Clone ID: MRT4577_104166C.1.pep
IFRSFYGTHDNMFHPQYTYRARGTGRQQQQRREHSVEGGSSINLTVFIHLVVVLFIVSLAFIPARQAEYSLQQTNYFPISKVTQKQGVEYFVSKQDFDQQFPQGSQSRENLERHVLMDYKSMLGRYCHVELQRRQWAKDYPTPRCDKLRELSVAQNVHMPSV

SEQ ID NO: 189233 - protein, 55 aa, Zea mays
  Clone ID: MRT4577_104167C.1.pep
SAYISLDPSCWESDMKPDLGQLVVYGLYCRILQHCCFTCFFAVNQATHVVLVRAS

SEQ ID NO: 189234 - protein, 860 aa, Zea mays
  unsure (1)..(860): unsure at all Xaa locations
  Clone ID: MRT4577_104168C.1.pep
MSEDKKAVAEMKLSLSEEKNLGFLIAMSKTNTEKITKEILEGLSEDTDDSDSYDVDSGGEVSEDRPWRPSHAVFGKSSIKENHLVNMRGRYFRDLSVVRADEGEKTCPNPEENEVVVFVSRSGSSCPVPTFRKRWPGDWMTEWFYVKNDLKTREDIKGIIMRPIWQSFGLRRPKVEMNEAAEECQRAFGVICSFIGTRDLVQEHIAFRVWPLAEKWEMPQETIKEADEGGLIRLKYTFKFGDKFVEPDDDWLKSIENLSDELLGAYSKAEDTALSAAFGGRKKKRLNRVFDAIGFVYPDYRYPIRGQKRKGTTPAKEETAAAPSEPAPKRKRIXPHTSATXLNQPQCLSSPERPLXTEAEEPTLLPEVAEMAEAPTRTELEEPKMLLPETKEMAXRHRQKKWKKRKDXEGSKISEVLSPSANVETIKNQKGPAVTPKRKRMVNVLDVLETIKSSSTTPKKTVETSEAKTEFFDTKAPKQETEAEAGPSEPTKVKSLETEEEKMTEPILVEEISAVAPEASPKVLDYIVRHASGKKLSEKEKQEAQLYAQKLKYPKGALIFNGSGEEDFLYCLPDSKEISVCREMSKSFGFPTLEDRLSVLSKNELADSLAYNSLKGLILSNALRAQKDAEDEGCVIALSNLRSEVIELRNEGLEKDKILHSLINRIKEDEATFKGQAEAQKREIEDLRKQLARVKEERILEETNRELSDQWANHLEGTIEELRSSKKRCYDKSMECVKKMKASFASVGAFSSEENFTRGNPEGPIEWINHEAEAFEEILNSRGDICAFSGARGIATILEKKGCEHVKILAQSEATLSFEDAKDPSAEASMVGGKFSPMXWDNGGREMAREIIQKKRKGHP

SEQ ID NO: 189235 - protein, 736 aa, Zea mays
  unsure (1)..(736): unsure at all Xaa locations
  Clone ID: MRT4577_104169C.1.pep
MSEDKKAAPKMKLSLSKEKNLGFLIAMSKTNTEKITKEILEGIKENHLANMRGRYFRDLSIVRVDEGEKTCPTPEENEVVVFRSFLKAGLRFPLSNFVVEVLKMFEIYLHQLTPEAIIRLNIFVWAVRSQGLEPDAKSFCNIHELSYETKPWGKEQYHNNFGCYSFVSRSGSSCPVPTFRKRWPGDWMTEWFYVKNDLKAREDIKGIIMRPIWQSFGLRKPKIEMNEAAEECQRAFGVICSFIGTGDLVQEHIAFRVWPLAEKWEMPQETIKEADEGGLVRLKYTFKFGDKFVEPDDDWLKSIENLSDELLGAYSKAEDTALSAAFGGRKKKRLNRVFDAIGFVYPDYRYPIRGQKRKSATSVKEEAAAAPSEPAPKRKRIKVLTHRPRYIEPASVPEFTEKTSSATEAEQLTLLPEVAEIAKAPTRTELEEPKTLLSETKETAGAPLXKKWKKQKDQLRDQKYQKFXSFSKXDRTKIQKGPAVTPKRKRMANVLDVLETIKSSSTPPKKTVETSEAKTGIFDTKAPEQETEAEAGPSELTKVKSLETEEEKVTEPILIEEISATAPEASPKIPDYIVRHASGKKLSEKEKQEAQFYAQKLKYPKGALIFNGSGEEDFLYCLPDSKEISVCREMSKSFGFPTLEDGLSVLSKDELADSLAYNSLKGLILSNALRAQKDAEDEGCVMALSNLRSEVIELRKECNTPGVAMAGAHLGTQDYDHMWKNLRSKSIRGFGN

SEQ ID NO: 189236 - protein, 37 aa, Zea mays
  Clone ID: MRT4577_10416C.1.pep
KLEVGPHFALGVPTVLKVPGAWRGPLKVHSRKKITET

SEQ ID NO: 189237 - protein, 40 aa, Zea mays
  Clone ID: MRT4577_104170C.1.pep
IMSIKMYDINRSSGIPKTYKENGNHVNLFLLPLQCTIAVY

SEQ ID NO: 189238 - protein, 172 aa, Zea mays
  unsure (1)..(172): unsure at all Xaa locations
  Clone ID: MRT4577_104171C.1.pep
RCAYNATVSVHQXGGNAAECMASWHYSALXEISFWTMTLSTRSCGDLNHWICTTMHXLXLVCIXVPLRYSVQLPDALGKAVHVXPNLPWPXLHYVHCXPFTAALHPDGFHHTHALTVPEXLTQQMXDANXIMRAADPPHGXYLIVLTMTMIKINSXEVLDHMINVHNNNSSY

SEQ ID NO: 189239 - protein, 880 aa, Zea mays
  unsure (1)..(880): unsure at all Xaa locations
  Clone ID: MRT4577_104172C.1.pep
MSEDKKAAAEMKLSLSEEKNLGFLIAMSKTNTEKITKEILEGLSEDTDDSDSYDVDSGGEDSEDRPWRPSHAVFGKSSIKENHLVNMRGRYFRDLSIVRADEGEKTCPSPEENEVVVFRSFLKAGLRFPLSSFVVENDLKTREDIKGIIMRPIWQSFGLRRPKVEMNEAAEECQRAFGVICSFIGTRDLVQEHIAFRVWPLAEKWEMPQETIKEADEGGLIRLKYTFKFGDKFVEPDDDWLKSIENAEDTALSATFGGRKKKRLNRVFDAIGFVYPDYHYPARGQKRKSATSAQETASAAPSEPTPKRQRVKVLTHRPRXLNQLQFLSSPGETSSATEIKEPTSVLKIEEKVEAPSAEKAEKSRTEGTKILETLSPSASVETIKTQKGPAVTPKRKRMVNVLDVLETIKSSSTTPKKTVETSEAETEIFDTQAPKQQTEAEAGPSEPTKVKSLETEEEKMMEPILVEEISVVAPEASPKVLDYIVRHASGKKLSEKEKQEAQFYAQKLKYPKGALIFNGSGEEDFLYCLPDSKEISVCREMSKSFGFPTLEDELSVLSKNELADSLAYNSLKGLILSNALRAQKDTEDEGCVMALSNLRSEVIELRNEGLEKDKILHSLINRIKEDEATFKGQAEAQKREIEDLRKQLARAKEERILEETKRELSDQWANHLEGTVEELRSSKKRCYIKSMECVKKMKASFASVGAFSSEENFTRGNPEGPIEWINHEAEAFEEILNSRGDICAFSGARGIATILEKKGCEHVKILAQSEATLSFEDAKDPSAEASMVGGKFFTDVWDNGGREMAREIIQKSEKGIHDARKVAEAAEKSAEPEGQIDPTKASSGPPPKDDDEIKKMAEAIMDQIVNQLLNEAAEVVLRED

SEQ ID NO: 189240 - protein, 61 aa, Zea mays
  Clone ID: MRT4577_104173C.1.pep
SAYLRQDRQNRILPMERLSAHRHAKQLPTPRAARIGNSSNNYTCMSAPSSANSADPHDPTR

SEQ ID NO: 189241 - protein, 860 aa, Zea mays
  unsure (1)..(860): unsure at all Xaa locations
  Clone ID: MRT4577_104174C.1.pep
MSEDKKAAAGMKLSLDEEKNLGFLIAMSKTNTEKITKEILEGLSEDTGDSDSYDVDSGGEDSEDRPWRPSHAVFGKSTIKENHLVNMRGSFVSRSGSSCPVPTFRKRWPGDWMTEWFYVKNDLAVREDIKGIIMRPIWQSFGLRRPKVEMSEAAEECQRAFGAVCSFIGTRDLVQEHIAFRVWPLAEKWEMPQETVKEADEGGLIRLKYTFKFGDKFAEPDDDWLKSIENLSDELLGAYSKAEDTALSAAFGGRKKKRLNRVFDAIGFVYPDYRYPIRRQKRKNTTSAKEEAAIAPSEPEPKRKKIKVLTHRPRYIEPASXCLSLPEKLLRPPKLKNQPSQLCCQKSQKRPKXPTKIELEQSKILLSETKEKAEAPSTEKMEEVKEATEGSKTSEVLSPAANIETVKNQKVPAVTPKRKRMANVLDVLETIKSSSTPPKKVAVIPETTTEISGSKAPEQETEAEAGPSEPAKIKPLEKKEEQEAQHYAQKLKYPKGALIFNGSGEEDFLYCLPDSKEISVCREMSKSFGFPTLEDGLSVLSKNDLADSLAYNSLKGLILSNALRAQKDAEDEGCSIALSNLRSEVIELRNEGLEKDKILHSLINKIKEDEAAFKGQAEAQKHEIEDLRKQLARAKEERILEETKRELSDQWADHLEITVEELRSSRKRCYNKSIECVKKLKTSFARVGAFSSEENFTRGNPEGPIEWIDHEAEAFEEILNSRGDICAFSGARGIATILEKKGCEHVKILAQSESALSFEDARDPSAEASIIGGKFFTDIWDNGGREMAGEIIRRSEKGIHDAREVAEAAEKSAEAEDLAKASSGPQPKGDDEIKKMAEDIMDEVVNRLLNEAAEVVLRED

SEQ ID NO: 189242 - protein, 898 aa, Zea mays
  unsure (1)..(898): unsure at all Xaa locations
  Clone ID: MRT4577_104175C.1.pep
MSEDKKAAAEMKLSLSEEKNLGYDVDSGGEDSEYRPWRPSHAVFGKSSIKENHLVNMRGRYFRDLSVVRADEGEKTCPTPEENEVVVFRSFLKAGLRFPLNSFVVEVLKIFEIYLHQLTPEAIIRMNIFVXAVRSQGLEPDAKSFCNIHELLYETKPWXFVARSGSSCPMPTFRKKWPGDWMSEWFYVKNDLKTREDIKGIIMRPIWQRFGLRKPKVEMNEAAEECQRAFGVVCSFIGTRDLVQEHIAFRVWSLAEKWEMPQETIKEADEGGLIRLKYTFKFGDKFVEPDDDWLKSIENLSDELLGVYSKAEDTALSAAFEGQKKKRLNRVFDAIGFVYPDYHYPARGQKRKSATSAQETASAAPSEPASKRQRVKVLTHRPRYIEPATVPEFAGETSSATEKEPTLLSKIEEKAEAPSAEKTEKPRTEGTKVLEILSPSASVETVKNQKGPAVTPKRKRMVNVLDVLETIKSSSTTPKKTVETSEAETEIFDTKAPEQQIETEAGPSEPTKVKSLETEEEKMTEPILAEEISAVAPEASPKVLDYIVRHASGKKLSEEEVFEANHYAKELKYPKGALVFNGTNEEDFLYCLPDNKELLVCREMTRSMGFPKLEAGLCAMTKDDLADSLAYNSLKGLILSNALRAQKNAEDESYEIAFNNLRTEQLARAKEERILEETKRELSDQWANHLEGTVEELRSSKKRCYDKSMECVKKMKASFASFGAFSSEENFTRGNPEGPIEWINHEAEAFEEILNSRGDICAFSGARGIATILERKGCDHVKILAQSETALSFEDAKDPSAEASIVGGKFFTDIWDNGGREMAREIIQKNEKGIHDARKVAEAAERSAEPEGQIDPAKTPPVPHPKDDDEIKKMAEAIMDQVVNQLLNEAAEVVLREY

SEQ ID NO: 189243 - protein, 862 aa, Zea mays
  Clone ID: MRT4577_104176C.1.pep
MKLTLSEEKNLGFLEAMSKTNTEKITKEILEGLSEDTDDSDSYDVDSGGEDSEDRPWRPSHGVFGKSSIKANHLVNMRGRYFRDLSIVRADEGEKTCPTPEENEVVVFRSFLKAGLRFPLSRFVIEVLKIFEIYLHQLTPEAIIRMNIFVWANDLKTRDDIKGIIMRPIWQRFGLRKPKVEMNEAAEECQRAFGVICSFIGTRDLVQEHIAFRVWPLAEKWEMPQETIKEADEGGLIRLKYTFKFGDKFIEPDDDWLKSIENLSDELLGVYSKAEDTALSAAFGGRKKKRLNRVFDAIGFMYPDYHYPARSQKRKNAASAQETASAAPSEPAPKRQRVKVLTHRPRYIEPATVPEFAGETSSATEIKEPTSTPKIEEKTEASSAMEAEKPRTEGTKILEILSPSASVGTIKNQKGPAVTPKRKRMVNVLDVLETIKSSSTTPKKTVETSEAETEISDIKAPKQQTETATGPSEPTKVKPLETEEEKMTEPIFVEEISAAAPKVLDYIVRHASGKKLSEEEVFEANHYAKELKYPKGALVFNGTNEDDLLYCLPDNKELLVCWEMARSMGFPKLEAGLCAMTKDDLADSLAYNSLKGLILSNTLRAQKNAEDESYEIAFNNLRTEVIKLRNEALEKDKILVTLVDKIKENEAASKAQVVAQKHEIDDLRKQLARAKEERILEETKRELSDQWANHLEGTVEELRSSKKRCYDKSIECVKKMKASFASVGAFSSEENFTRGNPEGPIEWINHEAEAFEEILNSRGDICAFSGARGIATILERKGCEHVKILAQSETALSFEDAKDPSAEASIVGGKFFTDIWDNGGREMAREIIQKSEKGIHDARKVAEAAEKSAEPEGQIGIN

SEQ ID NO: 189244 - protein, 42 aa, Zea mays
  Clone ID: MRT4577_104177C.1.pep
YLTQFVPIDLSLSYIINSFLDFVVVIGAYLINYFKFTVYQSF

SEQ ID NO: 189245 - protein, 385 aa, Zea mays
  Clone ID: MRT4577_104178C.1.pep
MGSRHSACSAEAGCRGSFVLLFSHPPARRVRHASGKKLSEKEKQEAQFYAQKLKYPKGALIFNGSGEEDFLYCLPDSKEISVCREMSKSFGFPTLEDGLSVLSKNELADSLAYNSLKGLILSNALRAQKDAEDEGCVMALSNLRSEVIELRNEARAKEERILEETKRELSDQWANHLEGTVEELRSSKKRCYDKSMECVKKMKASFASVGAFSSEENFTRGNPEGPIEWINHEAEAFEEILNSRGDICAFSGARGIATILEKKGCEHVKILAQSEATLSFEDAKDPSAEASMVGGKFFTDVWDNGGREMAREIIQKSEKGIHDARKVAEAAEKSVEPEGQIDPTKASPGPHPKDDDEIKKMAEAIMDQVVNQLLNEAAKVVLRED

SEQ ID NO: 189246 - protein, 43 aa, Zea mays
  Clone ID: MRT4577_104179C.1.pep
THDHWLLNIPNFCLHLRVPITRVHRGIGRTKIKLKKEYHVADK

SEQ ID NO: 189247 - protein, 73 aa, Zea mays
  Clone ID: MRT4577_10417C.1.pep
LCRVLSLPCSGDRLDPSLLVNLRHVLLVHNSLYFRYCFLATFVFLLLNIVSVSSALGPYALNIMHQPPPGLLL

SEQ ID NO: 189248 - protein, 177 aa, Zea mays
  unsure (1)..(177): unsure at all Xaa locations
  Clone ID: MRT4577_104180C.1.pep
AVLDCSDCLLAKMARILACSRKXKHRGPDXASLXHSTRCNFLMPQRLAAVSPLSVDRXLFNVDRTDVVPAIGEIYXHKNGRKHITGTHNFSTSSDCEVIMPLYDKYGENFGYMLDGELAFVLYYTRDRTYVASRDAIGVNPLYIGXSSDGSDWIASEMKALNEDCVRFEIFPSSHLY

SEQ ID NO: 189249 - protein, 53 aa, Zea mays
  Clone ID: MRT4577_104181C.1.pep
VILASWLQCHDVEIAEVLPYDNRGSLCSVLSSRVFIRGGKVDAPLNGWARSGV

SEQ ID NO: 189250 - protein, 167 aa, Zea mays
  Clone ID: MRT4577_104182C.1.pep
ASGAGDAAKSSSGAKTSSKQGSPSGPHAHAHTEQRGGHPFARALAAADDKADLCGGQYIYVHDLPARFNKDMVQNCDKLSPWTDMCRYTTNGGFGPLLPGGKGAFQGTIAGWYDTDEHALDIVFHERIKRYECLTDDPSLAAAVFVPFYAGLDVARHLWATATATAT

SEQ ID NO: 189251 - protein, 95 aa, Zea mays
  Clone ID: MRT4577_104183C.1.pep
KSRILAFRFRKPQGEGEGEAPCSVHVHAARDVEGERASEHAGFRRTRRAHQCSEERVSCAPRLTALQRRFCCFRNKPLPWNLKPGGACESRPHWG

SEQ ID NO: 189252 - protein, 112 aa, Zea mays
  Clone ID: MRT4577_104184C.1.pep
HTCQQNVSWSTMGFTAVSQKIKDRTYGTEFVCSSYTFSLCNRFLNIFKSKLLFISLELGLQSLSQREQDGKKKRKQLLGDLKLNEMKTNITCHTHLPPSVFWDYIISIFNFK

SEQ ID NO: 189253 - protein, 685 aa, Zea mays
  unsure (1)..(685): unsure at all Xaa locations
  Clone ID: MRT4577_104185C.1.pep
MFDSLLNSKFYNKCKHAIKCTRTRLDLLRRKKQAMVKFLKKDVADLLTSGLESHAFARMEGLIIEMNQASCYDTIEEYCEYIXEQLNHMQKASECPQEALEAVSTLIFAAARFPDLPELCDLRHIFTERYGSSVEPFVNSEFVQNLQNKSFTDEEKLRVMKRVAEQISHPFERSGLQWNIACGSQNKHALPKKSSLKQEMERDGHKVDRHAVHERKSKAMPEGYEQKQEMNVKPKDIHVVPDGIGQLGEKNRKNYSDKPSERRHVDNPLPPLDMKEKNGQKDMKKSGKKDSDRRRELMDAEVLDINGLKKQDVGTMKPSGGPDRSWGHADLGLKTLGIEKQEIDPISTLNGKAVNKPPPYSKPYRAPMGEKVAEDRQPVPEKATNMRPPYVKPNFEKHANQGANGHKQSGTEETIHQKREPIYDPVSVRSRVPRPPAHADEYAGMEEKMANQAPDGRRRHSSKRNGAHDNHDQRVAHVVPPLEGMGVDDDINNARPFHRVPSERRKHKSRQNGSTSGSDYNWASEGHESDGDDVNTSIDFGNLLPRAPSSHRKHRSRSADPRKAGGRGDDEERMMDKLLMHYSKKGLDREERKERANKSRTLFPRDDQRGDGAGELSSKGGGASAHRPERAASLPSESASPKAKAKAKPPARSMSMQPEMSRGNVHPSMPDFDELAARISALRNA

SEQ ID NO: 189254 - protein, 93 aa, Zea mays
  unsure (1)..(93): unsure at all Xaa locations
  Clone ID: MRT4577_104186C.1.pep
AAAVPPGCVAIIQQDIQSQRNVKPQPPLGDAYLTGMPANRRXTMHGDGPHLILSEAVSRAANAGGARPLTSPESLSRDLDAQEVRQSYRQQLR

SEQ ID NO: 189255 - protein, 86 aa, Zea mays
  Clone ID: MRT4577_104187C.1.pep
KNEFCMHACMPADHYTSLSRTNFASCMHGTGRSTTNRAWISSKQTFYNNLEQVILLASRWVGSLSSCAPKRHWFFFWTQKAGLVLL

SEQ ID NO: 189256 - protein, 76 aa, Zea mays
  unsure (1)..(76): unsure at all Xaa locations
  Clone ID: MRT4577_104188C.1.pep
RECQQFLLFPPNPKLPPSAAFFFVXKRANVPSLCQFFFKEVKKVWCLEKVVFLPPFCKRPFXPGFKCGSYTVPFCL

SEQ ID NO: 189257 - protein, 90 aa, Zea mays
  Clone ID: MRT4577_104189C.1.pep
ICTLPQGVAPTSPRNWFMIILRYPVCLSFHYTSPLWRNNTPRRMITFWSDLGHSRANPAALRPHRAHGEQDVRHHQLSWLLTARRARNRP

SEQ ID NO: 189258 - protein, 238 aa, Zea mays
  unsure (1)..(238): unsure at all Xaa locations
  Clone ID: MRT4577_10418C.1.pep
MEDVITDVPPPSRFSPDDLDNFAAPPAQPTPIFVVSPNPSPPAPRLLVVFISPTSLALLASPPPLHASLLLPDLPLLPHAPMRVYLHPSGALLAAAHGAFPAHRARXAAKALVSRLQPEEVLVLDAVRSGTYRGRLAADEPVEGKLETRAARARGGVGAAKAVQALVPPGSVVDGLGAAVLAECEIRGKAASMVVTWPADARPAEFGVMRRVAAELGVDTGKAAARVSGRPDLDSLYT

SEQ ID NO: 189259 - protein, 63 aa, Zea mays
  Clone ID: MRT4577_104190C.1.pep
PAVGKAKLPGLSGKRLRVPPASPILATICIELCSLFTAPTIYHTASYLLATPSSCFHSTNWQH

SEQ ID NO: 189260 - protein, 92 aa, Zea mays
  unsure (1)..(92): unsure at all Xaa locations
  Clone ID: MRT4577_104191C.1.pep
DCDCLQGFQVCHSLGGGTGSGMGTLLIXKIRXEEYPXDRLMLXTFYVFPVAQGGGTPVXSPYNAXTCTGHQPXVRNADXCMXVLDNEXALYD

SEQ ID NO: 189261 - protein, 37 aa, Zea mays
  Clone ID: MRT4577_104192C.1.pep
IPAEIYCPRLLEPVSNRKPVTNSVLCCNGNHAPTWLT

SEQ ID NO: 189262 - protein, 335 aa, Zea mays
  unsure (1)..(335): unsure at all Xaa locations
  Clone ID: MRT4577_104193C.1.pep
MATTSFFHPLAAPMDRGGVCFRRCPFSLTIPARTAPRRPAPLLVVRAKRAGSQAPAAAASRQPANPSAVPKRDVEEEEEEVEEEMPWIQDKALDLVEFTGTVTQAIPGPRVGSSPVPWLLAVPLAYVGVSFVLAVVRTVRRFTSPHTKKKRRVSKNIFLLKSLDDLFQKGREAINYPALQDLMQKTGFDMDDVVRKYIRYTLNEKQFSPDVVXDLIHLRKASMLEDAEVAEILNEISRRIVREKGPVVMDLSGFTEQGFKRKLAVQALFGKILYLSELPEFCSRDSSLVVKEIFGVTDEDADSLRIHTLSATGDIESIQKMVDDLDLEQGPPSSS

SEQ ID NO: 189263 - protein, 99 aa, Zea mays
  unsure (1)..(99): unsure at all Xaa locations
  Clone ID: MRT4577_104194C.1.pep
QRDYLVDLLSVRQEWCLFPVWIVPKQKXLLMRCHCSQDKWQQVFVSDGPLKSVFQCFGQMICCTEYVMCSVTLHQSLLVHTAFLGELQIARGISSGAGP

SEQ ID NO: 189264 - protein, 67 aa, Zea mays
  Clone ID: MRT4577_104195C.1.pep
PTRAPTRAPTRAAVALFLGRWRSHTRRITLEQIELIPIIHFTRALELLPTETTTTCSSKIHVLVYTT

SEQ ID NO: 189265 - protein, 75 aa, Zea mays
  Clone ID: MRT4577_104196C.1.pep
SCLQLCSVGFWPGSASQFKLLVSDAAVAIFIEELEAYLNSANLLVPELGPQWKMVAPRARDGEEGETMDARARVT

SEQ ID NO: 189266 - protein, 45 aa, Zea mays
  Clone ID: MRT4577_104197C.1.pep
SLVCALKLGLSHCFFMVYFFKVNVLVIIFSGWVFGWYLFACVTLR

SEQ ID NO: 189267 - protein, 43 aa, Zea mays
  Clone ID: MRT4577_104198C.1.pep
AVYFSVSNRVNIKTQDMYLKFASNKVCNISRFYLKLTHIYLSR

SEQ ID NO: 189268 - protein, 189 aa, Zea mays
  unsure (1)..(189): unsure at all Xaa locations
  Clone ID: MRT4577_104199C.1.pep
SSNPPQRTNIWRRQLPQTNDISSELLKTTQKKKNTPLKKNTTKKKKKKKDACPLSPPTPFDLPALASGWNHTQVGIPPAGSAPPTDCSSLYHHCFSGPPPLRIVKXDPPAEDFDYPAHMDITQLGSLDDDIHPLFLGPGGPLLNRMEHRGDTLDDCSEEGGEPSLDDDHLVFEXHGQTEFFFFVPPPRN

SEQ ID NO: 189269 - protein, 82 aa, Zea mays
  Clone ID: MRT4577_10419C.1.pep
NKFPRSSRRPQSPLSGIYGVLFSLQPPLASAFSLLLYQESGTLVAPPSRVSFPRFMPLTHSSEFVFLDRVASPELPPPLVWV

SEQ ID NO: 189270 - protein, 98 aa, Zea mays
  unsure (1)..(98): unsure at all Xaa locations
  Clone ID: MRT4577_1041C.1.pep
NLVKNWDSTKSLVHGSSYQRKLGVLKGGAPPTVDKPKRRTPAFTGRSSXQDKSHRSRNMFTSPHRPRVRGRLPAFNXVTSGFENTSYTMNLFTPPPLL

SEQ ID NO: 189271 - protein, 53 aa, Zea mays
  Clone ID: MRT4577_104200C.1.pep
AQSLCFFITYWTPYLLCFCPSRVPSWLVGKTKRAIFVFYICYRLPLKKNYRCV

SEQ ID NO: 189272 - protein, 78 aa, Zea mays
  Clone ID: MRT4577_104201C.1.pep
QGQRSSLRPEESSRHACRWLGGLSSRASGVNASWAISVIHIGDQKRHAGVLGFAGHSSPSARDNLRGRSRVLDQHPDG

SEQ ID NO: 189273 - protein, 50 aa, Zea mays
  Clone ID: MRT4577_104202C.1.pep
MAKLMTRWAVWLGHDRLPAVGVLRAGLAKLVLTFFLVLTGVSAAMAAGSD

SEQ ID NO: 189274 - protein, 48 aa, Zea mays
  unsure (1)..(48): unsure at all Xaa locations
  Clone ID: MRT4577_104203C.1.pep
SHCYTQLPLHTTDRKSSRGPLSLLLFLSPPXPXHHPSSSYSKKNSSSP

SEQ ID NO: 189275 - protein, 104 aa, Zea mays
  unsure (1)..(104): unsure at all Xaa locations
  Clone ID: MRT4577_104204C.1.pep
MGKTRGXGAGRKXKXHRXNQLWAXKAYXKSHXGNXLKXPFAGSSHAKXXIXLEKIGIEAKQPNSAIRKXXXXQLVKXCKXIAAFVPNXGCXXYIXENYEVLIXG

SEQ ID NO: 189276 - protein, 67 aa, Zea mays
  Clone ID: MRT4577_104205C.1.pep
MEPDAFRGTAPINLTERLCQILRWSGGSLEMFFSHCPLLAGRRLNLMQRIAYTNMTAYPISSVFLVF

SEQ ID NO: 189277 - protein, 240 aa, Zea mays
  Clone ID: MRT4577_104206C.1.pep
MRAPAPAAPIPALLSRCSSPPSSAPRRLLSSSRTPAACCPPPAVVRSVSVDLLAVAGEPAVAGAPSATPCRRLILLRHGDSATGGRFTRDHDRPLSKAGRADAISVSNKLQQMGWVPELILCSDAMRTKETLKILQEHVHGLSEAVVHPLQHLNAKAAMDGQTAEHLQKAICEYSSDEILTVMCMGHNKGWEEAASMFSGDSVLLETCNAALLEAAGKSWVEAFFVAGLGGWKLHGIVKP

SEQ ID NO: 189278 - protein, 170 aa, Zea mays
  unsure (1)..(170): unsure at all Xaa locations
  Clone ID: MRT4577_104207C.1.pep
GRAPGCACHPYGRFFLLAMYDCQREQGLYSLICNATPTPESPFPLLVNEARIYALCARIVKYYSMRRFVAATGQPANNWTRRHDERYFHYSSGLQAVVMALGACHXVSVFGFGKAPGAKHHYHTNQKKELDLHDYEADYQFYRDLQERPEAVPFLDEAPGFKVPPVKLYW

SEQ ID NO: 189279 - protein, 210 aa, Zea mays
  unsure (1)..(210): unsure at all Xaa locations
  Clone ID: MRT4577_104208C.1.pep
XLPWTGQKLSHEEAGGGTGGAMRGWWRQPSSRWXAACGRHSAWPILESRXPQXVXTGGVVAGGGRLLSPDAGSGHPXSAXXPCRXRPLRMAMXRVPAXSAPGHETKXARHATSLQTNIRRSPXXPAAPAPPPLCCMPVARGAHDRRXEGTGREGETGMADRQYYSGCYTCTYGLGEDSCLRGFAIEAPRCLGPWERXXAVXTDGVGXNPG

SEQ ID NO: 189280 - protein, 50 aa, Zea mays
  Clone ID: MRT4577_104209C.1.pep
FILFHYHPSRRPAIRSGCCNPGAVMATNRSVGTLLGVGTNGGVRWENAPT

SEQ ID NO: 189281 - protein, 42 aa, Zea mays
  Clone ID: MRT4577_10420C.1.pep
AYAVLQKAFPDHEVVMVEGGREIALGGGNIHCITQQQPVRPS

SEQ ID NO: 189282 - protein, 64 aa, Zea mays
  Clone ID: MRT4577_104210C.1.pep
QVPIDKTFVIYAYNTVTSSYRASTFLFQSFTSTFFQSISCCKLYFLYLTFASIIFSDVWSIRTS

SEQ ID NO: 189283 - protein, 73 aa, Zea mays
  Clone ID: MRT4577_104211C.1.pep
SKGPYYAIYPYELCESHNNPIPKLLCIQQQHRRRQRRYLGAIFLLYRFFFFSVAALTQENASGGWKRGSGQKN

SEQ ID NO: 189284 - protein, 297 aa, Zea mays
  unsure (1)..(297): unsure at all Xaa locations
  Clone ID: MRT4577_104212C.1.pep
DSQSFHKSKSVPNIPKDHVCTVDELSVNRGDWYYLDGTGHDQGPFSYSELQELVKKDTIIEQSSVFRKIDNTWFPVLKDLKPGSSVPSAARSSSFTAALMLPDQYNFGVNQGSGSFNQLHPQFVGYTRGKLHELVMKYFKSRELTLAINEVLDPWISAKQQKKEFEAYFSHNSASRNLLPXRWWVCKKAKLLPDQSDEDIHLSQDILASRKEDICFDELCDAEPSVDNDSLNPGAGNETWGLLNGHVLARIFHFMRADVKALISSAATCRSWNAAVKYYRNMCRFIDLSSVGPLCTD

SEQ ID NO: 189285 - protein, 110 aa, Zea mays
  Clone ID: MRT4577_104213C.1.pep
TAMSMPPPYSNIKLVQQSRSEYPLLQCLVVNLSWNRRDGEWPQIQPGGRRPYKDSARLLLSFVFRRFGPVWICFPEPRSWTRPSAYFRRESPGTKGNFANFRALKGSAFI

SEQ ID NO: 189286 - protein, 55 aa, Zea mays
  unsure (1)..(55): unsure at all Xaa locations
  Clone ID: MRT4577_104214C.1.pep
PPXIYSYILNKSYIYMYIYIKEQLITKRHTHPPSTILIYPSISLINQLNFYVLIT

SEQ ID NO: 189287 - protein, 155 aa, Zea mays
  Clone ID: MRT4577_104215C.1.pep
MFDDDDDGVDPQIEDFNGYYFEDGEEKPVCFSILPFQFGEDDSEADFLRKDVFLCGFVDKNLPVYKEVVAWKIRLDSEHPNIYVLSIEHKWIKLLKPRKCCGDIVRSTLITVQMLHFFGRGEQRSSNHLWDHLDDVFGKYNPKPVEDDLMKHHTL

SEQ ID NO: 189288 - protein, 661 aa, Zea mays
  Clone ID: MRT4577_104217C.1.pep
MTYFPEEVVEHIFSFLPSHSDRNTVSLVCKVWYEVERLSRRAVFVGNCYAVRPERVVLRFPNIKALTVKGKPHFADFNLVPPDWGGYAGPWIDAAARSCVGLEELRMKRMVVFDENLELLARSFLRFKVLVLISCEGFSTDGLAAIASHCKLLRELDLQENDVEDRGPRWLSFPDSCTSLVSLNFACIKGEVNSGALERLVARSPNLRSLRLNRSVSVDTLSKILLRAPNLEDLGTGLNLSYTPTLDYSDLAKMVSRCVKLQRLWVLDCISDKGLQVVASSCKDLQELRVFPSEFYVPGASAVTEEGLVAISSGCPKLTSLLYFCHQMTNEALITVANNCPNFIRFRLCILEPKKPDAMTGQPLDEGFGAIVRECKGLRRLSISGLLTDKVFMYIGKHAKYLEMLSIAFAGDSDKGMMDVMNGCKNLRKLEIRDSPFGDVALLGNVAKYETMRSLWMSSCNVTLKGCQVLASKMPMLNVEIMNELDGSSEMENHGDLSKVDKWSVESGMPGARATVDLSYTLFALAYFSSQPTGPIALRAQCGCPPCPLRTDTTSASLMMPSSDLRDSTPQVRDELLCLYREHNLPSSYLAINEHPDASDVALAAALAVEEVGAAVMVAQQKAVAYVKVATMAVDKTNYVIIAVENVFAKEANAGSFPNWC

SEQ ID NO: 189289 - protein, 575 aa, Zea mays
  Clone ID: MRT4577_104218C.1.pep
MTYFPEEVVEHIFSFLPSHSDRNTVSLVCKVWYEVERLSRRAVFVGNCYAVRPERVVLRFPNIKALTVKGKPHFADFNLVPPDWGGYAGPWIDAAARSCVGLEELRMKRMVVFDENLELLARSFLRFKVLVLISCEGFSTDGLAAIASHCKLLRELDLQENDVEDRGPRWLSFPDSCTSLVSLNFACIKGEVNSGALERLVARSPNLRSLRLNRSVSVDTLSKILLRAPNLEDLGTGNLTDEFQAESYSRLTSALEKCKKLRSLSGFWDASPICVPYIYPLCHQLTGLNLSYTPTLDYSDLAKMVSRCVKLQRLWVLDCISDKGLQVVASSCKDLQELRVFPSEFYVPGASAVTEEGLVAISSGCPKLTSLLYFCHQMTNEALITVANNCPNFIRFRLCILEPKKPDAMTGQPLDEGFGAIVRECKGLRRLSISGLLTDKVFMYIGKHAKYLEMLSIAFAGDSDKGMMDVMNGCKNLRKLEIRDSPFGDVALLGNVAKYETMRSLWMSSCNVTLKGCQVLASKMPMLNVEIMNELDGSSEMENHGDLSKVDKLYVYRTTAGARDDAPNFVKILQS

SEQ ID NO: 189290 - protein, 142 aa, Zea mays
  unsure (1)..(142): unsure at all Xaa locations
  Clone ID: MRT4577_104219C.1.pep
VEEEEASQKLLRXNGPVVKIPQEDKRLPVAISGGDEGDDKKGTKKVKNSVXTYKIYVFXVLKHAHPXDIDISSKVMYIMNSFINDVCERIAGEDVKLARDKIKTTITXSREIMTSVRLYLPGELDKHAVSEGTKDVTKLTSA

SEQ ID NO: 189291 - protein, 91 aa, Zea mays
  Clone ID: MRT4577_10421C.1.pep
VRRSRRLHRLARACPFAFDCSRLASITRYAVIYERGVAQRPARVRSAPTGSMGSRTPCCKRRATTELCSRRWRPGTGTSTWPWSRGRLSRS

SEQ ID NO: 189292 - protein, 123 aa, Zea mays
  Clone ID: MRT4577_104220C.1.pep
KNGVPCPRPLSLTHQRKNAPVSLAQMPLKKKNPSKFLAEAPSLLKVLPRPWLFFVPGSQSPPPNPFLFTRKKKSPVLPFLAGLFLKKKDKIGAQGWPKNWVLSPVVQPLGARSWVLSYPPPVF

SEQ ID NO: 189293 - protein, 88 aa, Zea mays
  unsure (1)..(88): unsure at all Xaa locations
  Clone ID: MRT4577_104221C.1.pep
MRPALXKSTAELLRRSRGYASSANPERKVAILGAAGGIGQPLSLLMKLNPLVSSLSLYEIXAGPPGXRADXCHINFPRPWGRGAMGGR

SEQ ID NO: 189294 - protein, 58 aa, Zea mays
  Clone ID: MRT4577_104222C.1.pep
IYRIILFKPFMAARLTSCASFIWEIIYLFASLLEAAASFGETIILFMLSSSLSFSSFT

SEQ ID NO: 189295 - protein, 48 aa, Zea mays
  unsure (1)..(48): unsure at all Xaa locations
  Clone ID: MRT4577_104223C.1.pep
LLLPVXGYQYTNNSYYTINPFYQKNLRTNNILYLQEITILTTPITLPT

SEQ ID NO: 189296 - protein, 34 aa, Zea mays
  Clone ID: MRT4577_104224C.1.pep
VHTVLCISSSEHTFDTYVPLPGHTHKSSSLELST

SEQ ID NO: 189297 - protein, 77 aa, Zea mays
  Clone ID: MRT4577_104225C.1.pep
TGGQLAIRSPNKQTNKQQTPPRNSCSVQNDTSTQETEKVTLREQEGSLLINMQGTEQNQHKHVVRPLKPDGRRTLTN

SEQ ID NO: 189298 - protein, 143 aa, Zea mays
  unsure (1)..(143): unsure at all Xaa locations
  Clone ID: MRT4577_104226C.1.pep
LGGLRVLSSSWVNQYSSYKYFPLMLVNVAHASIRAGPILNCICHPVLKHRELGDFASPDKXYCGLCVDAPALPKYGPSRRAAWKRNQTLSLHRLPLSTLILTVCNCAPRTHAGARIEVGVCDSLVSFACMRYSSAPCLPMSAP

SEQ ID NO: 189299 - protein, 54 aa, Zea mays
  Clone ID: MRT4577_104227C.1.pep
IYFGIKNLPRAGSKNGPGPKNPGKKNPPQNFGLGGGPKIEGRANTLVKKGGGGN

SEQ ID NO: 189300 - protein, 58 aa, Zea mays
  Clone ID: MRT4577_104228C.1.pep
IQGAKTPGGGHMASSYGTAGVKTQWHARLNLIVTEKKERRSRYCTGGHRNYNRAEQTS

SEQ ID NO: 189301 - protein, 57 aa, Zea mays
  Clone ID: MRT4577_104229C.1.pep
LVHICCIWTVMSFSIYRTPTMPNGTKRSTGQIVCSSVTTQQKHSVTGKRQYTVHSIP

SEQ ID NO: 189302 - protein, 97 aa, Zea mays
  Clone ID: MRT4577_10422C.1.pep
KPGFSPSEVFKRRPLKLNLGTPLKEYEIAYPLKLTSNLLGGHPFFFLKKIFYFIFTLFYIFLFLFLLFFSNFFILFFFYFIFFFFSHASADAWADAW

SEQ ID NO: 189303 - protein, 265 aa, Zea mays
  Clone ID: MRT4577_104230C.1.pep
MPGLTAPSDYAEEPPPHPALRINSKEPFNAEPHRSALVSSYITPVDFFYKRNHGPIPKVDDISRYSVSISGLMNKHIQLSMDDIRMLPKYNVTATLQCAGNKRTAMSKVRKVRGVGWDVSALGNATWGGAKLSDVLELVGIHKLSSVTSLGGKHVEFVSVDRCKEEKGGPYKASIPLKQATDPDADVLLAYEMNGETINRDHGYPLRVVVPGVIGARSVKWLDSINIIKEECQGFFMQKDYKMFPPTVDWDNIKLVTRRPQMDFS

SEQ ID NO: 189304 - protein, 106 aa, Zea mays
  Clone ID: MRT4577_104231C.1.pep
KDEQKVKDQDKECLVHAPTIQRGGPCRIAHEVKWSLSAPVSALVPAEYTPLVSVSSLFLVQQHCSCSSTKSVRPRILSTAPTKSVSFGCLYAAMSLHYNWLPRLAV

SEQ ID NO: 189305 - protein, 92 aa, Zea mays
  unsure (1)..(92): unsure at all Xaa locations
  Clone ID: MRT4577_104232C.1.pep
MDETTGDLGWRQGWPDGGGGMPLQGPVLALASIVAFFLYLTWQIDEYEEQLRRRAQAGLWVLLLLGLLALVVLAHHVLFDAXGRVLVAAPAA

SEQ ID NO: 189306 - protein, 145 aa, Zea mays
  unsure (1)..(145): unsure at all Xaa locations
  Clone ID: MRT4577_104233C.1.pep
MVSLAAVSVKPGGMKGLVGSSIAGRKLGGARAAAXSIRRPRESAAQTKYRDKSGYFDLHDIGNTTEQWDLYXGSDTSSPYNPTELXCFETLAXPFTKRGLXMLKILLLVADSLLAYVSDVSSPXDLLPIWKGPQEPPHPSQREKI

SEQ ID NO: 189307 - protein, 124 aa, Zea mays
  unsure (1)..(124): unsure at all Xaa locations
  Clone ID: MRT4577_104234C.1.pep
YWLGSCTSCWDLFLVSSTALLYLAYNFSRDHKPELEAERERXIQSAGGFILMGRINGNLNLSRAIXFFTRFFLFMPNGLACKMPXGDMKFKENKFLPPPPNKQILTMNPDIIVGAAPPRSHFPG

SEQ ID NO: 189308 - protein, 90 aa, Zea mays
  Clone ID: MRT4577_104235C.1.pep
DADLVSLSRGDRKRWHNMRAAAEAAAEAAAQAARLLLRLSLLTMQAMKTKPDGAAGSVCSLELQSLIYFLLILDLVNLGHCAYHAECLVF

SEQ ID NO: 189309 - protein, 82 aa, Zea mays
  Clone ID: MRT4577_104236C.1.pep
KNKNHLIGEHLNSFAEKNKKTHTSHHPVHHTSHHPGHHTSHHPGHHTSHHHPGHPCIRRHAQHARHTNSISPKQQLMRHNYF

SEQ ID NO: 189310 - protein, 83 aa, Zea mays
  unsure (1)..(83): unsure at all Xaa locations
  Clone ID: MRT4577_104237C.1.pep
MDAFQKQLDLRMGAYRNSDAEEECRNYYDRDVCRLFLAXLWPHDLYQLTXKKDLEACSKIHSLQLRXVYELATAKGTDILDRE

SEQ ID NO: 189311 - protein, 97 aa, Zea mays
  Clone ID: MRT4577_104238C.1.pep
SRCVFFRDRTFLWVCGFASQFHSAGSGVYDCENVVDVSGVNYGLVARGCRTGVRCVALCWLRDDLLALSSEAELVEIRGGEDRRGISNKTVMPRVHD

SEQ ID NO: 189312 - protein, 70 aa, Zea mays
  Clone ID: MRT4577_104239C.1.pep
SPVVVLVVWGRSVLKCERMPSSVSWPKVCAFPRCTFRHMFGLQVFRCIWWSFGRARHPRCCGLSPPVIGG

SEQ ID NO: 189313 - protein, 67 aa, Zea mays
  unsure (1)..(67): unsure at all Xaa locations
  Clone ID: MRT4577_10423C.1.pep
MGKEKSHINIVVIGHVDSGKSTTTGHLIYKLGGIDKRVIXRFXKEAAXMNNLSFKYAWVLDKLNVPY

SEQ ID NO: 189314 - protein, 60 aa, Zea mays
  Clone ID: MRT4577_104240C.1.pep
LRNGFYDKLEKARIRTIKTVYWFIPDIFRLMHIFIVLSLLSTIANTIIVTMNDYKKQKQL

SEQ ID NO: 189315 - protein, 118 aa, Zea mays
  Clone ID: MRT4577_104241C.1.pep
MVRSSIRPLGHHGFRREIADGPGIPAPTECAIRQRRAQQNSAPTPWKPIATPARIAAAASFLSLRIRRSFLAHPLSRRWLRAMGSGASVLIPRAVRNSREGRYNGGATTAESVVRLRA

SEQ ID NO: 189316 - protein, 34 aa, Zea mays
  Clone ID: MRT4577_104242C.1.pep
RCPSLYSLRPPRLPQSHCPSPRCIARFCGPAYGG

SEQ ID NO: 189317 - protein, 48 aa, Zea mays
  Clone ID: MRT4577_104243C.1.pep
LVETMHASRYITFQKQRRHTSHMMIIATHIPIEKRQDHAYKAKCLSTP

SEQ ID NO: 189318 - protein, 85 aa, Zea mays
  Clone ID: MRT4577_104244C.1.pep
SSFRSIAHEPELCRSLSTSTICSPWSDCLSASDSMPHLMHVDLELVRSVVFRVRCCYCGIPRHALAILLALSKYCLLVVSANWLL

SEQ ID NO: 189319 - protein, 62 aa, Zea mays
  Clone ID: MRT4577_104245C.1.pep
QICTPLMEALVYRAGEREGRHSYEGWYTVLHLLQEVDPLGDAVGSYSVSNRCSFRHVQRVLP

SEQ ID NO: 189320 - protein, 57 aa, Zea mays
  Clone ID: MRT4577_104246C.1.pep
MFFSFINSLNFYSLYSFSKYFIKLIFLFLYKLIKLLPSILLFILPFFFLFILKIFLY

SEQ ID NO: 189321 - protein, 48 aa, Zea mays
  Clone ID: MRT4577_104247C.1.pep
IRLPTRAEARDLLPVGVMRHQRHLLQTNIQRLGAQLPVIVKPTAWDLP

SEQ ID NO: 189322 - protein, 69 aa, Zea mays
  Clone ID: MRT4577_104248C.1.pep
RIYTIFRGLEFSGKPHVNRDSIRHPHPSPVLSISCNHLLVNFFLCFTQDGACDSVWGKSRIYRSPNRLG

SEQ ID NO: 189323 - protein, 342 aa, Zea mays
  Clone ID: MRT4577_104249C.1.pep
MLSSHHEAMLPYAPPPPPPSLLVDRRYRQLQQAGEAAPSCPRCDSPNTKFCYYNNYSLTQPRYFCKGCRRYWTRGGSLRNVPVGGGCRRNRRAKSSLRSAVGGGGGGHRFPGPVVRPDLVLEGMVSNPAQEMPGVPAAADGSTIDLAMLYAKFLDHHPPAEEGLGSAVTPELAVALAGPGRVDEALFDTFSDLSPPAGVLAAPPVQFDPPCGHDDGFDDWSSGAPVRSAGPSSTASTATATTTMPPCADVSVHAAFGEEFNFAKDQSCLLFDSLGLPTDDVGDLSSSSWRSIVPGLSTLEDTEYDLLDSSFPDDALSLHEGMVSGTDHDCWSVVDCQGLEAL

SEQ ID NO: 189324 - protein, 74 aa, Zea mays
  Clone ID: MRT4577_10424C.1.pep
MHTIKEENSCEDDGVSEDDGVNSCNEELFELATRPGLEGETETKVEGKVDRKADEFIAKFREQIRMQKVEQARR

SEQ ID NO: 189325 - protein, 54 aa, Zea mays
  Clone ID: MRT4577_104250C.1.pep
PSSYSLTLHYLTWGGILCGMLLLRAIDNSFPMSHVTLTATVILTHLDRLIHYSL

SEQ ID NO: 189326 - protein, 76 aa, Zea mays
  Clone ID: MRT4577_104251C.1.pep
KSNQFYYRPFNSTQQSTGGRAFIYLSNPTAGNTPLFSAPTWKRVLRVFPQFTPGYKWGPKPGKPANIPASLFKLLA

SEQ ID NO: 189327 - protein, 64 aa, Zea mays
  Clone ID: MRT4577_104252C.1.pep
LSAGVGLRCPRVSSVSAVSFAGFLLRRGNLLGPVFLKYPLRALGVGVVTTKCVESTRSVQVRAG

SEQ ID NO: 189328 - protein, 112 aa, Zea mays
  Clone ID: MRT4577_104253C.1.pep
SRHVVGVRTHDAAAPHDMASSSVALAVSTSSWSVGWDSTLWSPSITTAVDSDSALYSAATSRTAQYRTSTRKSTAKRTAAVADTRAHGWVLEIDTRVAPDAKQSRPASRYPM

SEQ ID NO: 189329 - protein, 96 aa, Zea mays
  Clone ID: MRT4577_104254C.1.pep
GRSPSNELLVFFLFGRSWGPISWMAPGIGVFFQGGGGFRPRGGLFLHWVTKLGFLGPISRAGFYGRLAPAAARWVHFAPGPWFFACKRDPLVGGRI

SEQ ID NO: 189330 - protein, 143 aa, Zea mays
  Clone ID: MRT4577_104255C.1.pep
GPGCLTSSASSSRSRRLSQDEQRKQESDQRSVGRDYVKRGSSRSSRASTGRLSGVALLPRQAQAHRARGGGTPCANKAQETMARRTTTSGIGTGTVGGVLDWRARMDTSNTETKASVDSRLGDSARLRRGLPSSTNGRGARRR

SEQ ID NO: 189331 - protein, 45 aa, Zea mays
  Clone ID: MRT4577_104256C.1.pep
LWFFFLNTTASTVFIAERLYKDIHTHTTGQTESRARPDHLQRNGC

SEQ ID NO: 189332 - protein, 229 aa, Zea mays
  unsure (1)..(229): unsure at all Xaa locations
  Clone ID: MRT4577_104257C.1.pep
VRTLCHHAHTSGRAPLPRPAETPSDLESGPPARPMSTLPAPPDAAGNGERQHPPPPPPQARTRRRDSDSGRPNGQTDAPSLPQLQEEEEAPERPAHVKNELRDTPXICPLVVXDDHHLYAAWCGSIILIPLVMDPAMGGXADDMAAVESTGLLVTGVTTSLHMSGGTRLPLAQGPSFVYLAPALAIINSPEFFGINDNNCKHIMKHLQGAIITGGACQVWMGYTGLMSL

SEQ ID NO: 189333 - protein, 277 aa, Zea mays
  Clone ID: MRT4577_104258C.1.pep
SRVPCRSSAPSASLVATTGRPPPPPYARCPALHFRSLRRTRAPARGLEASRSSEESNFGNDLKDGSSVSSENFGSSCLPGESYQSATVDHEKRPLFDVKTCQIACKRPKQTDHCTWLYSFEEHPLTSEVGISSPALYDGLVEIKQPNDIPAINGATTCSGSSVIPCGNHDQSILVASLDIPDWATSFPGYFEDCGPVVTYSHVDDIGSPRKGVPIGPEHQADIPELRPLNSMIVPGASEFCANLDCSSASTSESVPRGDDYVSDKWIRYCVPVTCCS

SEQ ID NO: 189334 - protein, 46 aa, Zea mays
  Clone ID: MRT4577_104259C.1.pep
LIMAIQTRTVLIHTRTRHVGSQMLIYGPPQPSTIAGPMTQTCTILA

SEQ ID NO: 189335 - protein, 75 aa, Zea mays
  Clone ID: MRT4577_10425C.1.pep
GQQDNLQSEASISQREKGTSSSSGINHGVDTQPKSNSERSFQYVLMLKKQKSSRVYDMSHEEGRGDLYKFCRPCT

SEQ ID NO: 189336 - protein, 188 aa, Zea mays
  Clone ID: MRT4577_104260C.1.pep
NHLITSLIVVDTACALRMQYRIWEGVSLRDTSPAGPLTPRRGHCPGETSSSNLGRKGRWPGLAGCLRPSRAGAEPPQRAPAAPTTRRSGQSGPRSAPSRALAQDAPRTTTVAAAPDRPHPRRREMGKPRHRRPGDGLRPAMSFDGGEGRGQGGGEAGGIWGFRPCRPWRSDATSNNFCANTFYLEHKY

SEQ ID NO: 189337 - protein, 492 aa, Zea mays
  Clone ID: MRT4577_104261C.1.pep
MLSTHEANADQFDLLSYGNLRGLEASRSSEESNFGNDLKDGSSVSSENFGSSCLPGESYQSATVDHEKRPLSDVKTCQIACKRPKQTDHCTWLYSFEEHPLTSEVGISSPALYDGLVEIKQPNDIPAINGATTCSGSSVIPCRNHDQSILVENLDIPDWATSFPGYFEDCGPVVTYSHVDDIGSPRKGVPIGPEHQADIPEWRPLNSMIVPGASEFCANLDCSSASTSESVPRGDDYVSDKWIRYCVVPVTCCSSPVDWAGDSKIDCNCSDEGSMRCSRQHIIEARDNLKMILGQDRFRELGLCEMGEDVALRWTDEEEKLFQRVVFLNPVSLGKNFWDHLPDAFPNKTSQELVSYYFNVFMLRKRAQQNRSDVLAVDSDDDELHGEPLAERVEGDPAVESSTHEHSVSNSLPMDDDHKEFEGAQFDGSLCEKSVYNAVECRHLPNQMPADSNTVNTALDVCDQDNGAQCSEFHMSLPSDTSNSLGDQSASV

SEQ ID NO: 189338 - protein, 86 aa, Zea mays
  unsure (1)..(86): unsure at all Xaa locations
  Clone ID: MRT4577_104262C.1.pep
PRGTPYCSPKSQLLGHKCSPQLRQVDPQPGSQGILGLVLQSILKKQPKKGQVRGLLAAQKAHQLRAMWGFQKPTPCPXVAAGGVPP

SEQ ID NO: 189339 - protein, 107 aa, Zea mays
  unsure (1)..(107): unsure at all Xaa locations
  Clone ID: MRT4577_104263C.1.pep
SITGAERGGGNXFAQGNLPDANKGSISLAASRAKLCQLCEQYSYEAXLLYLTQTETETEMVSILEDECVSLVRLKQQGITLIDYYVPIFFSEECMGTPEKVCESMHM

SEQ ID NO: 189340 - protein, 37 aa, Zea mays
  unsure (1)..(37): unsure at all Xaa locations
  Clone ID: MRT4577_104264C.1.pep
QDGSFNHIVQGPXVPSVQAHLATHPFENKTLKNLVQP

SEQ ID NO: 189341 - protein, 256 aa, Zea mays
  unsure (1)..(256): unsure at all Xaa locations
  Clone ID: MRT4577_104265C.1.pep
MVMGREDKYVRFQDWRSEQSVSSENIVAPHRDDVSLFSSLKERTATVFTFLGNILHTETSNKSMLDERKSTTGTLHPQGPFLQKWNRIFVISCIFAVSVDPLFLYIPVINDEKPCWYLDRKLEKAASVLRFFTDIFYILHIIFQFRTGFIASSHTTFGRSVLIEDRYAITKRYLSTYFFIDVFAILPIPQVIILVVLPNLHGSKVMKAKNVLMLIIICQYVPRLIRIRPLYLQITRSAGVITETARAGAAXTFCLH

SEQ ID NO: 189342 - protein, 150 aa, Zea mays
  unsure (1)..(150): unsure at all Xaa locations
  Clone ID: MRT4577_104266C.1.pep
FPLWLGGPSPGGRRKNDGTKGNKGEENAGGGERPPSKGDQKGTTKKKREGEKNGGRKGKGATGKGGQPGKAPPDPEGEPNGRKGRENKKRGEKGKRGSLGERVSRGKLHKKHEPAPKKGKXGNKKRGQTKKKGVAKTEAVPAGKPPNPKN

SEQ ID NO: 189343 - protein, 211 aa, Zea mays
  Clone ID: MRT4577_104267C.1.pep
MAHMAQGRMSCVFLACLVAVASVSASTASAFVFKAGGTGEWRVPAAAGSGNGSSYNAWAQRNRFRVGDAIAFTYQPGNDSVLLVDKRSYDACDTGSPTDTFADGSTVFTFTRSGPFYFISGNKDNCDRGEKLIVVVMAERAAVGNATEPGAGLAPSPSGPFSSFSPPPPFGIDISPTAPYPPPNAAAPPKVAAGVAGAATFAIGALFYALV

SEQ ID NO: 189344 - protein, 59 aa, Zea mays
  Clone ID: MRT4577_104268C.1.pep
ARPSWLPYIGIVWCVKKKKNQSSSVCYPPPCMFGASLWAHVRVSTSPLLDPIASAVPKY

SEQ ID NO: 189345 - protein, 191 aa, Zea mays
  unsure (1)..(191): unsure at all Xaa locations
  Clone ID: MRT4577_104269C.1.pep
MGDNYDDEGEPIVDLDEREPSPEPQPYEDLDDDLGDGGDWTRSRSPTPVHGDDSEAGSSAKPRKRLLKKGGGGGMPGDDGLDDFGLEDEDAVPASEARKSKGSSALRDLARGGAGKEKKEKKRRREDDGRGSDSGMVRDRRGAGGRDSGGREDQDDGEREIQELWDTIAGGDSEDDQXRCRTIDDDNFIDD

SEQ ID NO: 189346 - protein, 144 aa, Zea mays
  unsure (1)..(144): unsure at all Xaa locations
  Clone ID: MRT4577_10426C.1.pep
SAGGGAAAVAEIMMKTPPPDMCTXTAGKHARQRLGGVXDVTVVDMQVDAVEKCVKEVRKLAKEEVKTAATSDAWRGLNLCKTYYLYAGDNLGXCKGAIHLRDGVTIRATMSMVAQDTHSCDEEFKKAVSKNPMEDHYRSLIQMS

SEQ ID NO: 189347 - protein, 125 aa, Zea mays
  unsure (1)..(125): unsure at all Xaa locations
  Clone ID: MRT4577_104270C.1.pep
CVFTHTNQFCFMSMGYYCSQRLFKDGGGVYSCYKILFKNDPSCFMHTETVIITDINYYPVXSKYHFDLSITCIRLSCLKRLTSTXLRHSIIINIKFTTLPIEFPGLKIVFHVQEYSNTIYLAILF

SEQ ID NO: 189348 - protein, 168 aa, Zea mays
  unsure (1)..(168): unsure at all Xaa locations
  Clone ID: MRT4577_104271C.1.pep
NQKSXPLLHGPNPRRDLRRNRQRHALNRRPGRGRIRCWEMGAAKGKVRENKRSPRRCFAEIDRYCNNAKANPTVEAIKKRSRLCLWWWRIGPRPYADPDKQKQRNPQPRGAKKSVQEPEPELKRINGRRRPRGSGERASLAAANNHASQRQKLWNSLGSTREASRLDF

SEQ ID NO: 189349 - protein, 91 aa, Zea mays
  Clone ID: MRT4577_104272C.1.pep
PSTPPSNSEGSSAAPVIWVIAVEIFFSCKMSFGSQLVLVSPHYFCGTQILGCPRIRACGPQSLQLQLKRFFLGAECFIRFFWPGSSAPAGP

SEQ ID NO: 189350 - protein, 112 aa, Zea mays
  Clone ID: MRT4577_104273C.1.pep
RAGISLIPALIPRPIFFLPMGSEVTHSSAFVSLREVESHSVLSTTSPSSFSAPAHLSKSSRPSVRPQTTAGIPINGAEGRWRWRPAAAALGRGVGRVWRRRRGDHLKDLLSW

SEQ ID NO: 189351 - protein, 345 aa, Zea mays
  Clone ID: MRT4577_104274C.1.pep
RGQQERGMARLMSLVDEGFAVRRQTQEALYCMQMMTRIQTQLYTRRLKTEKDKKVLKSQTKAVNKHSLDKAKIGEGWDHSLQSKEQMETVQKMKQEAATRRQRALSYAFSQQWRNRNTSSARAAHGPAPMYMEPGNPNWGWCWAERWMAATRPWENQTMPPPDTGRAASKSASTRLPRVAVSVQIPTATTTPKGKPFRPPNWSSSSSLSSPSTPPPRRTATLASPRSGPLHATSGLQHSKSLQPDHRRPRSSQELSANSPRRAAVPASPRCASGSSSPLHPSSGAGAQHATTTATIRLERRPRSSQDRGMSSPRLLGAKDAPLRRTASLRSELPIRLSLGSAVAA

SEQ ID NO: 189352 - protein, 96 aa, Zea mays
  unsure (1)..(96): unsure at all Xaa locations
  Clone ID: MRT4577_104275C.1.pep
DSASMIEWGGXVVTREPTGTHTSTQMGSGHFPEEGFSKASYFKNVQVVDSSNQLSAPKGVGTFTEQSNCYDVQNGNNGDWGTYFYYGGPGKNSNCP

SEQ ID NO: 189353 - protein, 416 aa, Zea mays
  Clone ID: MRT4577_104276C.1.pep
MARARGGAAWWVLAAAWVLWAAAAAAEAEARSPSARRVHRHLKRLNKPAVKSIESPDGDIIDCVHISHQPAFDHPLLKNHTIQFRPAYHPEGLYDDTKSSIGSNNAGERPMLQMWHRNGRCPEGTVPIRRTKKDDLLRASSVRRYGRKRHTAPNPLSVDPNMLSEGGHQHAIAYVQGDKYYGAKATINVWEPKIQQANEFSLSQLWILGGSFGEDLNSIEAGWQVSPDLYGDNNTRLFTYWTSDAYQATGCYNMLCSGFIQINSEVAMGASIFPISNYAGSQYDISILIWKDPKEGNWWMQFGKEYVLGYWPSFLFSYLADSASMIEWGGEVVNSEPDGTHTSTQMGSGHFPEEGFSKASYFKNVQVVDSSNQLSAPKGVGTFTEQSNCYDVQNGNNGDWGTYFYYGGPGKNSNCP

SEQ ID NO: 189354 - protein, 93 aa, Zea mays
  Clone ID: MRT4577_104277C.1.pep
LSWGGGKFTPPGLFFPVPFIGAPRAFLRGGLSPGPPEPQGLGGCIFFPRGIQNWPVTKPVQRGGGGCHGVFKGLHQVFWPRGVGNPSENISFW

SEQ ID NO: 189355 - protein, 76 aa, Zea mays
  Clone ID: MRT4577_104278C.1.pep
LSRSSPDGALTNRVPGLNALFDTPCFLFIKRPRPGVCPQPRRLRWLRPTARFLFFLPFLPGLFRRFFPFCSRSGAP

SEQ ID NO: 189356 - protein, 57 aa, Zea mays
  unsure (1)..(57): unsure at all Xaa locations
  Clone ID: MRT4577_104279C.1.pep
MSWDRXNXLRQXLXXYXITWXFGLLVYFIVXTLSYIFIFDKRTFEHPRFIKNQXRME

SEQ ID NO: 189357 - protein, 94 aa, Zea mays
  Clone ID: MRT4577_10427C.1.pep
RNINYIRSTCGRRPLTLYHNRGVDRPDLSKRGLDPSETIMLHVYEDSEPCVKSVLLLKYPFPTCDHLLHSHEDSPSKGIEAHRPIYSFTDESSY

SEQ ID NO: 189358 - protein, 42 aa, Zea mays
  Clone ID: MRT4577_104280C.1.pep
YICWNPALLGVGLRLSDGLSLSRDNCQAGSQLTRSHKAYGAR

SEQ ID NO: 189359 - protein, 54 aa, Zea mays
  Clone ID: MRT4577_104281C.1.pep
RPDTFYLQPHLSIPYQKKTLIYPQINQTTPIILYPSKQHPLTSLNDKYSSPTTT

SEQ ID NO: 189360 - protein, 86 aa, Zea mays
  Clone ID: MRT4577_104282C.1.pep
FAEFPISLDNQTNVPPEKSLKLPSKIDGAKVGTPPIALSSNKNETWPKPLKSILSNLKWVLSWFIANTSFAPPSVSLPPQSLKTKS

SEQ ID NO: 189361 - protein, 153 aa, Zea mays
  unsure (1)..(153): unsure at all Xaa locations
  Clone ID: MRT4577_104283C.1.pep
QGPKPNGIGRAKKKKGPTKGGPKGGKQKGARIRGPPGKGSNGITGRGGPGKEGGSPKPNRGKNKKXQIGQKERGTPXPGKRAGPKPKGGTPQGKRRARKPPGKNQRGKKPPGPPPXGPAPGEKQQXNPQNPPAGEENPPDTKPLDRCQKKKVG

SEQ ID NO: 189362 - protein, 95 aa, Zea mays
  Clone ID: MRT4577_104284C.1.pep
FKPIICIFANYNISTPSELLFGSRGNQTGTMWGLKSPRTQKIVFLASANPLGGHTSKKTGLFWAQKNHINGGGGVYRGPQISTGVEGTLNRDRPE

SEQ ID NO: 189363 - protein, 69 aa, Zea mays
  Clone ID: MRT4577_104285C.1.pep
ALRVCCGGDDGKYNFNLSAACGMPGVAACPNPSAYVNWDGVHLTEAAYHRIADGWLRGPYANPPILATA

SEQ ID NO: 189364 - protein, 55 aa, Zea mays
  Clone ID: MRT4577_104286C.1.pep
IWLRQTPSRRHMRRRQGRRPVELRIVRPAMQGGQNVQLISGSIMCQANSALAIII

SEQ ID NO: 189365 - protein, 97 aa, Zea mays
  Clone ID: MRT4577_104287C.1.pep
MAARVPGSLLAVLLLILATASPTGALRFDLRSGHTKCISDDIKVGAMAVGKYQVMAPDGVASSSSSQQLPDSHRISLRVTSALRNSLHYAENLHSGN

SEQ ID NO: 189366 - protein, 177 aa, Zea mays
  Clone ID: MRT4577_104288C.1.pep
MEARTRPYVIIEGELYKHGVCSPLLKCLYPELKAITVDNGTQFDAEAFKEFCDQISTKIHFASVRHPESNGLIERANGIIMTRIMKLIFNQPRGKWPEEFIKVVWSLNTTVSRSAGFTPFKLLFGDEVITPEVAITGSIRSTTSAEDEADYHVAKDTIEGVRLQVVENINTVTEKFD

SEQ ID NO: 189367 - protein, 139 aa, Zea mays
  Clone ID: MRT4577_104289C.1.pep
LIEQFSSTSDGSFSHGDLDALKLDVTSDPSLFSFSEILGLPVLSSASWHSELDFTGLDPILLLVELVRTIILYSCMPSDIDVGSGSTARVCQSATLLGERVPYYHMIRSCPMLLCPMQEMSKINLINDRMVPDRLRISA

SEQ ID NO: 189368 - protein, 44 aa, Zea mays
  Clone ID: MRT4577_10428C.1.pep
WLVTIWLVLPRACPVVISLIFLAGQIVEWFPELIMPCCIQGVPL

SEQ ID NO: 189369 - protein, 67 aa, Zea mays
  Clone ID: MRT4577_104290C.1.pep
VNWDQQQVSPSTANAHKLKIDPCSIIICGETTPGQNKNALQRSTMRANYNTSLQNQKDWTPFTSNQP

SEQ ID NO: 189370 - protein, 65 aa, Zea mays
  Clone ID: MRT4577_104291C.1.pep
FTAMRRPWQPGLQAIDCISGLAAATLGSCRIKSNGQCRPSGHTAMCINMLWYNTSALTSQHCSLL

SEQ ID NO: 189371 - protein, 126 aa, Zea mays
  unsure (1)..(126): unsure at all Xaa locations
  Clone ID: MRT4577_104292C.1.pep
MLGVGVGVRLMVGGAPAPPVPAPPGKPPLPLCSSLLHRSSGXGCGGGRPWKXSTTATTSSRATRRKWWSDPDGSQEDYGSSSLEEDEYGYGYDYDYEDEAAFPGFGGAGEMFDEPWFSKVWYIRIV

SEQ ID NO: 189372 - protein, 63 aa, Zea mays
  Clone ID: MRT4577_104293C.1.pep
KIRVSFSNRNRQPLFNQSGACTYVPPFKQKFYMYILSAGLGSSGPLWGITGSPYPNLGRICYQ

SEQ ID NO: 189373 - protein, 58 aa, Zea mays
  Clone ID: MRT4577_104294C.1.pep
RGARRNHAHRVVDAHRCAEADGPHAGGYRLLDAHHRLVRHRLDVVEVHPEDQHPVVGG

SEQ ID NO: 189374 - protein, 320 aa, Zea mays
  Clone ID: MRT4577_104295C.1.pep
MLGVGLGVRLMVAVAPAPPVPAPPGKPPLPLCSSLRHRSSGWWFSNGDAHGRDSTAATTSSRATRRKWWSDPDGSQEDYGSSSLEEDEYGYGYDYDYEDEAAFPGFGGAGEMFDEPWFSKVFKTYGFMLPVMLASMFAVTGLKAFLMAMAIPLGQSAISFIIDAVWPRRKGNRDDRWRRPVQEEEEEEEDFPRDATDFATGGRGRYSSSYYEGRRGRQSYQSSVSNDFADAASAAVGADDSTKSSSSGMAEATNPAVGLAGAWGFRSSLAPLLLPGWLWAPATLSQRGTLITARNRGLRRLGRQMRILPPLAVAEERSRE

SEQ ID NO: 189375 - protein, 337 aa, Zea mays
  unsure (1)..(337): unsure at all Xaa locations
  Clone ID: MRT4577_104296C.1.pep
MIVAAAAPAPPVPAPPGKPPFSLSSSSSSFSLRRRSFSLWFSNGNAHGRDSATATTSSRATRRWWWSDPGGSREDYGSSSLEEEDVYDYEDEAAFPRFGGAAELFDEPWFSKVYKTYGILLPLMLASMLAATGPKAFLMAMVIPLSQSAISFLLDAVWGRRKXPRRQEETIPRGXDYPEDAAGFAAGGRGNGYRSRSSSSSNYYEGRRRTSNYQSSVSNNFAGAASTGVGADDNTKSSSSGYGGWDELLDNDTAAQETKRRSSFSAGTTDRSTKSQPSATGEEDADYTATPSTRTRMRRRRTPGTMGLGSTMYKQAPLVMRLLVAVFPFLGSWFRLL

SEQ ID NO: 189376 - protein, 83 aa, Zea mays
  Clone ID: MRT4577_104297C.1.pep
MEGGLSPERHAAAEPVRSRWTPKPEQILILESIFNSGMVNPPKDETVRIRKLLERFGAVGDANVFYWFQNRRSRSRRRRRARG

SEQ ID NO: 189377 - protein, 195 aa, Zea mays
  unsure (1)..(195): unsure at all Xaa locations
  Clone ID: MRT4577_104298C.1.pep
MIVAAAAPAPPVPAPPSKPPFSLSSSSFSLRRRSFSLWFSNGNAHGRDSATATTSSRATRRWWWSDPGGSQEVYGSSSLEEEEDGYDYEDEAAFPGFGGAAELFDEPWFSKVYKTYGILLPLMLASMLAATGPKAFIMAMVIPLSQSAISFLLDAVWGRRXXPRRQEETIPRGXDYPEDAAGFAGGGRGNGYRSL

SEQ ID NO: 189378 - protein, 114 aa, Zea mays
  Clone ID: MRT4577_104299C.1.pep
MSIENLKSFDPFAEADDDTGDTKKVENHIHIRIQQRNGRKSLTTVTGLPAKFDPGKILTFFRKEFACNGNKVNDEKAGEVIQLQGDQRKKVMDFLVDKKAGLGLNPDNITVHGA

SEQ ID NO: 189379 - protein, 198 aa, Zea mays
  Clone ID: MRT4577_10429C.1.pep
MLPNAKRVLAKQATGLMARAHAYSLGAQRQRLVSTLAVLEQKDGVLNHSSLSAFTAAKKLGGTVHGFIAGTGVKSVAQEVAKAEGVEKIIAVENAAYEKGLPETFAPLLVENIKKGGYTHVIAGHTAFGKNVMPRVAALLDSQQISDITAIESENVFVRPIYAGNAIATVESSDSVKIVTIRGTAFASVPLEGGSAAR

SEQ ID NO: 189380 - protein, 135 aa, Zea mays
  Clone ID: MRT4577_1042C.1.pep
LRQGSSAITKTGFIRSAKKFRWVKLDDPVDTNKLCHPQALTKFCFFLLDALKERGARMKPLICACLAKEPEKVLVVGVCGKPRLGAVQGNAFGNAFRYAAEEIGADYFHDMFESSWIVLDVVAVSSFMIRLTEKL

SEQ ID NO: 189381 - protein, 178 aa, Zea mays
  Clone ID: MRT4577_104300C.1.pep
MEGGLSPERHAAAEPVRSRWTPKPEQILILESIFNSGMVNPPKDETVRIRKLLERFGAVGDANVFYWFQNRRSRSRRRQRQLQAQAAAAAAASSSSSGSPPTSGLAPGHATASSTAGMFAHGATYGSSASASWPPPPSCEGMMGDLDYGGGDDLFAISRQMGYASGGGSGSASSAASR

SEQ ID NO: 189382 - protein, 90 aa, Zea mays
  Clone ID: MRT4577_104301C.1.pep
AEASAFALHGCSYALRVLVIRRGLLLLTSSCFMAPRTSVQIARASRTGARRVGRAVASRRNSAAHLVAGGQAEPVLQVMVLRPALLSGRR

SEQ ID NO: 189383 - protein, 48 aa, Zea mays
  Clone ID: MRT4577_104302C.1.pep
HCPPQISTSSPVLGRPGPALALCFACESAPVLGPAPPDSPRLKPVGDR

SEQ ID NO: 189384 - protein, 152 aa, Zea mays
  unsure (1)..(152): unsure at all Xaa locations
  Clone ID: MRT4577_104303C.1.pep
MTLRSIVRDLRENFGNLSRRNFEAKISSVPSLSGHHRGKSLESASDLQDSLVTNLQGNWASLPPELLRDVMXRLEEDDSNWPSRKDVVACASVCTTWREMCKDIVRNPEFCGKLTFPVSLKQPGSRDGLIQCFIKGTSQANYRLYCPLLLVA

SEQ ID NO: 189385 - protein, 132 aa, Zea mays
  Clone ID: MRT4577_104304C.1.pep
QPGGETTHVTKKQGSNKTLGTFFGGAHLKQQENHPGPGAGGPGPNQKGTGSFQTKQKRGGPQQKDTLSKRTHKTINQAGQGVTPKTNFCPPLPGEKTGRLQMGDPPFWAPAKKIKGKTGAGTPGGGGKRPQP

SEQ ID NO: 189386 - protein, 40 aa, Zea mays
  Clone ID: MRT4577_104305C.1.pep
HVNRGSCARIRSLLPLIHILWSEVTCDVITEELNLYRCYE

SEQ ID NO: 189387 - protein, 130 aa, Zea mays
  Clone ID: MRT4577_104306C.1.pep
MAESTARTVKDVNPHEFVKAYSAHLKRSGKMELPEWVDIVKTARFKELPPYDPNWSQGDEGCCQEEMIYLAGDEGCCQEEMIYLAGAVLACWLPRGSLKYLVLLTSLQLSREQVIYDGNVCLVMKYYYFR

SEQ ID NO: 189388 - protein, 93 aa, Zea mays
  Clone ID: MRT4577_104307C.1.pep
FDKQFTNLSRPLYLNERRSTARGNDLGSTSHQTPLKENSMRSFVLDPSVRTGEGAYCYCLRAVTPECGKSSTAFVSCRERRSRKVEHGAHLRT

SEQ ID NO: 189389 - protein, 52 aa, Zea mays
  unsure (1)..(52): unsure at all Xaa locations
  Clone ID: MRT4577_104308C.1.pep
APRYPRLIEFYPLGFIFNQTCGKWKWALEIETREHXYLFLNKRVHEKNIWDR

SEQ ID NO: 189390 - protein, 103 aa, Zea mays
  Clone ID: MRT4577_104309C.1.pep
QCYIYVQNSLFVAAAQVGRCTSFLFFFCFFYFNIKQKTYLLNCNFLKLSRRPLQRWNFSTMVVVTIGSELGSKLWVIMEKGASFRKLCCVKITTVVVSRRLKG

SEQ ID NO: 189391 - protein, 413 aa, Zea mays
  Clone ID: MRT4577_10430C.1.pep
MQAAAARARRLLALPAASGIPGILSGPIPGRASYAEGVLLYRLNGAPASPSSPQHTRGFSSSCFASRSHCNLPSPTIASQWLNEKSVHYHMTTAHFSTEASDMDHPTEAVEEMYQKMLKSVEAETMPPNAWLWSMIDSCSNKEDIKLLFQILQKLRVFRLSNLRISANFNEHLCRKVTEACARVGAVDYGLKALWKHNVYGITPTIGSAHYLLQHAKEQNDNKLMENVIHVLSRNFLPLQPGTADIVFSICYNADRWDLLSKYAERFVKAGVKLHRAAFDIWMDFAAKVGDSQSIWHINSLRGRSVKHYTLATGFACAKGSLLDRKPENAADKIKLLYEHLPDQKKPFVKDELEKLIAGWPTEVVKRQKKDKRKALEEALMKDIATMVDCLTKSGLDIPVELDKLSTPQLQVA

SEQ ID NO: 189392 - protein, 183 aa, Zea mays
  Clone ID: MRT4577_104310C.1.pep
DRMSVPVEPNTFRNQNIRIRTFGRDGEMKGIATARGTQPKKEEKNVNCRQATKDGWVGEPREARIVLLAVGRRRGGRTHSGEDVITIPCRDWPRWPTKRAWSASAPSFPYLALPFLVPQTRSTGAGTLGGGAAIEGAARKALWSRPRNGSSRFPSRRSLSVLVGRMATGGLEGGEETGGAPSR

SEQ ID NO: 189393 - protein, 52 aa, Zea mays
  Clone ID: MRT4577_104311C.1.pep
TQQQYMTLENAVRHHGMHVGRLASLSTHKNIEQRHTLTHTYGSINTSKCLER

SEQ ID NO: 189394 - protein, 54 aa, Zea mays
  Clone ID: MRT4577_104312C.1.pep
FCRLAYPPLCFSKSRLGRSRELFRTPCTRTHSMHVANFNVNPQRGSRTSLKGAV

SEQ ID NO: 189395 - protein, 87 aa, Zea mays
  Clone ID: MRT4577_104313C.1.pep
NLVGRQRFPAPGVLTLLTLGYLQGPGANPFRGFGPPPGPMGGILQAGAGMPASNLRFPRAPFGKVGPPPVVHEDTAFMGSGGLAFLV

SEQ ID NO: 189396 - protein, 59 aa, Zea mays
  Clone ID: MRT4577_104314C.1.pep
PPVFLLLSARPCLASFLGILPFSSSDHAYVSLSFVLLCSRPIQSYSILTSCAQSACRFG

SEQ ID NO: 189397 - protein, 78 aa, Zea mays
  unsure (1)..(78): unsure at all Xaa locations
  Clone ID: MRT4577_104315C.1.pep
STTASSSTCPAWELTPVVRRTVYVIPWSSNSLGSALVHSQRVLSLQARPYDILDCAAGTPKSTKIGPLIQWRPPTXXL

SEQ ID NO: 189398 - protein, 59 aa, Zea mays
  Clone ID: MRT4577_104316C.1.pep
YDRSWQTTRDRKTKYLLVESYYLLYVCIFSELLLWIRRFFVNSWCPFFLISHSFPNIVL

SEQ ID NO: 189399 - protein, 181 aa, Zea mays
  Clone ID: MRT4577_104317C.1.pep
ASGRSRSAAWADAWADAWADAWAFIGRIVMGLFGKTVPKTAENFRALCTGSRGVGKSGKALHYKGSKFHRIIPSFMLQGGDFTLGDGRGGESIYGLKFADENFKIKHTGPGLLSMANAGRDTNGSQFFITTVTTSWLDGKHVVFGKVLSGMDVVYKVEAEGRQSGEPKSKVVIADSGELPM

SEQ ID NO: 189400 - protein, 215 aa, Zea mays
  Clone ID: MRT4577_104318C.1.pep
METSGWRRRAAARASWSPATVYLWLALAAAALTLAQAKKDLTEVTHKVYFDVEIDGKPAGRIVMGLFGKTVPKTAENFRALCTGEKGIGKSGKALHYKGSTFHRIIPSFMLQGGDFTLGDGRGGESIYGMKFADENFKIKHTGPGLLSMANAGRDTNGSQFFITTVTTSWLDGKHVVFGKVLSGMDVVYKVEAEGRQSGQPKSKVVIADSGELPM

SEQ ID NO: 189401 - protein, 66 aa, Zea mays
  Clone ID: MRT4577_104319C.1.pep
PGRSLVNRYDPWSNKKAQFSEHSDVCPLAEKNLQVLRISGFKRIMNPTTQPRMRPVPDEVLSGIWA

SEQ ID NO: 189402 - protein, 92 aa, Zea mays
  Clone ID: MRT4577_10431C.1.pep
TCCTHDAKKNDRNCTTASRTRRERRERRLFFNGENTRIGCWWSGQRSARPVKLQRRVQRGSSTQEGEQGAPVRRAEKQSEHQKAARGTQVLA

SEQ ID NO: 189403 - protein, 227 aa, Zea mays
  Clone ID: MRT4577_104320C.1.pep
MAPSGWRRSAAARVAWRPATVCLWLALAAAALTLAQRLRSAGLVVDMTAKKDLTEVTHKVYFDIEIDGKPAGRIVMGLFGKTVPKTAENFRALCTGEKGVGKSGKALHYKGSKFHRIIPSFMLQGGDFTLGDGRGGESIYGLKFADENFKIKHTGPGLLSMANAGKNTNGSQFFITPVTPSWLNGKHVVFGKVLSGMDVVYKVKAKGRQSGQPKSKVFFFYSGHPPM

SEQ ID NO: 189404 - protein, 215 aa, Zea mays
  Clone ID: MRT4577_104321C.1.pep
MAPSGWRRSAAARAAWRPATVCLWLALAAAALTLAQAKKDLTEVTHKVYFDIEIDGKPAGRIVMGLFGKTVPKTAENFRALCTGEKGVGKSGKALHYKGSKFHRIIPSFMLQGGDFTLGDGRGGESIYGLKFADENFKIKHTGPGLLSMANAGRDTNGSQFFITTVTTSWLDGKHVVFGKVLSGMDVVYKVEAEGRQSGEPKSKVVIADSGELPM

SEQ ID NO: 189405 - protein, 60 aa, Zea mays
  Clone ID: MRT4577_104322C.1.pep
MKKKKKKKKKKKKKKKKKKKKKKKKKKKKKKKKKKKKKKKKNKKKNQGGPPSFLITHPHK

SEQ ID NO: 189406 - protein, 86 aa, Zea mays
  Clone ID: MRT4577_104323C.1.pep
PANSTPRSSFGYYILLRTILIAMPQLQSNPCRHSNHGRLKAACFLFVQWTKYSLVWTLILHQRNVVCVETCLIMNMWPAKICQIWV

SEQ ID NO: 189407 - protein, 206 aa, Zea mays
  unsure (1)..(206): unsure at all Xaa locations
  Clone ID: MRT4577_104324C.1.pep
MDSTEPLAGFVSGCHLPRYNLQGSLSVCKAQVPPLILPSGSCTSENVVMGSSKEAPVSLQNLSMDDCGSLNTASSKISQVKKPEGEKVVKKRARPGESTRPRPKDRQQIQERVKELREIVPNSAKCSIDALLDRTIKHMLFLQSVTKYAEKIKQADEPNMISKDNGSVLNDNSHGXLERNPSGGGNGGATWAYEVAGQTMVCPIIV

SEQ ID NO: 189408 - protein, 108 aa, Zea mays
  Clone ID: MRT4577_104325C.1.pep
PRSPTGRFRPQLALLLLRSLTDRSRLLLAPQSLRLPTVRSRHQLATAPSARHHLPPTPPQLSTPVLLPTLVPASSVLLVPLLSPCFKWLDQAASSTFSQLCRKTIYDS

SEQ ID NO: 189409 - protein, 96 aa, Zea mays
  Clone ID: MRT4577_104326C.1.pep
PGQARLFEDVLEEIEQMGIFKYGGLPPWGKNRNLAFVGAARKYPGLPHFLRVKDAYDPDGLFSSDWSDPMLGIGGRSTTTDAPGCALEGMCMCSRD

SEQ ID NO: 189410 - protein, 91 aa, Zea mays
  Clone ID: MRT4577_104327C.1.pep
KRNSCHPNKIGATWVIASHHLENDGQKNNLPPPKKKLNLRQHAELRLDPSKRPPFFLLFFNFFFYIFILFFFFFFFFFFFFFLSDAGRTRG

SEQ ID NO: 189411 - protein, 88 aa, Zea mays
  Clone ID: MRT4577_104328C.1.pep
RFKEQKKPRVFFSRQKYISGDLLCCHLSFYLWLGERCRHCQDRMQANGICERQDGRTEHERFGQSRHQNRAPDRPLVRPHRRYETCGN

SEQ ID NO: 189412 - protein, 246 aa, Zea mays
  unsure (1)..(246): unsure at all Xaa locations
  Clone ID: MRT4577_104329C.1.pep
MDMGRHQLQLQHAASSSSTSASSSSEQDKPLCCSGPKKRPAGRTKFRETRHPVFRGVRRRGAAGRWVCEVRVPGRRGARLWLGTYLGAEAAARAHDAAMLALGRGAACLNFPDSAWLLAVPPPPALSGGLDGARRAALEAVAEFQRRRFGAAAADEATSGTSPPSSSSSATKPAPAIERVPVEASETVALDGAVFEPDWFGDMDLDLYYASLAEGLLVEPPPXTARRLGSWXDCCDSGADVALWSY

SEQ ID NO: 189413 - protein, 182 aa, Zea mays
  Clone ID: MRT4577_10432C.1.pep
YIVEPANVEYMLKTNFGNYGKGAMIHDVMEDLLGDGIFNVDGARWRHQRKVASHEFSTRVLRDYSSGVFRDTAAELAGIVAVAARGAGPGERPLDVADLLMRSTLDSMFKVGFGVDLGSLSGCGDDEGAAAFARAFDDASEQVLYRFFDPSWKVKRLLGVSSEGAMKGSIRTIDQFVFGVID

SEQ ID NO: 189414 - protein, 256 aa, Zea mays
  Clone ID: MRT4577_104330C.1.pep
MDMGRLQLQLQHAASSSSTSASSSSSSEQNKLAWSPSSPQPPKKRPAGRTKFRETRHPVFRGVRRRGAAGRWVCEVRVPGRRGARLWLGTYLGAEAAARAHDAAMLALGRGAACLNFPDSAWLLAVPPPPALSGGLDGARRAALEAVAEFQRRRFGAVAADEATSGTSPPSSSSSPSGTYVSQAPAPAIERVPVEASETAALDGAVFEPDWFGDMDLDLYYASLAEGLLVEPPPPPAAWDHGDCCDSGADVALWSY

SEQ ID NO: 189415 - protein, 50 aa, Zea mays
  Clone ID: MRT4577_104331C.1.pep
FRMKRKDRCFDKKVRYHSRKKLAKQRPRVKGQFVSQKLKAATATEAETDS

SEQ ID NO: 189416 - protein, 74 aa, Zea mays
  Clone ID: MRT4577_104332C.1.pep
SSPLYRKANHGRKKKNFCQPSVLPVQSPTPGAGREEPKLQLFWTSARHESVSAAVAVAAFSFWLTNCPLTLGLC

SEQ ID NO: 189417 - protein, 400 aa, Zea mays
  unsure (1)..(400): unsure at all Xaa locations
  Clone ID: MRT4577_104333C.1.pep
MDNALRITDASSRRPTNLGKDLAMTEPAADRKCQSLVMENNAVKEKNPGEKSKSAVIGHADSYPSQFLETNLGKQQYRNGYKNQEFREKDIFNHSNSSAFSRYGNKRIEPSGEIQFFPSPCVIGQGHVHGKNPVFQPNGVLLPPNEHNTGESTRQARISLDSRTEGAAILCSTSAREDAGANSSSHRKDSMSHPSYGFIPVPIPVGAMMPYHCGAILQPVYYPQGPLMHCNSSAINKATIHQTSGQSNYREDCGSGRPSQVDEHKQSEEKHQLHHSRQIHRESGQPVDMVRAHMDHANQSASCSRDICKGSGCTGSGEADTNANTTXPREXNESGIQNSDRSRREAALMKFRMKRKDRCFDKKVRYHSRKKLAEQRPRVKGQFVSQKLKAAMATEAETDS

SEQ ID NO: 189418 - protein, 277 aa, Zea mays
  unsure (1)..(277): unsure at all Xaa locations
  Clone ID: MRT4577_104334C.1.pep
MAYAARLVAKVHLAATPQAEPRHLSSFRVGALSRSTTVQRQKFVAKSAISAVESGDTFVGVKQNTRPIIVIDNYDSFTYNLCQYMGEVGANFEVYRNDEITVEEIKXVCCLFYRISPRGILISPGPGTPQDSGISLQTVTELGPSIPLFGVCMGLQCIGEAFGGKVVRSPYGVVHGKGSLVHYDEKLDGTLFYDIPNPFQAGRYHSLVIEKDSFPHDTLEIVAWTDDGLIMAARHRIYKHIQGVQFHPESIITTEGRLMVNNFIKIIEGYEASNCSP

SEQ ID NO: 189419 - protein, 223 aa, Zea mays
  unsure (1)..(223): unsure at all Xaa locations
  Clone ID: MRT4577_104335C.1.pep
PNATVYAIANQVSEDVTFLGFDKKDFEVLKPAIEAARVVKDEFEVAMIRKANHISGLAHQACVQRVKTASNEQEIEATFLEKCVSNGAKEMAYHPIMASGRAAATLHYVANNAPLAGKQNMLLDAGAEWNNYASDITRTFPLTGKFTPESRAIYDIVLKMQKDTTAILKAGVVWDDVHLXGHKIAIDGLLSLGILKGDKDEILKARTSAAFFPHGLGHYLGMD

SEQ ID NO: 189420 - protein, 40 aa, Zea mays
  Clone ID: MRT4577_104336C.1.pep
CRDNLQLIFMSHIGVGDACDRVCDQPQSRKRCRREPSCRI

SEQ ID NO: 189421 - protein, 67 aa, Zea mays
  Clone ID: MRT4577_104337C.1.pep
KVFILDPKPVLFNGREQKVNASESGIVSIQPSKDSLENQQGEVETNIREVFYQDPGLGGQTLPMPVQ

SEQ ID NO: 189422 - protein, 162 aa, Zea mays
  unsure (1)..(162): unsure at all Xaa locations
  Clone ID: MRT4577_104338C.1.pep
MRPPTRARTRGFNRWTFDDVQVNDISLNDYLAVNAXNHAIFLPXVAGRYSKKRFXKAHCPIVERLTYSLIMHGRNIGKKVMAVPMIKHTLEITHLLTDANPXQVGGRAFINXGPREEATRIGVLSGAGGGGVGRGGGGRGGGWGGGGGGGGGGGRGGVGGGG

SEQ ID NO: 189423 - protein, 74 aa, Zea mays
  unsure (1)..(74): unsure at all Xaa locations
  Clone ID: MRT4577_104339C.1.pep
MGAKISSILMLLALSTCVANSTIFPEYSQTTISTILSAYIASMSTSIXDNXAIQPYTLHQAFSTCTLPISCLTS

SEQ ID NO: 189424 - protein, 54 aa, Zea mays
  Clone ID: MRT4577_10433C.1.pep
GPFFFFYNLNCILYKIMNELINNEGSGASAQLQSVEFIDVPPLLHTLLFLHRIY

SEQ ID NO: 189425 - protein, 194 aa, Zea mays
  Clone ID: MRT4577_104340C.1.pep
NLIPGEEITYISISQPSHFFSVPDDTRGISPHISAWILLAAELLLQHQCLKPSYLQFPVVDLALLLIPSPAVLVFLTGVPSRLARLQSPSRSGNFPFLWCRARCWSLRVHLAPASDTGAGSLMLARVCPRRQQLGLYVSPSASRHRNSIMSVCVWKNEIEGSEKKAKPMWFVRSFGLELELWILEKKFREISGR

SEQ ID NO: 189426 - protein, 66 aa, Zea mays
  Clone ID: MRT4577_104341C.1.pep
MYLQYYINEKGDKVYTTKKESPLGVPTQSAHPARFSPDDKYSRQRYLLKKRFGLLPTQKPALKIGI

SEQ ID NO: 189427 - protein, 109 aa, Zea mays
  Clone ID: MRT4577_104342C.1.pep
MYLQYYINEKGDKVYTTKKESPLGVPTQSAHPARFSPDDKYSRQRYLLKKRFGLLPTKPRQIKKTTESRTEVLKLQVNCPTCDVLFVSMLVGWNVLSSFSNICGPLVQF

SEQ ID NO: 189428 - protein, 99 aa, Zea mays
  Clone ID: MRT4577_104343C.1.pep
EPSFAEDLVGITGIQGAIKPTPANRDGSTNGDGKAKANVDTAGSSSVAAKVGLPREVERFSWPWACVLAAGAGFNTEDFAGRVAMFSSVEVVPLLSMRS

SEQ ID NO: 189429 - protein, 64 aa, Zea mays
  Clone ID: MRT4577_104344C.1.pep
MYLQYYINEKGDKVYTTKKESPLGVPTQSAHPARFSPDDKYSRQRYLLKKRFGLLPTQKPALKY

SEQ ID NO: 189430 - protein, 49 aa, Zea mays
  Clone ID: MRT4577_104345C.1.pep
ECCGDLRSHCLFRRLSAMPMFIACRRADAPQACSSPALTLWSLSRLKAT

SEQ ID NO: 189431 - protein, 111 aa, Zea mays
  Clone ID: MRT4577_104346C.1.pep
NRMIPGKLAGSAAAIFVKKIKPWPGGCPDGPPLRYAALVFGGFPPPVFRLPRSGAPFLFWGTCPAPGVVGALFRGAGQRFLRANRVVVFKSFLRSPLLPKKKKKKKKKQPT

SEQ ID NO: 189432 - protein, 47 aa, Zea mays
  Clone ID: MRT4577_104347C.1.pep
QSMGNLTSLEELRLESIVGRCMCHPIPSGRAWQANKVEGGQQHLFRG

SEQ ID NO: 189433 - protein, 44 aa, Zea mays
  Clone ID: MRT4577_104348C.1.pep
LQWLPISVQVCCIRLKSAITLSVIVPQHESVPQELDALADKWRR

SEQ ID NO: 189434 - protein, 52 aa, Zea mays
  Clone ID: MRT4577_104349C.1.pep
VVIVILVDLEHILSVLAVCHRLDVSAVPDDAPDHNVWRVHHKVKLRVYVRVG

SEQ ID NO: 189435 - protein, 107 aa, Zea mays
  unsure (1)..(107): unsure at all Xaa locations
  Clone ID: MRT4577_10434C.1.pep
YLCFARQDNQRMALGQLIRSAWAQPQIATVNFNQRNVPDQDRXDRGTRELFHXGTNIGRRPLTDYYRPGGETAFLRQGVHITLTCSRNLXRLIGLCTTQTELWTVYP

SEQ ID NO: 189436 - protein, 85 aa, Zea mays
  unsure (1)..(85): unsure at all Xaa locations
  Clone ID: MRT4577_104350C.1.pep
MTREVGQGSGSSERMGGGFAAVLKPDPFDGKNFLIWKAKMELWLTAMSCYHVAEGKPANLPSEDEAKFEADDNLFXGAVISALDT

SEQ ID NO: 189437 - protein, 69 aa, Zea mays
  Clone ID: MRT4577_104351C.1.pep
LTWREHCIMIFYFQILWMFSSFFFFGLLILPLTCALILCMLIWIWCINCASCGEITRIIYLSCKLFLMH

SEQ ID NO: 189438 - protein, 322 aa, Zea mays
  unsure (1)..(322): unsure at all Xaa locations
  Clone ID: MRT4577_104352C.1.pep
MQERNPKAVANAEDSECSNSCLVLLFQNNKELSIEDILKSTNNFDQAYIVGCGGFGLVYRSTLPDGRRVAIKRLSGDYSQIEREFQAEVETLSRAQHENLVLLQGYCKVGNDRLLIYSYMENGSLDYWLHERADDSGVLLDWRKRLRIAQGSAXGLAYLHMSCDPHILHRDIKSSNILLDDNFEAHLADFGLARLICAYETHVTTDVVGTLGYIPPEYGQSPVATYKGDVYSFGIVLLELLTGRRPVDMCRPKGTRDVVSWVLRMKEEGREAEVFHPSIHHEDNQGQLVRILDIACLCVTAAPKSRPTSQQLVAWLDDIAEG

SEQ ID NO: 189439 - protein, 219 aa, Zea mays
  unsure (1)..(219): unsure at all Xaa locations
  Clone ID: MRT4577_104353C.1.pep
MGGTSKLLSSLLLTSSPLRLRPTTAAAAALFLTPPAAASRRLLLLSSPSPPRTLSTSSSSLPHGSSQASPAPSPRAPFPEWSRLVDRLAAAGYGSGAPFAAXISRSPLPXCGLSDGALAAVSTCLAFARDRPDLLSSLPRKDVKILVANAAPSLFKDGEASALRLRRYLAGEETDVIVSDRAETVDIVRYLLSYTYGSSVSDSEHKKLIDSAVRKSWLS

SEQ ID NO: 189440 - protein, 117 aa, Zea mays
  Clone ID: MRT4577_104354C.1.pep
GRVLVWQTRSGPSLNALGCGVPSRIVFRTRVSPMAVGGCRFPLAGAFPPGCPPPPRDFGAPSAPGGPLPAQERGVPRFWGPPPFSPPPGEGFFLSFPPPFPLLSPFPFFYANFPLFG

SEQ ID NO: 189441 - protein, 142 aa, Zea mays
  unsure (1)..(142): unsure at all Xaa locations
  Clone ID: MRT4577_104355C.1.pep
PRPVFPRLAVKKTLPRGLLSWPPLPPARXGSFIPPLPPVFPLLTPPVRVPPLVSXAPVLAPPGFALLPAGLVNFCPLCVGPPFPPAPVFSPDVPPLSVGLLFGKVVLSSGPGPYSPGPPPLPPPLPPHPWPPPWPAPWAPAW

SEQ ID NO: 189442 - protein, 53 aa, Zea mays
  Clone ID: MRT4577_104356C.1.pep
PFPLLEDRPGPLLLKDEPGSPELGVIEGVPRIPLEFFFKILGFGPPWFFPHLF

SEQ ID NO: 189443 - protein, 90 aa, Zea mays
  Clone ID: MRT4577_104357C.1.pep
RRWPVGRMPPNRTIDEMQAALEQRLLMYGGGDASHCHIRKTEIRHPLSMPQCLVPPWKARGRPPCLTAQGGARSIAERHLRGPGRAPAAA

SEQ ID NO: 189444 - protein, 55 aa, Zea mays
  Clone ID: MRT4577_104358C.1.pep
GDQIISYRSAGGRDSLNPPNLSHFTHKIDEGKAYFTPHLANRCVAPIPRSPCADE

SEQ ID NO: 189445 - protein, 115 aa, Zea mays
  Clone ID: MRT4577_104359C.1.pep
KPGGSPKKGEVKPAVYPVQTPAPRADSPKSEPSAPPLFETQKVDNMPINKVSGDSPKGAEKIDPALKKTPMKETIRVTRAKLRRGPPPKDFVGNKLHPVVFPAHCIDLFPSFGPP

SEQ ID NO: 189446 - protein, 659 aa, Zea mays
  Clone ID: MRT4577_10435C.1.pep
MASLVHPERFQYEGALNLVRNLLGWSAPAFFGTIRAGATPLGDLAAGEFVLFVSYLSCGLALPISPFFLLLLEELGLQLQYLTPHSILQAAIFAHLCEMFVGVAPCTSLFRHFFVLVKSGKAKDHLGAYYFQMRLDSAGAYISSLGGMRWENWRADWVIVSTEATDCLTLPSDRQRLDRKQWRAKLSLAPEFLHVLDRIKTLAAGGLTSMHVVGDFLKRRITPLQRRARLCCWFTGSNDIGRIQHGPGTDLSWEELKLLVKGITSESFIPESLILPQGIPTLCDDPGLRTAILASLPTLDESGVAVRQTDDRDPHHGIRIFDALAGGPQPASAGSRAPSLWPPTPWTRAKGLQVAPPPRVAPGGRRKRGDTGCVALTGRLSWTLPLLRTRPKSVIGQLARPRGPAPRLRARRGMGDLPQGHQQQQPQQQQQQQQQRTSRFQGRWKVQGPKAADSADRDRGEDPKCEWEVEDKASNIALAEENLKAKDASLDKRAMDLAWREKDLAFREEMFERWDKLLAEHELEAKQREKDLEERIQKFQAAQAAPGSQAAEVMKKALEDLQAEHRAGVQRIATWAGETSTTLVPLGILGARLEAKGGRLCRAVIEYILTCFRSHDPTISLEPVIAGPVVDTKDAAREGVQNIMAVVAERFQRDPTDDE

SEQ ID NO: 189447 - protein, 101 aa, Zea mays
  Clone ID: MRT4577_104360C.1.pep
SRVGPARTRWLSPPAAAAAPAGASRGASWLVVLRARPPPPLACLASYSSVCARHRHRRRRAAEQHGTPTRCSLQALSLTGPGWVIAGGGALSPTLWSHAWA

SEQ ID NO: 189448 - protein, 56 aa, Zea mays
  Clone ID: MRT4577_104361C.1.pep
KPPPPTHRPTPVPVLDGSMDYWLVGPGVEGTSGTVTELGKGGNARSSRLRLGFAWS

SEQ ID NO: 189449 - protein, 107 aa, Zea mays
  unsure (1)..(107): unsure at all Xaa locations
  Clone ID: MRT4577_104362C.1.pep
SNLKNCHDFLRHQCTPLVMPFFQSRLIPPSSCRVLHHQCXSFFWQIEPQSFPQAFFNMVQSIFRGGPPPPPCGFCGFPQAPXKCGGIFASSPIPPLNVGLVPLFLPK

SEQ ID NO: 189450 - protein, 171 aa, Zea mays
  Clone ID: MRT4577_104363C.1.pep
MSASRFIKCVTVGDGAVGKTCMLISYTSNTFPTDYVPTVFDNFSANVVVDGNTVNLGLWDTAGQEDYNRLRPLSYRGADVFLLAFSLISKASYENWIPELKHYAPGVPIILVGTKLDLRDDKQFFVDHPGAVPITTAQNVKGVFDAAIKVVLQPPKAKKKKKAQRGACSIL

SEQ ID NO: 189451 - protein, 109 aa, Zea mays
  Clone ID: MRT4577_104364C.1.pep
PSVLRVGGRLGGRGGRVGYAPGVPIILVGTKLDLRDDKQFFVDHPGAVPITTAQGEELRKQIGAPYYIECSSKTQLNVKGVFDAAIKVVLQPPKAKKKKKAQRGACSIL

SEQ ID NO: 189452 - protein, 197 aa, Zea mays
  Clone ID: MRT4577_104365C.1.pep
MSASRFIKCVTVGDGAVGKTCMLISYTSNTFPTDYVPTVFDNFSANVVVDGNTVNLGLWDTAGQEDYNRLRPLSYRGADVFLLAFSLISKASYENVSKKWIPELKHYAPGVPIILVGTKLDLRDDKQFFVDHPGAVPITTAQGEELRKQIGAPYYIECSSKTQLNVKGVFDAAIKVVLQPPKAKKKKKAQRGACSIL

SEQ ID NO: 189453 - protein, 129 aa, Zea mays
  unsure (1)..(129): unsure at all Xaa locations
  Clone ID: MRT4577_104366C.1.pep
RPGFSCSRGFGLLVWRSPSSPGSTSPRQHQRSILSATAHAAERPEIAPHSLSPDGCRSAGRGRXGRRADDPGLLKRAFDRVFRFVRLAEFEIFFVLFFLIAFFLFKDLMARPQYNQLFVKKPDLDDSWP

SEQ ID NO: 189454 - protein, 197 aa, Zea mays
  Clone ID: MRT4577_104367C.1.pep
MSASRFIKCVTVGDGAVGKTCMLISYTSNTFPTDYVPTVFDNFSANVVVDGNTVNLGLWDTAGQEDYNRLRPLSYRGADVFLLAFSLISKASYENVSKKWIPELKHYAPGVPIILVGTKLDLRDDKQFFVDHPGAVPITTAQGEELRKQIGAPYYIECSSKTQLNVKGVFDAAIKVVLQPPKAKKKKKVQRGACSIL

SEQ ID NO: 189455 - protein, 75 aa, Zea mays
  Clone ID: MRT4577_104368C.1.pep
MRQQRGGAGAGRRADDPGLLKRAFDRVFRFVRLAEFEIFFVLFFLIAFFLFKDLMARPQYNQLFVKKPDLDDSWP

SEQ ID NO: 189456 - protein, 92 aa, Zea mays
  Clone ID: MRT4577_104369C.1.pep
TPLFLIQKVGKWFWFKTPISSRNSLKGWGNPGFVLERKKACLWGKKKGGVCFCPDDLKKLNVAPKVVFFPIRFGIFYVTGPGGSNFGPVCPL

SEQ ID NO: 189457 - protein, 54 aa, Zea mays
  Clone ID: MRT4577_10436C.1.pep
LKHSLGYTAHHTEQFIISHVRMLLNNNNSNKQSHDNIIYLNYHIFIINVFYQLL

SEQ ID NO: 189458 - protein, 98 aa, Zea mays
  unsure (1)..(98): unsure at all Xaa locations
  Clone ID: MRT4577_104370C.1.pep
GDFHQXRQMRRREQDRLARXMEADYQKRKKMAEFELRRQERMKAAEERTAKKRLKRQKKKQRKKEKRAKTGNNGGDEPNRVESSDDDHGSDDDDESKQ

SEQ ID NO: 189459 - protein, 113 aa, Zea mays
  unsure (1)..(113): unsure at all Xaa locations
  Clone ID: MRT4577_104371C.1.pep
ARAVKNLTDCMDGIRKLIRRINLKNLNVKDLSXLXGTHAIGXTALPXIVKRLTNYTDHRHSVHTLYGAYAAQLRRQRRSHTDNTTELEMRPTSSTTFYSGYYGLLTELMALYH

SEQ ID NO: 189460 - protein, 72 aa, Zea mays
  unsure (1)..(72): unsure at all Xaa locations
  Clone ID: MRT4577_104372C.1.pep
PGRPASAPRPPRVRCGXTSLGEEQQEEEREVPGSWSHSRLRLAHHLLHLHGYTYSLALPRVCFCGLVSNLRR

SEQ ID NO: 189461 - protein, 222 aa, Zea mays
  Clone ID: MRT4577_104373C.1.pep
PATGRTPPRAVPPAACPCTVLCPRRGAQLTPCRALLIKPCIAMLLPDSQSSHRAPVCSPHRLAYLRRPASLPSYSPRHSASLRCPTTLVAPCCSCFKRLVALCATPAPSSVVAVLLLCRARAVQHRSCVVPASYIVMSCCSPCCPVVPSITAPPRATLLPAPPRASSIASSHHVVRHWWCSTYSESESILFLFFVTSYVNIGLLASIVAHILNLCSLLNVKP

SEQ ID NO: 189462 - protein, 57 aa, Zea mays
  unsure (1)..(57): unsure at all Xaa locations
  Clone ID: MRT4577_104374C.1.pep
MAHQSLIYAFLARSTLVLADYTXLTGNSTTIAYHNLQNLPATNNKFTYNCYGHTFNY

SEQ ID NO: 189463 - protein, 90 aa, Zea mays
  Clone ID: MRT4577_104375C.1.pep
GNTLLVKQVIPLVDALAGAKINLTTLDGRNLPVRVEEVVRPGYEVVPTREGWPIRKEPGKKGKLVIKFDVTFPMRLSPSQRAAIRRIMGS

SEQ ID NO: 189464 - protein, 98 aa, Zea mays
  unsure (1)..(98): unsure at all Xaa locations
  Clone ID: MRT4577_104376C.1.pep
ARQASLFKISASTDKPIQKGKLVIDVKFFFFXVHWETRDIWGKISCPATGDFVLSPKQRLPGFPPPGWYPIYIKMVGAAPEEFSCISLGFSIGLVPPS

SEQ ID NO: 189465 - protein, 71 aa, Zea mays
  Clone ID: MRT4577_104377C.1.pep
IPRSPELHPHMPNSINNFLYSTPTKISPFLLPNTLPSCLKSSRAKGVPLTSCSLADPSFMHSIILLISPTF

SEQ ID NO: 189466 - protein, 65 aa, Zea mays
  unsure (1)..(65): unsure at all Xaa locations
  Clone ID: MRT4577_104378C.1.pep
FSRSLRSGSAPPPKKKGCCPPPRSSGLPLXRGSCYCLRLVRGCLWCLGGHGGPPFGLWSLWAGAS

SEQ ID NO: 189467 - protein, 182 aa, Zea mays
  unsure (1)..(182): unsure at all Xaa locations
  Clone ID: MRT4577_104379C.1.pep
LLGFFGLSGFPPSPPGVPQXPVTFAIGPMCLLNVSAGDKTPGQGXXISXPSDXGRLAQEAIAKLVQAAVKSKARAEEVKKKVGAKNTLENYAYSMGNTIKDGKFASRLSAGVKKKIEDAVDSATSWLGSNQLAEVDAFEDKMXELEGXCXPXFAXXXPXAAAGLGXAAGMXGVAPSGGXGAG

SEQ ID NO: 189468 - protein, 292 aa, Zea mays
  Clone ID: MRT4577_10437C.1.pep
LLCGNHYCTKSCHVLEVPLNHPEGDRTTSISKVNALAMPCEQCNLPCQRVREPPCSHPCPLPCHLNDCPSCKVLVKRPCHCGAMVHAFECVFYNILNAKDQIKIRSCGGPCHRKLPNCPHLCSEVCHPGVCPSVDQCMKKVNTRCACSTLKQEWRCQDVLKEYRKSGRDPKEVPKSQFGVGLLACGEDCKKKLKAPDSELHLRKSQENKIPAVEVVNAPKRRKRRDRGQEVKISKFQEVKTFVLRALLIILLSIIVAAGLYLLWKGIFWLSDWMNEMEEQRASQRYPRGAML

SEQ ID NO: 189469 - protein, 40 aa, Zea mays
  Clone ID: MRT4577_104380C.1.pep
RIHNSLQSNASSGMGVAPNIRETFVELHMKKAFRYVIFKI

SEQ ID NO: 189470 - protein, 38 aa, Zea mays
  Clone ID: MRT4577_104381C.1.pep
SSDIKDGCTRMEIRDEPRSGDYLHARLIITGTTETSIW

SEQ ID NO: 189471 - protein, 123 aa, Zea mays
  unsure (1)..(123): unsure at all Xaa locations
  Clone ID: MRT4577_104382C.1.pep
AQYYQLILLVYEGYKNIVESXQYNATALNQGLDKTDKFNIESKDNGVPLLGLSLKDRSRHSEFEILDLLRRFGWIVPGYTKPPDAHHVTVLRLFIREDFSRTLTERLVLDIEKVLHELDALHA

SEQ ID NO: 189472 - protein, 196 aa, Zea mays
  Clone ID: MRT4577_104383C.1.pep
CRRDNNLATFELVIVANNLHGDYQLANGYGPDKAKMVLEEHRRSFITAKDFDFLSRHGINTVRIPVGWWITQDPYPPSPFVGGSLAALDLAFSWAQSYGLKCIIDLHAAPGSQNGMEHSASRDGSVAWPSPEYISQTLEVIDFLATRYGGHPSLLGIELLNEPSAATVTLDVLVSYYMRGYQIVRNHSSTAYVILC

SEQ ID NO: 189473 - protein, 120 aa, Zea mays
  Clone ID: MRT4577_104384C.1.pep
KLFKGPPKKYPAFLAPEALSKQIPRPLGPGPPKAGRFPPLVSPPESPGSKVNGIKAPPKFPPKKVLCLGVPAGNLAMGENPIPPNLPMGGPFLVSLFKKNWPNFKCLSAKSPLGNPPRGF

SEQ ID NO: 189474 - protein, 54 aa, Zea mays
  unsure (1)..(54): unsure at all Xaa locations
  Clone ID: MRT4577_104385C.1.pep
ILYIGKDXIGIFCVFFPRKRTARKQHQQSTDPSQVLRHLVSPAINKPCKIKNLD

SEQ ID NO: 189475 - protein, 84 aa, Zea mays
  Clone ID: MRT4577_104386C.1.pep
SWLIGNPMPRPRPRPRGRGPVKLKRGGPPKQGGQTRELIRGSFVCPANTVFAIIIYKNPKWGQAYPQAGYGRPPNIFYPTGSCP

SEQ ID NO: 189476 - protein, 94 aa, Zea mays
  unsure (1)..(94): unsure at all Xaa locations
  Clone ID: MRT4577_104387C.1.pep
WRILADVLYDLGTALESSSPLXSQLFPEVAXLGNVAKANGVVAARATRLPIYSSFAXASNHECIIAKGGSISTLFXCHGIGAGWMALLLSTLRQ

SEQ ID NO: 189477 - protein, 184 aa, Zea mays
  unsure (1)..(184): unsure at all Xaa locations
  Clone ID: MRT4577_104388C.1.pep
KRTFLILGSHKQPTKKNINEPKPKKKKKKGTPHHGGGGEPPRGGKKKEGERKKKKKEKKGAPQRRGGRAKRPQPGGDXKEQGPPPPKSRRGGRGAPEKKKKKPPRPXPPERANPPPPAGGTXREPTPPPNKGKTRPDLAPGGKKXPHNPPQKTNRKQKKKSQGGPKKEPTHKNCVPPTAPPPGG

SEQ ID NO: 189478 - protein, 107 aa, Zea mays
  Clone ID: MRT4577_104389C.1.pep
MELASEALSALLSKLSMLLYGKYNLEKGVRGDIQRVMNKLERVHVALGHDSEAPVPLEQIFRPRLVKMWARDVMELSYDMEDLVDTFLVRVQGPERTSKRSAKRFMK

SEQ ID NO: 189479 - protein, 44 aa, Zea mays
  Clone ID: MRT4577_10438C.1.pep
YAGGGVSVPSGEAPGAHFRKREKRVTRGWIPITWTGAANPTALP

SEQ ID NO: 189480 - protein, 98 aa, Zea mays
  Clone ID: MRT4577_104390C.1.pep
VFFWMICHNKKKKVVIRMNLGQIRKGGNSIHRYRGDAGGSLGLYVTRMNGGLKSDRGRESNENHRWVTAKGTKEHEPSGEGKTLRTRTGGTGGEDPMV

SEQ ID NO: 189481 - protein, 151 aa, Zea mays
  Clone ID: MRT4577_104391C.1.pep
GVGAFSAGGWPCPEKPQAQRGPKNKPGPRVKGGVAPFSPVGFPGFFFSGAPEKRGAQKAAPPFSVGGWCSFVFFPLVFFFFFPARPFFWLPIFFLGLEFFLWVLGVFFLRSNRAFNKGGGEIFFFKFYPFFFGPRDFLNNLDFRGFFLTDF

SEQ ID NO: 189482 - protein, 71 aa, Zea mays
  Clone ID: MRT4577_104392C.1.pep
IQHSANRVYIHILHPAGILAITLAQVFQIVTHIPHENLILPVAVSLPPFVFISHVLVHDLGTSAILIKNGA

SEQ ID NO: 189483 - protein, 57 aa, Zea mays
  Clone ID: MRT4577_104393C.1.pep
MAGLDTFLFTLEYVDEGHPDKLCDQVSDAALDASLAEDPDSKVACGTCTKTNMVMVF

SEQ ID NO: 189484 - protein, 93 aa, Zea mays
  Clone ID: MRT4577_104394C.1.pep
RLRPRLWPHPLPCAALVEGGAAHGAWCNTAFPRRRVPMAAQLKERMPPGPKMRRKYVRGALLGRNSGAPREEPGRRVATNKERRDAGAKLELV

SEQ ID NO: 189485 - protein, 56 aa, Zea mays
  Clone ID: MRT4577_104395C.1.pep
TLTDMESHPTALGLTTQPQYKMVSLYNYHTMLSPPFIESSYNIVIITYDYSYITTT

SEQ ID NO: 189486 - protein, 310 aa, Zea mays
  unsure (1)..(310): unsure at all Xaa locations
  Clone ID: MRT4577_104396C.1.pep
MEAAAIPTSAPETRIAVVTGGNKGIGLEVCRQLAGAGATVVVLTARDETRGAAAAQELRESGLSDVIFHQLDITDAASVSRLAEFLKARFGKLDILVNNAAVGAVEYVQDPADSSTSEEXEWHGYGPKASVHXKRVRETYDAATEGIKTNYYGIKHVIEALLPLLQASSDGRIVNVSSDFGLLRLINNEELRQELNDVEKLTEERLDEVLAAYLRDFDAGEVGARGWPVDFSAYKVAKVAMNAYTRILARSHPGLRVNCAHPGYVSTDMTVHTGPLTPEQGAANVVKVALLPEGGPTGAYFALGEEASFM

SEQ ID NO: 189487 - protein, 57 aa, Zea mays
  Clone ID: MRT4577_104397C.1.pep
TSRPFQRQTSPWFMHWATDSINILCIVRSNGCYSCNAPVNSSNQGGTDSPMLAIYAT

SEQ ID NO: 189488 - protein, 365 aa, Zea mays
  unsure (1)..(365): unsure at all Xaa locations
  Clone ID: MRT4577_104398C.1.pep
MEAAAIPTSAPETRSVRAIPSCFASFLQSSVQSLREHKCACSPSTDLAGTGTYQVFLTGSRSFYLLLDRIAVVTGGNKGIGLEVCRQLAGAGATVVVLTARDETRGAAAAQELRESGLSDVIFHQLDITDAASVSRLAEFLKARFGKLDILVNNAAVGAVEYVQDPADSSTSEEXEWHGYGPKASVHXKRVRETYDAATEGIKTNYYGIKHVIEALLPLLQASSDGRIVNVSSDFGLLRLINNEEAKAXLNDVEKLTEERLDEVLAAYLRDFDAGEVGARGWPVDFSAYKVAKVAMNAYTRILARSHPGLRVNCAHPGYVSTDMTVHTGPLTPEQGAANVVKVALLPEGGPTGAYFALGEEASFM

SEQ ID NO: 189489 - protein, 335 aa, Zea mays
  unsure (1)..(335): unsure at all Xaa locations
  Clone ID: MRT4577_104399C.1.pep
LDRIAVVTGGNKGIGLEVCRQLAGAGATVVVLTARDETRGAAAAQELRESGLSDVIFHQLDITDAASVSRLAEFLKARFGKLDILVNNAAVGAVEYVQDPADSSTSEEELSGMDMVQRLQCMLKRVRETYDAATEGIKTNYYGIKHVIEALLPLLQASSDGRIVNVSSDFGLLRVTTNQYIYINSXFSNNDRHFNSVQKSYVINXWCGVXSTTRKLRQELNDVEKLTEERLDEVLAAYLRDFDAGEVGARGWPVDFSAYKVAKVAMNAYTRILARSHPGLRVNCAHPGYVSTDMTVHTGPLTPEQGAANVVKVALLPEGGPTGAYFALGEEASFM

SEQ ID NO: 189490 - protein, 781 aa, Zea mays
  unsure (1)..(781): unsure at all Xaa locations
  Clone ID: MRT4577_10439C.1.pep
PRASCSPSTPRPPSRPPRPGGPPRPRAAPGGGPPPPAARRRAPRLRVLGVRALLQAPAPPPRDRIRRPRPRPARPGPPSRRAALPRRSARSRSGAPAKLPYPDVAWSKVPPLAIAAGSPFASFRAERWIVVAVSSPPTAALAALARVRGWQLLAVGDSHTPAVWELKGAVFLCSELQAQLRRRSVLFIPHEYPVFSPAGYLFAIQHGAXVILDADDPHFVLEFDLGKHFDVDLGSGVTNHPVLLQYSHADPNRTVVNPYVHFGQRSVWPRGLPLDKVGEVAHEVFYTEVFSGRQFIQQGLSDGLPDVDAVLYFTRKPPTSAFDLRFDSEAPKVALPQGMMAPVNSFNTLFQTPAFWGLMMPVSVSSMAADVIRGYWAQRILWEIGGYVAFYPPTIYRKDYIQAYPFAEEKDLHVNVGRLIKFLNEWRSNKRTLFEKILDLSYAMAEEGFWTEQDVRLTAAWLQDLLAVGYRQPRLMSLEIDRQRATIGEGDMKEFVPKKLPSVHPGIRQKGTVNYEIGNLIKWRKNFGNVVMIMHVSGPVDRTALEWRLLYGRIFKTVIILAEQSNAELAVERCMLSHAYKYLPKVFERYSGADGFVFLQDHMVLNYWNLMQADKEKLWITNKIAHSWVTVPLETNKEEWFVKQGDMVKQVIGSSPVHFQTNYKESMGEDKIIFCGSELFYVPRRFVEDFGDLVGLVGNLDLHHKIAVPMFFLAMDSTQNFDSDALAGTVFRPQLPANATFSSIYTAQAPAVFPVKVMNEIDFIKVIRLMSIGDPLLMELV

SEQ ID NO: 189491 - protein, 33 aa, Zea mays
  Clone ID: MRT4577_1043C.1.pep
SQGRTWHLSCLIYVCVCSRLPSHRAGAVQASHR

SEQ ID NO: 189492 - protein, 144 aa, Zea mays
  Clone ID: MRT4577_104400C.1.pep
EKFPGPLDSWLGLIPLNRKRFWSKKVCTCQKLVWKGFSTLVFTPPKPNPERVVLPLPPSLETGKLLLVVVGVLVLAILHFFLTTGQSFQLAVRLLRLRRFWFTCFLLAVVVVVILRSNQQDLRNRGREEKDKKEGGQEILRHPG

SEQ ID NO: 189493 - protein, 123 aa, Zea mays
  unsure (1)..(123): unsure at all Xaa locations
  Clone ID: MRT4577_104401C.1.pep
TSPGGAGSGSRGXPGIGFFFVSDRPGRPRXXVPFFFLXTNFLGGGGXXFITPPFPSFRGGRATTPGRGRHXGPPALASLFSPCGGDAERHXGHERXGAGLPYHHRQRGPLPRRSRRRRRXLLL

SEQ ID NO: 189494 - protein, 68 aa, Zea mays
  Clone ID: MRT4577_104402C.1.pep
TGASPTTYSLFTWPWTGDENIHRYVLNMFMYPTVRHDIKQIEKTIHYLTGIPIDPDNANSPYSEFLYI

SEQ ID NO: 189495 - protein, 236 aa, Zea mays
  Clone ID: MRT4577_104404C.1.pep
MALLQPTLLTPPPLCCCSHGLLYPGFLKLPPKFSNGACCSTARASDRSELAGKSGGLAWRAAGRKGRLLGVTGAGRGPFFGGGGRRMDKGTSRVVGNLAFAAVVTYLAVTGQLRWVIDAIVSLWLLTILLPVLALGAFFFFAGQDILQGDCPNCGKSFQILKSALKDGPQLCPYCTQPFSVQGNKFVRESARFSSGRAATATNGPVFNEIFNRNMRGTAAPSETIVDVEAEVKDVE

SEQ ID NO: 189496 - protein, 49 aa, Zea mays
  Clone ID: MRT4577_104405C.1.pep
PQIGSKIERRRGKRIKQKRKMKIYQNAKQEQKPLGRPPLGVKFLPLLPL

SEQ ID NO: 189497 - protein, 83 aa, Zea mays
  Clone ID: MRT4577_104406C.1.pep
LPSAFFSRAAATLLHLTNQLLSNPWSLVDNSTPAGVMVPRMGVSFNGLPEQNQGSVNLLVGAPVLWLTLSSEHLTASRNGAPY

SEQ ID NO: 189498 - protein, 90 aa, Zea mays
  unsure (1)..(90): unsure at all Xaa locations
  Clone ID: MRT4577_104407C.1.pep
PLIRFLPWGFCFSGPAPVGVSXSXRAAALSLWXLVFCFLLPVVVLCXFLLXAFSVACXPSFVRPGVRXRPGLPPSFXPWGPLSPLGGAFP

SEQ ID NO: 189499 - protein, 75 aa, Zea mays
  Clone ID: MRT4577_104408C.1.pep
CRERMRRNGRHDRFRELGSALQPGKPVNAHKAAILNDATRMAIHLLSESHPLNETNDSLQEKIKELIAEKDDLGY

SEQ ID NO: 189500 - protein, 136 aa, Zea mays
  unsure (1)..(136): unsure at all Xaa locations
  Clone ID: MRT4577_104409C.1.pep
EKPVNESGSGKGKASTEKEGDSMQVDSPAAVEKKAPEPEPAFEILVNPARVVPAQEKYIKLLDDSRYVPVKLAPSGFVFFKSLXREHEPEVLSLTDAPTSTASPATGTAAAAQGTPASAMAVDDEPQPPQAFEYAS

SEQ ID NO: 189501 - protein, 266 aa, Zea mays
  unsure (1)..(266): unsure at all Xaa locations
  Clone ID: MRT4577_10440C.1.pep
LIDDSTKQDFSWIGSQSSSDVCLLLSPACLSFSPSPLLSPPPPPPLPXLPSPPPPSPSPXCPRPPPSPXPPLXFXXLXSPPPPSPPRLPPPPPSPPSPXPPPPPSFLLLLPVPPXPPPPSPPPPSXPPSPFSPPPLPPLPRPPPPPSRPPPPPFPPLPPPPPVPSPSSPPPXPPPPSPPPPPSPPFPPXCPPFPPXPPPXPPPPSPPPPPFXPPPLPPPPPSPSPPPPPAPPPXPPFPSPPPPPPPPHLLIPPSPPPPSPPPPPPP

SEQ ID NO: 189502 - protein, 118 aa, Zea mays
  unsure (1)..(118): unsure at all Xaa locations
  Clone ID: MRT4577_104410C.1.pep
PKPGPGNGTXRTAGQRTGISPKKGPTQATTGTYRLVWPAEGEQPDWERAPYGRQGPGRKKITPSPPPLSRELGHGSVAEDASPDYNSGGEAARFSSWAAPGSLAVPRGILVSXXSPRA

SEQ ID NO: 189503 - protein, 163 aa, Zea mays
  unsure (1)..(163): unsure at all Xaa locations
  Clone ID: MRT4577_104411C.1.pep
HVSWDRDYGFCCHIDEECAXRLADVPGVLSVQPDTNFGSDNKNYKGDDGVKSSEGTGAVDIKTKRLFVTGLSFYTSEKTLRAAFEPFGELVEVKIIMDRISKRSKGYAFVEYTTEEAGGAALKAMNGQIINGWMIVVDVAKTRSRDRLSGGSNQAFRPHYQAR

SEQ ID NO: 189504 - protein, 108 aa, Zea mays
  Clone ID: MRT4577_104412C.1.pep
MVQLRSSLSMTRARARGGDSDDADDRGWNQLHVAARKGNLKEVRRLLNEGMDVNAPAWGPKSPGATPLHLAAQGGHVKIMDELLERGANIDAPTKGACGWTPLHIAAR

SEQ ID NO: 189505 - protein, 79 aa, Zea mays
  Clone ID: MRT4577_104413C.1.pep
GLVGILRARGDFLKELTLFLEQDEIDEYEKWINTDAFSDFEDTTLQIEELLDKLSVSLTGEELEIIGKLYQQAMKLEEE

SEQ ID NO: 189506 - protein, 316 aa, Zea mays
  Clone ID: MRT4577_104414C.1.pep
MAFNYHDHALAMDPAAAAAVGAAANPSFVSGGGMAGGPGWEREKAAIAAHPLYERLLEAHVACLRVATPVDQLPRIDAQIAARPPPMEAAAAAAAAGGAHSGGEELDLFMTHYVLLLCSFKEQLQQHVRVHAMEAVMACWELEQTLQSLTGASPGEGTGATMSDDEDNQVDSESNMFDGNEGSDGMGFGPLMLTEGERSLVERVRQELKHELKQGYRDKLVDIREEILRKRRAGKLPGDTASTLKAWWQAHSKWPYPTEEDKARLVQETGLQLKQINNWFINQRKRNWHNNSASSSSDKSKRKRNTAGDGNAEPAW

SEQ ID NO: 189507 - protein, 113 aa, Zea mays
  unsure (1)..(113): unsure at all Xaa locations
  Clone ID: MRT4577_104415C.1.pep
HSSAHTVRELELKLKDRFKRYCQIAHKRVVDKPITEVRESGICMRENSLYVHTLRNFRDRRYEYKCLNKTWKGKLAXSNANGNSMKIHEAHDMVVLYDSLQLAHNCILNSFYG

SEQ ID NO: 189508 - protein, 144 aa, Zea mays
  Clone ID: MRT4577_104416C.1.pep
GPLSIIYPKVDLDPYGSPAAFLDSAVQCVADGGILMCSATDMAVLAGGNAEVCFSKYGSYPLRGKHCHEMALRILLACIESHAIRHKRYIVPIISVHMDFYIRVFVRIFTSASTVKSSPLKLAHVYQCTGCNSFYLQNIGKNSF

SEQ ID NO: 189509 - protein, 295 aa, Zea mays
  Clone ID: MRT4577_104417C.1.pep
MAFNYHDHALAMDPANPSFVSGGGMAGGPGWEREKAAIAAHPLYERLLEAHVACLRVATPVDQLPRIDAQIAARPPPMEAAAAAAAHEGAHSGGEELDLFMTHYVLLLCSFKEQLQQHVRVHAMEAVMACWELEQTLQSLTGASPGEGTGATMSDDEDNQVDSESNMFDGNEGSDGMGFGPLMLTEGERSLVERVRQELKHELKQGYRDKLVDIREEILRKRRAGKLPGDTASTLKAWWQAHSKWPYPTEEDKARLVQETGLQLKQINNWFINQRKGNWHNNSASSSSDKSKRKR

SEQ ID NO: 189510 - protein, 74 aa, Zea mays
  Clone ID: MRT4577_104418C.1.pep
LIKLFPIQPCHPLSMVHILENSQNTLAPYSAYNFLVQTKSDDSFVTILTNSELSLLLYVTPFPSFTSPCSPIFK

SEQ ID NO: 189511 - protein, 98 aa, Zea mays
  Clone ID: MRT4577_104419C.1.pep
SAGSFSPVPSSNAAGGPLVVKFPLAFPGVLAAFGIAGASSVDIVLVRGPDVRDLSCACPRPIRFCVRVGVRSELTRSVAWLFRLITVPHEPTMAIFKF

SEQ ID NO: 189512 - protein, 59 aa, Zea mays
  Clone ID: MRT4577_10441C.1.pep
HERATTRSIVGGLSDVCLRTSYVKGDLGQDLQLDHEPFGSTSRHHAASAKVSRLHQDDC

SEQ ID NO: 189513 - protein, 56 aa, Zea mays
  unsure (1)..(56): unsure at all Xaa locations
  Clone ID: MRT4577_104420C.1.pep
LYFIXNTTTPRQAFFYTREPFSSKKTPIPPIFLLNEKILIERPINLFFKNKNCKKN

SEQ ID NO: 189514 - protein, 218 aa, Zea mays
  Clone ID: MRT4577_104421C.1.pep
MEGVGARLGRTSARYGPATTFTGHVRKWRKEWVPVVAAAAAAAANANTSANGGTTSSTGMGSGGGSRGNNLLLFKWTPVNGANGGGGDGEQQQQAETATRRRRYVPVSLMEEQRQESTKSDDENKANDGDPSSNETEPSNGKTDINDTPMDESQATDEDGRDSGKNGGGTDLNLNLGLKDPDGDNEVETSEKHVAANNPQTENRSKRKSVTPDLEMTM

SEQ ID NO: 189515 - protein, 109 aa, Zea mays
  unsure (1)..(109): unsure at all Xaa locations
  Clone ID: MRT4577_104422C.1.pep
GAGGAVFVAAFPHMQRCDLMDLPXVVGRLPPCTGGLSLTGGDMFEHMRPVDALMLKWILHDWDEDRCMMIMDXCTEANGGKEAWGKEIIIDTGLGAGADDDDYDKTFRE

SEQ ID NO: 189516 - protein, 66 aa, Zea mays
  Clone ID: MRT4577_104423C.1.pep
NHCWNVATPCNWKPGEGAFIRPRLSHEGGMNMVPEGFETRDLPSNKGYLPFTKGYLGHGRDGHLTR

SEQ ID NO: 189517 - protein, 55 aa, Zea mays
  Clone ID: MRT4577_104424C.1.pep
TLRAAFMGDSGGPLLCAGVAHGIVSYGHPDAKPPAIFTRVSTYVPWINAVINTSS

SEQ ID NO: 189518 - protein, 94 aa, Zea mays
  Clone ID: MRT4577_104425C.1.pep
CISRGIASLNRQPGHRPSSKPERGLAGQAIYPWEPAHRGLSSVTIRGNHELSGGGVWSCARHRWYCQEVDPGQTYLEGDERFGHERRSVEHACV

SEQ ID NO: 189519 - protein, 81 aa, Zea mays
  unsure (1)..(81): unsure at all Xaa locations
  Clone ID: MRT4577_104426C.1.pep
MAEQHKIRWGELEEDDXWDLDYXLLQPSSRVRHNENSLKNVMKDRFDNNCNKVSVTTTIRVRKLARARMYRSAIERXRQWP

SEQ ID NO: 189520 - protein, 54 aa, Zea mays
  Clone ID: MRT4577_104427C.1.pep
YLLSVTPVGVEEYMLASWLGMMPITLALVYVGTTLKDLSDVTHGWSEISTTRWN

SEQ ID NO: 189521 - protein, 122 aa, Zea mays
  unsure (1)..(122): unsure at all Xaa locations
  Clone ID: MRT4577_104428C.1.pep
RERENGAHTLTPDLDFNPRVFLDMIXRGSQEHRIVMELGPRRPKPKTWRLRPDKGRDLGEMPLHYEVYNFERGTPEGVHLGGDFTRGHGLGGVSIYGENGPDEKVVRKHTRPSVLCMGSAGP

SEQ ID NO: 189522 - protein, 81 aa, Zea mays
  Clone ID: MRT4577_104429C.1.pep
NGGVCFQENPPKFFNFPRKPCSISPGLHNVCCLGLSSSKIQKNSVIFLKTAFWVVCFCLPAPIVQILGAGAEYIHFPVTLS

SEQ ID NO: 189523 - protein, 210 aa, Zea mays
  Clone ID: MRT4577_10442C.1.pep
LPFACPTAAILRAFLRPAMCPRARRSARPSRATPTAQQPTEPRNRSPTRAVHFISALMEIHCFRYSLPHLFFLEDTPLIVLIPTVPLQRPSLSLSSLYKLEPDLSPSIPSSLLLPLTSRRRTTVYRSSIAGVDATAPSTPPLCSRAPAVEPLLVPYTARRREAHRRIVRIRTSSVLESVEPRRSSCSPSAFPAELRVHAAPRTDDRARSL

SEQ ID NO: 189524 - protein, 88 aa, Zea mays
  Clone ID: MRT4577_104430C.1.pep
SPRPGRPGKNLPGRGRRGIKKPRGLDQWPALHLAGALVYHLPKWESGRHNLWQRGYAFARPLLKKKKKKKKKKKKRNLKNKKKKKKAP

SEQ ID NO: 189525 - protein, 145 aa, Zea mays
  Clone ID: MRT4577_104431C.1.pep
YEEVDVVLFKGFPNGVVLCVGVFSNFICGGGGVVIPLVCQHCLGFPCVDWLCGDRWGGEVACRLLLNCSRNLEWVSGNAALYLPLYWACFGGGWRSGFTGTVGQRPGRPFFLAFFSLFCCLVLAAFPFLRFLFRGFASGGVLIWG

SEQ ID NO: 189526 - protein, 57 aa, Zea mays
  unsure (1)..(57): unsure at all Xaa locations
  Clone ID: MRT4577_104432C.1.pep
MTIXLRXSDHRSRLLQRARQPSIHARPXTXHXXVPASTTYDVGQXQDXFELNKXLDT

SEQ ID NO: 189527 - protein, 313 aa, Zea mays
  unsure (1)..(313): unsure at all Xaa locations
  Clone ID: MRT4577_104433C.1.pep
MVQQQQHRIYILQFRKGETEQEVACKVSQPKGVGRRVMYYYQDYGSGGGGKSGKTVQPRALGVRRFLAMLLLSFLCVGTLFVAPVSFLSFVHSDEGGAAAAATAARGGVSGPCSAVGNNSLCCDRTSERADICFARGDLRMHSASASFQLVXPPATSTPGERIRXPYTRKWEANVMATIDEVRLRRVAPGDAARCDVRHDVPAVLFSTGGYTGNVYHEFNDGILPLFVTARHLRRRVALVILEYHDWWMTKYGDVVSQLSEFPPIDFSADRRVHCFPELIAGLRIHGELTVDPARTPERRSIGDFRRLLDDAY

SEQ ID NO: 189528 - protein, 130 aa, Zea mays
  unsure (1)..(130): unsure at all Xaa locations
  Clone ID: MRT4577_104434C.1.pep
MNEIRRRSTRRRSRVAGRRRGSXSGYVHPVLNSIQCRRQRLTGRSPXRARRGRAXRTTASFSKTTRHRPWPAGSWHRRXRATASPAXXRRRSCPRTPSCSAPTRASRAPPAARRRAARPCRGARARAAPR

SEQ ID NO: 189529 - protein, 536 aa, Zea mays
  unsure (1)..(536): unsure at all Xaa locations
  Clone ID: MRT4577_104435C.1.pep
MVQQQQQHRIYILQFRKGGPEQEVSCKVSQPKGGGRRPVMYYYQDHGSGGGKNGKKVQPRALGLRRFLGMLFLSFLCVGTLFVAPVSFLSFVHSDEGGSAAAAAAAAATAAVRGGVSEPCSAVGNDSLCCDRTSERADICFAKGDVRMHSASASFQLVXPPXNSSAAGEEEDRILSVHAQVRLRRVLPGDAARCDVRHDAPAVLFSTGGYTGNVYHEFNDGILPLFVTAHHLRRRVVLVILEYHDWWMTKYGDVVSQLSAFPPIDFAADRRVHCFPELIAGLRIHGELTVDPARTPEGKSIGDFRRLLDDAYRGRIGFLERLERRAAXAPAPAPPPPRRRRRRASSXGGPREDRPRLVIVSRTGXRVIENEADVGALAADVGFDVRVIRPDRTTEXLCKIYRELNASDAMVGVHGAAMTHFLFMRPGKVFIQVVPLGTDWAAGAYYGDPAARMGLRYVGYKILPEESSLSREYPTGDPVLTDPAGVAQRGWDVTKKVYLDRQNVRLDLARFREELVAAHRYLAAAGGRRRQPRAAE

SEQ ID NO: 189530 - protein, 75 aa, Zea mays
  Clone ID: MRT4577_104436C.1.pep
KSTWAIFSRHPRLTEPGKMGRGGVVLPSDKRGRHYLRVGLVKINTLLYAVLQASLAGVDQLLLTLGALTEGKELF

SEQ ID NO: 189531 - protein, 73 aa, Zea mays
  Clone ID: MRT4577_104437C.1.pep
LIINTNNIIWDTAISNIIWGTTLTTKRFIQAIHLTKQSKTLFLNNLNNLILANYKIVHNLNQFVLSVKIKTIF

SEQ ID NO: 189532 - protein, 132 aa, Zea mays
  Clone ID: MRT4577_104438C.1.pep
MRSTMTTELNSRKTTQVGVMLRGATLLASSASASDHHAAQSGNQSRASHSIRLLQQKKALSALHYSRAATLPTAYNQLRERTQLPIDRRSAAASRAITNNVKSENRGTARHHTSPQVRHCRRKQHQLVPTEL

SEQ ID NO: 189533 - protein, 271 aa, Zea mays
  Clone ID: MRT4577_104439C.1.pep
MQARVVVFPVKGRAWCFALPRASAAAPAADGALPRPTLRDLWRGISSGSRTAPEKAEAVVDFVADKMNRAWVGFGSAPEGSMKSRIHSFGLKLLSRVRPSEVLLKSVTKDVSALEIVHPASINSRLVRRRLRHIAVRGASVHKKFLYGSVCLLPVTSVFMVLPLPNIPFFWVLFRAYSHWRALQGSERLELLVSDCSDKWKVLEEKINSVKDGKPSENARNSPWKLRPSEKLDRFLEGRNLDEGLDCDTILSICQEYDLDKIDVLKYRDLP

SEQ ID NO: 189534 - protein, 86 aa, Zea mays
  unsure (1)..(86): unsure at all Xaa locations
  Clone ID: MRT4577_10443C.1.pep
PSRPAGTNSKSADRXRVYLSLLHCTTLPCHHIXREPRRARXRERYXCSEARXAGAGRAPSDDRGDSPXRGAXDDVELHRVQHADAV

SEQ ID NO: 189535 - protein, 56 aa, Zea mays
  Clone ID: MRT4577_104440C.1.pep
CQVAVFVSEFTVFCFCKKKKKKNKKKKKKKKKKKKKKKKKKKKKKKIKKKKGGKKI

SEQ ID NO: 189536 - protein, 87 aa, Zea mays
  Clone ID: MRT4577_104441C.1.pep
GGPLLSFACAAEIANGHGSFPTPPANADGGSVHANPLPANTLSSGKGAPSNGSHTLQRASLCHTTPTALRLTTVMPPLGGKGCGPTT

SEQ ID NO: 189537 - protein, 111 aa, Zea mays
  Clone ID: MRT4577_104442C.1.pep
AKGMIQALQENAGRFASMVSAFCQRLGWNDLEGLVSKFQNRVSFGVRAEIAELTSIPFVKGSRARALYKSGLRTPVAIAEASIPEIAKALFESSAWSGQGDSGLRRIQFGV

SEQ ID NO: 189538 - protein, 94 aa, Zea mays
  unsure (1)..(94): unsure at all Xaa locations
  Clone ID: MRT4577_104443C.1.pep
MACIDISFRALFLLSLVGVMHGEKAKSKDNDAXASGPVGSFYFINFIAFCFGMTDSTNAVQDACALSXSCYFXQTILIPNGDFLVGPLNFTGPC

SEQ ID NO: 189539 - protein, 225 aa, Zea mays
  Clone ID: MRT4577_104444C.1.pep
MVQCLDGVRQLLAVLLKCCDVELKQPPGLEDPQVLARETVFSVSEVEALYELFKKISSAVIDDGLINKEEFQLALFKTSKKESLFADRVFDLFDTKHNGILGFEEFARALSVFHPNAPLDEKIDFSFRLYDLKQQGYIERQEVKQMVVATLAESGMNLSDEIVESIIDKTFEEADTKHDGRIDKEEWRSLVSRHPSLLKNMTLQYLKDITTTFPSFVFHSQVDDN

SEQ ID NO: 189540 - protein, 67 aa, Zea mays
  Clone ID: MRT4577_104445C.1.pep
FDGGQEIMRDPYVAADGFTYEGEAIRGWLDSGHSTSPMTNLDLERSLLVPNRALRSAILEWNQQERQ

SEQ ID NO: 189541 - protein, 62 aa, Zea mays
  Clone ID: MRT4577_104446C.1.pep
IIIIIGQIHQTTEFQHFWLDFETLDLKQGTLEPCVPLYCTSVGFVWPSTNTFVVPKSAILAL

SEQ ID NO: 189542 - protein, 51 aa, Zea mays
  unsure (1)..(51): unsure at all Xaa locations
  Clone ID: MRT4577_104447C.1.pep
AQLXSLLHPSGFFYPRLSSNGHLSIWALSKLLNSPFPLLIIQHTACSSPTP

SEQ ID NO: 189543 - protein, 139 aa, Zea mays
  unsure (1)..(139): unsure at all Xaa locations
  Clone ID: MRT4577_104448C.1.pep
PDGRIPDLIFWHIPSTSXXATEAPKAKGGIRKPCVGSINEEEVAPQAAEWGMMDALAKRSSVKAVFVGHNHGLDWCCPYDGEEREQELWLCFARHTGYGGYGDWPIGARILEVTEEPFSAVSWIRMENGTRHSDVTLTS

SEQ ID NO: 189544 - protein, 120 aa, Zea mays
  unsure (1)..(120): unsure at all Xaa locations
  Clone ID: MRT4577_104449C.1.pep
KKKIWGGVFFFFFFFFFFHTPLGGQRAANGGFFFFFFTYKNPPGVSXRVFFXNHPPKGSLIILGPPPYGQAGPPSKLFSSQVLLIPPGPGYPPYPETMPPAPTLSRGEGPTPPPWLKNPP

SEQ ID NO: 189545 - protein, 230 aa, Zea mays
  unsure (1)..(230): unsure at all Xaa locations
  Clone ID: MRT4577_10444C.1.pep
MLSYILVCYCQAFTSYPSDEPQLRSPAAWRRWRSLCTLYGTMLSPXAVPRVRGCLLQKDMTIQIQPRDLSYGEHKSTSFLLFQPFIHDPAFNDLLIYVFVXSAICRYICNSYADSGNHDLLGXRXDGVIFRLVIEQCIDSEGHIFTPPSLAMILQLEFALMHGRTTDLXVXQHNESKLANVLDVHDQLLMTNQDFAXDDFXPVRPCALCPCRFPCEQXQQAWLDHREKDL

SEQ ID NO: 189546 - protein, 81 aa, Zea mays
  unsure (1)..(81): unsure at all Xaa locations
  Clone ID: MRT4577_104450C.1.pep
VYFTDDAHSLAHTIKALEPYIKTASTHFILEQQVPLXLRLSLAPXVIGAPHXTVTDLTFNWTDFINVMISDMSVTYSSNHT

SEQ ID NO: 189547 - protein, 131 aa, Zea mays
  Clone ID: MRT4577_104451C.1.pep
MAAQAAQCRQHLDASSCGCGPAKSEEAFSESDDRLALVLVDPQLVAAAAGGGPRTQAGEVRRGRSHEEEEEEETDRLAIVLAEPQRQAAAGRGDVESVLLALRRVKEQLRYTIERRSRARLVVAHQELYGH

SEQ ID NO: 189548 - protein, 92 aa, Zea mays
  unsure (1)..(92): unsure at all Xaa locations
  Clone ID: MRT4577_104452C.1.pep
QKYTEVKNVKEKLVEENVIXTSEILAVQNLLQKQHVPLEQVEALKKSLNGTIENLKEELTSMHRCYEKEQQTVTKLHQLLENQKNSSVHLAE

SEQ ID NO: 189549 - protein, 225 aa, Zea mays
  Clone ID: MRT4577_104453C.1.pep
MAAQAAQCRVSGGDGGGGGMRTVECLRGRLLAERVASKAAKEEADQLAKRLDELERKLADEVKVRNRAERRLRRAIRKLESLKVLDVGLSDGSTGSLYSNGRSGHQAPEAEVGAEAEERNGPGSLTTDGSAPSAPSGDADRVVSSEGSCTQLNSSSQDGSWCSVASEQSQPGPCMDPAGHTTNCRSAGSGGCDRDSERYVRVQINSVPIGSELSCWKRERETCLV

SEQ ID NO: 189550 - protein, 70 aa, Zea mays
  Clone ID: MRT4577_104454C.1.pep
MQGPGWDCSDATEHQLPSWEDELSWVHDPSDDTTLSASPEGADGAEPSVVNEPGPFLSSASAPTSASGAW

SEQ ID NO: 189551 - protein, 60 aa, Zea mays
  Clone ID: MRT4577_104455C.1.pep
HPRSSLIPFAVKGSKPFSISSISRLRKQTLQGQGPGSGIHPSSKSPSVYPSLMYITTQRS

SEQ ID NO: 189552 - protein, 65 aa, Zea mays
  Clone ID: MRT4577_104456C.1.pep
VFSLLPVADAFLSLSYCSRILLNQPRAHNNCVAEKYRKLLFSRRQILSWGRSISSLFYRGGLSPH

SEQ ID NO: 189553 - protein, 51 aa, Zea mays
  Clone ID: MRT4577_104457C.1.pep
DSSQASKKKTTFSRRPTKQLNLYPTNTKQHCSPCDNDHSSSWTLDMYFSVR

SEQ ID NO: 189554 - protein, 75 aa, Zea mays
  unsure (1)..(75): unsure at all Xaa locations
  Clone ID: MRT4577_104458C.1.pep
FVLYLQQNNTQDKHLCNFTRXKKKKKKKKKKKKKKKKKKKKKKKKKKKKKKKKKKKKKKKKKKKKKGGFWGFKFY

SEQ ID NO: 189555 - protein, 56 aa, Zea mays
  unsure (1)..(56): unsure at all Xaa locations
  Clone ID: MRT4577_104459C.1.pep
MAKQVFVVGHDWGAIIAWYLCLFRPDRVAALVNTSVAFMRHIFXRAXRXXVTPIDY

SEQ ID NO: 189556 - protein, 616 aa, Zea mays
  unsure (1)..(616): unsure at all Xaa locations
  Clone ID: MRT4577_10445C.1.pep
MAHEFKELAFDGHNYPTWALDIKISLASKNILSALLPPNERVGPLHDAYKYNTLYIIRHHVHPDLKAEYVMEEEPNVLWLSLKNRYGQQKAVILPEANHEWTHIRLQDYKSIEKHDELTMKNHKQHRDGAAHMPEIHHAVKNEKKGDGPKNHPKNSDNSKKRKRNKRPDXAKYKGSKERXPTSKQEKCKKCACFNHPTKKCRIPRHLVALYQQSLKGKNAEGQGYEARFTTPPNLKDGAGCSSMATMEPSTTNPPLLTDTDYMDLDNAIIEYDSNYAEVNPMEEELCLVGSGTTNSILRETKYFQTLTKRSGNVLTIAGRDAKIVGSGRATITLPMGTQVTIDDALLYPDSTRTLLSFRDIRKVLVSLIASWDDKSILSLDPRTQESELQVQKIIELQHFANNLPDAFTHYNGVTNSLNPAVNAPSRVKVLRKTIQPSSQPKRGRAAKQDNASTKRQRKERNIRSSKSVNESQPLVDGHQVDTIHPQTSTHVHNSDVAAKRKVFTSMIPTPPRIHPVGFKWVFTRKRNENNEIVRYKARLVAQGFTQRPRIDYNETYSPVMNEITFRYLISLAVQKRLLLQLMDVVIAYLYGSLDSDMYMKVPDGILRAPRGGVNR

SEQ ID NO: 189557 - protein, 131 aa, Zea mays
  unsure (1)..(131): unsure at all Xaa locations
  Clone ID: MRT4577_104460C.1.pep
VSSELGSRQQPRNYLQRGQLTHRGVLTRRGLRSRATRGRRAAGYSEAARERHLQGAARAGEANLNRTALYDTDVVHGGKMVPLAGWSKPMQDRDFIMDSSDNCRANHGLIRAAHRXGLRLKGRGGIPSLES

SEQ ID NO: 189558 - protein, 121 aa, Zea mays
  Clone ID: MRT4577_104461C.1.pep
RLNLLRPHPNPGHRSNLYAPGHTTRHSNLHQTAHRTPNTHTHAQSQPQDDNRKHSQTTNHCRTQHTPTTHPLDHSRTHPDDNPQSKPKQAPYASYTHPIHTFTTVEESQRHYNNIKHPTKT

SEQ ID NO: 189559 - protein, 49 aa, Zea mays
  Clone ID: MRT4577_104462C.1.pep
EMMARGVRKYEREEDRAVILRKVGGLGVSINCLQWVVLALAFVLRNYAY

SEQ ID NO: 189560 - protein, 155 aa, Zea mays
  unsure (1)..(155): unsure at all Xaa locations
  Clone ID: MRT4577_104463C.1.pep
LFVAANFFFFFCGNGADASFRKRFRVSQRIYMCLLNELNPCEKRLNKLNEMVKLLHFTQRNSNCMMREVVIFSFGRMCSFDFVMLIGAPVFASTGRKNVSHTCCGAAAPVVALGRGVCFFMHGPWPWACPIPTFSGSSASLFFFFFSRPXPRXXT

SEQ ID NO: 189561 - protein, 53 aa, Zea mays
  Clone ID: MRT4577_104464C.1.pep
SITVNLINIMSILYVYDHITLALFVYSLVNRWFVTSTIITQKKYFFSICGFPH

SEQ ID NO: 189562 - protein, 182 aa, Zea mays
  Clone ID: MRT4577_104465C.1.pep
SPMGIIKKLIFSFEFGEWLDFLGGGPLFFVGVFWSGGFFLNFFLGLGPFFPPLLVQANLFSFRVGPGSGGAIAWGNHFLKTCFSPENFWPFFFLGFWFFREQKLSPGAFPPFLVFSKIFSPVFMPLGVGGGWFNQFWLSPPWNFNNPSLFPFFFKKKKKKKKKKKKKKKKKKKRKKKKKKRP

SEQ ID NO: 189563 - protein, 120 aa, Zea mays
  Clone ID: MRT4577_104466C.1.pep
SLLSFVMHAFDRQRASTHPTMRARIVCSQSDHFIRSARCLELWRQLRRQSSREETRRNPASRVRTLSAPVRISRPLHGRPRSAHEERADPAKAGLERMGRKPEQSAASPGVNVSKGMGSP

SEQ ID NO: 189564 - protein, 142 aa, Zea mays
  Clone ID: MRT4577_104467C.1.pep
EASRFAYFGYFEALYQATKEQGCIGITANDDPYNSNEMSPSDQRQNHVSTSRKRLISLPTSEEAKTGKRQRENGDDMIPTSENYRPEDALEHLQDSKGTDLPESFTVKKLREGDNDDVGNIVSSSNIFADRYTGDDEEVDVD

SEQ ID NO: 189565 - protein, 153 aa, Zea mays
  Clone ID: MRT4577_104468C.1.pep
ALPLPPRSRLDRDRGSEPDPIIAIAPPPSPRRRPRRLDTACRYSTPSPSSPRFPRLLSVCRPRTSPFDATPLRPEVVVATASSSPPRRSRHRVPPASGLPFNADPETATDAAVIDYVDDDPPSCLSNQMVDPWSQMPPSMDATTWRPPTTRSS

SEQ ID NO: 189566 - protein, 264 aa, Zea mays
  Clone ID: MRT4577_104469C.1.pep
MHLDMEALLKYLSSVSFRSSDNEDKGKDERYLSSDEKNGREEQLKQMHLDMEALREDKSKLEAILEKKTDEERKLCSRVEDLELQLNKEKDDFQRMTSKTKKLIKAHGRYIKAQEDLKRSQARFERLADLLASDILKPYTKEQGSIGITANDDPYNGNEMSPSDQRQNHVSASRKRPISLPRSEEAKTGKRQRENGDDMIPTPENYRPEDALEHVQDSKGTDRLESFTVKKLRVGDYDDEGNIVSSSNIFADRYKGDDEEVDVD

SEQ ID NO: 189567 - protein, 60 aa, Zea mays
  unsure (1)..(60): unsure at all Xaa locations
  Clone ID: MRT4577_10446C.1.pep
RXKMTGGGATSQRGVSDRQKFFSKGMDMNQARVYFKRSDFDFPQEPANLAMRCSYIFERD

SEQ ID NO: 189568 - protein, 85 aa, Zea mays
  Clone ID: MRT4577_104470C.1.pep
GVICRGLSSLFPFRSVSFSITVFALSRSFSIHSFGTDSSFFQTVPFIPCASSSQSRRFLSLLFCILGSTMCSSNPYMLICLMQAN

SEQ ID NO: 189569 - protein, 66 aa, Zea mays
  Clone ID: MRT4577_104471C.1.pep
AEASPLIASELLHHSSRPRLSYRAHLHLKAEGSCYSILYLENMLVMFLRTFGRRRPPTDFMIGRVG

SEQ ID NO: 189570 - protein, 77 aa, Zea mays
  unsure (1)..(77): unsure at all Xaa locations
  Clone ID: MRT4577_104472C.1.pep
TREPXPLRAARNXXSTAPXRRVMRXXDQXTXKTPCAXXVXLRXHXQHALDDDDLXIXRXRXVAXLXQRXRSXASLQX

SEQ ID NO: 189571 - protein, 52 aa, Zea mays
  Clone ID: MRT4577_104473C.1.pep
QYHITKMLESIGFTAKFLPSGFWSASATYSLGILRLVQDSGSHYRSLRSHGA

SEQ ID NO: 189572 - protein, 53 aa, Zea mays
  Clone ID: MRT4577_104474C.1.pep
MSLTKTEYERGVHTFSPEGRLFQVEYAIEAIKLRYTEIGVKTKDGVVLAVETR

SEQ ID NO: 189573 - protein, 71 aa, Zea mays
  Clone ID: MRT4577_104475C.1.pep
RPTRTYTIPLGSGVSQWTPTQLSAPSAYTPAPGCTAGRRGWQARRAEVGHSLTSSGSRRGHGPRALSDGRQ

SEQ ID NO: 189574 - protein, 71 aa, Zea mays
  Clone ID: MRT4577_104476C.1.pep
WRPVPQSWWRPGCFFLSYPLCLTSLRFPRSCVFLPHLLRRSVCHPLLPNVNPLLFHPIVYFSRSFYISDLT

SEQ ID NO: 189575 - protein, 144 aa, Zea mays
  unsure (1)..(144): unsure at all Xaa locations
  Clone ID: MRT4577_104477C.1.pep
TPEPDNVPAPTRSHVCVSRXFQQPVRIXYAQLGYHYLICHDMHLLLSPVMALXSCKVFFFSPHDLDDLXEQLRFDLLCVVRCSHLLDFLSTVYFRTRPRPVYLLDFACYNAKYYRNCTRETFMHCSKFAGSFANKNLKFQRKIL

SEQ ID NO: 189576 - protein, 96 aa, Zea mays
  Clone ID: MRT4577_104478C.1.pep
KYLQQQLLQQIVPALTQLNVANPVAYLQQVVPFNQMIVLKFVGDLQQRQQLLNPLTVGNPLVVAFLQKQKMVPYNQFFFMNPALLWQQPIVGGALF

SEQ ID NO: 189577 - protein, 98 aa, Zea mays
  Clone ID: MRT4577_104479C.1.pep
NNSTKYKTSVISLTATQCERVISYLKSIVSYTVGLERSASRSVAKAALPTTVGTMGSASSEQGLPSISNGRGSSVWSLLLRRGLACHSSFVRSVSPLK

SEQ ID NO: 189578 - protein, 107 aa, Zea mays
  Clone ID: MRT4577_10447C.1.pep
STQGVVIVWSGSHRSGVGSFCAFGFTGSPHVSVLALCPHSVDSPIGPVEKARASPGSRARESIDAEPSNLKTSQYAGILSSSFARFMKPHVLVTFLVLILGSERDQH

SEQ ID NO: 189579 - protein, 611 aa, Zea mays
  unsure (1)..(611): unsure at all Xaa locations
  Clone ID: MRT4577_104480C.1.pep
EEGNELLSAFKVANFSSGEDDATFWSRLIQPDPADIIQETLAPRAARNKKSYVEDPQFDKNNNRKRRAVEAQEKPRRRSGRTVETVNSVPLVDGAVAQVREWSFGNIPKKDASRFVRAVIXRLSIYVKNFGNATQIDLIVDDVGGVLEKAPHEAQIELFDLLIDGCQKAVKENTDIKGTVLDFFGVAVKAYELLARVEELQLLSKRIARYKDPIKQYRIQLPYKKPQWSASCGWTETDDARLMVGIHWYGYGNWEKIRLDPKLGLTTKIAPATLGERETFLPRAPNLDNRASALLQKEYAKFSGNSSKVKGNARQTVNNDSNSGARSMRGRQKDAPDKEDNKPNKDDIQKRKVMMEAEAREEGEISESEAETKYRLDKEEKWLEWCSEVLNEEQETLKRLDRLQNTSVNLPKEKVLSRIRKYLLIIGDKIGEVVRQHSESYRQSRKCSRTSRMTMRLWNYVATFSNMSGEQLHDLYLKLSQDQLEGGVGPSHGANFTSIPSSKXVTQINFILQETIGQPGLSSXSESLHNNESSGSSEAWKRRRRADPDNQFDTQPLYQPPIMTNGNRLQESSSSAGILGWGPVEMRRYGNERPKRGVHPSHFPTGHGPLL

SEQ ID NO: 189580 - protein, 72 aa, Zea mays
  unsure (1)..(72): unsure at all Xaa locations
  Clone ID: MRT4577_104481C.1.pep
GXHVCHTTSSLLPKSLVRVRNASSLAGPGAPANAPGWSYLQHRLQPFSKAYKLRPALGGILETYAIYATPVT

SEQ ID NO: 189581 - protein, 80 aa, Zea mays
  Clone ID: MRT4577_104482C.1.pep
RGSGNPTMPPPLTCGRRRWCCQRKKVNLGPFDPLVAIGLDLGVCHRLPLMLIWSATIISWHTDSVCGYWPSGGDRRNVVR

SEQ ID NO: 189582 - protein, 101 aa, Zea mays
  unsure (1)..(101): unsure at all Xaa locations
  Clone ID: MRT4577_104483C.1.pep
KMELXRKKXYXXFFKLXVCFSFXSSIVXFMNXXIXXGHLXEXCSXSXXGPKLXNVLXXLXVSXKQXWRKAFXXKXCLGTXXNXXEAQTHXXSIYHHSXIFK

SEQ ID NO: 189583 - protein, 32 aa, Zea mays
  Clone ID: MRT4577_104484C.1.pep
SACTQLFTLLMVLANSDSLAHATHRLNVYMLL

SEQ ID NO: 189584 - protein, 114 aa, Zea mays
  Clone ID: MRT4577_104485C.1.pep
WAAIVSFFLLRRGPRHPRAPPRLCRSWLYSALFAVGHVVVLLLWVVVGPVLLSLFGVSCVSRPRVACASRRAPCRPWGGARRRSCFFPRPPPCRSGCSTLKRVRCGRSCSPPSS

SEQ ID NO: 189585 - protein, 451 aa, Zea mays
  Clone ID: MRT4577_104486C.1.pep
SFPVSSNDASRLTFWLSNTVVLREIIVQTFGISHQFTPSMTNMSMNGGAKKLDGKSMTMLWRNNYNGTQAKFAARLMPDDWQETSTLLAALEKIESWIFSRIVETVWWQALTPHMQKRAEGSSTPKAGRVLGPALGDQQQGTFSVNLWKAAFHDAFSRMCPLSAGGHECGCLPVLAKLVMEQCVARLDVAMFNAILRESASEIPTDPISDPIVDPKVLPIPAGDLSFGSGAQLKNSIGNWSRWLTDKLGIDHDDSEDIGDVEDERRAAAETKSFQLLNELSDLLMLPKDMLLEKSIRKEVCPSIGLQLVTRILCNFTPDEFCPDPVPSTVLEELNSESLLERHANKDATSVFPCTAAPIVYHTPSTLDAAERAADIGGGAKLDRKASMVQRRGYTSDDDLDDLDSPLASLIDRSAPPSPSNGFAHFSARRGVSMENTRYTLLREVWGLEQR

SEQ ID NO: 189586 - protein, 178 aa, Zea mays
  unsure (1)..(178): unsure at all Xaa locations
  Clone ID: MRT4577_104487C.1.pep
SIGLQLVIRILCNFTPDEFCPDPVPSTVLEELNSEVCSTRSLLQPCTLHLADNVTQMXIYICYAELAGASXNKDATSVFPCTAAPIVYHTPSTLDAAERAADIGGGAKLDRKASMVQRRGYTSDDDLDDLDSPLASLIDRSAPPSPSNGFAHFSARRGVSMENTRYTLLREVWGLEQR

SEQ ID NO: 189587 - protein, 129 aa, Zea mays
  unsure (1)..(129): unsure at all Xaa locations
  Clone ID: MRT4577_104488C.1.pep
YSHGPALKAGGKEKNQXGGKKLDNQRTKPPPGIGRMRKRGDESRAYGTDKEHTLREPEDPYNKQMAAEHTKNQNAADTPPYSDKDSNIASLGTSAKKTGGQEHHHAKTQTPTQGDKPKLEPKRDHTRKD

SEQ ID NO: 189588 - protein, 145 aa, Zea mays
  unsure (1)..(145): unsure at all Xaa locations
  Clone ID: MRT4577_104489C.1.pep
PRPLVLVAECSSNDASRLTFWXLSNTVVLREIIVQTFGISHQFTPSMTNMSMNGSAKKLDGKSMTMLWRNNYNGTQAKFAARLMPDDWQETSTLLAALEKIESWIFSRIVETVWWQVNVCLRQYILTDTSMKLGTPCPSLVFFFF

SEQ ID NO: 189589 - protein, 250 aa, Zea mays
  unsure (1)..(250): unsure at all Xaa locations
  Clone ID: MRT4577_10448C.1.pep
MATSSGSCLIISLLVVVVAAALSASTASAQLSSTFYDTSCPSAMSTISSGVNSAVAQQARVGASLLRLHFHDCFVQGCDASILLNDTSGEQTQPPNLTLNPRAFDVVNSIKAQVEAACPGVVSCADILAVAARDGVVALGGPSWTVLLGRRDSTGSFPSQTSDLPPPTSSLQALLAAYSKKNLDATDMVALSGAHTIGQAQCSSFNGHIYNDTNINAAFATSLKANCPXSGGSSLAPLDTXTPTVFDDDY

SEQ ID NO: 189590 - protein, 137 aa, Zea mays
  unsure (1)..(137): unsure at all Xaa locations
  Clone ID: MRT4577_104490C.1.pep
MEKKRVVIVGAGVSGLAACKHLLELGFRPTVFEADTVLGGVWARAPACTELQTPRPLYQYADFPWPESVTETFPSHRQVSAYLDAYARRFGVLGCVRFGRRVVGMEYRGVGERDVAAWXEWGRNGQAFGGAGAGEWS

SEQ ID NO: 189591 - protein, 52 aa, Zea mays
  Clone ID: MRT4577_104491C.1.pep
GFSGWGCFSPQFLRWNPFFDLGPVEGVLLMGFCLRFPKHQYFVGSIFSCSIF

SEQ ID NO: 189592 - protein, 130 aa, Zea mays
  unsure (1)..(130): unsure at all Xaa locations
  Clone ID: MRT4577_104492C.1.pep
MEGFLTNETHACDFNKSSIVLPKLNSLSLALQLQHWXNSYFTQPNLLALHPHFPCWLYSNDAXTFRPFQQLLILNVKWYSPCICALTFGAVVVSLYLTVTFAISISLAPFSFFLFFFLTFSXFSFHALNF

SEQ ID NO: 189593 - protein, 68 aa, Zea mays
  Clone ID: MRT4577_104493C.1.pep
PGYEQLKGEGWLSVSSAGCSHFTAVHLQNLHRHIGQADQTSPASASLLHTFASSSDPLPLLPLRTSYP

SEQ ID NO: 189594 - protein, 59 aa, Zea mays
  Clone ID: MRT4577_104494C.1.pep
LKLYSEIHDHKCRPANSTIPDDDEHEPGLANRPLITQPHLGDTRWGAAHDAAAVGARDP

SEQ ID NO: 189595 - protein, 39 aa, Zea mays
  Clone ID: MRT4577_104495C.1.pep
RERQITPLDEIGLGDREIQQCCPLCQVTLSTRKHQWRFR

SEQ ID NO: 189596 - protein, 62 aa, Zea mays
  Clone ID: MRT4577_104496C.1.pep
ALGAFFFFFFLKKEYGKASTCETLFKIVYGSQLHYDTYNLYYPINNDHRNETTSTLILLLLQ

SEQ ID NO: 189597 - protein, 53 aa, Zea mays
  Clone ID: MRT4577_104497C.1.pep
GRRDTLTWTSHGLRRARAGRWAALCSPLSSRAVRPACARDCRSGELVGAHSDV

SEQ ID NO: 189598 - protein, 185 aa, Zea mays
  unsure (1)..(185): unsure at all Xaa locations
  Clone ID: MRT4577_104498C.1.pep
MNNEERLGEIEKVKKRREERAIEKAQHEEEMTLLARERARAEFQDWEKKEEXRSEIRLREGRTKPIDVLLKNLNFSDEFDIELNEPYLVFKLLYILTPSHSTSNAFYNLAVPEICVFCNKLEDEMHEDEDDKRYSPEPIPQQTDNQFEEEDGSFSPQLMHGNEDEDAIDPEEDKAELVEFYVSIF

SEQ ID NO: 189599 - protein, 81 aa, Zea mays
  Clone ID: MRT4577_104499C.1.pep
RPPPPRFFFSMPQCLFLGFAKRLSPSILFFRGPPFSLLLRPPRNFFSPRKNCPKMVPPGKLKFLKTLNFKPFIPESVFPCG

SEQ ID NO: 189600 - protein, 122 aa, Zea mays
  unsure (1)..(122): unsure at all Xaa locations
  Clone ID: MRT4577_10449C.1.pep
DFDXFIDXEKXYGDGVIEVLFFFLIXXENEGGGVGVKXIMKEGVKKWKGVYFFEEGXXIXWVXCGRKXXWXXXXMKFXYGXGIYXGKEVFVXEMDGXXDRVDEXIYVEXXVSKXLIKFXGEV

SEQ ID NO: 189601 - protein, 69 aa, Zea mays
  Clone ID: MRT4577_1044C.1.pep
GLQVFVVIQERVHAVQVQQIRTRPVTIIRRSNQRLTVIVCTALVRPSRSFHWGCRPGSLDREAVPWVRA

SEQ ID NO: 189602 - protein, 112 aa, Zea mays
  Clone ID: MRT4577_104500C.1.pep
MIWRWPRHSCSSLRRQRRKTRVEGQQRCANAGVALVSRRKHASHGASPGSHSSDRARAAPEALLAEASQWSWAYAVPGDPRRRPPWSRGSSSTPVHCHRSLLHRAHPATYSP

SEQ ID NO: 189603 - protein, 50 aa, Zea mays
  Clone ID: MRT4577_104501C.1.pep
RADTVSLHDTLSCFAYFSSSHTALPLSGGESNMSAEVSSKRAPFVRPFTS

SEQ ID NO: 189604 - protein, 57 aa, Zea mays
  Clone ID: MRT4577_104502C.1.pep
GEGGLLGFKHGSPGRENLFRRFYRGKTPLSICWQKLAEHQDSYPLNWFCFFKKGLDH

SEQ ID NO: 189605 - protein, 150 aa, Zea mays
  Clone ID: MRT4577_104503C.1.pep
MESYLEERFGGVQAKNSSEEALRRWRRLCSVVKNPKRRFRFTANLEKRGEAEAIKHANHEKLRVAVLVSKAALQFLHGLTLRSEYVVPEEVKAAGFQICADELGSIVEGHDSKKLITHGGVDGIAEKLATSKTDGLSTADDSIKRRPDIY

SEQ ID NO: 189606 - protein, 63 aa, Zea mays
  Clone ID: MRT4577_104504C.1.pep
AQERVLCLQAHAICRLPCLLARLAMFDQATSGVGRRPVAGHAFPGSPCKSQGSCKCGEPKDVS

SEQ ID NO: 189607 - protein, 54 aa, Zea mays
  Clone ID: MRT4577_104505C.1.pep
LLFFLVFTTRLGYCQDRKGPTKNGKGVEHKQSTPRTVANPHALHTDTPLSKDPQ

SEQ ID NO: 189608 - protein, 250 aa, Zea mays
  Clone ID: MRT4577_104506C.1.pep
MDMAPAAVSSNPRSVEEIFKDFSGRRAGLVRALTSDVDDFCSFCDPDKENLCLYGLPNGSWEVSPPADEVPPELPEPALGINFARDGMQRRDWLSLVAVHSDSWLISVAFFYGARLNANDRKRLFSMISDLPSVFEAFADRKHVRDRSGVDSSGKSRHSSKRGNDGHAKNSRAAAPAAKEYDDDDDEEDEEHTETFCGSCGGLYNANEFWIGCDICERWFHGKCVRITPAKADHIKHYKCPDCSSKKIRQ

SEQ ID NO: 189609 - protein, 251 aa, Zea mays
  Clone ID: MRT4577_104507C.1.pep
MDMAPASVYFNPRSVEEIFKDFSGRRAGLVRALTSDVDDFCSLCDPDKENLCLYGLPNGSWEVSPPAEEVPPELPEPALGINFARDGMQRRDWLTLVAVHSDSWLISVAFFYGARLNGNDRKRLFSMMSDLPSVLEAFADRKHGRDRSGVDSSGKSRHSSKRGKDGHAKSFRAAAPAAKEYDEDDDEEDEEEHTETFCGSCGGLYNASEFWIGCDICERWFHGKCVRITPAKADHIKHYKCPDCSSKKMRQ

SEQ ID NO: 189610 - protein, 107 aa, Zea mays
  unsure (1)..(107): unsure at all Xaa locations
  Clone ID: MRT4577_104508C.1.pep
RPPPRPSPXRXPPPRPPPXVTPXPPRPPPCPXXPPRPGPSAPPAQRCRWRGAAAAARCRPXAPAVSLXRTAPRAPPGTRPGPPPCRPGRTARCSTLPMDDLISACCS

SEQ ID NO: 189611 - protein, 84 aa, Zea mays
  Clone ID: MRT4577_104509C.1.pep
YRNFFYRQVYIWSAWVVLYMMLSETLPFSCATVGDNFQALLPYNLRFLCHPFARLFHLVNDLLRPILCMDFWRKLYAEQVLMHP

SEQ ID NO: 189612 - protein, 418 aa, Zea mays
  unsure (1)..(418): unsure at all Xaa locations
  Clone ID: MRT4577_10450C.1.pep
MATSSGSCLISLLVVVVAAALSASTASAQLSSTFYDTSCPSAMSTISSGVNSAVAQQARVGASLLRLHFHDCFVQASLAVSDASIYLLIYKHDFLSSXSIVVHFNLKIKDXRRICMRLINQEASWXFLVVHQGCDASILLNDTSGEQTQPPNLTLNPRAFDVVNSIKAQVEAACPGVVSCADILAVAARDGVVALGGPSWTVLLGRRDSTGSFPSQTSDLPPPTSSLQALLAAYSKKNLDATDMVALSGAHTIGQAQCSSFNGHIYNDTNINAAFATSLKANCPMSGGSSLAPLDTMTPTVFDNDYYKNLLSQKGLLHSDQELFNNGSTDSTVSNFASSSAXLHQRLHGGHGEDGEPRPAHRDQWADQAHLLEAQLVLIIKDGRPIDDPAQSYRTCMIRIHLETTIPMQTEIYTYEYV

SEQ ID NO: 189613 - protein, 44 aa, Zea mays
  unsure (1)..(44): unsure at all Xaa locations
  Clone ID: MRT4577_104510C.1.pep
PRGFMGKHSRTMTFVVVWDILLAQIFSMMWVRLDPFTTXRVTGT

SEQ ID NO: 189614 - protein, 72 aa, Zea mays
  unsure (1)..(72): unsure at all Xaa locations
  Clone ID: MRT4577_104511C.1.pep
DRSGPGAPLNLKRAGKARPXLTTGSAWWNARAKTRAGEENRGLSFMEEGALLPAMLDEYATPRQERAPPTPP

SEQ ID NO: 189615 - protein, 100 aa, Zea mays
  unsure (1)..(100): unsure at all Xaa locations
  Clone ID: MRT4577_104512C.1.pep
CWPLYAEQKMNKVHMMXELKVGVVMEGXEEELVKAEEVEAKXRLVMAPGSGDGEELRQRLVXAKDMAVEVLKEGGSSHVAFDAFLTDLLKNTRTEKSGFL

SEQ ID NO: 189616 - protein, 37 aa, Zea mays
  Clone ID: MRT4577_104513C.1.pep
TSLFSLSIRFSEPQYVMFSESRNSRPPPNDRLRVIRN

SEQ ID NO: 189617 - protein, 270 aa, Zea mays
  unsure (1)..(270): unsure at all Xaa locations
  Clone ID: MRT4577_104514C.1.pep
GYLEAGRELARRGLRKPTGRQPLPQQLASRVLKPPKDLGTRSFADDRSHYDLFGKRRPGDEEFRKAWQEDVDEEDCLWTGSEDDDDDEESDTKLEREIKKVKRQAKENSNLIDADDSDELRSICPESDEDDMTLWSGSEDDDDDDIPSEAHPSERSDSYLDKVFEFEESPKYHTISELLKAENEPPELSPGKQARKLAVENALKKLKKGPDGRYINVFDVVTDIDILIGAFENIASGPEYAELREGGPKKAHIQFFXDIQARMRDPNFQF

SEQ ID NO: 189618 - protein, 276 aa, Zea mays
  Clone ID: MRT4577_104515C.1.pep
MARCLVARRFLPHLRLCAPRLLSVPPPTLGMLIRGVGVSFPSVQAPQGTRSFADDRSHYDLFGKRRPGDEEFRKAWQEDVDEEDCLWTGSEDDDGEEESDTKMEREIKKVKRQAKENSNLIDADDSDELRSICPESDEDDMTLWSGSEDDDDGDIPSEAHPSERSDSYLDKVFEFEESPKYHTISELLKAENEPPELSPGKQARKLAVENALKKLKKGPDGRYINVFDVVTDIDILIGAFENIVSGPEYAELREGGPKKLNIQFFKDIQARMRDPN

SEQ ID NO: 189619 - protein, 82 aa, Zea mays
  Clone ID: MRT4577_104516C.1.pep
AVMAARAGVAAVSALMFCACEFTSIVAYNSPHDGGRHEPQVVAVLVVVACWNVNSSRNSGLLLLIAVAGDKHRVIIIDICER

SEQ ID NO: 189620 - protein, 71 aa, Zea mays
  Clone ID: MRT4577_104517C.1.pep
TSLAVTITERSIASHIVHAILIASPMFVTKKKIKIKITNERQVKQLQLSANISPFLTPSTKKGKVTSHDPL

SEQ ID NO: 189621 - protein, 78 aa, Zea mays
  unsure (1)..(78): unsure at all Xaa locations
  Clone ID: MRT4577_104518C.1.pep
MGIRGWRTATCDLYALLDMSTDDLVQLFPARARRRLQSGLTRXPMALIKKLRQAKKDAPAGEKPEPAHTHLRNMITCP

SEQ ID NO: 189622 - protein, 121 aa, Zea mays
  Clone ID: MRT4577_104519C.1.pep
SPNGSLFVCLFLASVRRVFYRTFFIYLIYNGAQFSCAFEKKKESIDVLARLEHQAIPLLTQLLLGGSARADIADVCHGDGILGGFLVREDGAISGGTSIRRASSACNTSHLTSSGLATSPL

SEQ ID NO: 189623 - protein, 237 aa, Zea mays
  unsure (1)..(237): unsure at all Xaa locations
  Clone ID: MRT4577_10451C.1.pep
MATSSGSCLISLLVVVAALSASTASAQLSSTFYDTSCPSAMSTISSGVNSAVAQQARVGASLLRLHFHDCFVQGCDASILLNDTSGEQTQPPNLTLNPRAFDVVNSIKAQVEAACPGVVSCADILAVAARDGVVALGGPSWTVLLGRRDSTGSFPSQTSDLPPPTSSLQALLAAYSKKNLDATDMVALSGAHTXGQAQCSSFTXHIYNDTNINAAFATSLRXNCPMVGGTSLAPLDT

SEQ ID NO: 189624 - protein, 132 aa, Zea mays
  unsure (1)..(132): unsure at all Xaa locations
  Clone ID: MRT4577_104520C.1.pep
LGTSRPAGESSPDNPTRHPLTAVRLAMSAIHSPAAPPARPPFRRSTTGVASPLRESSQPQPTPPAPPSLTSRRAGLVALLVAAXSGSTSSERAPTTASTDPPATTTTRSPAGSVTRSRSCFFFYQPLALLMF

SEQ ID NO: 189625 - protein, 321 aa, Zea mays
  Clone ID: MRT4577_104521C.1.pep
MAAARARVLRELPARCWTKCLRRASPFPSTSPAASSLSSLSRASTSPFPLASRSRRLLHSLPSAAVRVRVRAQLQTRFLASEAARGGVGGRGPAADSEEEAQEWAVEWEDSEDDGYEPEIGDGGDGGGVALRGVGWGERALVAAEEVLAGHFGDDIAMFAFKVSPKGYVYVRLDKLTDVYGCPDIEEIEKFNRLYKQKLDEIVERGEISLDLALEVSSPGAERLLKVPEDLDRFKDMAMRVQYLAEGNSDLASKQSLLKDGIFLLESVNAEAGHCVWRLADVKENRAEAGKGRPLNRKQRDWRLQTCFTAVKKVTLYLDAN

SEQ ID NO: 189626 - protein, 108 aa, Zea mays
  Clone ID: MRT4577_104522C.1.pep
AGNQLEDGPPFAGAPPPKGGPLPLFFPPRGGFQIFVKTPPGKTLTLGVERSAPLPHVKGKIPAKGGLPPGHQGLFFPGQQLGEGPPLPGFPLPKEGPPPLLVRFPGGP

SEQ ID NO: 189627 - protein, 48 aa, Zea mays
  Clone ID: MRT4577_104523C.1.pep
ALHVMCKSKITEDRSRYPQAGLATSLIPLLAGRGAEPLKRHGAAPCAV

SEQ ID NO: 189628 - protein, 127 aa, Zea mays
  unsure (1)..(127): unsure at all Xaa locations
  Clone ID: MRT4577_104524C.1.pep
RKTLTERREYGGHLKSRSGTFQGGGIDRSNRITGAAATRPGQPETWHKERGPGNKNRGRSKEENGYXVQTMTTGEVMADYGEPTRRNTQRASELPETTVGRHQQGENEICNNDGDNKATQVEREHQN

SEQ ID NO: 189629 - protein, 105 aa, Zea mays
  unsure (1)..(105): unsure at all Xaa locations
  Clone ID: MRT4577_104525C.1.pep
AGDPDELINNAAYIGTHHKAILDADEGTGTIAKRLYTVNVXNLDENRRALRELLFCCPGALQYIDGVISGXETLYRKTKDGNPFVDVLKEGGVLPGIKVDKVTIE

SEQ ID NO: 189630 - protein, 37 aa, Zea mays
  Clone ID: MRT4577_104526C.1.pep
DSKLRSQDHYANKNGVDLPSKTLYYHHQKYFTSNIVL

SEQ ID NO: 189631 - protein, 50 aa, Zea mays
  Clone ID: MRT4577_104527C.1.pep
ALLVGGRPLFCYWDRYQSVLMARTLHQPIWILGPNTQRYGCILCNCFGRI

SEQ ID NO: 189632 - protein, 82 aa, Zea mays
  Clone ID: MRT4577_104528C.1.pep
MAGGGTSIRKYVGALKDSTTVSIAKVNSDYKQLDIAIVKATNHVERPAKEKYIRDIFMHLNSGRARADVVYCIRALARRLSK

SEQ ID NO: 189633 - protein, 41 aa, Zea mays
  Clone ID: MRT4577_104529C.1.pep
GGIGGCFLVLSSGLWVLINIPPGEKKSSSCPIFRCYNLLNF

SEQ ID NO: 189634 - protein, 361 aa, Zea mays
  unsure (1)..(361): unsure at all Xaa locations
  Clone ID: MRT4577_10452C.1.pep
MATSSGSCLTISLLVVAAAALSASTASAQLSSTFYDTSCPSAMSTISSGVNSAVAQQARVGASLLRLHFHDCFVQGCDASILLNDTSGEQTQPPNLTLNPRAFDVVNSIKAQVEAACPGVVSCADILAVAARDGVVALGGPSWTVLLGRRDSTGSFPSQTSDLPPPTSSLQALLAAYSKKNLDATDMVALSGAHTIGQAQCSSFNGHIYNDTNINAAFATSLKANCPMSGGSSLAPLDTMTPTVFDNDYYKNLLSQKGLLHSDQELFNNGSTDSTVSNFASSSAXLHQRLHGGHGEDGEPRPAHRDQWADQAHLLEAQLVLIIKDGRPIDDPAQSYRTCMIRIHLETTIPMQTEIYTYEYV

SEQ ID NO: 189635 - protein, 77 aa, Zea mays
  unsure (1)..(77): unsure at all Xaa locations
  Clone ID: MRT4577_104530C.1.pep
LVHDKPXASLVLVCEGHAAPARDLLAKAASERNDRXSRSLLEAQNTDGLTALHLAGRRGSEELEEATADYQENADIL

SEQ ID NO: 189636 - protein, 276 aa, Zea mays
  unsure (1)..(276): unsure at all Xaa locations
  Clone ID: MRT4577_104531C.1.pep
SVEQMGYEHRCSTNVLCXLVEEMWELLXEEEKLEDCIGDSKETNEDSVLALSAAAAEGGEGSRTIRLWASVYCQQLLVLVDSGSSASFLGSHLMNVLPGIQLLTKPMQVKVADGGILWSQHWLPNCKWLCGGTTFTTDFKFIPLGGYDMILGMDWLERHCPMSVHWAAKWMEFDYDKKRVHVQGVLPKVQTCYSLNGEQLGFMIKQEAVQHWLELQTVTELIVKNTPEAVQKLLEQYQHLFLRPDSLPPKRQVDHAIELLPGAQPFRLRPYRYTCN

SEQ ID NO: 189637 - protein, 48 aa, Zea mays
  Clone ID: MRT4577_104532C.1.pep
VPFGSENHLTATAFESISIEPCIADVGSYYVHVLVSQCKLFRFAPDAW

SEQ ID NO: 189638 - protein, 42 aa, Zea mays
  Clone ID: MRT4577_104533C.1.pep
KACYRPRSRCRNCPSPVPTTHSPLGDTRISKQQRSAPWSQYR

SEQ ID NO: 189639 - protein, 60 aa, Zea mays
  Clone ID: MRT4577_104534C.1.pep
RWWFYLWVPIICYRHTKVFFNFGCNVLGKLHIMRQILCAQLVLVMQFINNGAKGSRGRVG

SEQ ID NO: 189640 - protein, 66 aa, Zea mays
  Clone ID: MRT4577_104535C.1.pep
SKDFINARPRAETQHPGKTKLMNGQIMQPHKMVSRRSPAQEPPDSQPQVVKPGLIGRRNYSTGLLT

SEQ ID NO: 189641 - protein, 35 aa, Zea mays
  Clone ID: MRT4577_104536C.1.pep
GPIAAKWPPHAAPPESPRGITRQNPWPAIVGTLLR

SEQ ID NO: 189642 - protein, 99 aa, Zea mays
  Clone ID: MRT4577_104537C.1.pep
RLRIVHTIEFNEGGANIQIVRVAVYEEKWASPANIHVEDDTLVDLKPFSQRSRTKPSELTGSWKVYEVSATPIFSDKVQELEGGSPLVYLCMETVKKRN

SEQ ID NO: 189643 - protein, 107 aa, Zea mays
  unsure (1)..(107): unsure at all Xaa locations
  Clone ID: MRT4577_104538C.1.pep
LSPLVVGNAPKNLQQQLLQQIVPALTQQVVANLVAYLQKLFPFNQLILWNFVGYLQKGQQLFNPLEGANPLVAAFLKKQQLLPNNQFFLMNPVLXSRQQPMVGGAIF

SEQ ID NO: 189644 - protein, 74 aa, Zea mays
  Clone ID: MRT4577_104539C.1.pep
LEQHCVGVASLAAFLSALKGNMARLPSTAANFHLAIVLCLLHHLINDYLLADAAIVEHTFHVGNLSVHGWGRAR

SEQ ID NO: 189645 - protein, 241 aa, Zea mays
  unsure (1)..(241): unsure at all Xaa locations
  Clone ID: MRT4577_10453C.1.pep
MATSSGSCLISLLVVVAALSASTASAQLSSTFYDTSCPSAMSTISSGVNSAVAQQARVGASLLRLHFHDCFVQGCDASILLNDTSGEQTQPPNLTLNPRAFDVVSCADILAVAARDGVVALGGPSWTVLLGRRDSTGSFPSQTSDLPPPTSSLQALLAAYSKKNLDATDMVALSGAHTIGQAQCSSFNGHIYNDTNINXAFATSLKANCPQSGGTSLAPLDTMTPKKKLNXYYFNLLIDSM

SEQ ID NO: 189646 - protein, 384 aa, Zea mays
  Clone ID: MRT4577_104540C.1.pep
MPTPVKSVLPVVLLGCGGVGRYLLRHIVSCRPLHANQGVAIRVVGVADSSSLLVAEDVHSTGLDDALLTQLCAAKSAGSPLSSLLGRGHCQLFKNPEARGKVIDAATTLGRTTGLVLVDCSATYDTVSLLKDAVDHGCCVVLANKKPLTGAYEDFQKLVSNFRRIRFESTVGAGLPVIASVTRIIASGDPITRIVGSLSGTLGYVMSELEDGKKFSEVVKTAKSLGYTEPDPRDDLGGMDVARKALILARLLGQQISMESINVESLYPSELGPDAVSTKDFLESGLVQLDKSMEERIRAASSRGNVLRYVCEIESAGCQVGLKELPKDSALGRLRGSDNVVEIYSRCYQSSPLVIQGAGAGNDTTAAGVLADIIDLQDLFQTMA

SEQ ID NO: 189647 - protein, 93 aa, Zea mays
  Clone ID: MRT4577_104541C.1.pep
MVLQNTFFVHTLIQQSVSSYGFHGNLQDSFCSYFTTISNSSYDFPYHSFLLELIRRKDPNYKRMVMACFIQAVYLLELDRQDKKGEEDGLAPK

SEQ ID NO: 189648 - protein, 97 aa, Zea mays
  Clone ID: MRT4577_104542C.1.pep
GAQFAFKVFAQFGIKIAPFGVFFPVPPDGPPKKGGKKERGLFFRVLTGAPFKCTGSSLLAFKNLGFWVLYRLKFWVTFLRFPKTLFLQGIPHWGPFS

SEQ ID NO: 189649 - protein, 95 aa, Zea mays
  Clone ID: MRT4577_104543C.1.pep
TSDLTVACSSEKESAGRLAMEDSGFTVSGEEILSPGRRFNRDEATIILHARVELHGTTLGQRPRRAHRRWHSSVLSLSPCSHYGNGGATSLTRAP

SEQ ID NO: 189650 - protein, 70 aa, Zea mays
  Clone ID: MRT4577_104544C.1.pep
EPSSRRPPFLFGGFFWETDRSRPNRQKTKYTTLSTDSNRSGGSDTTPKPFTSCGTITSNKSYDKPQEKNN

SEQ ID NO: 189651 - protein, 44 aa, Zea mays
  Clone ID: MRT4577_104545C.1.pep
RPPVSLRRGLRTGGPDSRCPVELRPGTRPRRRSRYSLRWVLCAA

SEQ ID NO: 189652 - protein, 145 aa, Zea mays
  unsure (1)..(145): unsure at all Xaa locations
  Clone ID: MRT4577_104546C.1.pep
MGMNFRQGSVREKLLTVNNLATSGWPHQPSCAFCNGTFETGIHLCLHCPFARAVRRQILAWEGVILPAQSDLASAXTFGKWWEAATPPLPKNQKRAFNGIVIYTMWNIWKERNRRIFESVALPPVQVALRIKEDVSQFRRALLPM

SEQ ID NO: 189653 - protein, 199 aa, Zea mays
  unsure (1)..(199): unsure at all Xaa locations
  Clone ID: MRT4577_104547C.1.pep
IQVRVFPWKPDSPELLERITKCTQEEGMLPGLVETEEPAAATTTXRVXKSSAVLITSLKAWYYEQMKGMYWENATANGEVVVVNQPSHEEYQHYGVKSHEYKAWAEIYLLSLTDMLVTTGKSTFGYVAQGLAGLRPWVLLKQANGTAGHGWCSRDMSLEPCFHVAPSYDCKRRHDSGEIVPHVRHCEDVPTGLKLVDPN

SEQ ID NO: 189654 - protein, 91 aa, Zea mays
  Clone ID: MRT4577_104548C.1.pep
ILSFSPTGVIFLQRTLLQSLASRAQPPSSIYREVYRRSPLINIRILHFLFPISSKEQFDPFRTPAIQSPNYFGSTWITPPLGRPGLSLNTT

SEQ ID NO: 189655 - protein, 98 aa, Zea mays
  Clone ID: MRT4577_104549C.1.pep
QTLSSWPIVHREYLQLLVVEGSPLLVRPPAVFFSRVHGWRSSLRIHCRSTGKVAAIMFVCFFKLAYVHETEAGSLWTKTMYPLGVWHPNTKNLPPPLL

SEQ ID NO: 189656 - protein, 128 aa, Zea mays
  unsure (1)..(128): unsure at all Xaa locations
  Clone ID: MRT4577_10454C.1.pep
MGGGYGTRAGADRLQGRVRRCHHGYRVRIHITLSFNSVKNLLKVCGDLQKGPKGNELKVXGPVRMPTKVLHITTKNSPCVQCTNTXHRFEMRIHTRVIDLLKTPDHVKHITXTTIEPRVQVEVTISDT

SEQ ID NO: 189657 - protein, 119 aa, Zea mays
  Clone ID: MRT4577_104550C.1.pep
LHCWPRRRSPPLLYLRMCRLVAGEAFHSRGVVSAQGTPKAIRDEDAVRFSCIRVESRRGRREGRRSRSWRPPSQHWLCTWSGGRQRWLTRPVGWRNDCQRHRVEDVWRLRSSSYWDPDA

SEQ ID NO: 189658 - protein, 137 aa, Zea mays
  Clone ID: MRT4577_104551C.1.pep
SPRIPVPGGAPPSPAQCSVRVPSGPPSAAGCLVRVVCAWALLCWLLVVQLLLTWWEWEKGSWAGPLGRNFNPTSQADRSTNRTIRYLIALIASLPLLGSSRRATLSMELCSDLRQRRQTPMSGARARVVASRRSALG

SEQ ID NO: 189659 - protein, 140 aa, Zea mays
  unsure (1)..(140): unsure at all Xaa locations
  Clone ID: MRT4577_104552C.1.pep
QXXEGGAAGDXTRKHDTQPXAGSRGTRTGERXKXKKNTXXSXGREGGRGGHGHGPXTXXXSRPXRGGXGPXRKARATTSTRXQXEARQQKQHXXAXRXSRGAXXNPSDAXHPARRXXQXDXSXXXTXGXPSEAANRPTNR

SEQ ID NO: 189660 - protein, 68 aa, Zea mays
  unsure (1)..(68): unsure at all Xaa locations
  Clone ID: MRT4577_104553C.1.pep
GXPSPLFLLLSAFSXSRLXFPXFXWPFXFFAAFFPSGAAFFLCVGLGAVACCCSXCPVFCPPPPPGCV

SEQ ID NO: 189661 - protein, 142 aa, Zea mays
  Clone ID: MRT4577_104554C.1.pep
SCRVCLGVALLALGGGNWEKGSWAGLGHWASEVGHWAEISIQPARLIVQLIGRLVADVQAGGRRFRWSSALILDREGRQRCQEREREWWRHGGLLSARPWRCARRRHGCTGQAAGGCAQRAERGGVHAVTRRVGGGRLGSMS

SEQ ID NO: 189662 - protein, 50 aa, Zea mays
  Clone ID: MRT4577_104556C.1.pep
ICILTYSDWSIFWQRHKLTCLQTTDCHNNTLSCLIHIITIRHPRNCHPLL

SEQ ID NO: 189663 - protein, 86 aa, Zea mays
  Clone ID: MRT4577_104557C.1.pep
LCIKYFILVFLFDNLVIKWNKMKRLKIVRRNQTPSNYAVLVHQNSSRTKKRERKILMYGLFSNVSVTVQGSRGVLLSAKNKVCAVM

SEQ ID NO: 189664 - protein, 49 aa, Zea mays
  Clone ID: MRT4577_104558C.1.pep
TKLNSGFGINDILLLRKSTRLFDNGIECRQTLDTVIDRCSPLQNIRKLF

SEQ ID NO: 189665 - protein, 95 aa, Zea mays
  unsure (1)..(95): unsure at all Xaa locations
  Clone ID: MRT4577_104559C.1.pep
LVVPASVLGFPGAPGGLLLCGGRALWPLLSVARSRVVLGSSGGFFWSPPFRKKSLSLRFGLVPVVPLFWCGLLLPFGLGPLLFFAXPLRPPLCLP

SEQ ID NO: 189666 - protein, 46 aa, Zea mays
  Clone ID: MRT4577_10455C.1.pep
SANLLLARSAHDPGRYTFRVQTHNRREPPQFPPHVCRRRVGVLRVV

SEQ ID NO: 189667 - protein, 259 aa, Zea mays
  Clone ID: MRT4577_104560C.1.pep
FPILLQWLDCISQLLRLYPSAFQFSSKFLVDFMDCVLSCRFGNFLCNSERERDQSGVTISCRCMWSHLANLRASGGSFHEHYNPFYDPVNHSGALLPPAAALAPTLWPQFFLRWTCPIESQGGDLESQWHAMNKKYADTMKAKDIAEWRAKDIKLKLESMKQDLQREKRINSTALAAARSAQRENAAIKKAIESIGCTIKFSTSENEDRTEVLSCSLGRGTDGRAQQDENGDFSVAIEDSLVSDAPADHFCESLCPFRT

SEQ ID NO: 189668 - protein, 49 aa, Zea mays
  Clone ID: MRT4577_104561C.1.pep
NRATSKAALAPEGPAKGRAHATGLEKQLAVAVIAARLQRASEATAGWQP

SEQ ID NO: 189669 - protein, 125 aa, Zea mays
  Clone ID: MRT4577_104562C.1.pep
MPRNLISIRNEVHPRLEHANCAAGLFDVKKIPLQMELITSTDVVMNLLKKMAPPLVTLFAANPEIHHVILRNINLIVQKRATILPHEINDFFWKYNDPIYVQMEKLETMMQLGSDRNIHHVLLEF

SEQ ID NO: 189670 - protein, 169 aa, Zea mays
  unsure (1)..(169): unsure at all Xaa locations
  Clone ID: MRT4577_104563C.1.pep
LPKNSVSPDSKIGSPXMTYQEVPADPSAETAXEMPARKSMKKVVPMSVDTLATPQKLVGFLRLRPQDXRIRSPQFLRPLMGVNRDTIRXQVSSARSGNSRSQKKVDALKXYLVPIGNFLSFGLEVPAPNPVLFFWNTIPCPRALKRGPPVRPGVGPGASQKKKIKKLPG

SEQ ID NO: 189671 - protein, 40 aa, Zea mays
  Clone ID: MRT4577_104564C.1.pep
VRNFPNKLIGFEGGIGTQGKFRGNHSWNARSIKPWVLLTQ

SEQ ID NO: 189672 - protein, 733 aa, Zea mays
  Clone ID: MRT4577_104565C.1.pep
MVLLRLWHILFFLTCFSPSFVHPMEPGTYRCSNVSIPYPFGVAGKSPSLSRGFKVVCGHSGPLLSIGNSMLGILDISLLDGLVSILASASSQQCIGGTANSSVNLEGTVFTFSDTRNKFTALGCNVVAMLLNGSTGYSGGCASFCSSGNSIIDGSCSGVACCQAPVPKGLKKLDLEFSNINITNSGIDYGPCGQAFIVEQNSYVFSLPDLNYTVDTKPQYRHVVLEWSVNGSSCEEAKLSGSYACAENAYCYNSSNGIGYRCNCSSGFEGNPYLQGPNGCTDINECITRNPCTNRCSNTIGGFQCTCPAGMSGDGLKEGSGCNGVSTLVIAIVAGLALLVLLLILGFWTHWLVKKRKLAKTRQRYFMQNGGLMLKQQMFSEEAPLHIFTSSELDKATSNFSDDNIVGRGGFGTVYRGILSNQVVVAIKKAQRVDQTQTEQFINEMIILSQANHKNVVQLLGCCLETEVPLLVYEFITNGALFHHLHNTSVPMSWESRLSIAVETASALAYLHLAAKMPIIHRDVKSSNILLDDNFTAKVSDFGASRPIPHNQTHVTTLVQGTLGYMDPEYFQTSQLTEKSDVYSFGVVLIELLTRKKPIMDDIAEDIRSLALQFSMLFHGNKLLEIVDPVVAEEAGVRHVETVSKLALRCLRLKGEERPRMIDVAIELEALRRLMKQHFILKNESLLQESCCNEEMSIDAPSSLFLGVDGISDDESMEIIPLTCPSKILTSYP

SEQ ID NO: 189673 - protein, 87 aa, Zea mays
  Clone ID: MRT4577_104566C.1.pep
SGSHWSVRTHRWLSTRTFNCIGEIVIAPTICAHLIRFLPFSVRDSKRGSRYIDVLRSYHGTVFRLTDQVPLIHADSRSIILHPNGTP

SEQ ID NO: 189674 - protein, 157 aa, Zea mays
  Clone ID: MRT4577_104567C.1.pep
RRRRRRRWFRAPGLSAGGVVLRVSGRGLLAGAQPERQRQGGRRRPVSPRAQRLLLRRLQPARRRRPPRQRRRRRGLRLDVAQAHRPVQLGAATLPATHSRSPRKRCGTQFSLFTDDGRGKFGSGGAGSDYRFLAFFSSLLPCPESDMWLPGWEPLIF

SEQ ID NO: 189675 - protein, 85 aa, Zea mays
  Clone ID: MRT4577_104568C.1.pep
SPDPGHSAVLKLFWLLYKGPTSLGHPRPRLTTPHTAYPLAFFFQLNEMHAVLMCCLRKNNILRMCIITTQRLLARTRGRTRGRTW

SEQ ID NO: 189676 - protein, 63 aa, Zea mays
  Clone ID: MRT4577_104569C.1.pep
FKVKLVIIGGGFVGQIFIQFFIFFHGPTVLKRSPVCGFQTRLKGLPVWFQVNPINGGVPLMFS

SEQ ID NO: 189677 - protein, 109 aa, Zea mays
  Clone ID: MRT4577_10456C.1.pep
TWALTVPTTIVSDRDCTFMSSFWQHLFQLLGTMLVSSTAYHPQTDGQSERVNQCLEMYLRCAVSASTKDWSAWLSLAELWYNSAHHSAIGLAPFKALYGTDINMGILPQ

SEQ ID NO: 189678 - protein, 73 aa, Zea mays
  Clone ID: MRT4577_104570C.1.pep
GNQVSPPSTVEGGTLALALGARTKDSCLRQTLLWLLRSSVHDGEGGTGPGGVVNGSHQDLNRCLCLRIGGMSQ

SEQ ID NO: 189679 - protein, 78 aa, Zea mays
  Clone ID: MRT4577_104571C.1.pep
VLVIFKTGFDSPPIKCNEGAQNGHYMRRSWCAYAQVEHECIWSFRGHYRSPRLVISPVTQGLLSHIPQVQEEIVCNGR

SEQ ID NO: 189680 - protein, 96 aa, Zea mays
  Clone ID: MRT4577_104572C.1.pep
KTKKGEGLKNKLLNPGARLEVFPDGGKKGPGIVPFKTPPPKNGHKEGLSKKTGEPPNPQQEAIPVPKGGAPKTNPFGGARPLGPPLGHPGNSGPGP

SEQ ID NO: 189681 - protein, 168 aa, Zea mays
  Clone ID: MRT4577_104573C.1.pep
MRKTFCFGGRRVARKMSERAPMVDGCVFCDIVRGAPASTTALLYSDDKVVAFRDINPSAFRHYLVIPIDHIPTVNSLRKTKDDHQLVSHMVKVGKDLLNQDAPNSEEHRFGFHQPPFNSIDHLHLHCLALPFIPSWRQVKYTPLGPLGGFIAAEKLLERIKPEAEAYS

SEQ ID NO: 189682 - protein, 130 aa, Zea mays
  unsure (1)..(130): unsure at all Xaa locations
  Clone ID: MRT4577_104574C.1.pep
PVPTFPGEDVGSNVAACTSNHARHLKSVDNKTEDTRHGLFKFKARPLDRKXENKGDGVFRCAKRNTTVPKEFNLSTGRKANPAPLSELFNKLSLTAGAHQNRGVGRQIRDLPNYITTKDCKENMIGNMHR

SEQ ID NO: 189683 - protein, 127 aa, Zea mays
  Clone ID: MRT4577_104575C.1.pep
MSRYGSSDELGHGFISSNTWHYLVIPIDHIPTVNSLRKTKDDHQLVSHMVKVGKDLLNQDAPNSEEHRFGFHQPPFNSIDHLHLHCLALPFIPSWRQVKYTPLGPLGGFIAAEKLLERIKPEAEAYS

SEQ ID NO: 189684 - protein, 72 aa, Zea mays
  unsure (1)..(72): unsure at all Xaa locations
  Clone ID: MRT4577_104576C.1.pep
SKPAGKKFKKKXXXKKKKKKKKKKKKKNQIKKKKKKKKKKKKKTRFPQGRANFFRNFPKPWEPERGGCSPRS

SEQ ID NO: 189685 - protein, 35 aa, Zea mays
  Clone ID: MRT4577_104577C.1.pep
AQASSPRVRPSVRSIKILIEIYPDIFLNYVHHRKN

SEQ ID NO: 189686 - protein, 92 aa, Zea mays
  unsure (1)..(92): unsure at all Xaa locations
  Clone ID: MRT4577_104578C.1.pep
RARKRGARAGTIHRVFAKXEMRILMVGLDAAGKTTILYKLKLGEIFTTIPTIXFWGLTXEYXNIXFXXXXXXXXNXIXPLXXHYFXNTHXLI

SEQ ID NO: 189687 - protein, 76 aa, Zea mays
  Clone ID: MRT4577_104579C.1.pep
NVKAVLDFADIKRFVTGWYRSGIPGSTHASDLETCFVSFLLKDLPQLKKTRSVWAGLGRKRTTHAVAPFAELVAWS

SEQ ID NO: 189688 - protein, 59 aa, Zea mays
  unsure (1)..(59): unsure at all Xaa locations
  Clone ID: MRT4577_10457C.1.pep
ARERRSKXNEKMKALQSLIPNSNKTDKASMLDEAIEYLKQLQLQVQLVGATLQRQALGQ

SEQ ID NO: 189689 - protein, 30 aa, Zea mays
  Clone ID: MRT4577_104580C.1.pep
HSRAWYAIHHTPMLHMISIDLLIDSLLTHA

SEQ ID NO: 189690 - protein, 85 aa, Zea mays
  Clone ID: MRT4577_104581C.1.pep
PGPMDGKPSVLIFPRWPNSTDGRPVSQLIGFRSPPLKAGEKANVRFHVSPWEPFIRTRAAAKKVIARGFHFLMVGKEELEITFET

SEQ ID NO: 189691 - protein, 59 aa, Zea mays
  Clone ID: MRT4577_104582C.1.pep
LDSKVITDRETGGCRGFCCTTFSNENSMLDAIENINGKDLYSRNITVNQAQSRGACKHL

SEQ ID NO: 189692 - protein, 211 aa, Zea mays
  Clone ID: MRT4577_104583C.1.pep
MSLGAGVVADNWGDLFDNDFVEQQYEQPIIADNWGGCFNDGEQYCAVLDALPNDIHSDLLNSSARHSHDHLFILNPVAAQDSSAEEAMVAMEAAANAGDPTRLDQPSSSPSLLAAGNLLPPSLVVPQLQAEVVDKQFRTAMSPAPSLPVVDELYHDDAAGGDVLGLECVQGARPNGRERESRRCGGEHVRGDGNRLDGTSRGSDGQKSGCQ

SEQ ID NO: 189693 - protein, 54 aa, Zea mays
  Clone ID: MRT4577_104584C.1.pep
STVPIITYYSRLMNDIPTLGASHHTDAASKSQSCPYWTAYEVTNTDRHYKTHRG

SEQ ID NO: 189694 - protein, 167 aa, Zea mays
  Clone ID: MRT4577_104585C.1.pep
KLFFFFFFFFFIFFFFFFFFFFLFYCLNKKKKKKKKKKKKKKKKKKGEREGKEEKRGKKGRKKGGGKGERGGDGRGGGGRAGGARPKTKPRAKASERTKTGTGTKRGTKPGQAPSRGKTRAKPGSRRIPRKSQKGKKRGAGRGSEKTRKARRGKTRGQTGNQSGPLS

SEQ ID NO: 189695 - protein, 255 aa, Zea mays
  Clone ID: MRT4577_104586C.1.pep
MEPSPAVAAELWCSPHLAAGGGRPLEATSAVTEKSSGGRGGGGAVRRRPRETPVSEDDSSRIVSTSGGGGGQDLTDLEAKRSKTNKSSNNKGSLRTEVETDSRSAGKAVSKNIPAAEPPKQDYIHVRARRGQATDSHSLAERARREKISERMKVLQDLVPGCNKVIGKASVLDEIINYIQSLQCQVEFLSMKLEAVNAQANQGVEVFPAKDYGSQTYNTAPGLTFDTQTSREYAQGTSTSEWLHMQIGSGYERVS

SEQ ID NO: 189696 - protein, 40 aa, Zea mays
  Clone ID: MRT4577_104587C.1.pep
YCSPTKGSNADTPRQQTINWWMGCGRASHCSRHTLLTQTA

SEQ ID NO: 189697 - protein, 79 aa, Zea mays
  Clone ID: MRT4577_104588C.1.pep
QTFPPKGLYTVSFQTLKAPFIWKPLFLQIPQTKIKRAPTLPGEHFLCSKKKRNIPRLRGLFIFLFPSLGKEKTKITPML

SEQ ID NO: 189698 - protein, 30 aa, Zea mays
  Clone ID: MRT4577_104589C.1.pep
GQNYPGFVLQLETLCILNYIIWEHYFIDCG

SEQ ID NO: 189699 - protein, 63 aa, Zea mays
  Clone ID: MRT4577_10458C.1.pep
SQSSNQTRHNLFNSYLIYPRKPYLSTAIYHPTIRAYKLSIFLHLVKSADRQISPLPWEPERTV

SEQ ID NO: 189700 - protein, 74 aa, Zea mays
  Clone ID: MRT4577_104590C.1.pep
KCCQSWLALDSNMPHFVFTGLWFGQSEPFQSFSVNFSSAKNYPLYALRTLHLWTVCSLQTNWKYVITLSPISLQ

SEQ ID NO: 189701 - protein, 78 aa, Zea mays
  Clone ID: MRT4577_104591C.1.pep
GGTTTRKIFYHEIHEGITQIIHKGGIGYKAKGTKPLRAANKGPSWEKGKNRPLTTKVLPETFASKGTPKKLKTIPRVR

SEQ ID NO: 189702 - protein, 88 aa, Zea mays
  Clone ID: MRT4577_104592C.1.pep
GKKAGKIFRPKGKGTSQEGQKKKKGGGPKQKIPKKFFWWGPGKHPPPPITRRGPRVDLQKSFRVTKRGLGEQLNGGMGIFCLFGQGTP

SEQ ID NO: 189703 - protein, 40 aa, Zea mays
  Clone ID: MRT4577_104593C.1.pep
PQSRPELQSIMYQRFKEREMHHTTASYGVATAEVDRGLAT

SEQ ID NO: 189704 - protein, 90 aa, Zea mays
  unsure (1)..(90): unsure at all Xaa locations
  Clone ID: MRT4577_104594C.1.pep
MRSISLSGRLLLTLTTYXSTIIYSTNSYTTSLPKSVLLPYKLDLPTIIPIPLTQLLPXINLLLYLQSLXLTLLPKAPIPYNIFNNDKIIP

SEQ ID NO: 189705 - protein, 85 aa, Zea mays
  Clone ID: MRT4577_104595C.1.pep
GPIPFPKGKKAPPPAKNRPGLNLAPVGPKGPQKKSPPKKKNKAPGVSVQIPIMPKKGGIPKTPPPPDNPPPKDGFEILKKKPFFW

SEQ ID NO: 189706 - protein, 71 aa, Zea mays
  unsure (1)..(71): unsure at all Xaa locations
  Clone ID: MRT4577_104596C.1.pep
PPPPFXCXXLGVCPRLAPPXFLRLAPVALXGVSFXAXGGXGFLRARVRVXLGSAPAGSAALVWFPLXXCGA

SEQ ID NO: 189707 - protein, 80 aa, Zea mays
  unsure (1)..(80): unsure at all Xaa locations
  Clone ID: MRT4577_104597C.1.pep
TSLVYQHXAXGLFXXVLYPSLFYVPFLAAFPLEVFPAPMFLISIIPPLHLTNVLLCKFRSLYNSSYNIWALDLPALIWCT

SEQ ID NO: 189708 - protein, 115 aa, Zea mays
  Clone ID: MRT4577_104598C.1.pep
GDRKRRAQGGWDQRLGSPRLCPPPPPAAVVFFRVKCCSPRPRYLAQGFFSLCPVWKPSVPWSAPASPLGSRPSNLKKRGECQCFFKKKKKKKKKKKKKKKKKKKKKKKKKKKKPP

SEQ ID NO: 189709 - protein, 215 aa, Zea mays
  Clone ID: MRT4577_104599C.1.pep
LSCILQVTCMSAIGSLAAAAEQAFTLYAEKVLEMMKGFMVLINDEDLCARARATEVVGIVAMAVGRARIEAILPPFIEASISGFGLDYSELREYTHGFFSNVAEILGDSFTQYLPHVVPLVFSSCNLDDGSAVDIDDADSIENGFGGVSSDDDVNDEPRVRNISVRTGVLDEKAAATQAIGFFALHTKSAYAPYPLGRLQQFIHMVIENTVLHCS

SEQ ID NO: 189710 - protein, 107 aa, Zea mays
  Clone ID: MRT4577_10459C.1.pep
VRFSGTLRHHNTRRSVRKCEGLDGNREDGGLGRTAKLVSPLYSVHHVSDCVWVCAASAYELFGGCRIFELTNKKERVEHQIEKGGRSSPVRTVRACGLHGLRKRRTD

SEQ ID NO: 189711 - protein, 126 aa, Zea mays
  unsure (1)..(126): unsure at all Xaa locations
  Clone ID: MRT4577_1045C.1.pep
SSKTVQADAAALGTISADMAPVVDGFSADDDELDLDLPTEGFSSIPEAIEDIRQGKYVIVVDDEDRENEGDLIMAASTVTPEAMAFIVRHGTGXIVCVSMKEDDLERLQLSLMVVGKENEEKLPTA

SEQ ID NO: 189712 - protein, 86 aa, Zea mays
  Clone ID: MRT4577_104600C.1.pep
MLRRGLTGPAEDTTAGVGMLDLTQLSGAHVLLGIDPTEICTIRQVNHAYRCGHSVDYGWKSNTDENYSYLVDVVGSYHDGKQGRAP

SEQ ID NO: 189713 - protein, 75 aa, Zea mays
  Clone ID: MRT4577_104601C.1.pep
GSTHAFVYSFGITDNAAAWLLAIEGGDTTVEQTLLSIQAAQDRVFSMRSNLKHAMATKNNGITLKINTLRLSTHS

SEQ ID NO: 189714 - protein, 48 aa, Zea mays
  Clone ID: MRT4577_104602C.1.pep
RNLFSNPSNRGCFPHYNGDLPANIKIKNMASGQTRRLRKKGGKRGDNV

SEQ ID NO: 189715 - protein, 78 aa, Zea mays
  Clone ID: MRT4577_104603C.1.pep
KRGNLIDPLHFFGPNGLTRVSPSETNPQKPPNLTGPAGYAPRRPEGNKGGMGRKKNPGPPRMGRMCGNPKNPQRGPNP

SEQ ID NO: 189716 - protein, 90 aa, Zea mays
  Clone ID: MRT4577_104604C.1.pep
SSGRPGQGQAFFFFVFFFLYIFSFFFLPKLLIYVISGNDPVIKGDASPIITKSVGGGGGTNNPNKKKKYSSQKKKTPNQNHTKYQNSKNP

SEQ ID NO: 189717 - protein, 74 aa, Zea mays
  Clone ID: MRT4577_104605C.1.pep
ANTRWDFYIVRKHSFYTYVCSDFFLLPKNRPYSFGQTVEKHPRCNMHTVKGARSTGLVTKTLTRGDEMKNKGIP

SEQ ID NO: 189718 - protein, 69 aa, Zea mays
  Clone ID: MRT4577_104606C.1.pep
SPSTLHVALAAAGTTTTTAIVDVVPGSIAAVNHQQAKQAQQQRRGRTSEGDGHHHSTAIYSYLDPSGSG

SEQ ID NO: 189719 - protein, 96 aa, Zea mays
  unsure (1)..(96): unsure at all Xaa locations
  Clone ID: MRT4577_104607C.1.pep
MSGAQGAQPKGAFTATTYTSAAPTGGGAGAAQGXGRGKTXERRQTPRTELRSAEDERGLPVRKLEDAVEDAAGKGGPVFGAGTDDGKPDLGVTGTG

SEQ ID NO: 189720 - protein, 95 aa, Zea mays
  Clone ID: MRT4577_104609C.1.pep
MSGAQGAQPKGAFTATTYTSAAATGGGAAQGQGQGQEDQERRQTPRTELRSAEDERGLPVRKLEDAVEDAAGKGGPVFGAGTEDGKPDLGVTGTG

SEQ ID NO: 189721 - protein, 96 aa, Zea mays
  Clone ID: MRT4577_10460C.1.pep
LTMASNNKIVGMPVVFILALLLVSCYVEAEICARPNPHYPGACRSNKDCAGSCIQQNLGTSGYCKGSVPLFKSCYCTFECPMEDEAEGGGRLSGGH

SEQ ID NO: 189722 - protein, 535 aa, Zea mays
  Clone ID: MRT4577_104610C.1.pep
MGGGDADAGGEPADAQATLHIRCTNGSKFTVRADLGATVGAFKAIVADSCDVPAPQQRLIYKGRILKDEQTLASYGVETDHTIHMVRGAVPSPASTAPAANQEPTTAAPASSPATGLGGLLQNLGATGAAANSGGLGLFGSAPPGLDHMQQQLAENPNLMREMMNMPLMQNLMNNPELIRSIIMNNPQMRELIDRNPDLAHVLNDPSIMRQTFEAVRNPELMREMMRNTDRAMSNIESSPEGFNMLRRMYETVQEPFLNATTMGSEGDRNSNPFSALLGNQGSNQARDSAANGTTRASDPTSGSPAPNTNPLPNPWGSNAGSAQGAARSSPASNIRSTTASGLGGLGSADLGSTHGASGGGSGATLLTQVLQNPTMMQMMQNIMSNPQSMNQLLNMNPNVRNMMESNTQMREMIQNPEFLRQLTSPETLQQLISFQQSLMSQLGQQQAGQERTQSGSGAGNVNLNTLMNMFSGLGAGGGLGVPNAPNVPPEELYATQLAQLQEMGFFDTQENIRALAATAGNVHAAVERLLGNMG

SEQ ID NO: 189723 - protein, 49 aa, Zea mays
  Clone ID: MRT4577_104611C.1.pep
APMSMHTGSPTAFSLCPRAPPSAPSNVSLAPPLMPSPSAISYSTAHAIH

SEQ ID NO: 189724 - protein, 75 aa, Zea mays
  Clone ID: MRT4577_104612C.1.pep
LFIPPILTPPPLTPITRSLQAVVTTPSCSAHTSARVSPQELRRLVAGHGLLFRVGEWMGVVGLGRDEEIKRMPRP

SEQ ID NO: 189725 - protein, 293 aa, Zea mays
  Clone ID: MRT4577_104613C.1.pep
TSMLRRMYETVQEPFLNATTMGSEGDRNSNPFAALLGNQGSNQARDSAANGTTTASDTTSGAPAPNTNPLPNPWGPNAGSAQGAARSSPASNTRSTTAGGPGGLGSADLGSTLGASGGGSDATFLTQVLQNPTMMQMMQNIMSNPQSMNQLLNMNPNVRNMMESNTQMREMIQNPEFLRQLTSPETLQQLISFQQSLMSQLGQQQAGQERTQSGSGAGNVNLNTLMNMFSGLGAGGGLGVPNAPNVPPEELYATQLAQLQEMGFFDTQENIRALAATAGNVHAAVERLLGNMG

SEQ ID NO: 189726 - protein, 561 aa, Zea mays
  Clone ID: MRT4577_104614C.1.pep
MGGGDADAGGEPAAAQATLHIRCTNGSKFAVRADLGATVGTFKAIVADSCDVPAPQQRLIYKGRILKDEQTLASYGTSLSSVFLYSVFVFSCNLMLSPFEGVETDHTIHMVRGAVPPPASTAPAANQEPTTAAPASSPAAGLGGLLQNLGATGAAANSGGLGLFGSGLPELDHMQQQLAENPNLMREIMNMPLMQNLMNSPELIRSIIMNNPQMRELIDRNPDLAHVLNDPSIMRQTFEAVRNPELMREMMRNTDRAMSNIESSPEGFNMLRRMYETVQEPFLNATTMGSEGDRNSNPFAALLGNQGSNQARDSAANGTTTASDTTSGAPAPNTNPLPNPWGPNAGSAQGAARSPPATNTRSTTAGGPGGLGSADFGSTLGASGGGSDATFLTQVLQNPTMMQMMQNIMSNPQSMNQLLNMNPNVRNMMESNTQMREMIQNPEFIRQLTSPETLQQLISFQQSLMSQLGQQQTGQERTQSASGAGNVNLNTLMNMFSGLGAGGGLGVPNAPNVPPEELYATQLAQLQEMGFFDTQENIRALAATAGNVHAAVERLLGNMGQ

SEQ ID NO: 189727 - protein, 96 aa, Zea mays
  Clone ID: MRT4577_104615C.1.pep
PCLAVFLCAAGSVPGFPFDPDCGLHVWCVSLVKSSSVRAVSKWFAVLGFLCGCFVPSFAIAVFPRGAFLLLFRQAWGVYSRCVPIKSSPRRRLRAW

SEQ ID NO: 189728 - protein, 658 aa, Zea mays
  Clone ID: MRT4577_104616C.1.pep
TRPLEFMEYDLRTKYGFEIIEEVEFASVDPDDLTNQFYSDIAMLISSSMSVRERTSERAHFEILHAEHSAIKLNNANSSIHIDAVIDPLSPTGQKLAPLLRILRKQIQPSMRIVLNPISSLADLPLKNFYRFVLPSMDDFSSTDHSVHGPKAFFANMPLSKTLTMNIDVPEPWLVESVIAIHDLDNILLENLGDVRTLQAVFELEALLLTGHCMEKDRDPPRGLQFILGTKQRPHLVDTLVMANLGYWQMKVSPGVWYLQLAPGRSADLYELPPKLIAIDSLRGKLMHIEVQKKKGKEHEDLLNAADDYHFQEKTDNKGWNKNLLKWASSLITGDASSKSKADKTTDRKDARQGETINIFSVASGHLYERFLKIMILSVLKKTQRPVKFWFIKNYLSPQFKDVIPHMAREYEFEYELVTYKWPTWLHKQKEKQRIIWAYKILFLDVIFPLSLTKVIFVDADQIARADMGELLDMNLKGRPLAYTPFCDNNKDIDGFRFSKQGFWKDHLRGRPYHISALYVVDLAKFRQTASGDTLRVFYEQLSKDPNSLSNLDQDLPNYAQHTVPIFSLPQEWLWCESWCGNATKARAKTIDLCNNPMTKEPKLQGARRIVPEWTGLDSEARQFTARILGDDVEPADATPPPSEAPKPEDDQDVKDEL

SEQ ID NO: 189729 - protein, 33 aa, Zea mays
  Clone ID: MRT4577_104617C.1.pep
DFRLFLFWSVYVLSLEKHMIQGFCSIQLFNLSL

SEQ ID NO: 189730 - protein, 154 aa, Zea mays
  unsure (1)..(154): unsure at all Xaa locations
  Clone ID: MRT4577_104618C.1.pep
MAANTHSRKGFLLSNNRIMPCASSCXFITLTVCLMPSPXYLLLFVVHALTAVFSWTDCSCSFTVALTTATRHNWYNARGAIMDIFQGFVTMILSTXRTSYFLFQVLYYTRSDNSDNILKMIYXLNXGIIEHNRDDLEIYFSLHLDDDDDDDLNC

SEQ ID NO: 189731 - protein, 60 aa, Zea mays
  Clone ID: MRT4577_104619C.1.pep
KKAFSPPGFNLEDPKPFGNRIPRKPKLGLSIPKTKKAPKANPNMPPLKKDPGETKMEEVG

SEQ ID NO: 189732 - protein, 61 aa, Zea mays
  Clone ID: MRT4577_10461C.1.pep
IRGGAIIGRVELRITGDVGVKILVLGFSSPIVQVSVDCAIAISWRSQSLKCNQCGVPAISV

SEQ ID NO: 189733 - protein, 69 aa, Zea mays
  Clone ID: MRT4577_104620C.1.pep
QLRPSLLSPDISFPRPPSPSGRVQEICSTTSGPPRPSFSLALWPRLMCSRLSCPVRAESELSCWSWARC

SEQ ID NO: 189734 - protein, 80 aa, Zea mays
  Clone ID: MRT4577_104621C.1.pep
INKIWVDAVYFLSVQCAYVIFFTCNCHWYYERIAPIGLFRYYLYIFGSNYWQASYHFCSVSCVRCVDDVNNCCPSTSACR

SEQ ID NO: 189735 - protein, 77 aa, Zea mays
  Clone ID: MRT4577_104622C.1.pep
AKEQAFLFPSERVAIAYGLISPPPRAPLCFFKNLRICGGCPNPLKIMSRIVGRKLFVRGTKRFPPFKKGKGSCGDYW

SEQ ID NO: 189736 - protein, 49 aa, Zea mays
  Clone ID: MRT4577_104623C.1.pep
KSERFYYGCRISIKSTLGQGWFSIPIILVYMSWQLSGLSPYIPKAYAPL

SEQ ID NO: 189737 - protein, 44 aa, Zea mays
  Clone ID: MRT4577_104624C.1.pep
GTEDLAFHASNVCNLLMILLLLLRVPYPHLLFEHLSSPSRPHYP

SEQ ID NO: 189738 - protein, 68 aa, Zea mays
  Clone ID: MRT4577_104625C.1.pep
SQCPPTFYPPPNGETWAALGGRPGKPGAAHGAGNLVVENQMISRDPYTLLLKSFLFQFLQIIWSNLFV

SEQ ID NO: 189739 - protein, 52 aa, Zea mays
  Clone ID: MRT4577_104626C.1.pep
ELRFSITVLCRGYQPTLGRLQPRSDGDSLSKINVASATIYTKELECSSSRSV

SEQ ID NO: 189740 - protein, 92 aa, Zea mays
  unsure (1)..(92): unsure at all Xaa locations
  Clone ID: MRT4577_104627C.1.pep
RHGSVICGAKRHRRLYAXHIQGIIPPPIRRHARRGPAKRLSGLIXEETRGSAXSFLHNVILDPLTYTHHAXRRQTATATLPPNALKRQGQNP

SEQ ID NO: 189741 - protein, 60 aa, Zea mays
  unsure (1)..(60): unsure at all Xaa locations
  Clone ID: MRT4577_104628C.1.pep
KSHGFVDGFNPTMGLGVRYGFTQSIPGLNPWWDYISCNRTRPKVAFGTLDAPGFVISHAX

SEQ ID NO: 189742 - protein, 131 aa, Zea mays
  Clone ID: MRT4577_104629C.1.pep
KNEKTEGRNRGERGQQEREAQQEQGQKQQHQAPPPPKRSSKRRKGRLRQAKQTNRQGPPTSSSSSSRTGGSQDFPEAQRKKPAPRRGKTTPKRPKGPPQAPPKGPPQGGEESPPPPPGMTGKKKKICLFFV

SEQ ID NO: 189743 - protein, 65 aa, Zea mays
  Clone ID: MRT4577_10462C.1.pep
LMSDEHVGGSTVPHGADEIRVVPRDQVEVPCGREHGEPGVGMGLVPEAPGQAHHGRVVRLRVGSA

SEQ ID NO: 189744 - protein, 125 aa, Zea mays
  Clone ID: MRT4577_104630C.1.pep
LSKKGGMPRLLAGPERLPPASQLASSQLFSTANHKLGQFGHYRCWSGRSPAPTAGGQLRVGWPPPPPPPLVGWPSPLTGGPPPPGTACRKPRGRCEPSVRSPKSGAPGHEQICRCRPARKGEPNL

SEQ ID NO: 189745 - protein, 75 aa, Zea mays
  Clone ID: MRT4577_104631C.1.pep
YPMVCSDEGVQGVRSCIADMCEEALSSITWFLLHHRFCIFMPGSVKSSSNSGVSFHMVWPGVPAYFLNNRSLVGY

SEQ ID NO: 189746 - protein, 116 aa, Zea mays
  unsure (1)..(116): unsure at all Xaa locations
  Clone ID: MRT4577_104632C.1.pep
YFMWCTYHAHYYAYFALVGLSPKIEFTIQPDFDRAPLQEDNTRVRSLPDGTCVISKVITAVSNDLRAHDPYHQLNAYNIHDTCXTKDLYPKIILXIYRELSASRDKSLAKDAMHLL

SEQ ID NO: 189747 - protein, 130 aa, Zea mays
  Clone ID: MRT4577_104633C.1.pep
GVAVGVALHAVTHLTCDFPRLLHASAAAYEPMKAYFGQRRIPNYWWFLRGVEGITGVIMVVLMAVAYTLAHPWFRRGKLSEGNPLRRLSGFNMFWYSHHLFVIVYVAFIVHGVCLYINRTWYKQTTWMYL

SEQ ID NO: 189748 - protein, 50 aa, Zea mays
  unsure (1)..(50): unsure at all Xaa locations
  Clone ID: MRT4577_104634C.1.pep
LGGRGALDSSDSAMAAAGRWILLPYACSPPSVRLALLQAXANKQAPVVVL

SEQ ID NO: 189749 - protein, 86 aa, Zea mays
  Clone ID: MRT4577_104635C.1.pep
NKIMVKEGFSMQTFPHGQKFLSGVFHRGALRVDALAKFLALEVIGLLLAPKTSSKILFNICKVCMNSEFGLNRSQVWCIGASPLCP

SEQ ID NO: 189750 - protein, 49 aa, Zea mays
  unsure (1)..(49): unsure at all Xaa locations
  Clone ID: MRT4577_104636C.1.pep
HRDVNEFNCSYEWGISVVWNEILPFIKVFMDKNKIVEWQXGXVXGRVPG

SEQ ID NO: 189751 - protein, 74 aa, Zea mays
  Clone ID: MRT4577_104637C.1.pep
FGSSSRSDPLFLKPELRTRTRGLLSICGGAPQQRLPGGHESSPQTTLRRPTHKAQQAGATPHLLTHYYQVMPEA

SEQ ID NO: 189752 - protein, 53 aa, Zea mays
  Clone ID: MRT4577_104638C.1.pep
PFQSLNLNRAGPILVIQKQQTIFYSPRGTNGADVLDFPVLLAQDLPTTKKRGK

SEQ ID NO: 189753 - protein, 100 aa, Zea mays
  Clone ID: MRT4577_104639C.1.pep
GNGLSASILHQVIKTQRGVITAPVIFPTYIPFRLTNQKNAFKTKGMTLKPIMAIRGTPNGPLGCSPFDEHPSLQQIPATKTLPGHGRGLFSSKPLVNSGA

SEQ ID NO: 189754 - protein, 84 aa, Zea mays
  unsure (1)..(84): unsure at all Xaa locations
  Clone ID: MRT4577_10463C.1.pep
MSSRRLLXLDGSARHTHTCGRCGSQPPPPVHIPPPQHMPASGQLPPTEHFPPPDHLAALVPLPPPAHEPHPNYQPPPPCHDINI

SEQ ID NO: 189755 - protein, 76 aa, Zea mays
  Clone ID: MRT4577_104640C.1.pep
EIRLEHNDKDCDWWFTDVVVPKRTYVLDWVFAHAPPWSARAYDINVGDDFHATLPNNMAYEEFWMEEEQRIYTRLQ

SEQ ID NO: 189756 - protein, 86 aa, Zea mays
  unsure (1)..(86): unsure at all Xaa locations
  Clone ID: MRT4577_104641C.1.pep
FFANNISTTTSMLSWRPLTVGRSXDTTHTHTIRTGICELIATAIFVFAAXGSELSLGKMYHDHTTITTAFRLLAVSLAHTLCLGLE

SEQ ID NO: 189757 - protein, 218 aa, Zea mays
  Clone ID: MRT4577_104642C.1.pep
MRLLCCLAALVVLALQHQCHGLLLPLTNTMLSSLRGANGTATPVHHLLRASSLRSAARHGRHRARRSPPSPPSPGRHRQLSLPLSPGSDYTLSLSVGPASAAAPVSLFLDTGSDLVWFPCAPFTCMLCEGKPTPGRSGPLPPPPDSRRILCASPLCSAAHASAPPSDLCAAARCPLEDIETGSCGASHACPPLYYAYGDGSLVAHLRRRRVPLGAGDG

SEQ ID NO: 189758 - protein, 95 aa, Zea mays
  Clone ID: MRT4577_104643C.1.pep
NSAVYQLREISCKMLATYMDRVAILTIYHVKIVNPRLVLFNLLLFPNDVFLLFCLVDYLHILERGHLKRMFLNIGVRVPTVHLLLELSESHTLNL

SEQ ID NO: 189759 - protein, 361 aa, Zea mays
  unsure (1)..(361): unsure at all Xaa locations
  Clone ID: MRT4577_104644C.1.pep
WLVPSDFPLNDDEFGQSSAESYGNMLQNKAFGGGTDRSLVGNRLPPYVYLHLDGNYGFHDKLFFCEDDQQFLRGVPWLVMRTDMYFVPSLFLVPAFQDELGRLFPEKDTVFHHLARYLFHPTNGVWYSVTRCFRSYLAKAEKRVGIQIRIYETKGILQRNGPFPHILNQILSCAQNEKLLPEISMAEGAADGTRNNRTAAGSGTRNNRTIAVLTTSLSAWYSEQIHVKYDEQSAVDGVSVGXYCYAYCYSYFAKQRNXQNVFFQIYLLSMTDVLITSGFSTFGYAAQGHAGLKPWIMLKSENHVTPDPPCVRAMSIEPCFHQAPFYDCKARKDTDLGKVVPYVRHCEDVSWGLKIVDQTHL

SEQ ID NO: 189760 - protein, 55 aa, Zea mays
  Clone ID: MRT4577_104645C.1.pep
ELIRPTIRQRRPVHTSNEPCPWVFVNEVCPIQCTACCINIRVSKKAIWSATSRIP

SEQ ID NO: 189761 - protein, 92 aa, Zea mays
  Clone ID: MRT4577_104646C.1.pep
FSESNCFRRTRVETSKRRQAKCCGNLPRGRPMLPQQLPPPEGFLPTPPVHTVSLSWLCPVLILNHSSFPPVIGCVSWHIFPAPYGKGDPGPF

SEQ ID NO: 189762 - protein, 223 aa, Zea mays
  Clone ID: MRT4577_104647C.1.pep
AEKRVGIQIRIYETKGILQRNGPFPHILNQILSCAQNEKLLPEISMAEGAADGTRNNRTAAGSGTRNNRTIAVLTTSLSAWYSEQIQEKYDEQSAVDGVTVRVFQPSHEEYQRSRNKGHNMKALAEIYLLSMTDVLITSGFSTFGYAAQGLAGLKPWIMLKSENHVTPDPPCVRAMSIEPCFHQAPFYDCKARKDTDLGKVVPYVRHCEDVSWGLKIVDQTHL

SEQ ID NO: 189763 - protein, 53 aa, Zea mays
  Clone ID: MRT4577_104648C.1.pep
TNALKRLHYISCHLTMRAQTGILLPFRMQSLKSSSTDLGLLLPTRMPSFERLG

SEQ ID NO: 189764 - protein, 37 aa, Zea mays
  Clone ID: MRT4577_104649C.1.pep
SQETIHAQSKSLVLPFTLPFMNQTVVRLTLECCIDLR

SEQ ID NO: 189765 - protein, 158 aa, Zea mays
  unsure (1)..(158): unsure at all Xaa locations
  Clone ID: MRT4577_10464C.1.pep
MRECISIHVGQAGVQIGNACWELYCLEHGIQPDGQMPSDKTIGGGDDSFNTFFSETGAGKHVPRAVFVDLEPTVIDEVRTGTYRQLFHPEQLITGKEDAANNYARGHYTIGKEIIDLVLDRIRKLADQXTGLQGFLVFHSFGGGTGSGXTSLLMERLS

SEQ ID NO: 189766 - protein, 69 aa, Zea mays
  Clone ID: MRT4577_104650C.1.pep
GRPLSSLAAAHHFFLLHRSSPPPRSKDREEEEQDGLKRKRGSKRCSTPPPPSIVDFLGETLGGYTPDHA

SEQ ID NO: 189767 - protein, 133 aa, Zea mays
  Clone ID: MRT4577_104651C.1.pep
QTCHSCSPGTAVSSLFPSSGLPPSPKPHSLKTELQSQVTPDQSHVYTSRHISFFSLRDRGRSTLHSPTNITVKTPPNTGLKLPCLPGLTVDSCLLNKTSLTYKAAARPSEALQEAATGGPGFSPASSSQDRHS

SEQ ID NO: 189768 - protein, 39 aa, Zea mays
  Clone ID: MRT4577_104652C.1.pep
PYWFLSSAHFRNRRQSGLLLLLKIGLVDSYPICYRLFVV

SEQ ID NO: 189769 - protein, 108 aa, Zea mays
  unsure (1)..(108): unsure at all Xaa locations
  Clone ID: MRT4577_104653C.1.pep
RGRLGGLGEVWEEAVGRGGAGDGGGRERREALVGAASPHERRAQRRCRRRWRDSLFAVRSGGLRAVVVGERAGVRRDQNMVARAPPSFFPLPPSLLEIAPXXVNASPP

SEQ ID NO: 189770 - protein, 107 aa, Zea mays
  unsure (1)..(107): unsure at all Xaa locations
  Clone ID: MRT4577_104654C.1.pep
MARLQNLALATAAGGALVLLAGGTSEAAISCGQWGSAMGPXISYPRGQGWGPSAGCXRGLRSLKNAAGTTADRGAACNCLKNAAAGVRVLNAGNAARIPSKGGVRIP

SEQ ID NO: 189771 - protein, 59 aa, Zea mays
  Clone ID: MRT4577_104655C.1.pep
RLLSTRGLSFFLYQPNPSVPQDQIVLNPRWETTTRTNPGLALHITTGACPTFRAKRSCT

SEQ ID NO: 189772 - protein, 37 aa, Zea mays
  Clone ID: MRT4577_104656C.1.pep
NAVMDHGLTHCQPSCYLQAPRPDFSSFHLLSYYHCLT

SEQ ID NO: 189773 - protein, 76 aa, Zea mays
  unsure (1)..(76): unsure at all Xaa locations
  Clone ID: MRT4577_104657C.1.pep
WWGVNKKFFFPGGGGVFLGPSGLFFVFFVRYFLFGGYFVCSCGAXYEVFDVSSSLYCLLTVHKYTMTIKYVFINKT

SEQ ID NO: 189774 - protein, 257 aa, Zea mays
  unsure (1)..(257): unsure at all Xaa locations
  Clone ID: MRT4577_104658C.1.pep
MAGAAAHQTTSHADDGSPEWSVAVPAAAAGHENTKSSRRACCTRALVVCLFSWLAAPMVSLATSSCLWLFSLAAAARDRVVGVARMAWRIGADDPRKVAHGFKMALALTLCSVFYYVKPLYDFTGQNAMWAVLTVVVVFEYTVGGCLYKGLNRAMATMTGAALALGVQWIASLSDKELEPFILSGSLFVFAAAATYSRFLPTMKARFDYGVTIFILTYTLVAVXGGYRVXRVAFMARHRLTTIAIGAXICFAVCALV

SEQ ID NO: 189775 - protein, 46 aa, Zea mays
  unsure (1)..(46): unsure at all Xaa locations
  Clone ID: MRT4577_104659C.1.pep
HAYDSISQTPSLFFFFXHTTPYHAMVIFHASPTPTISTLAITLTNN

SEQ ID NO: 189776 - protein, 126 aa, Zea mays
  unsure (1)..(126): unsure at all Xaa locations
  Clone ID: MRT4577_10465C.1.pep
EVTTSSLRHLLGSRETATMRECISIHVGQAGVQIGNACWELYCLEHGIQPDGQMPSDKTIGGGDDSFNTFFSETGAGKHVPRAVFVDLEPTVIDEVRTGTYRQLFHPEQLITGKEDAANNYARXHY

SEQ ID NO: 189777 - protein, 89 aa, Zea mays
  Clone ID: MRT4577_104660C.1.pep
FCTFGKTPRGLAWVPPMARFGCGQASCGPLGGRGLDFWRWAGPLLSVGFGVEEFNFLEGVFFLFPKSFAWGWGCIYPKTQKFPNKPVVI

SEQ ID NO: 189778 - protein, 40 aa, Zea mays
  Clone ID: MRT4577_104661C.1.pep
SGAIVGHYCTIWAQNSIFPEFKPDEMTHIVKDIDEPGFLA

SEQ ID NO: 189779 - protein, 135 aa, Zea mays
  Clone ID: MRT4577_104662C.1.pep
SQIRYTSRRAVAERRPRFPSGSMYSWPSSPRHPRACSAMPTQRSLATIIPGSPPASVPDVHAIAKAAISLSSSIPERPSPMCGVLGLLKALQKSFPVISRHVLVLLPPASSRGLPSRSRFVSELRGIDGQASATK

SEQ ID NO: 189780 - protein, 66 aa, Zea mays
  unsure (1)..(66): unsure at all Xaa locations
  Clone ID: MRT4577_104663C.1.pep
RPCRSAGVEXDDEGVRELNEPLLEGVRVVHLVVTPQVDPIDRHFRGPLTSSHDLVATVIEEAVDLS

SEQ ID NO: 189781 - protein, 58 aa, Zea mays
  Clone ID: MRT4577_104664C.1.pep
GRGHASDHASDGAEPVGQHLNGSCRHDMNHACNHSQRCHRMQRMLAYILHLIKNSLQL

SEQ ID NO: 189782 - protein, 72 aa, Zea mays
  Clone ID: MRT4577_104665C.1.pep
MGVYLSTPKTDKLSADGENSRVRFGLSSMQGWRTTMEDAVSCFRLPRGFRLGGNGIAPDCSVPCSHDWFGVI

SEQ ID NO: 189783 - protein, 210 aa, Zea mays
  unsure (1)..(210): unsure at all Xaa locations
  Clone ID: MRT4577_104666C.1.pep
PPLSFLPSASAFSSFSSPRQHAGSPAPLPWRPTSLPLLSTASCQLGVELQAPWARTPPSLLSIPLGVLLPPGRCPILFPLSALSVAGHGRTGPQLEHAWTPLSHGRAPAPAPASGRGAAPLQRMRRSCSPWRACSHGAPPRVRCAQPCRALLPPLFHSSVLPSSAPISLLPSRASHGALPPSLCCTWRQAANSHGAXTSQRPPYSHGAPL

SEQ ID NO: 189784 - protein, 354 aa, Zea mays
  Clone ID: MRT4577_104667C.1.pep
MGVYLSTPKTDKLSADGENSRVRFGLSSMQGWRTTMEDAHAALPDLDECTSFFGVYDGHGGKAVSKFCARHLHKQVLINDANSSGDLPTSLHKAFLRMDEMMKGQRGWRELTELGDKGNKISGMIDDIIWPPKGGDSDKIREDWDTEEGPNSNFPGPTSGSTACVAVIRNDKLIVANAGDSRCVISRKGQAYNLSTDHKPDLEEERERILGAGGFVVAGRVNASLNLSRAIGDMELKQNDLLPVERQIVTAEPELKTVQLSEDDEFIVLACDGIWDCMSSQEVVDFVHKQLKTEDKISSVCEKLLNRCVAPTSGGEGCDNMTVIVVQFKKPALAVATSSAEQSATTAEGMRPKI

SEQ ID NO: 189785 - protein, 39 aa, Zea mays
  unsure (1)..(39): unsure at all Xaa locations
  Clone ID: MRT4577_104668C.1.pep
NFRALCXLFXXNLLNFDIYDYIRLRYISSHLHKILKVIM

SEQ ID NO: 189786 - protein, 92 aa, Zea mays
  Clone ID: MRT4577_104669C.1.pep
MTKRTKKVGVTGKYGTRYGASLRKQVKKMEITQHAKYTCTFCGKVTVRRKSTGIWNCRSCKRTIAGGAYTVATPAAAAMRSTLRRLREIAEV

SEQ ID NO: 189787 - protein, 56 aa, Zea mays
  Clone ID: MRT4577_10466C.1.pep
VSYLNYAGTICERSTERALRDMARPMTVSKGAHDANLLYFLQAVPVKPIRIHFLSI

SEQ ID NO: 189788 - protein, 95 aa, Zea mays
  unsure (1)..(95): unsure at all Xaa locations
  Clone ID: MRT4577_104670C.1.pep
GXPGALFXVXXXFAWPPXXXCFXXXXXLFRSVLFFCWFXLXAPLGXRXAXFCGXWXXXAXXLXCLCXXXXPCLRSGCXSSVFRXXXXXXXXXXPE

SEQ ID NO: 189789 - protein, 81 aa, Zea mays
  Clone ID: MRT4577_104671C.1.pep
ATVGTDAVEEPSPASRGSTGLTSAASGSAPTRASRSSTSSACAICSIARLDRSLTASRPCGPHILSKSAPTDCFTTESLTL

SEQ ID NO: 189790 - protein, 81 aa, Zea mays
  Clone ID: MRT4577_104672C.1.pep
NNFLHNTHPPPKAFLKPFCVYNTNKNLHQGPTTHLFLYLDSKPFLDLLIPPLFSRQNILMLVFNNLSPHIFTQNSPTYLSI

SEQ ID NO: 189791 - protein, 53 aa, Zea mays
  Clone ID: MRT4577_104673C.1.pep
ATGTCSQYLTEVKISGPKWPSLQVSWALHDGKVDCYYLSAPLVASSLIDQLIR

SEQ ID NO: 189792 - protein, 50 aa, Zea mays
  Clone ID: MRT4577_104674C.1.pep
MAKQVHGPEYDLRTKDIDREVLMKIKEGKKHVQYWIADSAINLSSTPTLS

SEQ ID NO: 189793 - protein, 50 aa, Zea mays
  unsure (1)..(50): unsure at all Xaa locations
  Clone ID: MRT4577_104675C.1.pep
LVSGLRPRPENPGSTGAKAPRLWHVTXXKXSSRRGRQAYSIQYNTVGLAD

SEQ ID NO: 189794 - protein, 230 aa, Zea mays
  Clone ID: MRT4577_104676C.1.pep
MGCKACQKPKVQYRKGLWSPEEDEKLRDYILRYGHGCWSALPLKAGLQRNGKSCRLRWINYLRPGLKHGVFSREEEETVMSLHAKLGNKWSQIARHLPGRTDNEVKNYWNSYLKKRVEGGAQGKHGAADPATPGRSDVHGSPDDPSENNGQGSVVSRPANSDSSEPAVESSSADDSSCLTVTEPAGARASATAAVRPHAPVLPKVMFADWLDMDYGTSLVALGPDAGVFD

SEQ ID NO: 189795 - protein, 59 aa, Zea mays
  Clone ID: MRT4577_104677C.1.pep
ALAVSSPLVAHSLVFSSLPPYVSNSKTYILVNVPHVVCLRPIHMSQLCSLVHPWALVPI

SEQ ID NO: 189796 - protein, 115 aa, Zea mays
  Clone ID: MRT4577_104678C.1.pep
KRETNVIPAPTKKFWNKNFSGPPPKGGTPKWGIKKQTMAANPGAKKKVKNGPAPQAQVGIKTLPPAGKNPRFFWDPGPGGLSPKNLPARGVRGKTPRNPWRGGLVEGEIPNPGGG

SEQ ID NO: 189797 - protein, 144 aa, Zea mays
  Clone ID: MRT4577_104679C.1.pep
HLLYTQSRVGPVQWLKPYTDEVLVELGQKGVKSLLAVPVSFVSEHIETLEEIDMEYKELALESGIENWGRVPALGCTSTFISDLANAVVEALPSASALGTRKPEDTDSSMDLMHYLTKMFFGSILAFILLLSPRLVSAFRNTML

SEQ ID NO: 189798 - protein, 106 aa, Zea mays
  Clone ID: MRT4577_10467C.1.pep
KFQLYLLHSHPIIMTLSISRFPLWSFMSIGPPGPSKYICCAKCVAALVTCDKLSLTCLMWKSSVIITCWRRRSLSLWIHTFFVHPIMLLLFSSRRKPHVLLDRMIP

SEQ ID NO: 189799 - protein, 97 aa, Zea mays
  Clone ID: MRT4577_104680C.1.pep
PLEHEDMEYKELALESGIENWGRVPALGCTSTFISDLADAVVEALPSASALGTRKPEDTGSSMDLMHYLTKMFFGSILAFILLLSPRLVSAFRNTML

SEQ ID NO: 189800 - protein, 35 aa, Zea mays
  Clone ID: MRT4577_104681C.1.pep
HGCTYYKEVLETNKQYVVQSSTDQKCQELSKQLFY

SEQ ID NO: 189801 - protein, 116 aa, Zea mays
  Clone ID: MRT4577_104682C.1.pep
RLTPTNTAHGPRLQRLVEARPGRTTTRARRSAAVAQSCLAAAPWRSLTTAVWISDRQDFYPLARCRSAMDAESLVSSVEMSSGALDLCSTVWRSWRDAAWMWTRSRSSKSLDEWTS

SEQ ID NO: 189802 - protein, 31 aa, Zea mays
  Clone ID: MRT4577_104683C.1.pep
KLLNICLSRLRIISLNPTDMVYYHSDKLIQT

SEQ ID NO: 189803 - protein, 264 aa, Zea mays
  Clone ID: MRT4577_104684C.1.pep
ASRHRNGWQRRCTGRAGNQDADAWVDDGETFQWSKVTTTINNLILGRVYCHHHGTMNISGNRRYSCKLTFKEQSFLDRNPRQVQGVVNDADGSKVATLMGKWDESMHYIINNDASKTNSHGSHEGSGATLLWEKNEPPVNPTRYNLSTFAITLNELTPELKEKLPPTDSRLRPDQRHLENGEYEKANAEKLRLETRQRMARKMQESGWKPRWFQRDSEDGTYRYVGGYWEAREQRTWVGCNDIFGNLSSSPKLPPSGLNTSSSI

SEQ ID NO: 189804 - protein, 549 aa, Zea mays
  unsure (1)..(549): unsure at all Xaa locations
  Clone ID: MRT4577_104685C.1.pep
EYLSFIGTLPHDVEVVNSVDSMSXEKPRLELFKHDCSSSGKCSEYSNTESSDDVGKQEISELSDGDDFHFYDTRQSFSEFTTTPADLRKGCVNTGNEDHKSVESLTVDEAEKYMLSHPKRRSQLPEPIEKEKGVSLWSMIKDNVGKDLTRVCLPVYFNEPLSSLQKCFEELEYSYLLDRAYECGLRGNGLMRIIYVAAFAVSGYASTDSRPCKPFNPLLGETYEADYPEKGIRFFSEKVSHHPMVMACHCEGKGWKFWGDSNLKSKFWGQSIQLDPNGVLTLEFDDGEIFQWSKVTTTINNLILGRVYCHHHGTMNISGNRRYSCKLTFKEQSFLDRNPRQVQGVVKDAGGSKVATLTGKWDESVHCVINNDASKVNSHGPHQSSGSTLLWEKNEPPVNPTRYNLSAFAITLNELTPXSRYTWNIHISHNLXLLALPKRLRHIFYALVKEKLPPTDSRLRPDQRHLENGEYEKANAEKLRLETQQRMARKMQESGWKPRWFQRDSEDGTYRYVGGYWEAREQRTWVGCNDIFGNLSSSQKLPPSALYTS

SEQ ID NO: 189805 - protein, 180 aa, Zea mays
  Clone ID: MRT4577_104686C.1.pep
AKQHVGPEPHARLSHECSSSFQEGDLRHTPRSAYGEESHGQISVLGSWQAPGTYYNWGPQNRTVCPEFQNRGSFQQRFGSYGAADSGFGRANGDRQFNSLERRVPYGRIGGQGRGRTSCQGRGYTRGWHERFVCRWSEPHCQVQNGGSEIASHKLLAPGQQGTKRNWCKAESSDSPQQDN

SEQ ID NO: 189806 - protein, 71 aa, Zea mays
  Clone ID: MRT4577_104687C.1.pep
TRGRHLSRLFVKKPNYPSTHTSLTYMILMTKRRTINNSLLYIKFSYLPPSIAPNLYHQTIGSTANNHNSYM

SEQ ID NO: 189807 - protein, 90 aa, Zea mays
  Clone ID: MRT4577_104688C.1.pep
SNSFNLVIPCNLVPVFLDFFCHSFLFIFMWFNLYLFSNVRVPSLVWNVIIWDCSQIKLFHGCVEESVYRLFVFHHSDFSLSVSVSIEFIL

SEQ ID NO: 189808 - protein, 180 aa, Zea mays
  unsure (1)..(180): unsure at all Xaa locations
  Clone ID: MRT4577_104689C.1.pep
MHIFVNILTGNTISLEVLSSDTXDYVNXKIHXKESIPPEQXRLIFSWLNIIDDGLTLCEYNIQKESTLHMVFRLMGGMQIFVPTLTAEIITMXVETCDTIDHGMAEIQXDNEGLPPEQQRXLIFSGMQLDDEHTLVDYNLQMESTLHLWLRMCGGMQIFFKTVTGKTITLDAESSDTIDY

SEQ ID NO: 189809 - protein, 402 aa, Zea mays
  Clone ID: MRT4577_10468C.1.pep
MGSAWANVREICRAQRADGPAAVLAIGTANPANCVPQDEFPDFYFRATKSDHLTGLKEKFKRVCQKLGVQKRYLHHTEELLSAHPEFLDRSSPSLDARLDIVKTAVPELAAQACRKAIAEWGRPAADVTHLVVATNSGAHIPGVDFQLVSLLGLRPTVRRTMLYLNGCSAGAAALRLARDLAENNRGARVLVACAEITVLLFDGPEEGCFQTLVNQGLFGDGAGAVVVGADPAAPAERPLFEIVSAAQTVIPDSEGVITMHLTKGGYGGNISTRQVPVLIGDHIERCLTDAFAPLGVGAGWNDLFWDVHPGSSAILDQVDAVLKLKPEKLAASRRVLSEYGNMFGVTVIFVLDELRRRMTNGEEEGAPAEWGVMVAFGPGLTVETMVLHRSGTPAETKLGEA

SEQ ID NO: 189810 - protein, 109 aa, Zea mays
  Clone ID: MRT4577_104690C.1.pep
MSEKIEDAQTKGKLEVEEAVHHEHADEISPELEALLQTDPKQGLSTEEAAKRLAQFGPNELAEVKRNPFLKFLSYFTGAIAYFIEVPCTISAVVNDWLDFGIILGLLLV

SEQ ID NO: 189811 - protein, 103 aa, Zea mays
  unsure (1)..(103): unsure at all Xaa locations
  Clone ID: MRT4577_104691C.1.pep
MTSPKEATPVQFHTTGRLSLCSFCFASASGRRRFAAVRASEETMATEXLGIKEERYPPEARLSKLGGRQRPXRGCEKSKLPWTYFAKVTCYLLQGKVIVLPEG

SEQ ID NO: 189812 - protein, 135 aa, Zea mays
  unsure (1)..(135): unsure at all Xaa locations
  Clone ID: MRT4577_104692C.1.pep
MADRGELQLMDSCYRPYEIRAKAWFGLKGLSYPLAEGDLSRKSDLLMKLKPRHRKAPVLVHACRPVRDALVILHYCDKTMXGTGTPLLPVDAYDRAMGRFWADYHHDKAITCDCRGRPAGQNANPCLFLLLAPRI

SEQ ID NO: 189813 - protein, 55 aa, Zea mays
  unsure (1)..(55): unsure at all Xaa locations
  Clone ID: MRT4577_104693C.1.pep
RGEPVTRHEAPPQAERPTDERNPRTRPPGADTKQTADRXGESGXXXXTPRPCPGG

SEQ ID NO: 189814 - protein, 145 aa, Zea mays
  unsure (1)..(145): unsure at all Xaa locations
  Clone ID: MRT4577_104694C.1.pep
VTKFCSGHAPHFPMKKVLLLLWKTVLCTLGGFEELQSMKAEKRAILGLPPLPEDSIKVIRNMRAASPPASASDLIEQQQKRGRREHKALIKQDNLDAFNERDPYKADDSREEEEENDDDNSLEGETFPLERDEVMPXPLQHPQTD

SEQ ID NO: 189815 - protein, 394 aa, Zea mays
  unsure (1)..(394): unsure at all Xaa locations
  Clone ID: MRT4577_104695C.1.pep
TTTSSTTTTRTPTRADTTSPPPTARLSRPPSPPATPSPLPXTPAPTAPQVPRPPLPQPPAPAPAPAPAPQPPKPSSPPAPAPAPAAEPYYWPKPYDYGDAPRHLPMYPTPEVFRGWPFLPPPPGPXTAAPRAPASAPVTTGGSACGGWTTSSATPTATGSATSESTPSGSPSTPTGRGASRTPSQSRRRRRPSGLSSGTTPANCSFRTTDRLGMVTPKRKHILMSNLHTLHTIDLMSNLPILRMIDLMNSLPTLHMIDLMNSLPTLHMIDLMNSPTVFTLFPMRLPGFLIRPTRMSTKRRNHNSRNSSRMMKTIKFRLNLFLATISILVNNRCIFMLSLQKQFLLTSWSTMRISRCTTTKMMVIIWRVQDNHMRHSPMCTCLTINLNLIGLHGL

SEQ ID NO: 189816 - protein, 85 aa, Zea mays
  Clone ID: MRT4577_104696C.1.pep
GKRPPSFSPRAFFPPPTPPFKNRKKSPGGGGCIPYPKPHFFFFNPLFLAPRTPTKMPHFPPLQPAMSKNWSPPRPRGGPQTLKRL

SEQ ID NO: 189817 - protein, 79 aa, Zea mays
  Clone ID: MRT4577_104697C.1.pep
APKASLSSPARPPRRRRPPGPPWRPRPAARPRGAKTARGGLCPGRRPSPPTPPCPRPGCPRPRNLRFLWWGFWRRYGEG

SEQ ID NO: 189818 - protein, 211 aa, Zea mays
  Clone ID: MRT4577_104698C.1.pep
MEALLGQGLDDGNELDRSFYMESLGLMAQQAEDVGRIKMEPNGIVSSRSRGEGAPGFGPTEMKPEASSAAAEVLDTDFNCCSPTVMMDNEDEDSFEQKASASNAAAAAAGTQFLKRSLDLSLNYEAIIESWGSSPWTDGQRPSVQLDDFWPHAHLTGWMAGGGRLGGEAAVTPRLGMGGGREARVTRYREKRRTRLFAKKIRYEVRKLNAE

SEQ ID NO: 189819 - protein, 51 aa, Zea mays
  unsure (1)..(51): unsure at all Xaa locations
  Clone ID: MRT4577_104699C.1.pep
KGWLELEKRKNFVAGGILFETLSLESLIRFKLQKEKIKGLGGNVSFXITPN

SEQ ID NO: 189820 - protein, 74 aa, Zea mays
  Clone ID: MRT4577_10469C.1.pep
RPGRPHAGYISFLPIPVHESPYGNTRYVLSHRGSSLKAITKCMLPPYYTSSYRPRGSNIDRRSYIFFYLRHNQR

SEQ ID NO: 189821 - protein, 78 aa, Zea mays
  Clone ID: MRT4577_1046C.1.pep
KKKKKKKKKKKKKKKKKKKKKKKKKKRKKKKKKKKKKRFVPWAGNHPKGRNFGKYHIKLGGRLNHALKGAKFPLKGVV

SEQ ID NO: 189822 - protein, 471 aa, Zea mays
  unsure (1)..(471): unsure at all Xaa locations
  Clone ID: MRT4577_104700C.1.pep
MSSSKHAAGAVGGKAARACDSCLRRRARWYCAADDAFLCQGCDASVHSANPLARRHERLRLRPTDPHSTXRGRRGDGDVEEAPAAGRAGVVXRKARTRRPHVKSVGELLSRKLVVVPEVSPIESSEERKAEEEEEEEEGQLLYCVPTFDRALAELCSPPPPVDDPTASSCCRDDVDGAVENNTKAPPVVVAESPVQQLPDSFAGFGPTDAELREFAADMEALLGQGLDDGNELDRSFYMESLGLMAQQAEDVGRIKMEPNGIVSSRSRGEGAPGFGPTEMKPEASSAAAEVLDTDFNCCSPTVMMDNEDEDSFEQKASASNAAAAAAGTQFLKRSLDLSLNYEAIIESWGSSPWTDGQRPSVQLDDFWPHAHLTVRLFPNSRCSSSSTDRLRXVDACLXCFDLQSTIGFMCQVCVQGWMAGGGRLGGEAAVTPRLGMGGGREARVTRYREKRRTRLFAKKIRYEVRKLNAE

SEQ ID NO: 189823 - protein, 311 aa, Zea mays
  Clone ID: MRT4577_104701C.1.pep
QVEGCKVDLSSAKEYHRKHRVCEPHSKAPKVVVAGLERRFCQQCSRFHGLAEFDQKKKSCRRRLNDHNARRRKPQPEALSFGSSRLSAMFYDTRQHTSLLFGQGPYGQMRSCASSSWDNPGGGFKFAETKGPWLRAGGVDGLHQSSQQVWNNFMPHGVHQDFDGFTAFKGTNAKVLHQGVEASAVASNQNGAPQPDLHRALSLLSNSWAGAGTDQHPTAQLRHHAALSSSLAASSVSVAQASPAGLWQDGGGGAALSHHDYAHAQARFQAIDALGGAGAAAAVAAGQELLQLPRPPSPYDDGSSSRYDLMR

SEQ ID NO: 189824 - protein, 55 aa, Zea mays
  Clone ID: MRT4577_104702C.1.pep
KSSPPPFFVYKWASLPPPFKKKKKKKKKKKKKKKKKKKKKKKKKKKKKKKKKTPH

SEQ ID NO: 189825 - protein, 77 aa, Zea mays
  unsure (1)..(77): unsure at all Xaa locations
  Clone ID: MRT4577_104703C.1.pep
PSAACSFPLRAHQRRSLGPPTWLSRPRGCCLLGLRGPGEGRGADRIRVKAPAGRXLRWVGPWGASAWEMPLGLPXRP

SEQ ID NO: 189826 - protein, 56 aa, Zea mays
  Clone ID: MRT4577_104704C.1.pep
SKKNTHLGDNSFGAPLTGFLEKNNYLKKCPINWKTINFFHHLKRVFFAGSAGDHLT

SEQ ID NO: 189827 - protein, 81 aa, Zea mays
  unsure (1)..(81): unsure at all Xaa locations
  Clone ID: MRT4577_104705C.1.pep
CVQKSSQHRPVSNLLHAYALYADAKQVFLWSSLDLRGEGRSCPLFLKNNGVVGWGKPMSVARSSLEKKPXLTRKPKESXLL

SEQ ID NO: 189828 - protein, 59 aa, Zea mays
  Clone ID: MRT4577_104706C.1.pep
GTHAPCSKLIYKFTCGCNPTQGHPQSPGYHMLDTQSAPTRTLLMTHGPGSLTMLQSRGG

SEQ ID NO: 189829 - protein, 65 aa, Zea mays
  Clone ID: MRT4577_104707C.1.pep
EIEGGENVGRRGKGGGFLGNYRHGVKREFFGRGINWGRKGVFQVRSCLRRGSELNLGGVKKELLL

SEQ ID NO: 189830 - protein, 38 aa, Zea mays
  Clone ID: MRT4577_104708C.1.pep
TYSSVRLSYSSSPSYCISLTTLSSRHSSAYHLTTPHTS

SEQ ID NO: 189831 - protein, 148 aa, Zea mays
  Clone ID: MRT4577_104709C.1.pep
ETQRSRGLGLVPFSPEGALGTPFKGITAKELGGPNFPVKGAHSPGALEGGAGGGYVVARGGGGFGGGGPRNGGGGFGGGGGFGGGAGGSGGGGGGFGGGTRGGGLGNSPGNWGNLAVGPAKKNFLVRSRVFSPSPKGLFSFVSGLLLP

SEQ ID NO: 189832 - protein, 86 aa, Zea mays
  Clone ID: MRT4577_10470C.1.pep
RVPVMVIRRGLPYRLNHDSIRASRKNRLDVTSEMGGVVLSQVVRIHGLGRTGCITQHVDAATRVQRQSDRLRSPASLRNRQRPARG

SEQ ID NO: 189833 - protein, 144 aa, Zea mays
  unsure (1)..(144): unsure at all Xaa locations
  Clone ID: MRT4577_104710C.1.pep
GLKLYKYACNVKWLRVRGGVLHFIPEGAFSELKPRDFQIAKGFMLSKFLQESYKTXLALMVEKGKGANIEALYFPGVGFLGKDIAKKIVQGDYILRLAAGKLAWLPGTINCMDCSTVAIYVPPPVDLNHGLYWNVYKNSQRLAS

SEQ ID NO: 189834 - protein, 47 aa, Zea mays
  Clone ID: MRT4577_104711C.1.pep
SKRIIEKRNKVVSFYLKRYMLGHEKFILVWGFKICSRPLFHELPPFF

SEQ ID NO: 189835 - protein, 77 aa, Zea mays
  unsure (1)..(77): unsure at all Xaa locations
  Clone ID: MRT4577_104712C.1.pep
IXPPPPQIXYYVYVAPVPIASVILALSLQACRPWMHDILVFHLLTVHGGGGVGEDLPARRPVAACCEKPIFFFFFFF

SEQ ID NO: 189836 - protein, 106 aa, Zea mays
  Clone ID: MRT4577_104713C.1.pep
NPEFARAFQRSCAGYRTDPPVSIFKDIVPPRDFSETFYKNLPPGLGLFPSDPPLWEYPPPRVFAQRYPPNRPPFFEDFPPPIQRLGPVGVKTGPQGVVRPPFDALD

SEQ ID NO: 189837 - protein, 111 aa, Zea mays
  unsure (1)..(111): unsure at all Xaa locations
  Clone ID: MRT4577_104714C.1.pep
SLLXXXCXVVXXXCLSXXXPXFXLVCXPXXAXXXVLRLVFPAPAPWSXXRXLGLVVPSWXRXAVVXXXXXPXXXXARXRGPXVLSXVVLXCWVRRSLAASXLVAXXAVVXG

SEQ ID NO: 189838 - protein, 59 aa, Zea mays
  Clone ID: MRT4577_104715C.1.pep
SKSMGSSLRSIVCLVRTPPRPADKCRLQVSLWARISSEQSTARPRRQRQADEGFEFELS

SEQ ID NO: 189839 - protein, 105 aa, Zea mays
  Clone ID: MRT4577_104716C.1.pep
FLHFRFPCDPAGPPSPEVAKSVAAPPPPEVAYPTPPTCPRTPTRVISRARAPSCHHHDAVAIELSSPGATIPPSLGLRLTLISHPSSSLEKNAANCLVNCDSVLD

SEQ ID NO: 189840 - protein, 217 aa, Zea mays
  Clone ID: MRT4577_104717C.1.pep
MASNGNGNLKADIQQVESTASDNVQGATGVNTLATQGVSRNEKRWSGFRDFWNRLCTGPKLKKLGPSTSFKFQQIALQRDEFSRSIHSDNHVSHGHFQFIRKINWEQLWVMARNWIKEPMNMALFVWIACVAVSGAILFLVMTGMLNRVLPSKSKRDTWFEVNNQILNALFTLMCLYQHPQRIYNFVLLCRWEQQDILRLRKIYCKNGTYKPNEWMH

SEQ ID NO: 189841 - protein, 546 aa, Zea mays
  unsure (1)..(546): unsure at all Xaa locations
  Clone ID: MRT4577_104718C.1.pep
MASNGNGNLKADIQQVESTASDNVQGATGVNTLATQGVSRNEKRWSGFRDFWNRLCTGPKLKKLGPSTSFKFQQIALQRDEFSRSIHSDNHVSHEHFQFIRKINWEQLWVMARNWIKEPMNMALFVWIACVAVSGAILFLVMTGMLNRVLPSKSKRDTWFEVNNQILNALFTLMCLYQHPQRIYNFVLLCRWEQQDILRLRKIYCKNGTYKPNEWMHMMVVVILLNLNCFAQYALCGLNVGYRRSERPAIGVGLTISVAIGAAAFAGLYNIISPLGKDYDTEHADTDQEAQIHATSTESGRPTSRLQSFERRYSFIQSDERRFVERRPQWVGGLMDFWDQISIAYLSLFCSCCVFGWNMQRLGFGNMYVHIATFLLFCLAPFFIFVLAAGNVDNGSVQVALVLTGLFLCFFGLLYGGFWRIQMRKRFNLPENSFCCHNPDASDCFHWLFCCSCSLAQEVRTADYYDITEDRSHTGQVVGESHRIMSPLQREDGLPLFKSSPSSPYRSGNASPSXSSSWRARHRRPHVGRLVRRLRVVVHRRWAIGR

SEQ ID NO: 189842 - protein, 70 aa, Zea mays
  unsure (1)..(70): unsure at all Xaa locations
  Clone ID: MRT4577_104719C.1.pep
SYDKAAWTFENTRGFCEICIQEINAGNRSNDIMTTRGHNNIAEKYKIATXLHHSRLQLKNKLDLLKGRHE

SEQ ID NO: 189843 - protein, 85 aa, Zea mays
  Clone ID: MRT4577_10471C.1.pep
YIIFFFFTLMVGFFSQIMHARHIWLYNNFLTLECWKFKFTLSNTWMPQLDIMNTRQLRKKNENSDSYSRSGKHINPDFTKPSLMG

SEQ ID NO: 189844 - protein, 80 aa, Zea mays
  unsure (1)..(80): unsure at all Xaa locations
  Clone ID: MRT4577_104720C.1.pep
MADWGPVVIAVVLFVLLSPGLLFQLPGRSRVVEFGNMQTSAISILVHTIIFXGLITIFLIAIGVHIYTWLGLFYSFFGKV

SEQ ID NO: 189845 - protein, 131 aa, Zea mays
  unsure (1)..(131): unsure at all Xaa locations
  Clone ID: MRT4577_104721C.1.pep
RGVSPIDHTFLFPKKIPSPVEVFPLAKQLLGWPPAPAFLGATPAAGWVQTPGAIKRKGHPFLFFPANPKFPPSAAFFFVWKRANFPCLCQFFSKKVKKVWGLEKVVFFPPFCKRPFXPGSKGGGFTVPFCL

SEQ ID NO: 189846 - protein, 69 aa, Zea mays
  Clone ID: MRT4577_104722C.1.pep
IIIQDSMSSQNYEPSNYSRISESAESGKNAIQLKLCLSPTCFTAVTSESMTGEKTVKLKAHIHCYSISL

SEQ ID NO: 189847 - protein, 271 aa, Zea mays
  unsure (1)..(271): unsure at all Xaa locations
  Clone ID: MRT4577_104723C.1.pep
LGTSRPAGELSPGWACAVWPLSLHPTQPRNRGPRSSSERQRTPWPPWTSSPASSYAPCVSIPHSSPLLLPPPAPSPHPAVIKAKENMKIAFLSQEFEVSASRTVREEFFSAFEEEMEVKRRLEQVQAALEGATEDMDLMGRLLDELDLLQRRSQDVDLDMVDVKVQKLMPELGFMPEDADRLVASFSGGWKMRMSLGKILLQDPDLLLLDEPTNHVDLDTIEWLEMYLKTQDVPMVIISHDRAFLDQLCTKIVETEXGVSKTYKGNYSEYI

SEQ ID NO: 189848 - protein, 57 aa, Zea mays
  Clone ID: MRT4577_104724C.1.pep
AIRLVGCPVFNFATLYVYGCESDLFKEICCAFYCVEVMLRGPMMRGYSIVGVLANIE

SEQ ID NO: 189849 - protein, 298 aa, Zea mays
  unsure (1)..(298): unsure at all Xaa locations
  Clone ID: MRT4577_104725C.1.pep
MAAMDLLSGKLIRSLRLHSSLLPSAPSSSRAVPTSRRLRRRRHAPLYCRLTTTSSSSSASTTTTTGVEEDVKSQDLSSLLTSSDPSAAPAVGTKKKRSGGSSGASSIPSGVRLEGISKSYKGVTVLKDVSWEVQRGEKVGLVGVNGAGKTTQLRIIAGLEKPDGGAVIKAKENMKIAFLSQEFEVSASRTVREEFFSAFEEEMEVKRRLEPRCRPALEGATEDMDLMGRXLLDELDLLQRRXQDVDLDMVDVKVQKLMPELGFMPEDADRLVASFSGGWXMRMSLGKMLLQDPDLPLL

SEQ ID NO: 189850 - protein, 51 aa, Zea mays
  Clone ID: MRT4577_104726C.1.pep
EWRIGGIIHLHQSINLIICYMNKLLRACGRPDLWRSGAINLYARTLSIYDE

SEQ ID NO: 189851 - protein, 571 aa, Zea mays
  unsure (1)..(571): unsure at all Xaa locations
  Clone ID: MRT4577_104727C.1.pep
MAAMDLLSGKLLRSLRLHSSLLPSAPSSSRAVIKAKEITITAFXAEPLSPREGRSAREEFFSAFEEEMEVKRRLEQGQAALEGATEDMDLMGRLLDELDLLQRRSQDVDLDMVDVKVQKLMPELGFMPEDADRLVDSFSGGWQSRMSLGKILLQDPDLLLLDEXTNHVDLDTIEWLEMYLKTQDVPMVIISHDMRRSLIKLCTKIVETEFGVSKTYKGNYSEYILAKAVAVEAQYAAWEKQQKEIEQTKELINRLGAGVNAGRASSEQKKLEKLEKEGLIEKPFQRKQLKIRFPERGRSGRTVLTINNLQFGFENKTLFNNANLIVERGEKIAIIGPNGCGKSTLLKLMLGMEKPQGGEVLLGEHNVLPNYFEQNQAEALDLEKTVLDTVAEAAEDWILDDIKGLLGRCNFRDDMLDRKVQFLSGGEKARLAFCKFMVTPSTLLILDEPTNHLDIPSKEMLEEAISEYTGTVITVSHDRYFIKQIVNRVIEVKDQTIQDYQGDYNYYLERNLEARERELAREEELEERAPKVKAKSKMSKAEKAVRKKQKMQAFQQSKQKSKSLKNSKRWN

SEQ ID NO: 189852 - protein, 174 aa, Zea mays
  unsure (1)..(174): unsure at all Xaa locations
  Clone ID: MRT4577_104728C.1.pep
TDDDHEWQAYYDRTISXKATGVAMPEEHKDDGCPIIGXCDKECFPMNQARLSSXRNTYLLLTAAPCFRGHRRRNVDLKRQSXVQVRIMNHHLVLLILXVFVNNCENDLPXQTDSDNXGMRSPXRSISRIYLLKRNTLDEVRNNVDTSRRTFTTANRDNDIQVPNIQRIVTPLTL

SEQ ID NO: 189853 - protein, 77 aa, Zea mays
  Clone ID: MRT4577_104729C.1.pep
ARTNNTAGGLSRGVGDKSDIHNARATQIQGATGTPITSIHYVDVMNEHIHSTPTDIKICTPCLAKEAEHQTPEEDAL

SEQ ID NO: 189854 - protein, 295 aa, Zea mays
  unsure (1)..(295): unsure at all Xaa locations
  Clone ID: MRT4577_10472C.1.pep
PHGYTSPNFNGNIYLKVPIGFDPSARSVSARSSQGLACDPDGPEIVQGTPDTFRTSRGNDKWSYLFAFAGVLGVLDLILIATGWWFLSSKQSIPSSLEEAGYRMVRGQFRRFTYRELKDATGNFKEELGRGGSGVVYRGVLDKGKVVAVKKLTNVAGGDDEFWAEMTLIGRINHINLVRTWGFCSQGKHKLLVYEYMENESLDRHLFGTADRTXLPWRERYRIALGTARGLAYLHHECLEWVIHCDVKPENILLTREFDAKIADFGLAKLXRDDGAGDSDGMRLSRMXGTTGYNG

SEQ ID NO: 189855 - protein, 307 aa, Zea mays
  Clone ID: MRT4577_104730C.1.pep
MKPAEDADAPAPETAAAQTVWYDPMTSPQAPAPQQQPAIEAAMRGASPSVSSNARPLRVYADGIYDLFHFGHARALEQAKKSFPNTYLLVGCCSDEITHMYKGKTVMTEDERYESLRHCKWVDEVIPDAPWVINQEFIDKHDIDYVAHDALPYADTSGAANDVYEFVKAIGKFKETKRTEGISTSDIIMRILKDYNQYIMRNLTRGYSRKDLGVSYVKEKQLRVNMGISKLREKVKEHQEKFHSAAKIAGTNPVEWMENADRWIVGFLEKFEEGCHMMETAIKGRIQEGLKRQGRSESNLSGEESDS

SEQ ID NO: 189856 - protein, 87 aa, Zea mays
  Clone ID: MRT4577_104731C.1.pep
GPSILVFQGANMFCPVGPNTNFLFLYANGDKKSPLQIQACWKLVLWISKCQPQVQKLWNRNLCVKNLGKKGPKKLFKPEYVLKMVDP

SEQ ID NO: 189857 - protein, 42 aa, Zea mays
  Clone ID: MRT4577_104732C.1.pep
VILHLCRISNLYIKGLKIKIMVHIFYEHILKTKGNIPSMDSV

SEQ ID NO: 189858 - protein, 418 aa, Zea mays
  Clone ID: MRT4577_104733C.1.pep
MPNPGMPSSAHGCHVVPSQMPLRARLHDLRGSMVNLGRDYESEYTTLSTLSQENKRKKGKGKGKGKPLPPKGNKVCHKCGTEGHFTRDYTCPKHLVLLYQQSIKKEKFDKPGFEAHFNSAEASTEMHNDVNSTGEELCLMDSCTTNSILREIKYFQTLKKRWKSFEHAVIVGSGRATITLPMDTEIVIEDTLLYPDSTRTLLSFRDIRQNGFHIETHDENQEFLFLTKPNKYGKRICEKILSLMFGLYYTYIKTIAHVAYKIWHDRLGHPDIGMMRKTTSNSIGHNLPTTNFPKSKDFICTACATGKLILRPSYLKIKAEPLKFLERIQGDICGPITPTSRPFSSARYRPYTTTTNCISFYFPNIYETEQQVQKIIHLQRLANELPDAFTNYKGVTKSFIPARNAPERVKYQVKPLNS

SEQ ID NO: 189859 - protein, 1117 aa, Zea mays
  Clone ID: MRT4577_104734C.1.pep
MGTEIVIEDALLYPDSTLTLLSFRDIRQNGFHIETHDENQEEFLFLTKPNKYGKRICEKIPSLTSGLYYTYIKSNAHVAYKVIFQDVDAFQIWHDRLGHPGVGMMRKITGNSIGHNLPTKSFPKSKDFVCTACATGKLILRPSYLKIKAEPLKFLERIQGDICGPIIPTSGPFRYFMVLIDASTRWSHVCLLSTRNHAFAKIMSQIIKLKANFPEHRISSIRMDNAAEFKSQAFNDYCMALGIQVQHSVPYVHTQNGLAESLIKRIKLIARPLLMNYKLPSSCWGHAVLHAADLIQLRPTAYHSTSPIQMVRGNPPSISHLRKFGCCVYIPISPPQRTTMGPHRKVGIYVGFQSPSIIKYLEPLTGDLFTARFADSIFDEEHFPTLGGEFKYQKECQEINWNTQCVPGSDPRTSETELQVQKIIHLQRLANELPDAFTNYKGVTKSFIPARNAPERVEVPNKATQLLERRSMVNKRCSVAKKQRTIVNAKGHQYDTMYHVDCDDPQPSSDVHITKAGTSENPRHINLGNSDESLRNDEIAINYVETGETYDRKATNVDIYFSEKIAEDLQNDLDPKTMAECTKRSDWIKWKAAIEAELASLYKREVFSAVIPTPRDIFPVGYKWVFIRKRNENGEVVRYKARLVAQGFTQKPGVDFNETYSPVMSAITFRYLISLAVQNRLSMQLMDVVTAYLYGSLDSDIYMKVPDGIDIPNPKATRNMYCVKLQKSLYGLKQSGRMWYNRLSEFLLRKGYTKNDDCPCVFIKRSKVGFCIISVYVDDLNIIGNKLDIDEARHHLSTEFEMKDLGKTKFCLGLQLEHLPSGILVHQSTYTQKVLEKFNMHMSYPSKTPMVVRSLDLKKDPFRPRDDEEQILGPEFPYLSAIGALMYLANNTRPDIAFVVNLLARHSSAPTKRHWVGIKNIFRYLNGTKDLGLFYKRSNDPSLIGYTDAGYLSDPHNGRSQTGFVFLQGGTAISWKSSKQTLVTTSTNHSEIIALFEASRECVWLRRMVNHVLTTCGIGSLDLPTIIYEDNSACVVQMDTGYIKSNINKHISPKLFYPHELQEKGDINILQTKSCDNLADLFTKSLPYSTFQKCVEGIGMRRLKCLQGSGGVIPHDI

SEQ ID NO: 189860 - protein, 149 aa, Zea mays
  unsure (1)..(149): unsure at all Xaa locations
  Clone ID: MRT4577_104735C.1.pep
CGFFXSACHHEHRCSKCHNGXITSKQEQAQMAASSIDRISAMCRTYNXGKDLQLLATVCVAVPQVEENTIVEQPMHVNEINEAAAVIWKDNEGPNRCATCKKRVELXTGINCRCLNTNCTMHRYSEKHYCQFDYRTAATDAIAKDNPVL

SEQ ID NO: 189861 - protein, 50 aa, Zea mays
  Clone ID: MRT4577_104736C.1.pep
PIPPGFENRLNPVSDPRSPFSCQNPPAESSHRVLQYGLGSPYDVVKPLSG

SEQ ID NO: 189862 - protein, 71 aa, Zea mays
  Clone ID: MRT4577_104737C.1.pep
RNDLRTESPPHMAYRPPGWFVGEPKQKTYFCRGNTPKQHPLVGAHKNSNQNHQGGGNQNGRGETNQRATPP

SEQ ID NO: 189863 - protein, 57 aa, Zea mays
  Clone ID: MRT4577_104738C.1.pep
KNGVLKLVDRTVGDGTDRVGVREAVVGMRMWLPPLRGFIAPVALIRPSGREWWQPFT

SEQ ID NO: 189864 - protein, 74 aa, Zea mays
  Clone ID: MRT4577_104739C.1.pep
PIPAALGGAPGLGTYLPPGDSPLPEEVGLGEPLSSTTHLTPYKEKEKNTERASDRRVGSHGARCKLRPHRWGGG

SEQ ID NO: 189865 - protein, 47 aa, Zea mays
  Clone ID: MRT4577_10473C.1.pep
QEIYLLAPLSFDRGQFMLTWVAVINICRPCVMLSSFLLNGSFQDRVN

SEQ ID NO: 189866 - protein, 35 aa, Zea mays
  unsure (1)..(35): unsure at all Xaa locations
  Clone ID: MRT4577_104740C.1.pep
EKASGSGAYASCDVPAAILTLPASIRFFASVRXNG

SEQ ID NO: 189867 - protein, 80 aa, Zea mays
  unsure (1)..(80): unsure at all Xaa locations
  Clone ID: MRT4577_104741C.1.pep
PPKAIPGGPPAKVPHQSRGPGENKRPGLEFXAIPNRTRVVFQGPFYPMKPPGPLSAPLVDKPSFVGVSKKKTGGPLIQVL

SEQ ID NO: 189868 - protein, 90 aa, Zea mays
  Clone ID: MRT4577_104742C.1.pep
QTKGARTFFLVFENPGKSTFRGPIFLVVRQWGKNWLGPFFFLPCGGATFLPGLLMSNFNTLQIFFFFQFLAPKGLFALGKPLAGRNNPSM

SEQ ID NO: 189869 - protein, 72 aa, Zea mays
  unsure (1)..(72): unsure at all Xaa locations
  Clone ID: MRT4577_104743C.1.pep
XXGAXAAQALHHQPXTCSRPNXLKXDXGXQLQGDXPAAAVQGVXRRXTSXPKXVKXXXAXRIXXQTSEDTXS

SEQ ID NO: 189870 - protein, 194 aa, Zea mays
  unsure (1)..(194): unsure at all Xaa locations
  Clone ID: MRT4577_104744C.1.pep
RLPLLFVLSRLQDQASSYPVSKENMHIKIXIFVQDDSEKXTTTGPTALYKLAGIDQCVIPQXVENEXAEXNKNTFKDDVAMLDKLKADGDHSITIDIXMCQLDTTNDYCSXIDVPGHHDFISNMITGTSQHDXHDLSLDXHSLSAVEDDITNDXTIRENVLLSYAAVEKHKICXCNDMNAETLKYSIAGDDNID

SEQ ID NO: 189871 - protein, 44 aa, Zea mays
  Clone ID: MRT4577_104745C.1.pep
VCRTCKGAELPYHHDLLSSVLVDHLVVLLYLPSPLSVSLNSYRV

SEQ ID NO: 189872 - protein, 81 aa, Zea mays
  unsure (1)..(81): unsure at all Xaa locations
  Clone ID: MRT4577_104746C.1.pep
AGPPHYCPLVRDMXELRADKVIAVTPLSGAVGGSFLHVEERSGGTILVLWPAVSQLPVVFPVIHYKIRDYGCYRSSLRPWL

SEQ ID NO: 189873 - protein, 141 aa, Zea mays
  Clone ID: MRT4577_104747C.1.pep
MAVSCNHSAILFSPSSTAGSSSVTSSSSLIGFPRFQTLRFKSRSVYSKSRVSSPVSALPLRSLEALIFDCDGVILESENLHRQAYNDAFSHFDVRCPPSSSESLDWSLEFYDKFQNLVGGGKPKMRWYFKENGWPTSTIFD

SEQ ID NO: 189874 - protein, 102 aa, Zea mays
  unsure (1)..(102): unsure at all Xaa locations
  Clone ID: MRT4577_104748C.1.pep
QFPPGFIPTACIFKTIPVAPYIVNXSGPVFRQYTAPWQVILKQADGFYACVAESXDRFIFGQAKQFLLGVIGLQEKKGSSLQFFKRGSNNFPWWEKNVDQWT

SEQ ID NO: 189875 - protein, 66 aa, Zea mays
  Clone ID: MRT4577_104749C.1.pep
SPTGGPSRSRRTPTSSTESSSTSCGALGPPPPKPNSFIARSAGSFFFGYPLSSCPARSRRFCLFVV

SEQ ID NO: 189876 - protein, 75 aa, Zea mays
  Clone ID: MRT4577_10474C.1.pep
THFFSHYTRTVVMMQCAHRTLPIRAKEIASPLRRRSGSTGGMWYRTTERTYTGRNGQLARIFPLEALDTNTFTFW

SEQ ID NO: 189877 - protein, 82 aa, Zea mays
  Clone ID: MRT4577_104750C.1.pep
EICRLMCGSAVAAVRHRHQEPDLGGGSSGSRRSTGWGLEVSGQVVSGNPAYCSPICFQASRCSCVPWLGLIAVFNRGEATRI

SEQ ID NO: 189878 - protein, 68 aa, Zea mays
  Clone ID: MRT4577_104751C.1.pep
DATPPVHSIFYVCKFVSNLVHPIEWLYIIDTLLNTALESGDSSLPNKPVLVLIDHGLFWSKRSLPLLL

SEQ ID NO: 189879 - protein, 58 aa, Zea mays
  Clone ID: MRT4577_104752C.1.pep
GGLHCLVATKLPTLLLFFNATGGSPWPSPRNVCPFKSVALLGGSHQASVIRPRKLIFL

SEQ ID NO: 189880 - protein, 58 aa, Zea mays
  unsure (1)..(58): unsure at all Xaa locations
  Clone ID: MRT4577_104753C.1.pep
PKGNLNHRAAAKQXRLHSXRVRLXATXSSHPNELIALXSRYVHHGNXMRQRHQLLSEY

SEQ ID NO: 189881 - protein, 81 aa, Zea mays
  Clone ID: MRT4577_104754C.1.pep
GAGRCPGQSFDRCPHRRGVLEADLQLLPGLVSYYLGDSYRVFVHAHLSSLTGRADWWSRKQPRAPIRPPLRCRDWCGKKDA

SEQ ID NO: 189882 - protein, 244 aa, Zea mays
  unsure (1)..(244): unsure at all Xaa locations
  Clone ID: MRT4577_104755C.1.pep
MAKDIEAAPPGGGYAAKDYSDPPPAPLFDAEELTKWSLYRAVIAEFVATLLFLYITVATVIGYKHQADPAGPNAADAACSGVGILGIAWAFGGMIFVLVYCTAGVSGGHINPAVTFGLFLARKVSLVRALLYIIAQCLGAICGVGLVKGFQSAFYVRYGGGANELSSGFSKGTGLAAEIIGTFVLVYTVFSATDPKRSARDSHVPVLAPLPXGFAVFMVHLGTIPITGTGINHARRLGCFLPWA

SEQ ID NO: 189883 - protein, 94 aa, Zea mays; identical to SEQ ID NO: 189027
  Clone ID: MRT4577_104756C.1.pep

SEQ ID NO: 189884 - protein, 103 aa, Zea mays
  Clone ID: MRT4577_104757C.1.pep
KKKKKKKKKKKKKKKKKKKKKKKKKKKRGEKKKKKKRGGPFLGVPFFLPPCFLPWCVFFLALPLGGVPWPFPFPTPVPGKTPGVPPLIRLGERPPPPWFIFEG

SEQ ID NO: 189885 - protein, 57 aa, Zea mays
  Clone ID: MRT4577_104758C.1.pep
GKGSNFPVDLNLNTGTHGRLVLAPLSSSSKRAPVRPQRRRETVKNLPRRAMRFGGQV

SEQ ID NO: 189886 - protein, 59 aa, Zea mays
  Clone ID: MRT4577_104759C.1.pep
LRSIPFIQSSPVCTQREPPIFYPCRKTLILHIPGRPFFITGNPFPFKYGGICRDHSFTT

SEQ ID NO: 189887 - protein, 95 aa, Zea mays
  Clone ID: MRT4577_10475C.1.pep
LSPPHTHPLHVPHKHTLAQGSFDRSSIVRPPVLSLFVRSSDRSIVRPIVHGSFVRSFDRSIVRPFVRPNNLFPTVMLPKFRSFVRSIIRSFIVRS

SEQ ID NO: 189888 - protein, 85 aa, Zea mays
  Clone ID: MRT4577_104760C.1.pep
NSIVRILCVASFHLRYPHLDMYRVHLDMYSDKNTYNTGSAFTWTCIAIKNTSNTGSAGLQPILDTERICLTRNLATQQQSDIAND

SEQ ID NO: 189889 - protein, 115 aa, Zea mays
  Clone ID: MRT4577_104761C.1.pep
MKGLSLLVLALVASAACLVAVRGAGECGATPPDRMALKLAPCASAAQNPSSAPSNGCCTAVHTIGKQSPQCLCAVMLSKTAKKSGIKPEVAITIPKRCNLVDRPVGYKCGDYTLP

SEQ ID NO: 189890 - protein, 63 aa, Zea mays
  Clone ID: MRT4577_104762C.1.pep
MASQLYAAVPRFHGLRCYAAPRSAVAALPSVKVGKKRSSSQGIRCDYIGSATNLIMVTTTTLM

SEQ ID NO: 189891 - protein, 115 aa, Zea mays; identical to SEQ ID NO: 189889
  Clone ID: MRT4577_104763C.1.pep

SEQ ID NO: 189892 - protein, 103 aa, Zea mays
  unsure (1)..(103): unsure at all Xaa locations
  Clone ID: MRT4577_104764C.1.pep
RERKDGSGRAAQQPAQEEEAESQAAENQADAGHGDGGGNTPTPTPATPAGXXRSPPPRGPNPTPPPRQHTPPKEHGPKPDKPAKAHKPTPATDTXRPKPRART

SEQ ID NO: 189893 - protein, 115 aa, Zea mays
  Clone ID: MRT4577_104765C.1.pep
MKGLLLLVLALVASAACLVAVRGAGECGATPPDRMALKLAPCASAAQNPSSAPSNGCCTAVHTIGKQSPQCLCAVMLSKTAKKSGIKPEVAITIPKRCNLVDRPVGYKCGDYTLP

SEQ ID NO: 189894 - protein, 84 aa, Zea mays
  Clone ID: MRT4577_104766C.1.pep
YSHGLRLSQGRRQLVKKKKKKKKKKKKKKKKKKKKKKKKKKKKKKKKKKKKKKKRKEGKKKKKKKKKKKKGGAFKKDQILKTLA

SEQ ID NO: 189895 - protein, 87 aa, Zea mays
  Clone ID: MRT4577_104767C.1.pep
MESKCTTTFVSSRASSQCLRSIDPTDGSSLIDDFVLSYDNVPCAEVEEVAEEALEQQQFGAGGSSVSRVPFSKDLFVDRPPGIAVQP

SEQ ID NO: 189896 - protein, 116 aa, Zea mays
  Clone ID: MRT4577_104768C.1.pep
MSTPGDSGSGAGPTSGGGRRDSRAPTPSSTPRDPTPTPSDGIAPTPTDGQGTGTTNTDAVEIDEDVRVGSKRKLKSDVWQDFERVCVGGTWKAKCNWCHKTLSAVCRNGTSHLRSH

SEQ ID NO: 189897 - protein, 284 aa, Zea mays
  unsure (1)..(284): unsure at all Xaa locations
  Clone ID: MRT4577_104769C.1.pep
GVLRSDVMDYHCEANLNFRGLDKNVKEVQKCVQVLQDKQEIAETQNELAKLQIVYEDAAQKSEGTAPSVFMAKENDGSFPGAKHELALVPLHQVNAAQSPAMQFQSCNGLILQQLVPVSFSNQQDQPRSNQPTVYCMQNQGQPERRQAQTFQPTPHSMQPQAQNPQPQTVVEAPEFYLQAQHHWQHQTVQDVHSQARQPQQQPQPQPQVAQQQQYHNMQQVPAQVVQLQTSSPQAQSAPHVALFYPPLRSQQPACGNTEALSRGMXVQPAYSTSLLPAKHEAAQ

SEQ ID NO: 189898 - protein, 108 aa, Zea mays
  Clone ID: MRT4577_10476C.1.pep
WQLSPPPHTHPLHVPHKHTLAQGSFDRSSIVRPLFLVCSFVRPIVRLFVRSFMVRSFVRTIIRSFVRSFVQIIFFLPLCCRNSDRSFIRSFDRSSFVHSSYSSFIVRS

SEQ ID NO: 189899 - protein, 180 aa, Zea mays
  Clone ID: MRT4577_104770C.1.pep
MRLRSRAIFPLVRTTATTTSAASSSPAVLSIGHALRERRLFTGDDVAAYAAVSGDRNPVHLDDAVARELSGFQRGRVVHGMLVASLFPSIIAASFPGAVYASQTLKFAAPVYVGDEVVARVQALNIRMMAAATNSCTARRYVVKFATKCFMDEEEGSVAIEGEAMAVLPTLELSSQSTSN

SEQ ID NO: 189900 - protein, 112 aa, Zea mays
  Clone ID: MRT4577_104771C.1.pep
MRLRSRAIFPLVRTTATTTSAASSSPAVLSIGHALRERRLFTVYVGDEVVARVQALNIRTTAAATNSCTARRYVVKFATKCFMDEEEGSVAIEGEAMAVLPTLELSSQSTRN

SEQ ID NO: 189901 - protein, 80 aa, Zea mays
  Clone ID: MRT4577_104772C.1.pep
ATSLALSLSHDHLPLTLLSNSSLVLHSSIYSQEGCHHILYSEQKLAFQWLATTPPPLTTDILYCKLELYIPLKVEVNNPI

SEQ ID NO: 189902 - protein, 208 aa, Zea mays
  unsure (1)..(208): unsure at all Xaa locations
  Clone ID: MRT4577_104773C.1.pep
MRLRSRAIFPLVRTTTSAASSSPAVLSIGHALRERRLFTGDDVAAYAAVSGDRNPVHLDDAVARELSGFQRGRVVHGMLVASLFPSIIAASFXFSFRHFVQQRVSVEPHSVAWPDRXWVLLVQPGAVYASQTLKFAAPVYVGDEVVARVQALNIRMMAAATNSCTARRYVVKFATKCFMDEEEGSVAIEGEAMAVLPTLELSSQSTRN

SEQ ID NO: 189903 - protein, 119 aa, Zea mays
  Clone ID: MRT4577_104774C.1.pep
SLAARARWATRPPASAGVCPDFTWSAGTAPRARVGPARQTTSTLASTAIRLGLSSMSRGHLAARTGPAMRAASAPTCTISGEWRARPPATAGAMATRNQVRIAEGYNRRHVEEEDQKES

SEQ ID NO: 189904 - protein, 64 aa, Zea mays
  Clone ID: MRT4577_104775C.1.pep
ASGREIQGLEQREQLHDRELPEEVQRKEELLLGGKPDTTGICIVTLEPGTRGISLPGPREEKTP

SEQ ID NO: 189905 - protein, 80 aa, Zea mays
  Clone ID: MRT4577_104776C.1.pep
TKFHIFIYSSILTEICLEPKIRCHIGNHLDFYKTSTVFIHMSHSVSILERENMSYSSLIDSNMFQCMLHYISQFTISPYS

SEQ ID NO: 189906 - protein, 118 aa, Zea mays
  unsure (1)..(118): unsure at all Xaa locations
  Clone ID: MRT4577_104777C.1.pep
DAYASASQALEEQAHLQAMYPVMEDDSNXGPILDNVAVKKLFTPHKPKDNGVLNGDSEEXGPWMFPNTSSGXLCPTNLDEQTYVLPGWMNESNRAXRYINSDXSXVPKGKRAIELLSG

SEQ ID NO: 189907 - protein, 74 aa, Zea mays
  Clone ID: MRT4577_104778C.1.pep
SYQGNPAGLAPLCSKARKSRGFHGIKEGIRSPPLFFQKEHKVQCGGYFRTRPQGPPQIDVSQWEKELYSGHGGE

SEQ ID NO: 189908 - protein, 72 aa, Zea mays
  Clone ID: MRT4577_104779C.1.pep
FNSSSNTFSCHNNPLAHSEFLIQILKNALYLKKTIIKAGHRPLAILTPFCLLSKLGEWVISIDLLLVRVDEG

SEQ ID NO: 189909 - protein, 131 aa, Zea mays
  Clone ID: MRT4577_10477C.1.pep
TPSHFMATLFPPPHTPTPCSTQAHTSTRIVRSFFDRSIVLRSFVPCSWFVRSSVRPFVRSFVRSFVQIIFFLLLCCRNSDRSFIVPIHRSSFVHSPYSSFFQIIFVLPLCCRNSDRSFVRSFDRSSVRSSK

SEQ ID NO: 189910 - protein, 64 aa, Zea mays
  Clone ID: MRT4577_104780C.1.pep
TGEVHDVILFFGIIDILQDYSVKKRLEHSYKSLQTDPNSISAVEPKLYSRRFQEFIGRIFVEDG

SEQ ID NO: 189911 - protein, 328 aa, Zea mays
  Clone ID: MRT4577_104781C.1.pep
MVHPIAEADERSPFGRLTPDEFYARHGVTHSASSFVNPRGLRIFTQRWVPSGDAPVLGAVAVVHGFTGESSWTIQLTAVHLAAAGFAVAALDHQGHGFSEGLQGHLPDINPVLDDCDAAFAPFRADYPPPLPCFLYGESLGGAIALLLHLRNRDLWRDGAVLNGAMCGVSPRFKPPWPLEHLLAAAAAVVPTWRVAFTRGNIPERSFKVDWKRALALASPRRTTAPPRAATALELLRVCRELQRRFEEVQLPLLVVHGAEDTVCDPACVEELCRRAGSKDKTLRIYPGMWHQIVGEPEENVEKVFDDIIDWLKARATATAAGAHHGEQ

SEQ ID NO: 189912 - protein, 106 aa, Zea mays
  Clone ID: MRT4577_104782C.1.pep
GCIFVMAAHQIRIHEARVTDFYLRVRSRPIIEDCSGVRFAPYVLNYEGIGEDLKDSGLEEETGNWANVDDFKWLKAVQSPNWRLVPEEERLQTVNISELHKQEDDS

SEQ ID NO: 189913 - protein, 82 aa, Zea mays
  unsure (1)..(82): unsure at all Xaa locations
  Clone ID: MRT4577_104783C.1.pep
GYKASQTGRDLMLMARPFWDIKFTPPPPKNGGWLMENGEPCVDSPAQILAYPPPPGXRLGCPPSVVPLFPAWVLIDLAGVFP

SEQ ID NO: 189914 - protein, 62 aa, Zea mays
  Clone ID: MRT4577_104784C.1.pep
KTTFLTSYAFLGQVQTEQFLFLVLEKVTLVPEAKFFTCLEFFSNGSLVFGSFGIKFIQKIFF

SEQ ID NO: 189915 - protein, 78 aa, Zea mays
  Clone ID: MRT4577_104785C.1.pep
GRILYVPNFSMQGMKFYAYHSNGSFCTILVRYWSWYQDDLTVYNLQQCIYFSRLLILMLLHFSCFRYHWCGSTFLLAI

SEQ ID NO: 189916 - protein, 79 aa, Zea mays
  Clone ID: MRT4577_104786C.1.pep
IWGAIHILNLPILILTGGPLYPGGTKTPIGCPNCSQNRVYPPFFFQLAMTRCDRIKVQEKGWEKKKTGHEPHCHWRSEN

SEQ ID NO: 189917 - protein, 168 aa, Zea mays
  Clone ID: MRT4577_104787C.1.pep
AVLPPSSELIPLAPAVRPRAAGQSPSTRNSALCALRLSLRVVGFLVSSGQTGHCAESRSVSSAHSMGVTALTRHPCVSSFWCRFVCCAVLLPGSPFPTGAPCAHVYGKRAINPRCRGPELELLGSLFFFFFHGRASPAVTYIFIEYIIIATLTYYSVTSLSTEVVVLY

SEQ ID NO: 189918 - protein, 75 aa, Zea mays
  unsure (1)..(75): unsure at all Xaa locations
  Clone ID: MRT4577_104788C.1.pep
MVAAPTDATVAAASMDLLXDDDEFAKFEINDKCDDHAEGIEALQQWDDEXDNHHLHDDFSLHHIEKLDRGNGQHN

SEQ ID NO: 189919 - protein, 323 aa, Zea mays
  unsure (1)..(323): unsure at all Xaa locations
  Clone ID: MRT4577_104789C.1.pep
MDAGEVRHWNADVNGVSIHVAERGPEDGPAVLLIHGFPELWLSWRHQMAALAARGFRALAPDLRGYGDSSVPSDPAAYTIFHIVGDIVALLEHLQLTKVFVVGHDWGAQVAWHLCLFRPDRVRAAAVLGIPYYARXKLTPSXVFAAFGDGFYINQFQEPGRAEAAFAHYDVATVLKKFYSIEIDELTAPPGVEIIDFLEASPSPLPWISEEELGQYAEKFRKSGFTGPLNYYRMWETNWRLLAPWNEAKITVPVKFIAGDKDIGVQSFGVEKYIKSGEFKSTVPDLEVAVIEGHHFLQQEQAERVNSEIISYLVRFTSQEASS

SEQ ID NO: 189920 - protein, 109 aa, Zea mays
  unsure (1)..(109): unsure at all Xaa locations
  Clone ID: MRT4577_10478C.1.pep
MGRGRGHLLLPAAAACLWTLESALMLRASPHRAGAGAGGLLRIGLSKRRXGLDQRALAAAKAXRQQEASRLGAYGGGDVLIXDYLNTQYYGVVGIXTPAEYFTVFFNTG

SEQ ID NO: 189921 - protein, 97 aa, Zea mays
  Clone ID: MRT4577_104790C.1.pep
SVDTSNLDDVSVHVFYTIYIISNRSLTISVIIDTMFKEITSNLCKVSIVKVKQNEEGEIWSQSWSNAYANVNVCTRFYEYHSKQWQVGIGSIIMRQI

SEQ ID NO: 189922 - protein, 97 aa, Zea mays
  Clone ID: MRT4577_104791C.1.pep
GGAKRTSSRCWGGPNGLCWGSGGFGLRKQAWATGWDFIGGLRLHSLSVAKTWYHLLLGVSFSLTMAPPPPGLLLQLLSGVIKRLKPINPSRHFGETP

SEQ ID NO: 189923 - protein, 107 aa, Zea mays
  Clone ID: MRT4577_104792C.1.pep
PPSHIAVRFGELLPKIARRFGKELEKEPKFLKTGDAGLVKMIPPLPLVVETFSGFPPPGRFAVRHLRQPVAVGVIKSVGNKAPSGAKVSKAAAKKKCCVPAPCFTNT

SEQ ID NO: 189924 - protein, 101 aa, Zea mays
  Clone ID: MRT4577_104793C.1.pep
HASGRSVFSSVVALGAGLDPGTNPASNLYHGLHQGGGSRGCSPGSCARAGALRGQLPGRPALEAEGQPQGPAQLGPHAGQHAHLALHLVRPELPPEQPRYW

SEQ ID NO: 189925 - protein, 154 aa, Zea mays
  Clone ID: MRT4577_104794C.1.pep
MEARRSSAALVSVAAAAAAVALLLVLAAEPSRAERFVVGDAARWTWGYNYTDWVIRKGPFFQNDTLVFMYDPPNATVHAHSVYLMRTAADYQSCNLKAAKLVASVTQGAGSGFEFVLRKRKQHYFVCGERGGIHCTMGQMKFVVKPKSSACRDD

SEQ ID NO: 189926 - protein, 45 aa, Zea mays
  Clone ID: MRT4577_104795C.1.pep
PGINTMLVLVRRRPIDDHLQVCPSASSCGVARAWGRLGSSSASRD

SEQ ID NO: 189927 - protein, 63 aa, Zea mays
  unsure (1)..(63): unsure at all Xaa locations
  Clone ID: MRT4577_104796C.1.pep
MDWIYIESNGLSRIGRLLARAALQSDDVQLVTVNDPFISTDYMTYMFKHDTXVHGQWKHHDAK

SEQ ID NO: 189928 - protein, 86 aa, Zea mays
  Clone ID: MRT4577_104797C.1.pep
GRGTTSLVGGTCCTFTIRIHGRFLSSSFRVGLQFRASFQPPAGLEAKALPFFFISWGASLDHPLTMPLFFKINPFFFFYGLLIYLG

SEQ ID NO: 189929 - protein, 368 aa, Zea mays
  Clone ID: MRT4577_104798C.1.pep
MSSLLCISRRNNKKDSDGDGEYGGEQIIISTGGAAMRKGPWTDEEDEQLVRFVRLFGERRWDFLAKVSGLRGGGCVDRSASMQLRMHEEGRSASIEQLAVFLTVCFFFFLLIFVAYLRAALVDTDGDVRAGLRRTGKSCRLRWVNYLHPGLRRGRITADEERRIVELHAQWGSRWSRIARSLPGRTDNEIKNFWRTRTRKKALEERRAAAAATSTAAESASSVMTVSSSSECRRPPVSSSSSSSSLRRDEARRSGDETEEASTPTAAPATKHDEEPQPQPQECYDFPMDQLWNEIAAADAAAMSYLVVDACWGGAAVGGHCYYYGAAAASAASPPPPASPPWEYCGSDFSLWRIDDQEYYKKMLDSSS

SEQ ID NO: 189930 - protein, 63 aa, Zea mays
  Clone ID: MRT4577_104799C.1.pep
GTATLSSSFFFFFFFFFFFFFFFFLSLAMFPHYLIAVRPVHSEDSPLVEGPLLLRTCGLTYGQ

SEQ ID NO: 189931 - protein, 57 aa, Zea mays
  unsure (1)..(57): unsure at all Xaa locations
  Clone ID: MRT4577_10479C.1.pep
CDVESMAXASSRXLGLELFQLCYLRGHSEVYMTECDYDYYMSTIYDVAAIVICTLCV

SEQ ID NO: 189932 - protein, 57 aa, Zea mays
  unsure (1)..(57): unsure at all Xaa locations
  Clone ID: MRT4577_1047C.1.pep
FFGCCVLVXWEGSXSWPRQPALVLCVTQVPLCVPDPLVFVLCGPWQVVPVGAHRKVI

SEQ ID NO: 189933 - protein, 152 aa, Zea mays
  unsure (1)..(152): unsure at all Xaa locations
  Clone ID: MRT4577_104800C.1.pep
STKRCDSILSMPPAGAVEHIRTALIKRGYSRNRNSLYAXTLLATAAELMTEELLRLLEHDIAKHPNGXKTPKEKKNCSKRHLNGRPHCHDNDDFDENKLKEASFMVXEEIQYLVMGMAHENEYFEDFVIAHDTCQDYLMTFSTTNSYSIYYV

SEQ ID NO: 189934 - protein, 39 aa, Zea mays
  Clone ID: MRT4577_104801C.1.pep
VLAFLQSMYPILERLHDAYMQIPAFQAALPKNQPDAPSS

SEQ ID NO: 189935 - protein, 154 aa, Zea mays
  unsure (1)..(154): unsure at all Xaa locations
  Clone ID: MRT4577_104802C.1.pep
GVRCGPLGFFAPCRGGAVLPVAXVGLRXGFPGXAFVXXRPVPXXGLVXSGSSFGSAPGCAGSSLVPVGLXSRFCCSPXXRXRAXGXSFPPASSXXAPWPXWALFSPVVRSLFXXGSAXCFPGAGCSWLPSRAXSPVVXLFFGCAAXEFLPSRCA

SEQ ID NO: 189936 - protein, 212 aa, Zea mays
  Clone ID: MRT4577_104803C.1.pep
MATEKPILYNAWISSCSHRVRIALNLKGVDYEYKSVNPRTDPDYEKINPIKYIPALVDGDIVVSDSLAISLYLEDKYPEHPLLPKDLKRKALNLQIANIVCSSIQPLQGYAVIGLHEGRMSPDEGLHIVQSYIDKGFRAIEKLLEGCESKYATGDDVQLADVFLEPQIHAGINRFQIDMSMYPILERLHDAYMQIPAFQAALPKNQPDAPSS

SEQ ID NO: 189937 - protein, 134 aa, Zea mays
  Clone ID: MRT4577_104804C.1.pep
MSGGRRRGLVWSLPVARSDALGKLGPAFGIGAGCGVGLGFGLIGGAGIGAGFPGLQLGFGAGAGCGIGIGFGYGFGKGVAYDESGRYSNIRRPFQSSRSIAFDEKFDIMFDELMESTRKLVKATSKEIDKWRRM

SEQ ID NO: 189938 - protein, 33 aa, Zea mays
  unsure (1)..(33): unsure at all Xaa locations
  Clone ID: MRT4577_104805C.1.pep
MEKGGGGGNXMMMTSGATGRIVPVFRSVLSRRA

SEQ ID NO: 189939 - protein, 30 aa, Zea mays
  Clone ID: MRT4577_104806C.1.pep
QSKNKLGAPTCIGSLNPPEIEVHQCGEACF

SEQ ID NO: 189940 - protein, 230 aa, Zea mays
  Clone ID: MRT4577_104807C.1.pep
SFAHASAHASADAWSDLCSHRSIFLIFFSRTAILLPGPSSSSASGAALPAASPSLVLLQSRPPTPQPISLRAILPPVLPARVVNSLPWTRAELLARVSGAQPTSSSPFSLMARPSTAPAPCRVPAQTTLLLRPVPARWSSCARRIPARGASSCSAHRSRPALPAIFLFPTTGSTARPPSSAMATAPWSPAQRGASFLPLPWRLPWIPPLLGRLPGVQVRTPLQPSPFSLL

SEQ ID NO: 189941 - protein, 156 aa, Zea mays
  unsure (1)..(156): unsure at all Xaa locations
  Clone ID: MRT4577_104808C.1.pep
TLKKQHQPPRQNEQAAKGQSKQQTPRARKKHSRPKKKTAADTRTTGQTAKPATNRRTEPLKKGRNRLTQGERHQPHRPGRGIPRGGRANDGEGGPRQDQEGPCGNPHLPGEPNPTGKKPNPPRRREKTAQQRKRRAXETGTKRPGTRAKQRRSPAS

SEQ ID NO: 189942 - protein, 49 aa, Zea mays
  Clone ID: MRT4577_104809C.1.pep
AKILHHKLSAFPESSLPSQIDPKSTRTTTTLIQAFHRTSGTRPASRYPM

SEQ ID NO: 189943 - protein, 81 aa, Zea mays
  Clone ID: MRT4577_10480C.1.pep
GSSRVHDDGRPHRVQGGHWLMLSSLLHVVHLPMYVHIVQRYCMNRAHAVHSTRVQLAQNLERTNCHEPVNIEHDAHTDHLI

SEQ ID NO: 189944 - protein, 61 aa, Zea mays
  Clone ID: MRT4577_104810C.1.pep
TQWFRANFHHICTSYISLMRTLKASAPYRLIHSSFAIGIKNLLELTAYYRCMHDFLYVCHS

SEQ ID NO: 189945 - protein, 55 aa, Zea mays
  unsure (1)..(55): unsure at all Xaa locations
  Clone ID: MRT4577_104811C.1.pep
SYCRNILFITKILHTISVLAEFEVFFGXGGRNPXIVPVDAXQEHSESCFQDLERP

SEQ ID NO: 189946 - protein, 80 aa, Zea mays
  unsure (1)..(80): unsure at all Xaa locations
  Clone ID: MRT4577_104812C.1.pep
MAWTPATTLAVFLYRRVLSAAGTAVDNDLSDCDIHRRVYXNTCLAGCETNATGYSLRAKVRLECRHWGSCKLERSIDGVT

SEQ ID NO: 189947 - protein, 102 aa, Zea mays
  unsure (1)..(102): unsure at all Xaa locations
  Clone ID: MRT4577_104813C.1.pep
QRVEIKEPSSFLNRGGDRCISTKELGTVIRSLLHNLTGDALQDMSNVVDAVCNGTRDCLEVFNLRPRRIXDTDFDEELKEELLLFSKDHVRSIFGAELFHLM

SEQ ID NO: 189948 - protein, 116 aa, Zea mays
  unsure (1)..(116): unsure at all Xaa locations
  Clone ID: MRT4577_104814C.1.pep
KLSISFGFQENIAKKALKAFGGNIEKTPAWVFNPPEEFSSAFGDFSPNNVNADAPYIPKGNGKNKLMGFFNQKGPFTPWGPXVGHVLKNGRGAIFYDNKVPVFFFLPKKKGYLFFF

SEQ ID NO: 189949 - protein, 80 aa, Zea mays
  Clone ID: MRT4577_104815C.1.pep
DAGPGQSRTPGLGLRPDRRRHSYTRSVSPCALRRLGYRRRRPRRSSTRVCAVARCIRPSGVNLYGFWHLLILNGGPYRHR

SEQ ID NO: 189950 - protein, 154 aa, Zea mays
  Clone ID: MRT4577_104816C.1.pep
IGLSGLATDAHTLYQRLVFRHKLYQLREERDMKPEAFASLVSALLYEKRFGPYFCQPVIAGLGDNDEPFICTMDCIGAKELAKDFVVSGTASESLYGACESMYKPNMEPEELFETISQALQASVDRDCLSGWGGYVLVVTPTEVQERVLKGRMD

SEQ ID NO: 189951 - protein, 237 aa, Zea mays
  Clone ID: MRT4577_104817C.1.pep
MFVFLRRRKSTCAAAFSVLAVASASAAAAQVRVMSIFEYNGSAVVAMVGKNCFAIASDRRLGVQLQTIATDFRRVFKVHDKLYIGLSGLATDAQTLYQRLVFRHKLYQLREERDMKPETFASLVSALLYEKRFGPYFCQPVIAGLGDNDEPFICTMDCIGAKELAKDFVVSGTASESLYGACESMYKPNMEPEELFETISQALQASVDRDCLSGWGGYVLVVTPTEVQERVLKGRMD

SEQ ID NO: 189952 - protein, 77 aa, Zea mays
  unsure (1)..(77): unsure at all Xaa locations
  Clone ID: MRT4577_104818C.1.pep
KDRRSVRWPSLCGVKVSSSGGGVPSVMNLAFRAYLFVAAPYPRXAASHPVRRIEEPAYLVAGTPSPSVPSPSASPVP

SEQ ID NO: 189953 - protein, 66 aa, Zea mays
  Clone ID: MRT4577_104819C.1.pep
RCVSKWASSCPMLDNKSAVRLSPFMAVTIQDTFQSMSRSLILFRSPPQKVTGLRQAGTRTSPLQVR

SEQ ID NO: 189954 - protein, 90 aa, Zea mays
  Clone ID: MRT4577_10481C.1.pep
LHVISSNQALYPSAFRGCRGSLCTQCGFDRGVSQCPEGCWGNSCGDLGTVGSVARHDHVQFSNHSAPSSFCDACLGDSRCTRHELDGGPP

SEQ ID NO: 189955 - protein, 71 aa, Zea mays
  Clone ID: MRT4577_104820C.1.pep
LSWLGGLSSTPHVLCLTSHRSEFQVGFRKIPYPVPWQSTCLRFDRVVLTWATVPLCMVSTGVISICLRRPS

SEQ ID NO: 189956 - protein, 77 aa, Zea mays
  unsure (1)..(77): unsure at all Xaa locations
  Clone ID: MRT4577_104821C.1.pep
GRPDPSSTSPTDTYPSPYTPSYQYIPLLNKLTPCDPSSTLLASWLLLLRPAQLNIMPGISTAPASNRPTKAHSXRAR

SEQ ID NO: 189957 - protein, 77 aa, Zea mays
  Clone ID: MRT4577_104822C.1.pep
PGQGRIPARWRPGLGAPRGGRACRHPGPPCLLAGPVIHSQRPPTEEPAALSGGPLAARVPANKPGWPTAQFPGATRG

SEQ ID NO: 189958 - protein, 66 aa, Zea mays
  Clone ID: MRT4577_104823C.1.pep
RCYISPVFWLNNPLYHCIYLDLHSNFLFSFLCSIFSSVVVCVLGSGTHLQELILSANKSCYFLMSK

SEQ ID NO: 189959 - protein, 85 aa, Zea mays
  Clone ID: MRT4577_104824C.1.pep
CGGTGIVVTGEIMASFAVKPPFLPGAGRRSDGKKRTVSEEREKDYFSPRLDFIFGTIGFIPLKDPNFRYIPWAPHVIDSCGPTCK

SEQ ID NO: 189960 - protein, 80 aa, Zea mays
  Clone ID: MRT4577_104825C.1.pep
LNITSRGPTRFILTFLCTAGDMSTMVSGILISMSILFKNSEQVNEWALPRLDDLQDIHLARAAVLGIQHGAIGHRNSGRR

SEQ ID NO: 189961 - protein, 68 aa, Zea mays
  Clone ID: MRT4577_104826C.1.pep
RNNSGCEWELIVRPKMRGWVRVSFYPKRLKERVELQKVNGAAKPGGWFSALFGTKFGGKNGEQNNTPK

SEQ ID NO: 189962 - protein, 113 aa, Zea mays
  Clone ID: MRT4577_104827C.1.pep
GKKDCMHVNMTNKEDYMVRLQVTCFIDLTITLSHDTLFIARNQLYATRRWTQRQRCPASSFLERKGYVKGKIQHVLLQLLGPNFVLLTYYSPKEPRDFYTTDDQQIIKNHKNC

SEQ ID NO: 189963 - protein, 75 aa, Zea mays
  unsure (1)..(75): unsure at all Xaa locations
  Clone ID: MRT4577_104828C.1.pep
MNELVKFIRCRSPSLREHPSTELMTEPLSAPLQAVPPAATSLTLXSLTPPPTAWDQGSSLSKGGTRGRGEARGNH

SEQ ID NO: 189964 - protein, 156 aa, Zea mays
  unsure (1)..(156): unsure at all Xaa locations
  Clone ID: MRT4577_104829C.1.pep
RVRPRVRPRVREPSRPRGLAXXDSSPFQSTSRYTSPFQNPHWNRNLHLQSNRNSRSASLLHPHPGRAPPLVLSDSTSHRLVHLLPPLLGPSLPSGATGAWMHETTGAAKRTSGGSAAAGVPLRGMVTRRREARRARPAPAPALAPARMVSEPAPCL

SEQ ID NO: 189965 - protein, 69 aa, Zea mays
  Clone ID: MRT4577_104830C.1.pep
VVLTHDVPAWARPLSPYSGRVIMSGSRPELCHCGLNNGPSLLCEGGSLLSAVSRLRVMLLKKKQKKKEG

SEQ ID NO: 189966 - protein, 128 aa, Zea mays
  Clone ID: MRT4577_104831C.1.pep
FPCLRSDVLFSKLPQGCLRPKVPQGLRIHHGFFFHALPVSLGGMNPALITQCHELGPHHPVMGVGGKKMAHGAQALECMELIPPQGKDGFFHKGGGDHLKASVISCLPGSLRHIQRLQQRRGLPPWGA

SEQ ID NO: 189967 - protein, 64 aa, Zea mays
  Clone ID: MRT4577_104832C.1.pep
HAVLYFLFQTPLCEQCQTVLSSRISHSLFCPINSSQSNRPTNECVETGRIGLCWKERITQKKKI

SEQ ID NO: 189968 - protein, 417 aa, Zea mays
  Clone ID: MRT4577_104833C.1.pep
MYRGGLDRFKKAQTLEPFSVKSESGTKKAPAAAGTAKALAPLTLPLNSNFVPGQNHQSPQGTISRVAGQGGDAPGHVGTQVGGGQSTWQPPDWAFEPRPGVYYLDVVKDGEVIDRINLDNRRHLFGRQVPACDFVLDHQSVSRQHAAVIPHRNGSIYVIDLGSVHGTFVANERLTKDNPVELEVGQSLRFAASTRTYILRKNAAALFPTPSLPSDVSLPSPPDPNDEDAVVAYNTVLNRYGISKSDILSSSKDSSGGASGANDDKHAVERLLKRGKKRRVSFRDQVGGELTQVVGISDGADVETEPGPIGVKEGSLVGKYESLVQVTVIPKGKEQASRKECTSTSPSGVTDKLQEVLKKVKSATRPGIYDDLYGDSVPAKVGSSWAYKSDDQPVEEKTHGMNLNMNSADDSDDLFGD

SEQ ID NO: 189969 - protein, 156 aa, Zea mays
  Clone ID: MRT4577_104834C.1.pep
PRVRLKRSKKRRVSFRDQAGGELTQVVGISDGADVETEPGPIGVKEGSLVGKYESLVQVTVIPKGKEQASRKDFTSTSPSGVTDKLQEVLKRVKSTTRPGIYDDLYGDSIATKVGSSWAYKSDDLSDKAQPVEEKTLGMDSNLNSADDSDDLFGDT

SEQ ID NO: 189970 - protein, 75 aa, Zea mays
  Clone ID: MRT4577_104835C.1.pep
EYAVCGWKMRYCVGWKFGSVSSYGFIDADMYGKMWREDSVRYVSLGGQGVSVDKCRKCPNVGWRRRVIECVIEIG

SEQ ID NO: 189971 - protein, 136 aa, Zea mays
  unsure (1)..(136): unsure at all Xaa locations
  Clone ID: MRT4577_104836C.1.pep
HQATYKAEYSINNRATLAAKILGILMLLALSACVANATIFPQCFQASYACLLPPILSIMAPSRWGKPILLPYKLQQAIATSNLPLSPLVFQQSPPLFLXQSLVQTIREQHLKKLMFPVNKQIVLENLFPYXQQQPF

SEQ ID NO: 189972 - protein, 61 aa, Zea mays
  Clone ID: MRT4577_104837C.1.pep
TIYMNRTPQSFRTEHLFIWSLETQNSPIYRYVLTTSLLMYISAHCTKRAVPLPLPQTMYRH

SEQ ID NO: 189973 - protein, 84 aa, Zea mays
  Clone ID: MRT4577_104838C.1.pep
TLRNELGSYPLNKFSRSSQMMIRGTMATPSRAAHAQIVAMVASVSAATTLVTLPSGSTTGSTNPIREIRDDNDGCEEQIRVSDL

SEQ ID NO: 189974 - protein, 162 aa, Zea mays
  unsure (1)..(162): unsure at all Xaa locations
  Clone ID: MRT4577_104839C.1.pep
HSPFVHTINGQRYPLDLXLFHRSAHCPLAVIFILYQLGSPDSFYYHLKRHLXRWSTTGATXDEDELWMEAVLIHLRSLHNLTGSYFRYTGSLTVPPCTENILWSVLCKVRQIIHDQLQLLKAPFARSDARPTIXVNGRTVQFYNPSIIPSSFRSNTINTLES

SEQ ID NO: 189975 - protein, 329 aa, Zea mays
  unsure (1)..(329): unsure at all Xaa locations
  Clone ID: MRT4577_10483C.1.pep
MPISACSMQKKMETWLVLTALLLSLSLAAAAGTETVKVITTPVFPHIPRLQASKDFQVLVRVEAPPALQQHRRVPVDLAVVLDVGASTGTGTGVPRLDAVKKAVKFIISQVHDDDRLAVVGPSNYRLVTGFKDTYDARHNAQKSVEQLQHRGEFTSGAGLEEAIKILEELPATASRSSRARFVILXDGQGSGRGQQQIQQAAARVPPXPVHTFGLGEAHDPRELLHIARESQGTYSFVDDQNTDGITGAIAVCLSGLKNVVAVGARVRLETPVGSGVTIERIQSGGYTYSRTRPITTRDDKTYVEVALGALYAGEVKSFLVHLRVAALL

SEQ ID NO: 189976 - protein, 67 aa, Zea mays
  Clone ID: MRT4577_104840C.1.pep
DAWADAWADAWADAWADAWVGFEAGEANISFRSPGIGYQLYRLLIVNLLIQSRSNSSSQITIPCPTT

SEQ ID NO: 189977 - protein, 412 aa, Zea mays
  unsure (1)..(412): unsure at all Xaa locations
  Clone ID: MRT4577_104841C.1.pep
MPNPVFTPFLIGSPQHRQADSSGLTFVPTGPPVPFVAXFVPGNNDGSGPQFERSEGIDXSCQYCRSXFGSLNDVHQQDSSAISTVSSSTMTEPSGEHKPDILHSDFVSHWHNLQYGRLCQNPRPMGPVLYPVPVPPMYLQGHVPWDGPGRPAAPNVNWTQMXVGGQRVFPVMPVQPATERTXGVFQHYGEDAPRYRGGTGTYLPNPKVHFRDRHSNSRNYRGGYNGDRGDYNDKEGSWINSKQRNPNRGYGRSQSERSGMRSDRQVTDESRSDRQRRTYRNDSYRHEASSXYLVQGQPFGSTSSMRKPGNTVHGVYTPPSTYSNGTSALSGPPGPPFFMVYSYEQGSNHAASSSEPIEFGSLGPLPAADGDDIPRSTRQVMPNGFYGQRRGRYRGGSSHSSPDQPSSPQPRR

SEQ ID NO: 189978 - protein, 413 aa, Zea mays
  unsure (1)..(413): unsure at all Xaa locations
  Clone ID: MRT4577_104842C.1.pep
MPNPVFAPFLIGSPQHRQADSSGLTFVPTGPPVPFAVLPLVSGNSDGSGPQFERSEGIDXSCQYCRSFXGSLHDVHQQDSSATSTVSSSTMTEPSGDHKPDILNSDFVSHWHNLQYGRLCQNPRPMGPVLYPVPVPPMYLHGHATWDGPGRPAAPNVNWTQMVGGQRVFPVMPVQPATERTGVLQHYSEDTPRYRGGTGTYLPNPKVHFRDRHSNSRNYRGGYNGDRGDYSDKEGSWVNSKQRNLNRGYGRSQSERSSMRSDRQTTDESQSDRQRRTYRTDSYRHEASSQYLVQGQPFGSTSSMRKQGNTSHGVYTPPSTSSNGPSALSGPPGPPFFMVYSYEQGSNHGATATSSEPIEFGSLGPLPAADGDDIPRSTRQIMANGFYGQRRGPYRGGSSHSSPDQPSSPQPRR

SEQ ID NO: 189979 - protein, 213 aa, Zea mays
  Clone ID: MRT4577_104843C.1.pep
MASVQKVHFRDRHSNSRNYRGGYNGDRGDYSDKEGSWVNSKQRNLNRGYGRSQSERSSMRSDRQTTDESQSDRQRRTYRTDSYRHEASSQYLVQGQPFGSTSSMRKQGNTSHGVYTPPSTSSNGPSALSGPPGPPFFMVYSYEQGSNHGATATSSEPIEFGSLGPLPAADGDDIPRSTRQIMPNGFYGQRRGPYRGGSSHSYPDQPSSPQPRR

SEQ ID NO: 189980 - protein, 100 aa, Zea mays
  Clone ID: MRT4577_104844C.1.pep
SGLISSYAVIAVGSSEQAQCFLPSMRLVKESRHDILNTGSRPQQLSSKNQQTSTSLLTHLDLPMREHHARSLIPHLNSLARLTHVTIVQPLLRMVIVGSP

SEQ ID NO: 189981 - protein, 89 aa, Zea mays
  Clone ID: MRT4577_104845C.1.pep
VYNKALLYQCFSWPSRRVPWHCTATLKVMMAYGFCLQRQQYRLTSAPCPLVWSPSVYQVFLWYLFAGSHENVNQVFANNNSVVSASSFF

SEQ ID NO: 189982 - protein, 39 aa, Zea mays
  Clone ID: MRT4577_104846C.1.pep
ICQKCYVKGTVICDKQHTQCCQSAVILCVRNIIWRSLSP

SEQ ID NO: 189983 - protein, 99 aa, Zea mays
  Clone ID: MRT4577_104847C.1.pep
RPHASRDPEGGLQGRPAAQPRPARQTNALARAENKAIAEERPKTKSERTSPKTDREKRSQDGTKPQTTETGKGKVPQVSEGQTKLCQSGTPELDRKKHG

SEQ ID NO: 189984 - protein, 72 aa, Zea mays
  Clone ID: MRT4577_104848C.1.pep
FMVSTITSASGIPGVCLWAGYPTADDSTFLPFLHDLLMTFSSRPMSLGDARQAIHVTHSRSSCALDASFLRR

SEQ ID NO: 189985 - protein, 80 aa, Zea mays
  Clone ID: MRT4577_104849C.1.pep
LCRGSPFLLRALLIFHSLLSSPQTDLVGHSHSIVMEVPPPPFFCSVHLTHHIPVGFLLRLTPWAPGRACRSCTGAGPGRK

SEQ ID NO: 189986 - protein, 63 aa, Zea mays
  Clone ID: MRT4577_10484C.1.pep
VPGPLRFFFFFFFFFFFFFFFFFFFFFFFFFFWQKQTRGGFFLWENPGGLNQLTQGHGFKELF

SEQ ID NO: 189987 - protein, 45 aa, Zea mays
  Clone ID: MRT4577_104850C.1.pep
YNTTGLRGIFIETCRRNYRFLSPNGPGGGAYRFIFPTVPGVVKQP

SEQ ID NO: 189988 - protein, 44 aa, Zea mays
  Clone ID: MRT4577_104851C.1.pep
LRFRSKNPSDSFSRGLPVGVFISFALYCIGWVGRVVKPCHSVFI

SEQ ID NO: 189989 - protein, 106 aa, Zea mays
  unsure (1)..(106): unsure at all Xaa locations
  Clone ID: MRT4577_104852C.1.pep
MVRGRLDYKMIMNTTSRDASVWQRRHGPLKKELDARGLCDADXALARFCIRRRLWAHPTGTARATSDRSXMASGTVSRCGPPVLEHSAQPAYQLELRELRNQIQML

SEQ ID NO: 189990 - protein, 99 aa, Zea mays
  Clone ID: MRT4577_104853C.1.pep
ALFQDIKKPAEDEWGKTPDAMKAAMALEKKLNQALLDLHALGSARTDPHLCDFLETHFLDEEVKLIKKMGDHLTNLHRLGGPEAGLGEYLFERLTLKHD

SEQ ID NO: 189991 - protein, 64 aa, Zea mays
  unsure (1)..(64): unsure at all Xaa locations
  Clone ID: MRT4577_104854C.1.pep
VFVWVNLLGLLVQRVFFYAXKAFHNQQIDRIGLYEPLGGSLGEXVPLKSNIQMENLLDWSIGQG

SEQ ID NO: 189992 - protein, 47 aa, Zea mays
  Clone ID: MRT4577_104855C.1.pep
ASAHNGAVQFGSFIHVHPSIDPRERKKKEQITETHAHTTNKPSNPTD

SEQ ID NO: 189993 - protein, 78 aa, Zea mays
  Clone ID: MRT4577_104856C.1.pep
ARTGPPCAGHGYPPPPCPKAASDRRGTAARRPPRRRSPWASSGHLWPPRHASSGPPPLIMRPPIDRDEMSTMCVARVR

SEQ ID NO: 189994 - protein, 36 aa, Zea mays
  Clone ID: MRT4577_104857C.1.pep
SKVSGSSATAVRALALRASHQIGKQERERQPQLVTE

SEQ ID NO: 189995 - protein, 163 aa, Zea mays
  Clone ID: MRT4577_104858C.1.pep
MWRGCVSRGLSKAKASASRLFSTTSSSYTVVDHSYDAVVVGAGGAGLRAAIGLSEHGFSTACITKLFPTRSHTVAAQGGINAALGNMSEDDWRWHMYDTVKGSDWLGGQAYRCACAADRTGHAMLHTLYGQAMKHNTQFFVEYFALDLLMDNEGNCQGVIALN

SEQ ID NO: 189996 - protein, 643 aa, Zea mays
  unsure (1)..(643): unsure at all Xaa locations
  Clone ID: MRT4577_104859C.1.pep
MASSPPQPLTRTVLAATLLLLLHNAAARADGASPAVNPFTAKAAFIRYWNRKVPNNRPHPAFFVAKLSPLPAADSASFPSALPDIRASLPALCTKAALLCPGPATTDAASLTSGRRGGGPFKGYNNANFSNYGTGGVAGTDSFQKYSPDLNIAADSFRRYGRDSSGRADSFTSYEADGNVVTANFTSYAGGATGGSGSFAAYAAETNVPDSTFTNYDAAANGRGRSFASYSQEANHGENGFSGYGKNGNGVRETFKSYGNESNVLASGFANYGQSANGATDTFTGYGVEGNVPENRFRSYGAGGNAGVDTFKNYRDDGNVGDDRFTSYAKGANGGAAEFQSYGNSANPGSTIFKGYGEGTNPNHHIGFKEYAGENNTFKGYAKSGVDFKGYHNTTVSSSTAAALTXVGGGSGIDAXEHLKWSPEPGKFFRERELVAGNRMPMPDIRDKMPPRAFLPRAIAARIPFEPNAVSEAFGLPLDTALGKAVASTVAECERAPSKGETKRCATSAEDVVDFAVEVLGDDIVVRSTASTAGGGGRVQLGAVAGVDGGRVTRSVSCHQSLFPYLVYYCHSVPKVRVYEADILAADGSGSGEKINRGVAICHLDTSDWSPAHGAFVALGGKPGEVEVCHWIFEGDMTWTVAD

SEQ ID NO: 189997 - protein, 92 aa, Zea mays
  unsure (1)..(92): unsure at all Xaa locations
  Clone ID: MRT4577_10485C.1.pep
PPHNFLNKRHGGPKNXNPPLGGFGNVTTGTKGGGKKKGPCNQIPLGGAKSIFGKTVVVPPDPYXLXKGGAQFNKNPGNPGGRVACGVLGPQG

SEQ ID NO: 189998 - protein, 64 aa, Zea mays
  Clone ID: MRT4577_104860C.1.pep
LVLVSSMVSQRKPPWFEATACAWIPSRSAFFVSPSQFGPFQEPQASSFLVLCTQVGSMSELTRL

SEQ ID NO: 189999 - protein, 164 aa, Zea mays
  unsure (1)..(164): unsure at all Xaa locations
  Clone ID: MRT4577_104861C.1.pep
MEGKEDDVRLSANKFSECQPIXTETQGMXDKDYKEPXRRRRSSSPEQLXSWSFYRADIAEFVDTFLFLYISILTAMXVYNATSKXATAGIHRISXSFGGMIFPLVYCTAVISGEHIIPAKNFGVILVRKVHHTSAKDYIIMQRLRIICVADDCNGLQHLLYMDN

SEQ ID NO: 190000 - protein, 98 aa, Zea mays
  Clone ID: MRT4577_104862C.1.pep
RPVRDHRALDDPRKMKRLINNSIVHKRKRRRQNMPPEQTSLCDNCSGRWDRIGFWHSSPPGTEESQEEWGHVLDRKFGEIEKNSQCSFCQKKKKKRPL

SEQ ID NO: 190001 - protein, 89 aa, Zea mays
  Clone ID: MRT4577_104863C.1.pep
SHIQCAASDLTYVAYPSGELPDHLCQQTATEEVPPMESLQKGHSPELHKRITCLRPADNNHPRGELNWIHMRREERVRNSSTATPSYWR

SEQ ID NO: 190002 - protein, 31 aa, Zea mays
  Clone ID: MRT4577_104864C.1.pep
FVSRADCYLTFLSRSGSTICPATFLFALREI

SEQ ID NO: 190003 - protein, 41 aa, Zea mays
  Clone ID: MRT4577_104865C.1.pep
HAITLPANTITPATIHTTSSAFTIKKTPNLKHYTYPITDNG

SEQ ID NO: 190004 - protein, 57 aa, Zea mays
  Clone ID: MRT4577_104866C.1.pep
SNRRLQHRQIFWDHINNAPNVFIPLHALQLRSHLSYQALYYIRLALLTKGAGGSYDC

SEQ ID NO: 190005 - protein, 165 aa, Zea mays
  unsure (1)..(165): unsure at all Xaa locations
  Clone ID: MRT4577_104867C.1.pep
WWNILTSVRNVNVALTFISQFAEVNDFGMGLPQIPVVKEEEPTEVSTPAGSSFSVDGPCDSGKLLEGSSSGSWFQNPSSISDFKRKFAPGASNGLNSQFRTRHAADDPAGYQSLNPXPRDPKYRSCTXIKSTLQIPAMRVXGFDSGTDGSTGGPDIMVSHKCIHL

SEQ ID NO: 190006 - protein, 111 aa, Zea mays
  unsure (1)..(111): unsure at all Xaa locations
  Clone ID: MRT4577_104868C.1.pep
GPGGTTPTFMDVRGFGPGFKIKCNSPVNCSGKPLVVHITDMSYEPXIAGYHFXLPGTAFGAMDKKGDDEMLRIAGIIDMQFRRVKCKYDSKVTFHLEKGCGPRYLALLVKY

SEQ ID NO: 190007 - protein, 165 aa, Zea mays
  unsure (1)..(165): unsure at all Xaa locations
  Clone ID: MRT4577_104869C.1.pep
DGVEYCSTSHTRCSVKGPNQKSSSFQNISSRFDLDCCISSLEKYGVGSCGPRGFYGTIDVHLDCESKIAKFLGTPDSILYSYGISTIFSVIPALCKKGDIIVTDEGVHWAVQNGLHLSRSVVVYFKHNDMASLASTLEKLTRGNKRVEKIRRYIVVEXIYQVQCF

SEQ ID NO: 190008 - protein, 137 aa, Zea mays
  Clone ID: MRT4577_10486C.1.pep
NWSSMVLYNCGHPKNVAALTPEAVSTQTGAFLHRFAWLDDDEIGEVPFAWNFLVGHNRVDPADPATRPRAIHYTSGGPWFERYRDCEFADLWLKEAEELRADKEKDKLKLLKDMDDANGKQEVEEEAAQEKEKEKGK

SEQ ID NO: 190009 - protein, 76 aa, Zea mays
  Clone ID: MRT4577_104870C.1.pep
QSGKHTLEPCGRIIGRSARHQLWTADATNASSLITVAGAGASPGCVDQQGQGVPLKADVLKRGVLTRLLRHAFARL

SEQ ID NO: 190010 - protein, 79 aa, Zea mays
  Clone ID: MRT4577_104871C.1.pep
TSLLGTSGQVNLVPTLMFPLVHRVYLRSSRLLLPICVFDCKVPLCQLLEVCSSAAPADPCINQHGLWIDGTCYPCQDLF

SEQ ID NO: 190011 - protein, 159 aa, Zea mays
  Clone ID: MRT4577_104872C.1.pep
SSSRSLKSIAAPAPNSACPHLLSHGAHEHLPLRTPSVRPCSLVTRCTRAASCAPGWPSSPSSPLPSAMAPGRHRPCFPWRHFLLHGGRRPPQPLCWWLSPSPPWRARPCIPARPRSPSMFQPPPMDASPHLIVAPARSAPSLLVAGSPLLLPWSGTYGI

SEQ ID NO: 190012 - protein, 63 aa, Zea mays
  Clone ID: MRT4577_104873C.1.pep
NRSIKIHNGQKLRGRAITLVPSLHQEKASDLNTTCIDCAMTIMAGAGANIGIAVAPAIHVKKK

SEQ ID NO: 190013 - protein, 79 aa, Zea mays
  Clone ID: MRT4577_104874C.1.pep
KKRRRTALSYTKSEEIRVKRTQIQHTPYGGQKQAYRKLSIRTETKGPFGKAPAPASLALDPDPREELILLILLENQNHF

SEQ ID NO: 190014 - protein, 57 aa, Zea mays
  Clone ID: MRT4577_104875C.1.pep
NRQSSQTTNSQKTESVYLPNGFKNDSDFLGESGGSAPHKDQDLELKKQELELCQTGP

SEQ ID NO: 190015 - protein, 118 aa, Zea mays
  Clone ID: MRT4577_104876C.1.pep
AKVHMDGYAIGRKINLRAQGGYASLSRVLTNMTTNFYSPADCSTGATGTGEKDLPTNNDKFIFLYEDFEGDRMQVGDVPWELFLASAKRLYIVRNPTSSDKGQGEDDRKYTTEQPTDD

SEQ ID NO: 190016 - protein, 93 aa, Zea mays
  unsure (1)..(93): unsure at all Xaa locations
  Clone ID: MRT4577_104877C.1.pep
MEDDSPLTITIKGAVTGLGWGTIWGRVDTTXYDLPRVERNMRLPGLITTLKMCSTXGATLPTIGGLYIGFYQFVQSQPKKRHFKKGPLCAFFP

SEQ ID NO: 190017 - protein, 108 aa, Zea mays
  Clone ID: MRT4577_104878C.1.pep
MATTQEVDPFLKATHPTRVLSRRGLSLHQRAQRSSPYDTGVGSRTPCKLARTEEAKPPRAEHVTAQRLRALLRLRLNQWAKGRTGMRAACNHTTRMHPFDFDASSMES

SEQ ID NO: 190018 - protein, 85 aa, Zea mays
  Clone ID: MRT4577_104879C.1.pep
SLAGARVFFFWFVVCFFFFFLFFFFFFFLKRKRFFAAFELHYPYPPFIFLLDCPQINSFALQPPAKIHLFVPNRKSDLAPFGPKE

SEQ ID NO: 190019 - protein, 320 aa, Zea mays
  Clone ID: MRT4577_10487C.1.pep
MHRHYSRASSMKIELQVAREFSYQELSAATSNFFKDRKLGAGQFGEVYRGELPDPLMPPVAVKRLTRQMEARTRKDYVTEIMTLGRLSHRNLVKLVGWCQGGNELLLVYELVTNRSLDEHLHRSERLLAWPERYRIVLGIGSAIEYLHTGDQNPILHRDIKPSNVMLDDDFEAKLGDFGLVRQIHPGHGSSLEGTVMIGTRAYMDPVCMSTNTASTASDIYSFGVLLLEIATGLMPTEVAGRGGLLSNTLISTVREYYGRGSVLEMADRRLNGDFDEGEMERVLLVGLLCVQQDRRHRPEIRIAVNMLSNLKLPSPRIRS

SEQ ID NO: 190020 - protein, 83 aa, Zea mays
  Clone ID: MRT4577_104880C.1.pep
MSAYDEVEIEDMEWSEELGAYTYPCPCGDLFQITLADLRLGEEIARCPSCSLFLTVVYNEEDFADAKEPPQKPPAAAQPVAVA

SEQ ID NO: 190021 - protein, 52 aa, Zea mays
  Clone ID: MRT4577_104881C.1.pep
WKKNCILLKQPPPICNNVRVLTSVFFLCSSRIDLCFRYIGIFFVFIPCFYVF

SEQ ID NO: 190022 - protein, 954 aa, Zea mays
  Clone ID: MRT4577_104882C.1.pep
MPPSPPQGIPAAGGDPERDGDDNDDSGSSSHNTELLEEKEPEGWIARPITRGTARGCHFHNTLDLKYYPRCSAGSVGGVIVSLVGEGNPMLNNMVNLVVVLNTELDHALDELGKAYHIDTEDWLRTVERELHTAQCNNHEKVLYGPRLLRGAAQSWWESYLATHADPKAITWEEFRDNFHHHHVPEGLMIVRKKEFLALKQSPLSVIEYKDKFLQLSRYAPEDVNTYAKRQYRFLRVQARSPARSPASSSTSAPAAVSEAVPSAAVVPSEQPARRKSIPVPEQPGTLPSCPSNQPEQSGSASARRRSWMFPFWGTRSLGQSLPEESSSTASSFQHFSKTRSTQQAPGGRGQAYNRGKVNHLEAEAIQDAPNVVVEEGACHHLSVDGKEANLIEDIRIVSEFPDVLLEELPDMPPEHKVEFAIELIPCTAPISKRAYRVSRPELVELKKQIDKLLEKGYIRPCTSPWAALVLFVEKKDGTKSMCIDYRSLNEVNVKNKYPLPQIEDLFDQLIGASVFSKIDMRSGYHELRIRPSDIPKTTFITKYGLYELTVMSFGLTNAPSYFMYLMNIVFMDYLDKFVVVFIDDILIYSQNEQEHEEHLRKGKVVAYSSRQLKIHEKNYPTHDLELAVVVHVLKTWRHYLYGQKCDIYIDHKSLKYIFTQSELNMRQRRWLELIKDYELEIHYHPGKANVVIDALSRKIQVNMMVAHPMPYGKGKDFREDAEGVVWFKDRLYIPDIKSIRELIIKEAHETAYSVHPGSDKMYQDLKERFRWYDMKREIGEYVTICDSCQRIKAEHQRPTGLLQPLQIPQWKWDEIGMDFIVGLPRTRAGYDSIWVVFGLDILLEAKENIKMVRENLKTAQSRQRSYADTRRRDLSFEVGDYVYLKVSPMRGIKRFGVKGKLAPRYIRPYQIQARRGEVAYQLSLPKSLSAVHDVFHVSQLKKSLRVPEEQLPT

SEQ ID NO: 190023 - protein, 39 aa, Zea mays
  Clone ID: MRT4577_104883C.1.pep
PYNSSKMVHSPFQRSCRWVIVQLNWLIITEPLLYVATNK

SEQ ID NO: 190024 - protein, 86 aa, Zea mays
  Clone ID: MRT4577_104884C.1.pep
WRHACSGKIILRTPGPTQQVRDEVATRSLTHAATHPIMLTTTIDLLGNTELVDRDTAYCSPVGCGVEPSKCLRSTPCRLESMSGRQ

SEQ ID NO: 190025 - protein, 182 aa, Zea mays
  Clone ID: MRT4577_104885C.1.pep
MAPQAWVVAENGEDLQQPREFLPLSKLEDVGVLYWHLDPKKSESEEELAKIRRDRGYSYMDLIEICPDKLENYEEKVKNFFCEHMHADEEIRYCLEGSGYFDVRDKDDKWIRIRIREGDMIILPAGIYHRFTLDSAKYTKLMRLFIGEPVWTALNRPQEDHPARQEYVKNVSAGTGFALAAH

SEQ ID NO: 190026 - protein, 47 aa, Zea mays
  Clone ID: MRT4577_104886C.1.pep
MTFRIKKKLAKKMRQNRPIPYWIRMRTGNTIRYNAKRRHWRRTKLGF

SEQ ID NO: 190027 - protein, 48 aa, Zea mays
  unsure (1)..(48): unsure at all Xaa locations
  Clone ID: MRT4577_104887C.1.pep
MERFSAYPTLGRFAVREMRQTVAVGVIKSVAKKDXTXAXVXQAAAKQN

SEQ ID NO: 190028 - protein, 51 aa, Zea mays
  Clone ID: MRT4577_104888C.1.pep
MPSHKTFRIKKKLAKKMRQNRPIPYWIRMRTDNTIRYNAKRRHWRRTKLGF

SEQ ID NO: 190029 - protein, 57 aa, Zea mays
  Clone ID: MRT4577_104889C.1.pep
DLLEFQSQQDPCPSCIATRTCGCSKWLQALSYYSSAKGCSTEGNVQVEWLISHNRKT

SEQ ID NO: 190030 - protein, 44 aa, Zea mays
  Clone ID: MRT4577_10488C.1.pep
VDEDLCELISRIRPEDGNTEFWERRCLGETLYYLCEEDSKEDGQ

SEQ ID NO: 190031 - protein, 51 aa, Zea mays; identical to SEQ ID NO: 190028
  Clone ID: MRT4577_104890C.1.pep

SEQ ID NO: 190032 - protein, 51 aa, Zea mays; identical to SEQ ID NO: 190028
  Clone ID: MRT4577_104891C.1.pep

SEQ ID NO: 190033 - protein, 105 aa, Zea mays
  Clone ID: MRT4577_104892C.1.pep
TRPMYRIQIRRSFYFIAIYLTQLHYHWLVGFTVHARVDRAAKQRTQKHAHVRCRTQTIAVAQHNHAAVPPVPVAPASALSSGRSFLAPKVRWSTPRPAASSTLSC

SEQ ID NO: 190034 - protein, 51 aa, Zea mays; identical to SEQ ID NO: 190028
  Clone ID: MRT4577_104893C.1.pep

SEQ ID NO: 190035 - protein, 138 aa, Zea mays
  Clone ID: MRT4577_104894C.1.pep
AWASCSQSRLLPGLFFFLSSPRLAAGDGAAHTISLVLSSLFPTSRRPRVVPWKIRARPSRPLPPISDCALLPALGEPTMVAPPMSLELASASTSPVSSPSRHDAWPRPVRRSNLTSHVHHALGIAFPAGRTSLLRRKP

SEQ ID NO: 190036 - protein, 79 aa, Zea mays
  Clone ID: MRT4577_104895C.1.pep
MMKVSPSPEQGVMAGREPFGLPKTPATPPSSGGTQGLRMAYTTDGTAIFTPVSSVSCCPRRRHTSPWAAAPRLLQLAGV

SEQ ID NO: 190037 - protein, 40 aa, Zea mays
  Clone ID: MRT4577_104896C.1.pep
YSNHTNYYDFDHSILSMYHSTLRQQDSTLSSKHLSNLSHV

SEQ ID NO: 190038 - protein, 77 aa, Zea mays
  Clone ID: MRT4577_104897C.1.pep
FWETLIIETARMFHPAIILLLLLIATTHVSSSSKRILEGHLAITWGMHDVRQLRLRFPRSNLHLRPFQHLSPSVHLH

SEQ ID NO: 190039 - protein, 398 aa, Zea mays
  unsure (1)..(398): unsure at all Xaa locations
  Clone ID: MRT4577_104898C.1.pep
MVAVKQLTGPARPAHTCAAHAHQLLSARYDHRGASQAELPDRISPSNASTFCTSMYSSSAADSSKSCRQAGALPFLPHPPKREQQQQQSSSSPSLLVCTDLGNGGQDEXSGTSGXELKDFLNLSGEASWRGGFHGESSGVAFRFREKVEFQFLSEQLGIAITDHDESPRLDDQEDIYDRPPQTSSCPVLSCSNQEEGLQRAGSPVKAQLSSYRAACNNKPRLRWNLELHELFVKAVNKLGGPEKATPKGVLKLMKVEGLTIYHVKSHLQKYRFAKYLPETKEDMKSSSEDKMPGSNPGRKKILKSLQVAEALRMQMEVQKQLHEQLEVQRQLQVRIEEHAKYLQKILEQQKARNSLSATTSSIQTELSESTKEEKPETQADTSSAQLPNKKNSDTDME

SEQ ID NO: 190040 - protein, 60 aa, Zea mays
  Clone ID: MRT4577_104899C.1.pep
KNPGGPKVFCPKPTKGKRNLKRPLFRKFLWKKKWGPFPYITLENGTFNQPGEWKINPGGG

SEQ ID NO: 190041 - protein, 84 aa, Zea mays
  Clone ID: MRT4577_10489C.1.pep
RMRTPIPSLSVTVTRFVQMNIDPQKRTKEWGKLHRPHCTFLFIYTSTVANTTGAWANDGVTPCSRSCRNLIMLFITITLMGSLS

SEQ ID NO: 190042 - protein, 53 aa, Zea mays
  Clone ID: MRT4577_1048C.1.pep
LRPLNFVSAPSPWKHPSGGGCSIQRSWTGRPFFIELNSLPIKIVPLWCAGTHV

SEQ ID NO: 190043 - protein, 291 aa, Zea mays
  unsure (1)..(291): unsure at all Xaa locations
  Clone ID: MRT4577_104900C.1.pep
SSYDIYIYIYSRVLTLQAQRLRNELFGIYCGEWTQRPTAWRRHEQTEHGRRGAAHRPCQCQTRSHVRCSASCSPAAQCSIRSPWRVELPDRISPSNASTFCTSMYSSSSSSSAAADSSKSCRRAGALPFLPHPPKREQQQQQQSSSSPSLLVCTDLGNGGQDEAEAEHPAELKDFLNLSGEASWRGGFHGESSGVAFRFGEQVEFQFLSEQLGIAITDHDESPRLDDIYDRPPQTSSCPVLSCSDQEEGLQRAGSPVKAQPSSSRAASCNNKPRLRWTLELHEXFVKAVNK

SEQ ID NO: 190044 - protein, 63 aa, Zea mays
  Clone ID: MRT4577_104901C.1.pep
FRSVGPPGVRSPPPAKKRSWFLFISMVVFFSVLPLCGFVSDHSCIRPSFNGSPASDLRPSVRL

SEQ ID NO: 190045 - protein, 65 aa, Zea mays
  Clone ID: MRT4577_104902C.1.pep
SPPMLKIKFPTQGGTLMLDENNNSNWIQRTELVNLGYQGPRNWVGNPPGYPLGGGFISRAQQRKV

SEQ ID NO: 190046 - protein, 42 aa, Zea mays
  Clone ID: MRT4577_104903C.1.pep
EHMEYSSLDTLNHSNPPKTKLHWHRRLKMLRDICSSLMCMHR

SEQ ID NO: 190047 - protein, 337 aa, Zea mays
  Clone ID: MRT4577_104904C.1.pep
DIEDFYKEKSKTNPQFLFLSGGAGCNYYMRKLWEHQQKHIGQRWHDSAKSKTSSDKLTAENRGKILGERPLDRTTKVHSPSLSAKEAVQLQSNLTETFVKPISLDGLPEYEKPFSNDPAKQVRFEQFLRDKYKGGLRAANVTPTSTMSEGDRARERLDFEAAAEAIEKGKGKKVIDPLSVFSLPGMNEQRFVAATQPESSVVIQDEKPIYPQRQQFEWRPSPILCKRFDIVDPFMGKPMPVQRPRSKMENLIFMTESNKGTNDEVESSSRSLQHASMEAVSDVESRGAATDPDFEPSSLQRPVDLYKATFSDDSYDDADEILSNQLIDPLKTCEGAN

SEQ ID NO: 190048 - protein, 100 aa, Zea mays
  unsure (1)..(100): unsure at all Xaa locations
  Clone ID: MRT4577_104905C.1.pep
PHPAPKVPPWRYMPNHAMPPHIFGAPIYAQLRYPDGVRAILNRXFKGEAFPGQNYIVKEGQLPSQYQCPPKMFLSRVGFFGEKPRGKNPCWGPGLLYEKL

SEQ ID NO: 190049 - protein, 72 aa, Zea mays
  unsure (1)..(72): unsure at all Xaa locations
  Clone ID: MRT4577_104906C.1.pep
PPISVRPAGDHGSSPTPNPNSLLPPGLAVXXXGAADNKQPTHITQHDPNTSNRLQIQRNPCRRTRPHPRRRD

SEQ ID NO: 190050 - protein, 43 aa, Zea mays
  Clone ID: MRT4577_104907C.1.pep
MCTPMEMRKTEAREKKMMEWKKMEGPLVCKKPHSPKGGPLERR

SEQ ID NO: 190051 - protein, 336 aa, Zea mays
  unsure (1)..(336): unsure at all Xaa locations
  Clone ID: MRT4577_104908C.1.pep
MSRRGAMPSTAPRARLSPPAPASHPPRKRGRSPSAPGSTASWRASAENTVPLYHRRRWHNPERAPGRVWQRFRAPQPALLSSRLWICSEDASTSSSGDACTIMSYNILADYNARNHPDLYLDAPWDAMRWDSRRRLIIREIRHWDPDVVCLQEVDRFQDIAAGMKSRGYEGIFQRRTGDTRDGCAIFWKSKQLHLVEEDSIDFSEFNLRNNVAQICVFELNGTHKFVLGNIHVLFNPKRGDVKLGQIRMLLENANALAEKWDKIPIVLAGDFNSTPDSAIYKFLSTMKLNISLHDRRHLSGLDSTEFGYELCSLLKYQWTDEEVRNATGYSNXSWW

SEQ ID NO: 190052 - protein, 65 aa, Zea mays
  Clone ID: MRT4577_104909C.1.pep
PAWEKHVVWDAPHGKTPVGTGNPRSRAHWRRPVVWDRTSPEKASLAWQSPLSRRHPSRKRACGPQ

SEQ ID NO: 190053 - protein, 64 aa, Zea mays
  Clone ID: MRT4577_10490C.1.pep
VRLYVYRSHSHIDKCVQLQCQCVTSKTQCSMWAYALPLYPTSREISSSWFTVRLIHFSMQQPKA

SEQ ID NO: 190054 - protein, 58 aa, Zea mays
  Clone ID: MRT4577_104910C.1.pep
PELASVAADTAQGLTVHGLVVPRRRLAISAVLCIVTGAIPKPHAPWHVSALVAQARGV

SEQ ID NO: 190055 - protein, 293 aa, Zea mays
  Clone ID: MRT4577_104911C.1.pep
IVQVRRGYLPKDFVVPKSPERILFCGWRRDIEDMIMVLDAFLAPGSELWMFNDVPEVDRERKLIDGGLDFSRLDNITLVHREGNAVIRRHLESLPLESFDSILILADESVEDSAIQADSRSLATLLLIRDIQAKRLPCKESLISHVPRGTFSEGSWIGEMQQASDKSVIISEILDPRTKNLLSVSKISDYVLSNELVSMALAMVAEDRQINNVLEELFPVQGNEMQIRPSDLYLREEEELNFFEVILRARQRKEIVIGYRLEAAERAIINPIDKVSRRRWSPKDVFVVISEKE

SEQ ID NO: 190056 - protein, 104 aa, Zea mays
  unsure (1)..(104): unsure at all Xaa locations
  Clone ID: MRT4577_104912C.1.pep
GRSSSIFEDISTKACHPCXYDTGYPQKRTSPLMSWRASGQQNGKSRRPRRFSSSVLDQRCWKGSSQWCQWTRQQQGCIGGGPNVATIQEDLIGVLSSVVRQDGC

SEQ ID NO: 190057 - protein, 216 aa, Zea mays
  unsure (1)..(216): unsure at all Xaa locations
  Clone ID: MRT4577_104913C.1.pep
MSDNLMDKVNALGERLKISGAEVSRKMSTGVTSMSFKMKEFFQGQNMADKIVDEATLETMDGPDWATNLEICDMANTERVNSVELIRAIKRRIMLKSPRVQYLALVLLETIVKNCEKAFSEIAAERVLDEMVKLIDDPQTIVNNRNKALMLIEAWGESGEELRYLPVYEETYKSLRSRGIRFPXRDDESLAPIFTPPRSVPAAEPYSDAAQDGYQE

SEQ ID NO: 190058 - protein, 148 aa, Zea mays
  Clone ID: MRT4577_104914C.1.pep
VPRGTFSEGSWIGEMQQACDKSVIISEILDPRTNSGNNAEYAGDYVLSNELVSMALAMVAEDRQINNVLEELFAEQGNEMQIRPSDVYLREEEELNFFEVILRARQRKEIVIGYRLEAAERAIINPIDKVSRRRWSPKDVFVVISEKE

SEQ ID NO: 190059 - protein, 95 aa, Zea mays
  unsure (1)..(95): unsure at all Xaa locations
  Clone ID: MRT4577_104915C.1.pep
FVVGGCGFKFVKVIYAFVWVFDDFDMRGGGGVITKGLIETXCRVVVNVVNADLTGKXRGVCMREERRIMNGLGETAIVYXQVESGNVEFKGGVGC

SEQ ID NO: 190060 - protein, 52 aa, Zea mays
  Clone ID: MRT4577_104916C.1.pep
YSNSVYMSGWKQTPLMDWDKACSYLSNGSSMEWLTSPQTQCMHTGHPPRQIL

SEQ ID NO: 190061 - protein, 429 aa, Zea mays
  Clone ID: MRT4577_104917C.1.pep
LYQLYTITHDQRHLVLAHLFDKPCFLGLLAVQADSLSNFHANTHIPVVIGGQMRYEVTGDPLYKEIATFFMDTVNSSHAYATGGTSVSEFWSNPKRLAEALTTETEESCTTYKLGTSRPAGFRWTKEIAYADYYERALINGVLSIQRGRDPGVMIYMLPQGPGRSKAKSYHGWGTQYESFWCCYGTGIESFSKLGDSIYFEERGERPALYVVQFIPSTFSWRTAGLTVAQQLMPLSSSDQYLQVSFSVSAKTTNGQFATLNVRIPSWTSLNGAKATLNGKHLELASPGTFLTISKQWGSGDQLSLQLPIHLRTEAIKDDRPEYASIQAVLFGPFLLAGLTTGDWDAKTGAADAAASDWITPVPVESNSQLVTLAQESGGEAFVLSALNGSLTMLQRPKDGRGTEAAVHATFRLVPQGGAGAGAAAMLEP

SEQ ID NO: 190062 - protein, 72 aa, Zea mays
  Clone ID: MRT4577_104918C.1.pep
ARPIRSSTPANSLRAESAINRQRNCWKLASYPLISYGSSSHPLCLRVVACYALQWRPDRACASDAPCLSGCL

SEQ ID NO: 190063 - protein, 42 aa, Zea mays
  Clone ID: MRT4577_104919C.1.pep
FSIQDIFVPSHSHCMLSITEAAESWHVMRYTASKETSIVAER

SEQ ID NO: 190064 - protein, 61 aa, Zea mays
  Clone ID: MRT4577_104920C.1.pep
ATQCNEMYHLHSQTQLGPPLKLHGPLAPEPSCHYSFLRRICLFFHSIVYSILWDSFLFFVV

SEQ ID NO: 190065 - protein, 187 aa, Zea mays
  unsure (1)..(187): unsure at all Xaa locations
  Clone ID: MRT4577_104921C.1.pep
KKKRGGGKRGKKKPQKGNPKREPPERETEGKKRNTRQKKQEKQPKGGEQGGRQKKRTPGEKPPQTPRKKRRKRGRPPAKTGRKNGRKGQRGGPPNQQNRXEKREKRNKGKKGGNHRVSPEKRVKNAGQRRKKRPKRPPKGPPKRKPERPPSGKKNPKKPPKREDNEKNFFFFFFFFFFFFFFFFFFF

SEQ ID NO: 190066 - protein, 148 aa, Zea mays
  Clone ID: MRT4577_104922C.1.pep
MAEHLFEDIFHVTRIDPDGKKFDRVNRIEARSEQLEMYMQLDIATYVYPMHMGDKFTMVLAPTLNLDGTPDTGYYTQAGRKTLADKYDYVMHGKLYKISEDNSSKDKGPTKVEIYASFGGLLMLLKGDPSSAANLELDQRLFLLIRKV

SEQ ID NO: 190067 - protein, 127 aa, Zea mays
  Clone ID: MRT4577_104923C.1.pep
VCCREQQVNRKSSSPRIEDGTQHGEAHHCCSRRRGPPNFSCCSLSLARGLTGSPSFTEKAEGSLRISIIRVRVLLLYATFSNTWSGGARLPPLPLPPLRSESNLSPPGAVPQHLQQRRCPRVRPRVR

SEQ ID NO: 190068 - protein, 84 aa, Zea mays
  unsure (1)..(84): unsure at all Xaa locations
  Clone ID: MRT4577_104924C.1.pep
MWRWQQTLLRRLPPPMAVAQAPASWAADRLVCYYGSTPEAREGKAAPLQARGMVYRFQMRAKGGDGGNGCVSLRRSKSNXPRHA

SEQ ID NO: 190069 - protein, 90 aa, Zea mays
  Clone ID: MRT4577_104925C.1.pep
MASLSWAGITSPSFTVAPARAVVIRRSFTVRASLRKATATVAVAVAVSALLACGGAMGHEVLLCAGYCSLCLLAQPVHLQGLRHLHLQEQ

SEQ ID NO: 190070 - protein, 70 aa, Zea mays
  Clone ID: MRT4577_104926C.1.pep
FREWSALVDRKKRGSIGGFAWGGFQNELGPCFCWERAVSGCVRQLRQVFWSHSVWESVFGCTLQTVSSVV

SEQ ID NO: 190071 - protein, 97 aa, Zea mays
  Clone ID: MRT4577_104927C.1.pep
SNTLNKTGGVYRIGGAPRFLLDGSCLVGKGWHPRWRTRRRLHCSPTVHPTSAGGGTYQRQFSPTHPVRIATKAQHHERFIFKDTHFLENFGFAGFCY

SEQ ID NO: 190072 - protein, 130 aa, Zea mays
  unsure (1)..(130): unsure at all Xaa locations
  Clone ID: MRT4577_104928C.1.pep
MMTSSGCYYLSRYLYRPPPLKSRISFRCPSADPPGPSFTTSTLKKPDPFPNQKLCAYFPFKAVDILPTGPDNILXIFDLPGFMVENDAPQFLNLMMDVFYYYYPKPLALALSVDAPFFFQPMWLVAKPLV

SEQ ID NO: 190073 - protein, 69 aa, Zea mays
  Clone ID: MRT4577_104929C.1.pep
AAALLFFILYSCGLIYWGYFLNVLCFFTTTQEVLFTQRENPEGTIKMVLGGNTFLKKKGEGETPHESPG

SEQ ID NO: 190074 - protein, 25 aa, Zea mays
  Clone ID: MRT4577_10492C.1.pep
HNYNLSICLRQFNKHILSILHINIV

SEQ ID NO: 190075 - protein, 199 aa, Zea mays
  unsure (1)..(199): unsure at all Xaa locations
  Clone ID: MRT4577_104930C.1.pep
LGPRAGGKITPPFPPSTLLPRLXSPAATTTRPRPPPPPRNTPSSPRISSSPPRLRPPPISPRRTYPSLSPSPSSPSLPRSRGVSLSSSTPPAHASPPSTMPSRPLXPLPSLPSPPPPXAPASSSPPRSSPARRRRGSRPSSPPXPPPRAVPXTPACSMSCTTTPRFLPTKSPSSSPPPCTPSSDSFPETASFRPQVASS

SEQ ID NO: 190076 - protein, 37 aa, Zea mays
  unsure (1)..(37): unsure at all Xaa locations
  Clone ID: MRT4577_104931C.1.pep
FXILNNTXSGTFMFXXLVIRLRFQILPXHRTRGVDTG

SEQ ID NO: 190077 - protein, 58 aa, Zea mays
  Clone ID: MRT4577_104932C.1.pep
DGWLNQGAIGDPPLIVGRLASNAITVFRVTAIYPFKCIHIVIVILFGTIIIKKKCGTM

SEQ ID NO: 190078 - protein, 47 aa, Zea mays
  unsure (1)..(47): unsure at all Xaa locations
  Clone ID: MRT4577_104933C.1.pep
LFLVFTGFSLPDLDGVWKLKPILDGKXIMGXMQVKSGGPLIGKWVRC

SEQ ID NO: 190079 - protein, 52 aa, Zea mays
  unsure (1)..(52): unsure at all Xaa locations
  Clone ID: MRT4577_104934C.1.pep
THFYHSFVEGSTSPTAKKRYKQXPMLRSALLNQRSSCRCYCVDPPSLMTAKR

SEQ ID NO: 190080 - protein, 134 aa, Zea mays
  unsure (1)..(134): unsure at all Xaa locations
  Clone ID: MRT4577_104935C.1.pep
MAKIKIGINGFGRIGRMVARVALQSDDDELVPXNDPFISTDYMTYMTKHHTVHGQXKHHXVQEKDSQTLLXFGENEAAVHGCSNPEEIPWGSDXDEYDAEPNGVFPDQAKAEAHLKDGAKKDVISAPNXDAPMF

SEQ ID NO: 190081 - protein, 50 aa, Zea mays
  Clone ID: MRT4577_104936C.1.pep
KMLPPQPASPLRSSSVGSGIIIPSSVIQMKPCGNDQGLFKTSPVLPRGTY

SEQ ID NO: 190082 - protein, 268 aa, Zea mays
  Clone ID: MRT4577_104937C.1.pep
HWDLEPAGNYCPWLCLHACLIFSRSPRRARAPAATTGRPPPTYARCQAVPQSHHEAFNEPFAGDEKELELTEIRDVLRCILHTIFFHRTLSLVRPKDVDCDFLDITYVQCGLPELEKEVDEKIDQFSAWVEKHPNRRSQICLSFFDEKHRHPGWFVNKTERIYWEQWFINLQVMFPKRYSKSNSSKGLTNIQANAVEETSTRRAALEASINEVLFQIIKFANEKKDHIPAIPDRIFNHEIMIPSSDSVFGWNTDVIRRVLNSGHPYSL

SEQ ID NO: 190083 - protein, 130 aa, Zea mays
  Clone ID: MRT4577_104938C.1.pep
DPAPRRTDSFKAYFPSKVSSRVIDIVKMMPTVLQLELLHRMDDWPKSFETMHPVHEDIGLFFFPNKPDGCEKKHSNVLEAYNNFVLRAYIHDIKLLIYSSEVLPPDSQWIDGENYLWGLFVSSDGKSGPS

SEQ ID NO: 190084 - protein, 126 aa, Zea mays
  Clone ID: MRT4577_104939C.1.pep
RLPYLLPFTAPCARAPAATTGRPPPTYARCQAVPQSHHEAFNEPFAGDEKVQCGLPELEKEVDEKIDQFSAWVEKHPNRRSQICLSFFDEKHRHPGWFVNKTERIYWEQWFINLQVMFPKRYSKSN

SEQ ID NO: 190085 - protein, 77 aa, Zea mays
  unsure (1)..(77): unsure at all Xaa locations
  Clone ID: MRT4577_10493C.1.pep
KVAKVVFKKVFGKRTSKEFPETSLSPTQKKSAIKKLSWRVFGTPETGPPPVKGGPVASRALVVXLGPMEIRPFLLKF

SEQ ID NO: 190086 - protein, 70 aa, Zea mays
  Clone ID: MRT4577_104940C.1.pep
IKRTEWIHYIAYDNHREVSSRISSLYFPAPTLYPRATTTHDRGERLELILICPAAYIGTRRGPFLGRSEE

SEQ ID NO: 190087 - protein, 213 aa, Zea mays
  Clone ID: MRT4577_104941C.1.pep
MNCETCQLKELELELTEIRDVLRCILHTIFFHRTLSLVRPKDVDCDFLDITYVQCGLPELEKEVDEKIDQFSAWVEKHPNRRSQICLSFFDEKHRHPGWFVNKTERIYWEQWFINLQVMFPKRYSKSNSSKGLTNIQANAVEETSTRRAALEASINEVLFQIIKFANEKKDHIPAIPDRIFNHEIMIPSSDSVFGWNTDVIRRVLNSGHPYSL

SEQ ID NO: 190088 - protein, 189 aa, Zea mays
  Clone ID: MRT4577_104942C.1.pep
MASLHPTTAMLAQRHSPAPSLSASSLSWSASIAVSRIPPAPGLALHPLVNPPASGNRQSPVVCAAWTRRSRGEAEQRPNRKSWKQRTDMYMRPFLLNVFFSKRFVHAKVMHRGTSKVIAVATTNSKDLRLTLPSLVDDNACRTIGRLIAERSMDADVFAMAYEPKKNERIEGKLGIVIDTIKEHGIIFV

SEQ ID NO: 190089 - protein, 96 aa, Zea mays
  Clone ID: MRT4577_104943C.1.pep
QKKTPRGFLTTQPNPFLPVLAWGEICLSPVSSFYPDKTSYVSGLSFKGRNCPGPVYVTSFLCAQQFPPPPPLLHVSCKSIQKMLGVEPRLKVSDWV

SEQ ID NO: 190090 - protein, 42 aa, Zea mays
  Clone ID: MRT4577_104944C.1.pep
QSYNTFYTKNGNTQCTGKKFLSSQKLWIYLVKTPPIYLLQCT

SEQ ID NO: 190091 - protein, 106 aa, Zea mays
  Clone ID: MRT4577_104945C.1.pep
CKDTAVSYRSLTHIHSNMNNMSDRALLVLMLLLSVLFVAQCGRPHDDEVVGTARGRRAAFSLTENGYCDTEHQNCKVVYCCSHPQPKHCYATFMQCRANCYVHKRK

SEQ ID NO: 190092 - protein, 135 aa, Zea mays
  unsure (1)..(135): unsure at all Xaa locations
  Clone ID: MRT4577_104946C.1.pep
DAQSSRFAWSSRSRFGWSSCRNLYPSLELALGLLSHPPLERYYWQNRVLNSSKRPAIXALYAEPDKREYAVXMKNTAESTYYIFLDXALDTQVLIGQNDTIDGVGTFFSMDXYAPYVGLNTRTFMSAFGANLVRS

SEQ ID NO: 190093 - protein, 59 aa, Zea mays
  Clone ID: MRT4577_104947C.1.pep
EGAFKNNKGAKKSNRHFGETDLTKHAPNMYRQDSSTVKTAERPQNRTMTPPYDTNTNED

SEQ ID NO: 190094 - protein, 91 aa, Zea mays
  unsure (1)..(91): unsure at all Xaa locations
  Clone ID: MRT4577_104948C.1.pep
PLPAVDRAVGSQGAKRAATAMSREAXRTRSRVLVVGATGRLGGSIARANLGRGHPNFPLGRAQQFRSPGFPGLGPVVTLRANFVQGSLEEY

SEQ ID NO: 190095 - protein, 53 aa, Zea mays
  unsure (1)..(53): unsure at all Xaa locations
  Clone ID: MRT4577_104949C.1.pep
CKSAIHDRTTXLSPIISQVSMSYLFVLVDCKNKVPLNKYHLKRIVPVRCNSEC

SEQ ID NO: 190096 - protein, 64 aa, Zea mays
  Clone ID: MRT4577_10494C.1.pep
DTVGRAESTEALRARAQTPRAVHDCRWTRSTFVARSSCSHAFCVRGYRLQHTAEWRGWKVFASR

SEQ ID NO: 190097 - protein, 382 aa, Zea mays
  unsure (1)..(382): unsure at all Xaa locations
  Clone ID: MRT4577_104950C.1.pep
MAEANVAAASLFGADGRLCSADILAPPEVRARIEVAVLNFLAALASPSSPAISVLPLISRSSANCSLRSGLLNDVSSVYLSYTFCKRSLTHNPKAFVRVWKVMEMCYKILGEGKLVQQRELFYKLLSDSPKYFSCQRHVNQAIQDVVSLLRCTRQSLGVMASSRGALIXRLVLHEPDGEQIDCSILGASGHAITGDLNLLSKLNLSSGSRYIIVVEKDAVFQRLAEDRLYNQLPCILITAKGYPDIATRFILHRLSQTFPNMPIFALVDWNPAGLAILCTYKYGSISMGLESYRYACNVKWLGVRGGDLHLIPEDAFQELKPRDLQIAKSLMSSKFLQESHRAELALMVERGKRADIEALYSHGFDFLGKYIARKIVQGDYI

SEQ ID NO: 190098 - protein, 91 aa, Zea mays
  Clone ID: MRT4577_104951C.1.pep
MIRTLLLSTLVAGALSCGDPTYPPYVTRVVGGEEARPNSWPWQVSLQYSSNGKWYHTCGGSLIANSWVLTAAHCISSSRTYRVGLGRHNLY

SEQ ID NO: 190099 - protein, 129 aa, Zea mays
  unsure (1)..(129): unsure at all Xaa locations
  Clone ID: MRT4577_104952C.1.pep
PRAAVYSALHCGGXFETPDGAQEDDHSASMDLDRGALAARHHHQLHETHDIWLLCPPKAMMKDRSEHLGXSTLKRRLLWWALWCVAAAFRLIALPIIIDTNIPHKKPALPAPEQXTDXAFDTALLFLNA

SEQ ID NO: 190100 - protein, 125 aa, Zea mays
  unsure (1)..(125): unsure at all Xaa locations
  Clone ID: MRT4577_104953C.1.pep
GTHLPTPTLPADGAGTSSNQHASSVLVIASSQPGKAXILXLRARFVGRXAAIVRVFEEGTRDRPYGHCLVVGLAKNPKRVVRMXSPMKTANKAHEKCSIKLVKLTQLMQTPLSPPVHPSAVAPRG

SEQ ID NO: 190101 - protein, 95 aa, Zea mays
  unsure (1)..(95): unsure at all Xaa locations
  Clone ID: MRT4577_104954C.1.pep
RVGKGGPEKXLKAIQYLXXRECEYDQRISIDFCKEGEPLKPAVTAVLAFVCTPHPIGNKYYLGPGPLQDMGRQIATANGPTGYNRDYLVSMEKAL

SEQ ID NO: 190102 - protein, 74 aa, Zea mays
  unsure (1)..(74): unsure at all Xaa locations
  Clone ID: MRT4577_104955C.1.pep
GGGGEFWRAPDLQSRLTKQGEYIKIWRRQWXLLKQRQLXWFKEWSRTRASEPRCVIPEASCLTEKGAEDVLNRP

SEQ ID NO: 190103 - protein, 66 aa, Zea mays
  Clone ID: MRT4577_104956C.1.pep
TLNANYLDRLKNTPLKAFESHLNSTISGMCSRLTREQKLRIKTCLFFAKISATTCFSANFNHDLQH

SEQ ID NO: 190104 - protein, 87 aa, Zea mays
  Clone ID: MRT4577_104957C.1.pep
GEKGNVSYAFHRFFQQQKQGPKSCDFGGPGMKTYPDPSMGECRLLVGGEDSKSFAVASCGGGFFGVCCGLWVLALWGVMDPKKMDSA

SEQ ID NO: 190105 - protein, 122 aa, Zea mays
  unsure (1)..(122): unsure at all Xaa locations
  Clone ID: MRT4577_104958C.1.pep
LCFRVWLCWRSACRLGSVYLHALQSGHCRPPALAGFDSGLFSSCPLFAPLCPPSARAPSFRVRSSSSSPLASSSSSWVWFPFGLVLGWVCVGSLFSKFPPFRARRRPPXDAARRAGLFLPAR

SEQ ID NO: 190106 - protein, 166 aa, Zea mays
  Clone ID: MRT4577_104959C.1.pep
LASCLKNTLFCSKEASESTYRTLRNGSLEEPSPQRKGRGSSSEGNPVLGSGLLPLLLRARLRRQGGCEVPLRGLLSSDTMLWPRRVQAPPPLQQLQPLQMMHAYTSIKLVGVHLLLDQQFIHLPSLSAKKVGFVRSLTKSCKILKKFSSRLFTSSRCSWSPSVLVY

SEQ ID NO: 190107 - protein, 64 aa, Zea mays
  Clone ID: MRT4577_10495C.1.pep
GFSFLFFDHDDVLVHFGNSSCLCRLGFEEGALTIGFKWISFLLCFSLLYSSFSLILLDLSLSAV

SEQ ID NO: 190108 - protein, 71 aa, Zea mays
  Clone ID: MRT4577_104960C.1.pep
PLMLHINNIPRQRDPVGLSKGTAPDLLSILPCTGTDLKLTRASARPISGWDTLGDTEPAVRMEGIHEKWGR

SEQ ID NO: 190109 - protein, 136 aa, Zea mays
  unsure (1)..(136): unsure at all Xaa locations
  Clone ID: MRT4577_104961C.1.pep
TRHEAPDGADGGGAPGRLKESGADASRGPPGRPPRRADDPTPTPLATCGNWPPTLSPSRRPHSSPGLPFSLKCQKDKPGLGNKGRPKSLTHRKQRAFDPSSRKLYNTRRTIXGLFSRIRNVGEEPLQXPGFKSAPW

SEQ ID NO: 190110 - protein, 86 aa, Zea mays
  Clone ID: MRT4577_104962C.1.pep
TPGLPKNGGLNGFLDPLGQKNIYTQLKAPALVFLARGFPKRKKGGSPRRTWKRKPPPFWWREILAPKLGAIPGGLLLIGRKPRGWP

SEQ ID NO: 190111 - protein, 63 aa, Zea mays
  unsure (1)..(63): unsure at all Xaa locations
  Clone ID: MRT4577_104963C.1.pep
MATAEVQTPNRFGTYETPAGETPHTAAVVPEEAAPDPKAKAEEPAAPARTEPIVYCAPKMXPV

SEQ ID NO: 190112 - protein, 61 aa, Zea mays
  Clone ID: MRT4577_104964C.1.pep
NRHSRRTLYISFIRVLSRSPVGGKIYYQTLAAHENRMWPKTCIRMLHTIALTVNRGPPIPN

SEQ ID NO: 190113 - protein, 64 aa, Zea mays
  Clone ID: MRT4577_104965C.1.pep
KKKKKKKNVSLKSEEVPTLHTLTSKLHNSYIPPLKSNLLPPILQHLFFQNPTIPPLNLLLSHPN

SEQ ID NO: 190114 - protein, 108 aa, Zea mays
  unsure (1)..(108): unsure at all Xaa locations
  Clone ID: MRT4577_104967C.1.pep
HRRNRGGAGAXRNXKHRNPDXQXQDGGRKPKXDAPXGTRRTXAAXRTAXXHGQNXXAGGGKXXRDKKRXXNAHRPSNAXXTNANAAXETRNPPGEKKXTKADTPEGGT

SEQ ID NO: 190115 - protein, 83 aa, Zea mays
  Clone ID: MRT4577_104968C.1.pep
SVCLWSQCNRSEPRPTSGAFRVGSRRQEDQPGDPTVNGSRADTTNIRGRYVNVCPPTSLRPLSPLAQSTRSSPGYCEPCLRLN

SEQ ID NO: 190116 - protein, 84 aa, Zea mays
  Clone ID: MRT4577_104969C.1.pep
TVWWLIFRSACITSPTRHCLQSVVRRASRLSRAASARTADELPRSPPLGASSAAMQRSTVRERRGAERRKSPSRQWTGRLMKGC

SEQ ID NO: 190117 - protein, 396 aa, Zea mays
  Clone ID: MRT4577_10496C.1.pep
MAAAASSALHAVGAVASAKPRSVVPAVATRRSVRVAPAAKRGPGSGGGRLVARSAVAAKADEAAAAAGSKSGGHELLMFEALREALIEEMNLDPTVCVMGEDVGHYGGSYKVTKGLAEMFGDLRVLDTPIAENSFTGMGVGAAMKGLRPVVEGMNMGFLLLAYNQISNNCGMLHYTSGGQFKIPVVIRGPGGVGRQLGAEHSQRLESYFQSIPGLQMVACSTPYNAKGLMKAAIRSENPVVLFEHVLLYNLKEKIPDEEYICCLEEAEMVRPGEHVTILTYSRMRYHVMQAAKTLVNKGYDPEVIDIRSLKPFDLHTIGNSIKKTHRVLIVEECMRTGGIGASLRSAIIDNFWDYLDAPIMCLSSQDVPTPYAATLEDATVVQPAQIVAAVEQICQ

SEQ ID NO: 190118 - protein, 91 aa, Zea mays
  Clone ID: MRT4577_104970C.1.pep
SRLSPSIYARPSCRCRGVGSLSPKPRDVSVSGVPRAQPQQNHKVKEEKAKAATFPRPQAPEKEPRKGNPHSLRRNPLARTRNLTRNYGGHC

SEQ ID NO: 190119 - protein, 60 aa, Zea mays
  Clone ID: MRT4577_104971C.1.pep
RMQHFTLLYLRDRTTHTVSSPQHSFSTNTYSIFGTLGMLNDGCLCFCIFFYTTIRLPSSS

SEQ ID NO: 190120 - protein, 55 aa, Zea mays
  Clone ID: MRT4577_104972C.1.pep
ARATNAFIIPHSSLAPSAIIPPLLRIHAFMRLQETSEQAYRVRQALAVSVLYTTN

SEQ ID NO: 190121 - protein, 75 aa, Zea mays
  Clone ID: MRT4577_104973C.1.pep
STGVYQQWYPIYIASLCSWECEKVQRPRPLTRILCMMLLLSLAHMKCQDQQHRLRHLQCLQELQDSLLDSYRQNL

SEQ ID NO: 190122 - protein, 152 aa, Zea mays
  Clone ID: MRT4577_104974C.1.pep
MAEEQQHQRWQEGHRLCANNCGFFGSPATLDLCSKCYRDLYQQQPAGAAAGPSAPTASAFQHSSSAVSGAAAVSPDLEPPATAPAGAKAGRCSSCRKRVGLTGFACRCGATFCGVHRYPERHACAFDFRAAGRDAIARANPVVKGDKLKDKI

SEQ ID NO: 190123 - protein, 146 aa, Zea mays
  Clone ID: MRT4577_104975C.1.pep
MAAVAARSGLRRMFSIADFATPNTRMFSISAFAPPSPPTPPPKADPSPNLFVSGLSKRTTTDGLREAFAKFGEVEHARVVTDRVTGFSKGFGFVRYVSVEDATKGIEGMDGKFLDGWAIFAEYARPRPPPQMGGATPQPQQSWGTP

SEQ ID NO: 190124 - protein, 109 aa, Zea mays
  Clone ID: MRT4577_104976C.1.pep
FTYKIQRKHRLQGTKLVQYGRLSEIPKAQWVIHAQLSKGEGIRSQDGGRWRCTSKTDVGVIWTCPGSWLKIRLDHCTVRNVSSELNTIDYLLWLEAYKTTGYMGFGTGK

SEQ ID NO: 190125 - protein, 49 aa, Zea mays
  Clone ID: MRT4577_104977C.1.pep
LIFRVAHALSIMTELLVLKTYDQTINFPNLSSLYVQSPKDYVCREDFPQ

SEQ ID NO: 190126 - protein, 133 aa, Zea mays
  unsure (1)..(133): unsure at all Xaa locations
  Clone ID: MRT4577_104978C.1.pep
MSLPAISLYTSPPGAVYSSEFDPTSRGSSPCTTAALLPPAASHRLPSGGGGGGGGLSCLFSSPAAAAAPPRTPAHDDLGALWHDRSDDLSAAAGXGGYSYSHSHSSSPLKWRDPHHHHRPVSVFQGLSSSSHP

SEQ ID NO: 190127 - protein, 74 aa, Zea mays
  Clone ID: MRT4577_104979C.1.pep
GNVALFNISVSNLLKKRIHYGIIKKTGGPPFRDSVTRGLIPYRAPEVNQLSPMGGRFKPGGNQGKSCSLGKIFS

SEQ ID NO: 190128 - protein, 36 aa, Zea mays
  Clone ID: MRT4577_10497C.1.pep
LQFRSGLPVDQRPLCYLCYQRKVIRFLVKLCCPASK

SEQ ID NO: 190129 - protein, 129 aa, Zea mays
  unsure (1)..(129): unsure at all Xaa locations
  Clone ID: MRT4577_104980C.1.pep
RSRIPSCGAYKYVXSELXRRKQSDVMRFVQRVRCFFFFFFPAIXRFXGRGRPDKARRLGYMGGGGYFVYRERVKRGGLNRPVPKGXVYGMSNHHXITHFMFXRTIXLXSEDRAXLKLGGLMVLNPYCLI

SEQ ID NO: 190130 - protein, 52 aa, Zea mays
  Clone ID: MRT4577_104981C.1.pep
LKIFFGSPPGAQKKRLAMTLLNFTVLHVRNGDLNLKTGVNWGGGDLLHPIWG

SEQ ID NO: 190131 - protein, 283 aa, Zea mays
  Clone ID: MRT4577_104982C.1.pep
PTHPAQIMLGCGQTQTGSFLDAAAPNGLFGLGIDEVSVPSILAQKGLTSNSFSMCFGRDGIGRISFGDQESSDQEETPLDINRQHPTYAITISGITDGNKPTDMDFITIFDTGTSFTYLADPAYTYITQSFHAQVQANRHAADPRIAFEYCYDLSSSEARFPIPDIILRTVTGSMFPVIDPGQVISIQEHEYVYCLAIVKSMKLNIIGQNFMTGLRVVFDRERKILGWKKFNCFSPSTSENYSPQEARNPAGVSQLRPLNNSAPAALYDSLLLMLILVHLAVN

SEQ ID NO: 190132 - protein, 98 aa, Zea mays
  unsure (1)..(98): unsure at all Xaa locations
  Clone ID: MRT4577_104983C.1.pep
ANGPKKSIXRPPPGELMASSSSSSHRRLILAAAVLLSVLAAASASAVTSCVPGRAIPHNPFPSCRWYVTSRTCGFGPCLPWSELXRRCCRELAAIPAF

SEQ ID NO: 190133 - protein, 118 aa, Zea mays
  Clone ID: MRT4577_104984C.1.pep
GEGIPHVSRKEVPRRFFPKQTKKGGGENYKTVLGHGWGNPRRGLTGGTDGKISPAGGPPSTSGGFFGFGGGTSFGSRVPLPPGGQKTLLFGQRIFWGREARRQKNPSPWKPRVGAPPS

SEQ ID NO: 190134 - protein, 159 aa, Zea mays
  Clone ID: MRT4577_104985C.1.pep
MGVPEAVALEIPAVEEGSPTPLARVPPRIRRRLLQAGSGENGGKAPTAEEIETKLRQAHLRRQQFHEALSSKARRSIKSPSGSLQEEDRGQLLEAKLLAARQKRLTLLEKEQSRLAKLDKLRQAVKSDAEMRFEREREELGMKVESRVQKAENNRMQLM

SEQ ID NO: 190135 - protein, 59 aa, Zea mays
  Clone ID: MRT4577_104986C.1.pep
YVAPAIPRVSPFSAPTSGVTQCAVPRVAPKAFWCSVNQGPTDHDGKSVFPRLSSLLVRD

SEQ ID NO: 190136 - protein, 320 aa, Zea mays
  Clone ID: MRT4577_104987C.1.pep
MAEAVESGGRALLVSELGRVQDLVSQLELQLRAPADADSVDLCRCLVQQIVALTDRSIGMLHSSPDLAPSPLTATGSPISSDAASDHHPFRPAGASPKKRKATARWTSQQVRVSADDGHSWRKYGQKDILGARHPRAYYRCTHRNSQNCLATKQVQRADDHPALFDVVYHGEHTCRPAAAGGGSKRAQQHNPHAQAALQGLAARLTVATTTTDNAAGLPPMTPESCPVRGASSPWSLASPVGSDFNGCLHQGISPCPVPGYRDWTSDVDLQEVVSSAFAAVSSVAPLPVPDDEFMPLECVEYVFDQNFDIDTAMPSLYYP

SEQ ID NO: 190137 - protein, 36 aa, Zea mays
  Clone ID: MRT4577_104988C.1.pep
GVTSVPDSVRAVRSSSSIIRNLYNIGLAPQCIVWSM

SEQ ID NO: 190138 - protein, 53 aa, Zea mays
  Clone ID: MRT4577_104989C.1.pep
RLCCCAARVFFRMGVIYKPSGEPEMFFRTMSTTNYNELATRWNLRASIKGNNT

SEQ ID NO: 190139 - protein, 43 aa, Zea mays
  Clone ID: MRT4577_10498C.1.pep
LVTQQRRNGRISGHKMVQHADLRYESDSRRRHNPAHRPINAHI

SEQ ID NO: 190140 - protein, 82 aa, Zea mays
  Clone ID: MRT4577_104990C.1.pep
PGLVLSGLRFWALPPLGGALGRSRVLPSPGFAPFDFFSTEQRHEFCLIILPFLGPVLFFLVFGSLNCPFHAFWLYGFGGAGL

SEQ ID NO: 190141 - protein, 75 aa, Zea mays
  unsure (1)..(75): unsure at all Xaa locations
  Clone ID: MRT4577_104991C.1.pep
HFQVKRLPNFLLSSPVLGLAGYSIVHNTKLLHRRYQRSSAHKQIITALEKRPSASXILLGVCXCXCSIXLLLSYQ

SEQ ID NO: 190142 - protein, 56 aa, Zea mays
  Clone ID: MRT4577_104992C.1.pep
DAWAVIHSDNSTEVPSSHSRGVSLYDCAECMKRMSKGSLIKTLIVYAYDAQAHEIT

SEQ ID NO: 190143 - protein, 212 aa, Zea mays
  Clone ID: MRT4577_104993C.1.pep
MENMRSENHRGAAMEGVKLASEAAANTNRRALRDIKNILGAPHQPQAVSKRGLQEKPAAAGAKSQAGAVGHRPVTRKFAAILQQTQPANAPLAPIGSERQKRNADTAFHAPSDMECSKASDDDLDEMMTNELKEIDMEDTEEEEMPDIDSCDVGNSLAVVEYVDEIYSFYRRTEELSCVSPTYMAHQSDINEKMRGILVDWLIEVHYKLELL

SEQ ID NO: 190144 - protein, 118 aa, Zea mays
  Clone ID: MRT4577_104994C.1.pep
TRGHAIFGISGGLEWGCRLHQVLLHRRSMRHMVPVAGDHGMICFKSCSKLKQPSFRIHGCPQDSDFCNPVQFTIMLLAWHLVAVVTVEAAAHCAFSLPDAAVSSLLAWPSRKKHSFNR

SEQ ID NO: 190145 - protein, 111 aa, Zea mays
  Clone ID: MRT4577_104995C.1.pep
HPSAHASAESRKKTGITVADWSPSYSDRRMSSVTAEGPPPPLPPPAVAGEQCSSSGGSGLPQRVGGGGGRLKQSLKEKLMEARMDDQKPLPSVCKNLDDEQHYQNSSDHKF

SEQ ID NO: 190146 - protein, 116 aa, Zea mays
  Clone ID: MRT4577_104996C.1.pep
TPRYTQVWRSAITESRKKTGRTAADWSPSYSDRRMSSVTAEGPPPPLPPPAVAGEQCSSSGGSGLPQRVGGGGGRLKQSLKEKLMEARMDDQKPLPSVCKNLDDEQHYQNSSDHKF

SEQ ID NO: 190147 - protein, 56 aa, Zea mays
  Clone ID: MRT4577_104997C.1.pep
LLCRLLHESRHHHHHPVSPFPSPVLDSSRSHGQGTVAHLQLGGSGPHICYLALTAR

SEQ ID NO: 190148 - protein, 60 aa, Zea mays
  Clone ID: MRT4577_104998C.1.pep
NHLKQKFFLKKKNLPITTTLPKTQRTQERLHSTAPESSWSHRCPFSSFYLRAAQPPLNLG

SEQ ID NO: 190149 - protein, 84 aa, Zea mays
  unsure (1)..(84): unsure at all Xaa locations
  Clone ID: MRT4577_104999C.1.pep
TRERVSSCARDVSETIFSTCSTNDQYVLSKLERTIESPKESSSRDSIAPELMSNVEPRTLAQVRGRQARHVGXKVCNTCRSEAP

SEQ ID NO: 190150 - protein, 63 aa, Zea mays
  Clone ID: MRT4577_10499C.1.pep
LLIISPTSIYPKGGFYNIFSGKRRQHRSTKQKHATWRFIDTRGGGTGGRTTNRDVKQNKYQAG

SEQ ID NO: 190151 - protein, 63 aa, Zea mays
  unsure (1)..(63): unsure at all Xaa locations
  Clone ID: MRT4577_1049C.1.pep
XIIFTEXSLLPGVFINEEWDHPHNEEGSKLHHPAKSESLMKPPTVDSPWNNVGRQLDQIILHV

SEQ ID NO: 190152 - protein, 102 aa, Zea mays
  Clone ID: MRT4577_104C.1.pep
YTHLLTLPDSKTRPLMTARSWDIIALRSHAHASSLAAHSSRPPGPANLQNSCPPSSISSITLMTITHSTPHSTFTMTPTYTPTVDSFGKQDFTVLHLLNCPH

SEQ ID NO: 190153 - protein, 131 aa, Zea mays
  Clone ID: MRT4577_105000C.1.pep
NVLVFSGYFSPNAFTILGTLGFNPFPRRCTTWFHLCSGGPTNPPHVGCVFFNKLLTVRWCSAWPPHPSQKCPACATPFAVFALAAALPLVVFAPQPVFLPSRPTPITVLSYNVPIHYDVCSINLNKKKNCN

SEQ ID NO: 190154 - protein, 85 aa, Zea mays
  Clone ID: MRT4577_105001C.1.pep
ARPTRSLANLASQLRIPTRTGSITGGASCQARGQSANDKIRRGLLPTSRDCAVRVHHSWSGQPMLHPCMSHHHAGAATCGGAILS

SEQ ID NO: 190155 - protein, 47 aa, Zea mays
  Clone ID: MRT4577_105002C.1.pep
KGGFAMVPFLGFPVKAPPTGKGPLNNWAPPLKDPLHTPFFDTFGGSF

SEQ ID NO: 190156 - protein, 59 aa, Zea mays
  Clone ID: MRT4577_105003C.1.pep
TSDVPRHPSYGVQASVLRSSLVKTVPLVDLTQDLECGLVHATVPVGYLPVVTSRPNPKS

SEQ ID NO: 190157 - protein, 170 aa, Zea mays
  Clone ID: MRT4577_105004C.1.pep
RFSCNGGILSATSTLNRSNSAFSCVFESLLTPNLTPAVTQCLTAVAHRAFETVLSWLDDRISDIGEGADVRESVLSVHACFLIKSMSQRDEHVRDVSVKLLTQLKEKFPQVLWNSSCLDLLLISVHNELTSGPVSDPAWVATVRSLYQKIAREWLTSALSYAPCTRQQRN

SEQ ID NO: 190158 - protein, 128 aa, Zea mays
  Clone ID: MRT4577_105005C.1.pep
NLDEAETYMTLDAPRPIVCRRLSGHLAKGKNLHGSPEGTRSSNDAVPRTRSKKPKQKNKTKNQNKLGFRTQKRRSYLGEASLRRGVARYCGLELKGRWISKQSSPGLGVTLGSTRQSGRHRTAPAVDS

SEQ ID NO: 190159 - protein, 43 aa, Zea mays
  Clone ID: MRT4577_105006C.1.pep
RGWCPYLSRFSAPRSCVRRARCVSGCRSRRSLGPRFLDCSLAD

SEQ ID NO: 190160 - protein, 45 aa, Zea mays
  Clone ID: MRT4577_105007C.1.pep
LFISFLQTRPSPLVPPSRRCNYLCLPHLTAGLMTPSSPMTGRTVP

SEQ ID NO: 190161 - protein, 68 aa, Zea mays
  Clone ID: MRT4577_105008C.1.pep
QDHGRRVDPTAKEYFLFSAAKSIRWILVKAKHPMHKLTIRCTSFLHISYIYRHLTNKLQTVRDSMSAA

SEQ ID NO: 190162 - protein, 139 aa, Zea mays
  unsure (1)..(139): unsure at all Xaa locations
  Clone ID: MRT4577_105009C.1.pep
DRAXEXXKKXEEXKXXRGRXQEAXXXAXXXXXXRQEERXRXXKERGXXXXGATKKEXGRAKEXKXKQXEXEKGQXKEXGTXHXXEXRRXXXXXXGRNKQAXRAAQEAXKHAEEXXXRRSPXPXAAAGRXKRTQRAEDKK

SEQ ID NO: 190163 - protein, 167 aa, Zea mays
  unsure (1)..(167): unsure at all Xaa locations
  Clone ID: MRT4577_10500C.1.pep
MDHHFTEIEGKMAHEPLAHSSTFSDETKDKMEHDSLVYSPRSIARATTTGIPVGDQGVAVLRGPLIVGAGPAGLACAALLTMLYIPYVLLERDVCVASMWHRRTYRRLCLHLPKRYCELPLMHFPRTYPTYPTRQQFLVYLNEYMRAXGILPFFSLEVVAAEYNGEY

SEQ ID NO: 190164 - protein, 82 aa, Zea mays
  Clone ID: MRT4577_105010C.1.pep
EIIGKDNGDGRDVDHHTVSKRHDGVGVDVMQQKRKRTRDIGQAVLVKGWRHVYIGAVNIQREKGGSLGSNGAMGCDTRLRRQ

SEQ ID NO: 190165 - protein, 64 aa, Zea mays
  unsure (1)..(64): unsure at all Xaa locations
  Clone ID: MRT4577_105011C.1.pep
EHVFPRGGLFLFQFELQDMPDVCGLLLSLALHTPVIEVDTSYFFVWLRHDDLKRYYELQHGXPP

SEQ ID NO: 190166 - protein, 128 aa, Zea mays
  Clone ID: MRT4577_105012C.1.pep
QAEAQKTEIEELRRQLGEAKENCALAQANQEISEYWKIKQEKNVKELCESKEWCFEKSLDCMKKLKTSFAKVGAYSAEENFIRGNPEGVVEWISGEAETFEEILSDRGDICAFYGAQGNLEEGGMRSH

SEQ ID NO: 190167 - protein, 326 aa, Zea mays
  Clone ID: MRT4577_105013C.1.pep
MLPYAPGPPPSLLLDRRYKQGGEAAPSCPRCDSPNTKFCYYNNYSLSQPRYFCKGCRRYWTKGGSLRNVPVGGGCRKNRRGKSSLRSAADSIASCGGGGRDAAFGHRFPGPVRPDLVLEGMVGNHPSNPAGQAAMPGGVPAAADGSTIDLAMLYAKFLNHPPAVEGVGAVAPESAGQVDEAFDASSDLMSPGALAPVQFDPCQPQDGFGEWSGVPVSSAGPSSTASTTAATTMLCTDVSVQAAFGELNFAMDQNCFDSLGLPTDDVGNLSSSWCSIVPGLSTLEDAKYDLDSFPDDALSLHDEGMISGTDHDWSVDCQGLETLYMP

SEQ ID NO: 190168 - protein, 87 aa, Zea mays
  Clone ID: MRT4577_105014C.1.pep
VVRLSADPWALAKCRASYGFCSRGHSIVAVDLHPTDGAALTFNWTGRTNRPKGHFAGLRPTLGRCGTRKNVENICIYILRKQNWSFG

SEQ ID NO: 190169 - protein, 62 aa, Zea mays
  unsure (1)..(62): unsure at all Xaa locations
  Clone ID: MRT4577_105015C.1.pep
SISSHFSISYYLNYPXGHLGDLSISGYHIPSFHEIINYLYLKALYGYTFFPFLTLYNIFYAH

SEQ ID NO: 190170 - protein, 72 aa, Zea mays
  Clone ID: MRT4577_105016C.1.pep
RPGGISFGFTPGSVFFFVPPGKLTLSLSLKATRQSPSFALYGKNSACFPFGQKKSKNTTSTKSSKRKKTKST

SEQ ID NO: 190171 - protein, 179 aa, Zea mays
  unsure (1)..(179): unsure at all Xaa locations
  Clone ID: MRT4577_105017C.1.pep
MLASYFSTIYGENAYPKALSKAKITNMPYHPAPMKNKGEPRDGKNMARRLAHHEDMDPKDVNAAAATIKTKRTIHIVDWCPTGFKSGINYQPTNVAPGGDLPKVQRAGCMISNSTSVVEVISRMHHKLNLMYAKRAIRHWYVGEGIDEGEFSDAREDLAGLDKDYXEVGAEFDEDDDGD

SEQ ID NO: 190172 - protein, 243 aa, Zea mays
  Clone ID: MRT4577_105018C.1.pep
ASRYDICLHVDLCLGGFVLPFAHKLGYPIPPFDFSVKGVTSISSDVHKYGLAPKGTSIVLYRNHEIRKHQFVAVTEWTGGLYVSPTIAGSRPGGLIAGAWAAMMSLGLNGYLDSTSRIMDVSKKIQRGIGEIPGLFVIGKPDMTVVAFGSDVVDIFEVNDIMSSKGWHLNALQRPNSLHICVTLQHTTVYDQFLKDLQDSVNTVKANPGPISGGKAPIYGAAGKMPDRGTVRELLVEFMDSSC

SEQ ID NO: 190173 - protein, 99 aa, Zea mays
  Clone ID: MRT4577_105019C.1.pep
DLRWSCTMIRPSYFSLESLDDDPRAMFTVPHQQMRADLINLDALHKSLRSSHTAQESSVIRSNSFHQPSVFPRVTLRVASLPSRDGGIRREIIILTQTL

SEQ ID NO: 190174 - protein, 69 aa, Zea mays
  Clone ID: MRT4577_10501C.1.pep
SIVYSYFGAGETAARNPLVVTEFINGQWKSLILSSCLESWAGTLTLLLCFFLLSIKTVPPSFKFMSVFT

SEQ ID NO: 190175 - protein, 73 aa, Zea mays
  Clone ID: MRT4577_105020C.1.pep
QHITPLPHINFSYLLSLSILILSIIYFIYIFPSFYFIKYLPLYLSTYYSSIILNSILTTYHLSLIITIILTLF

SEQ ID NO: 190176 - protein, 76 aa, Zea mays
  Clone ID: MRT4577_105021C.1.pep
AFTANVICPSADMYKAQGCQQRLSTSMTCKCSAISMSTLNTTIQSVKGAWPSSPFRKIKIMEEQAVVLGKPSPAGK

SEQ ID NO: 190177 - protein, 201 aa, Zea mays
  unsure (1)..(201): unsure at all Xaa locations
  Clone ID: MRT4577_105022C.1.pep
PTLTDGQTRSGLLSEIWTHNTRAPVAMQVTDLDTVLAVMVARRLERITEMLSYLYLCGSVSLGATTSTRNCHRQTERMLLQIMLYDRDYQQVQRQAQRHNETPSISDSNCNYKDSFMVTIRCKVMFKIVCNTTCSLTDLQHANIHANINAADNQSYQEYYDRYVIGSPINTETVRLXVIQCLEPSIXRRVYLDVKLDLCTN

SEQ ID NO: 190178 - protein, 475 aa, Zea mays
  Clone ID: MRT4577_105023C.1.pep
MATVAPVVSDLVDFLNASPTAFHAVDEAKRRLKAAGFVQLSEREEWAGLEPGRKYFFTRNHSTIVAFAIGAKYVAGNGFHIIGAHTDSPCLKLKPVSKVTKGGYLEVGVQTYGGGLWYTWFDRDLTVAGRVIIREKKDGVVSYAHKLVRVQEPIMRIPTLAIHLDRTISSEGLKVNNQSHLVPVLATCIKNEMQKFVADNGPKQASENANTKHHPLLLQLIAKEANCEPGEICDFELQLCDTQPSVVAGATKEFIFSGRLDNLCMSFCSLKALIDSSSVEHSLDHESGVRMVALFDHEEVGSDSAQGAGSPAMLDALSRITGSFNSSGSKLLEKAIQRSFLVSADMAHALHPNYMDKHEENHQPKLHGGLVIKHNANQRYATNAVTAFIFREIAERHQLPIQDFVVRNDMACGSTIGPILASGVGIRTVDIGAPQLSMHSIREMCAADDISYSYEHFKAYFEEFTELDGKVKVDY

SEQ ID NO: 190179 - protein, 268 aa, Zea mays
  Clone ID: MRT4577_105024C.1.pep
MAAMPAPLLPLLLLVVAAAMTLSPAAARIPGVYVGGGGGWQSAHATFYGGSDASGTMGGACGYGNLYSQGYGVNNAALSTALFDEGLRCGACFEIRCEEQPGWRWCRPGRPSILVTATNFCPPNYALPSDDGGWCNPPRPHFDLAMPMFLHIAEYRAGIVPVSYRRVPCRKSGGVRFTINGFRYFNLVLITNVAGAGDVVRASVKAASTGWLPMSRNWGQNWQSNAILVGQALSFRVTASDRRTSTSWNAAPSTWQFGQTFEGKNFRV

SEQ ID NO: 190180 - protein, 120 aa, Zea mays
  Clone ID: MRT4577_105025C.1.pep
VPILLCCKHVFCEDCVSEWFLWGRSCPLCRALVRPADLRSFGVGSASLFFQLLWSFRASCSWASWGAPPCAYVSCVCVCVFLLAARASCSALMRFWVGVRQPEAAVRFMCVLLCIFPFPL

SEQ ID NO: 190181 - protein, 77 aa, Zea mays
  Clone ID: MRT4577_105026C.1.pep
AYIFRAYQQNVVERLVCIPKMDTIIDIHFKKNSREKIGDLEDFSSPLFSIQSNTLLGPVCFVEIEFHSTNYNLEETN

SEQ ID NO: 190182 - protein, 269 aa, Zea mays
  Clone ID: MRT4577_105027C.1.pep
MAAMPAPLLPLLLLVVAAAMTLSPATARIPGVYVGGGGGGWQSAHATFYGGSDASGTMGGACGYGNLYSQGYGVNNAALSTALFDEGLRCGACFEIRCEEQPGWRWCRPGRPSILVTATNFCPPNYALPSDDGGWCNPPRPHFDLAMPMFLHIAEYRAGIVPVSYRRVPCRKSGGVRFTINGFRYFNLVLITNVAGAGDVVRASVKAASTGWLPMSRNWGQNWQSNAILVGQALSFRVTASDRRTSTSWNAAPSTWQFGQTFEGKNFRV

SEQ ID NO: 190183 - protein, 244 aa, Zea mays
  unsure (1)..(244): unsure at all Xaa locations
  Clone ID: MRT4577_105028C.1.pep
MAAMPAPLLPLLLLVVAAAMTLSPAAARIPGVYVGGGGGGGWQSAHATFYGGSDASGTMGGACGYGNLYSQGYGVNNAALSTALFDEGLRCGACFEIRCEEQPGWXWCRPGRPSILVTATNFCPPNYALPSDDGGWCNPPRPHFDLAMPMFLHIAEYRAGIVPVSYRRVPCRKSGGVRFTINGFRYFNLVLITNVATRSTWXRAVVKALSFRVIGSDRRSATSWNAAPRDWRFGQTFEGKNFRV

SEQ ID NO: 190184 - protein, 300 aa, Zea mays
  unsure (1)..(300): unsure at all Xaa locations
  Clone ID: MRT4577_105029C.1.pep
MAAMPAPLLPLLLLVVAAAMTLSPAAARIPGVYVGGGGGWQSAHATFYGGSDASGTMGTYVHPWIHTHTYTYIQKKRRLADETKGNLALXGACGYGNLYSQGYGVNNAALSTALFDEGLRCGACFEIRCEEQPGWRWCRPGRPSILVTGTNFCPPNYALPSDDGGWCNPPRPHFDLAMPMFLHIAEYRAGIVPVSYRRVPCRKXGGVRFTINGFRYFNLVLITNVAGAGDVVRASVKAASTGWLPMSRNWGQNWQSNAILVGQALSFRVTASDRRTSTSWNAAPSTWQFGQTFEGKNFRV

SEQ ID NO: 190185 - protein, 128 aa, Zea mays
  unsure (1)..(128): unsure at all Xaa locations
  Clone ID: MRT4577_10502C.1.pep
NAFFFSFPXYQKGVFNFCLCGCGFPAPSSSPFCSMRGFHFFCRGGRGPALGSVCDESGLALRDLCWGEQRSCTPPGVFPRGFSQMCFQSVNLCLFSRGVFPFGVFFDLGVFCLVTRAVGGPGVFFSVL

SEQ ID NO: 190186 - protein, 81 aa, Zea mays
  Clone ID: MRT4577_105030C.1.pep
PQINPGFATALSFFLPASSCKTLAKKAFVALGPLINSCQLQYQDAQSALKLFKGTTPGFFKNSFICKAFIVFPPLWGLGGD

SEQ ID NO: 190187 - protein, 269 aa, Zea mays
  Clone ID: MRT4577_105031C.1.pep
MAAMPAPLLPLLLLVVAAAMTLSPAAARIPGVYGGGGGGGWQSAHATFYGGSDASGTMGGACGYGNLYSQGYGVNNAALSTALFDEGLRCGACFEIRCEEQPGWRWCRPGRPSILVTATNFCPPNYALPSDDGGWCNPPRPHFDLAMPMFLHIAEYRAGIVPVSYRRVPCRKSGGVRFTINGFRYFNLVLITNVAGAGDVVRASVKAASTGWLPMSRNWGQNWQSNAILVGQALSFRVTASDRRTSTSWNAAPSTWQFGQTFEGKNFRV

SEQ ID NO: 190188 - protein, 60 aa, Zea mays
  Clone ID: MRT4577_105032C.1.pep
HAVRYTQNLKGYHKMPIYNRKVMLFAGVTGEVKPYQNSDSSPPVGWWSLISLIKAIEFWG

SEQ ID NO: 190189 - protein, 65 aa, Zea mays
  Clone ID: MRT4577_105033C.1.pep
LELASSGRPQHGHEQPPHYCARPPAGRGHDASRRRCCAYRGAGCRLPLLVRRRRRPLRHRPRPRW

SEQ ID NO: 190190 - protein, 85 aa, Zea mays
  unsure (1)..(85): unsure at all Xaa locations
  Clone ID: MRT4577_105034C.1.pep
QNPILSRIMQTRPAAQTNTAYNKGIAHAHYPICKDDGVSGLYHGPGDTSLGIGPNIAVALTVYESXHSHCQIDKPCAPPVRISLA

SEQ ID NO: 190191 - protein, 82 aa, Zea mays
  Clone ID: MRT4577_105035C.1.pep
VPSTSPPPPTAAPHVWAHPAFVRVPSTTYRFVFPLASGPVFVSVLPLDSGVRYPLLCPSVLLLPHETRAITPVDRWFSVLQT

SEQ ID NO: 190192 - protein, 54 aa, Zea mays
  Clone ID: MRT4577_105036C.1.pep
WTLCHPGYNQFCDPFMACFVNQLPKYGVPVEPNLVLCRKTTCNISWYMYRGSTV

SEQ ID NO: 190193 - protein, 147 aa, Zea mays
  Clone ID: MRT4577_105037C.1.pep
TSNGHAVNLMNGCVNDLSGAAMEVLKEMKKLQQMDLYDEHARMRRRLLNDRLLLAERSFLQPEGLQGRGWFKHLLYSPPEDYESKLSFFPGIADAISRSANLSDKEQEVAMQHEVWKVCRAIQRAASVLRGEFSEQKPTNFSSLVTP

SEQ ID NO: 190194 - protein, 58 aa, Zea mays
  Clone ID: MRT4577_105038C.1.pep
INEMIHSNTTYPEGLAHLSISLFSTLMTLPPTNMGPKEKEKNKKIKHFVVQMLYLKNR

SEQ ID NO: 190195 - protein, 61 aa, Zea mays
  Clone ID: MRT4577_105039C.1.pep
ATKNDSHLDCHFISYYYYILQQHTLCRFDEQMIESLFAYNFQGQTKNEDPKSKILATSKHV

SEQ ID NO: 190196 - protein, 35 aa, Zea mays
  Clone ID: MRT4577_10503C.1.pep
ALVTLKPHPKRGHIACNEPFCVKWKWALTEGVGRP

SEQ ID NO: 190197 - protein, 170 aa, Zea mays
  Clone ID: MRT4577_105040C.1.pep
HSTPSPRGYGGYLLTSRFALNPAARRAPRSFPARTEALIPSSSVRRGLLGSRSRIADCWVRRFCTVRTPCRVSAHPREAVLPPMIPEKTQSRRQVDPCPQAIGGGGSFPLQTAGPRASTAGLWMRCPKNDVLPSPTFYGGHPAALISSENGRLGAKSGSFPDQFFLTSSG

SEQ ID NO: 190198 - protein, 84 aa, Zea mays
  Clone ID: MRT4577_105041C.1.pep
ADRRSLSGFFQLHSELGPTNPTLRYNCMSPLNSHVPSPVCGRNIVTYIHRKTQRQCFLPHLVKLQLTTGFLPACLPRPLPTGDL

SEQ ID NO: 190199 - protein, 357 aa, Zea mays
  unsure (1)..(357): unsure at all Xaa locations
  Clone ID: MRT4577_105042C.1.pep
MTGPMEIPVIDLGGLNGGGEERSRTLAELHDACKDWGFFWVXSTNECLQLIFDNFFPYACARAYVRHYDAPAPLASASAXENHGVDAPLMEEVKRFVYGHYEEHLEAKFYASALAMDLEAATRGDTDEKPSDEVDWESTYFIQHHPKTNVADFPEITPPTRETLDAYVAQMVSLAERLAECMSLNLGLPGAHVAATFAPPFVGTKFAMYPSCPRPELVWGLRAHTDAGGIILLLQDDVVGGLEFLRAGAHWVPVGPTKGGRLFVNIGDQIEVLSAGAYRSVLHRVAAGDQGRRLSVATFYNPGTDAVVAPAPGRDDQGAGAAAYPGPYRFGDYLDYYQGTKFGDKDARFQAVKKLLG

SEQ ID NO: 190200 - protein, 89 aa, Zea mays
  Clone ID: MRT4577_105043C.1.pep
ALCLLPLSVPCVILRHLARALAAHRRCLRSPPPEACPRRGCTARDSWHGSQCPCKDRAFGIERKSLLAAALAYGLIKKGTVVVFELVES

SEQ ID NO: 190201 - protein, 114 aa, Zea mays
  Clone ID: MRT4577_105044C.1.pep
QHPRHINLGEMPEREKTRKEKKGRPKREQEQEQDGPPTPRGGWDPPTKPESGKRRKTPKTKQPFTPWRTWSPTLAPSKGWGRGDGPPFQGGPGKPKTKGPIHPPLPGWVGGRPL

SEQ ID NO: 190202 - protein, 113 aa, Zea mays
  unsure (1)..(113): unsure at all Xaa locations
  Clone ID: MRT4577_105045C.1.pep
GGYGGGGGYGGYGGGGGGGGGGYGGGGGXXXFRTXSPSRSLPRPPPSRLPPCSRPPTSPAAPSXPRASXAPXALYIPPYXSGRPRPRPTSCLPPSLPSPLRRLPMPAYPFSPA

SEQ ID NO: 190203 - protein, 87 aa, Zea mays
  Clone ID: MRT4577_105046C.1.pep
KKRSGSWPGSKAPLTGFKNAPFRGSGPPQLQPRGPALLQFAHGPPGGKMQGRGKLPGGIRGVPTPGGGFLNAPGFQISRGVPPLVGF

SEQ ID NO: 190204 - protein, 73 aa, Zea mays
  unsure (1)..(73): unsure at all Xaa locations
  Clone ID: MRT4577_105047C.1.pep
WSRKIATYMIIVGVTVFRLAENKNVWVFCPVLVEHTKXWQRAGSPFFFSIYPPGSPSLSFCFFLAVKNGFPPL

SEQ ID NO: 190205 - protein, 98 aa, Zea mays
  unsure (1)..(98): unsure at all Xaa locations
  Clone ID: MRT4577_105048C.1.pep
NILHYLGVPIAVRGHHSQSRTDSHILTSRAFQSHKGQSWCQKAASNAYQVPVVRMLCGHEDRNKTWLALLKCDGPTCCFLKFPPGLNXVPQVFLTWAS

SEQ ID NO: 190206 - protein, 61 aa, Zea mays
  Clone ID: MRT4577_105049C.1.pep
TALIWTKLVFFEPKAKNTFPSFRTQRSVKFASFVLIEALSLEPKQLSVHYDMIMMILRMSK

SEQ ID NO: 190207 - protein, 86 aa, Zea mays
  Clone ID: MRT4577_10504C.1.pep
KAVSPTLRLSVINFASSFSCLPGLNFLFSPLQCSFCPLCARAACFLLSGGSVVPVWYSRRSRQPCGFVRTSVWWGAIAQFERGRGD

SEQ ID NO: 190208 - protein, 43 aa, Zea mays
  Clone ID: MRT4577_105050C.1.pep
SNESSPQNICEKWLTFSMVFFIISSHKVPHQLMLVLIRSCCIL

SEQ ID NO: 190209 - protein, 129 aa, Zea mays
  unsure (1)..(129): unsure at all Xaa locations
  Clone ID: MRT4577_105051C.1.pep
DPRVRPGPRXLRLSRVRPTPPVSWSSPFFPANRTPRSHNRPIRDPSQPNNRAEIRSTLSGCILPSIYQGQPLLSSSFSPTTQSSEKSASEGKRRFRRVVSHPRRRCGHDSRPGCSSMISGVRAWPHLVR

SEQ ID NO: 190210 - protein, 123 aa, Zea mays
  unsure (1)..(123): unsure at all Xaa locations
  Clone ID: MRT4577_105052C.1.pep
IFVLNQPWQFAVAFHPCESRPFAVAAQIVPKAEKKPVANKPSEEEPATDKVEKASAGKKPKAVKRLLAVKSKDGGLGNXGKKKVYKFRXLYKIFIFKVLXMCSPTFASCSRPCSLLTSFLSTF

SEQ ID NO: 190211 - protein, 79 aa, Zea mays
  Clone ID: MRT4577_105053C.1.pep
TCSHGRHRDLSPSPPNRRAPCGLRPPCPTRGQSCAIRAGGFDGATQVLLPLAYFKGSHHHRIFLTKHLMCIKTHLVLQV

SEQ ID NO: 190212 - protein, 44 aa, Zea mays
  unsure (1)..(44): unsure at all Xaa locations
  Clone ID: MRT4577_105054C.1.pep
PTVSADFSEVFXKARRKHEALIEENSXAPLMLRLAWHSVGTLDV

SEQ ID NO: 190213 - protein, 111 aa, Zea mays
  Clone ID: MRT4577_105055C.1.pep
VFYQRFFPPPPDLFLKAGRPLEIVLEPPKNMDFPKFSLANVVMVPGGRNPRRVGVPKTRENPKGTLAPPRGAGSFLKCPVFPHLWPREPKKKIPFWGGQKGGAFYSKKVGL

SEQ ID NO: 190214 - protein, 45 aa, Zea mays
  Clone ID: MRT4577_105056C.1.pep
DEDEEEGRESRIGLSPEEGRQASYSASVSVWFPSLTESREDRTRH

SEQ ID NO: 190215 - protein, 34 aa, Zea mays
  Clone ID: MRT4577_105057C.1.pep
HHKVDITRSTLQSFNHKAHITMLHWFFFLVPHLF

SEQ ID NO: 190216 - protein, 77 aa, Zea mays
  Clone ID: MRT4577_105058C.1.pep
IYGMKATYVHVVIGLQYHDAPVVSSPTLCLFRISHPYLVIWQTVWFCLLQVMHSKPVNGVISLYFLVIFRHEVDLAF

SEQ ID NO: 190217 - protein, 95 aa, Zea mays
  unsure (1)..(95): unsure at all Xaa locations
  Clone ID: MRT4577_105059C.1.pep
VDRRRQVDRFWLPATAGGSCTDNAPSAAGGPEGALCALTGDKSKEIFSETASKSREIAPDGHQASRPLWGGGNLFFFNLPKPXILTIHSIYPIHY

SEQ ID NO: 190218 - protein, 88 aa, Zea mays
  Clone ID: MRT4577_10505C.1.pep
SRDQTVTLQLLTTSEQKMLTHNTKGLSIHSEYDHTKLIKDDRCSIADIVSSRILFYSRYGPQVLCQVSTMLKDDSLSSAVPIFSSGRR

SEQ ID NO: 190219 - protein, 258 aa, Zea mays
  Clone ID: MRT4577_105060C.1.pep
MEGSSNSPDGQSSGGSPEERGSGGSGGRGTGEPARSRWTPKPEQILILESIFNSGMVNPPKDETVRIRKLLERFGAVGDANVFYWFQNRRSRSRRRQRQMQAAAAAAAAAAAASSASNNSSPAASATVGLPSGALQYPLAMGGTAACQYEQQASSSSSSGSTGGSSLGLFALGAAGVPGTGGGGYFQASCGASSPLATGLMGDVDSSGGSDDLFAISRQMGFAAASTVASSVAPSFNAHHQQYYSCESPAATITVFHH

SEQ ID NO: 190220 - protein, 96 aa, Zea mays
  Clone ID: MRT4577_105061C.1.pep
SDAHISQVMVDYEFILHNSFLVLSMLFFFSRHRLQVYFRNKFMQCFSAMCWVQSYIGQSQVGYRFIFEISIFLRHRLQVYRSSPCNWSVMFHSIFS

SEQ ID NO: 190221 - protein, 97 aa, Zea mays
  Clone ID: MRT4577_105062C.1.pep
MAEDKVRRIFVGGLSWKTTERTLERTFGQYGNVIEAQSCNFNLTATADSERLQSLPFLYVRILTKLQEKKFTNQLSSLVSICGMMGSVKVNWRSMHY

SEQ ID NO: 190222 - protein, 230 aa, Zea mays
  Clone ID: MRT4577_105063C.1.pep
FGTRQSLPIYKLKKELIQAVHDNQVLVVIGETGSGKTTQVTQYLAEAGYTTRGKIGCTQPRRVAAMSVAKRVAEEFGCRLGEEVGYAIRFEDCTGPDTVIKYMTDGMLLREILVDENLSQYSVIMLDEAHERTIHTDVLFGLLKQLIKRRSDMRLIVTSATLDAEKFSGYFFNCNIFTIPGRTFPVEILYTKQPESDYLDAALITVLQIHLTEPERDILCFLTGQEEIDH

SEQ ID NO: 190223 - protein, 130 aa, Zea mays
  Clone ID: MRT4577_105064C.1.pep
GTWGSRGFSRGLGAKGPVFPFFGGGKKKKGLKGPGQKKFSRSQICFLGGPFPAPGGFFWGLCPPPSFFLVKRPFRGGPGFFQWGFGKIEFGERKGPPPPGFLKKGGFYQGLLRALRKTPPLKKRNRFWAP

SEQ ID NO: 190224 - protein, 82 aa, Zea mays
  Clone ID: MRT4577_105065C.1.pep
PPGKDDLCEQGIGGPNRGLNGGGEGVFQGERKIDNRAGTKKTPLGPGLIFKLKQQRGVQKKQKVLKIGQKRGEQKNQTKPFC

SEQ ID NO: 190225 - protein, 94 aa, Zea mays
  Clone ID: MRT4577_105066C.1.pep
HGTFLLDENEAIPGVAEDATTEDLDGGISCALLQPTRRNQPSQGERNRAKGLTVRRAGETRRTEVVLAGSRGGAAAGADHDAATSRRAWPHHGR

SEQ ID NO: 190226 - protein, 223 aa, Zea mays
  unsure (1)..(223): unsure at all Xaa locations
  Clone ID: MRT4577_105067C.1.pep
MLSSSHLVKLPLLPRGLLSYLPASILPSGRESTADAAPSTPPSSKKMSSXPAAAAAAASGQQQXAESAELARVFELFDKDGDGRITREELAESLRKLGMGVPGDDELASMMARVDANGDGCVDAEEFGELYRGIMDGAAEEEEEEDDDDDDMREAFRVFDANGDGYITADELGAVLSSLGLRQGRTAEECRRMIGRVDRDGDGRVDFREFRQMMRAGGLAALG

SEQ ID NO: 190227 - protein, 212 aa, Zea mays
  Clone ID: MRT4577_105068C.1.pep
ASCRPSSARPRSRRSRRRRRAAARAPPRASSRPRPPPRPPHPPPPSPPPTPPTPTATTTPPTPTTPPPPSTWRRPPTSRQRRRRGGGGSSCRATTTTTRAAGGRSGTRRWAARARTRTRTRTPPHRGGVGVAVEKESSDPRADFRESMTQMVLEMGLCGWDDLRCMLRRLLALNAPRHHAAILAAFAEVCAQLTTAAPPYHAAYDYDYHFHY

SEQ ID NO: 190228 - protein, 68 aa, Zea mays
  Clone ID: MRT4577_105069C.1.pep
DYPQPIPLNFSPYITFCLYFSPYFFISRSGIPLNTPPIPHYHYKISFSIPTINCLSTNKYVGTHSTVL

SEQ ID NO: 190229 - protein, 80 aa, Zea mays
  unsure (1)..(80): unsure at all Xaa locations
  Clone ID: MRT4577_10506C.1.pep
GTGAPATSGXALPEPATSSDSSSTGGSPKRRKRGEAAAANMAMALVPPPSQLSRPAQPWFPAAAPVEQAAMAPRVEQLVI

SEQ ID NO: 190230 - protein, 47 aa, Zea mays
  Clone ID: MRT4577_105070C.1.pep
SFYFKKHLTLGVFYKSWGHPPSAKSGETGLVSHAQANPLLVGTPSLV

SEQ ID NO: 190231 - protein, 73 aa, Zea mays
  Clone ID: MRT4577_105071C.1.pep
VLVGWPDLSGRPPRLVGTPLGGLSSTGQLPSRSQHSRVPIRRISITRPAKASFGFWLALSFSELAQHTTVVRH

SEQ ID NO: 190232 - protein, 55 aa, Zea mays
  Clone ID: MRT4577_105072C.1.pep
AVHVDLERATVVIPGKVGDVDLFLPELPPLVANVVRHKGVHLPNPLFLPAKIPPP

SEQ ID NO: 190233 - protein, 78 aa, Zea mays
  Clone ID: MRT4577_105073C.1.pep
RPGRRQETDQTSVSVVAQLHYSNVAHRKAADSLQAHHYLVPAYLHHKEGVHVDRLHLAGAIVAGQLLNLRLSTPSTEH

SEQ ID NO: 190234 - protein, 99 aa, Zea mays
  unsure (1)..(99): unsure at all Xaa locations
  Clone ID: MRT4577_105074C.1.pep
KGGFPPKEAVPPPFKVPKKTMGPPPLFPKKLELARVFFHPGPGGGKNQVGSPKTLGKLLXKTGLTNPTPGGKCFFFFGLLNPPPAFKKGLKIWAFFGGT

SEQ ID NO: 190235 - protein, 262 aa, Zea mays
  unsure (1)..(262): unsure at all Xaa locations
  Clone ID: MRT4577_105075C.1.pep
VWYRSQTRDPVKVQEEATDFTQSRHPEASFNRTAQKTPYTIHEAAKSDRGPKGNYAIAKFTDVSKPSSHSDKLASLRSYRXARGLCGRCAEKWSHGHMCASSVQLHALEEVLELVSTDGEVENPRACFSXIMMALSQATWTGTEGPQTLKLKGSIQSTPLLILVDSGSSHTFFSTRLSPSLHGFSTRPFPLSVRLANEDVLCCEHQLLQVEWFIQDFSFVSDLLLLPITTYNXVVGMDWLEAHSPMRIDWASKLMAIPYNGS

SEQ ID NO: 190236 - protein, 61 aa, Zea mays
  Clone ID: MRT4577_105076C.1.pep
PMTLQIAYNLGLDDISLVVAAAMKRTFVAGSGAAAKEAAISSVGDSHHEPSTHVTELRRTS

SEQ ID NO: 190237 - protein, 49 aa, Zea mays
  Clone ID: MRT4577_105077C.1.pep
LQFALNIHKVMIRFQKTRANEMFSVCSCQYLLLPHADKIFMFFYSRKKR

SEQ ID NO: 190238 - protein, 76 aa, Zea mays
  Clone ID: MRT4577_105078C.1.pep
MGGKAISSPVPVEWYPPLAVVMGSVGLMFPPPFFIYEATSSRRNRSLSKEIPPPGVAFVFLGFGSLFGLLAKGVYV

SEQ ID NO: 190239 - protein, 116 aa, Zea mays
  Clone ID: MRT4577_105079C.1.pep
PWGGESRGPPKLMEQRPLRGPRSPHYGGPLNPFFWGGPGNIGFPQQGRALGPGIQREGGSKTGGPPFIWGQKGWWPGLQTGPPPGLYGVKLPPHTLGGQQPRGYTAGAQGTGRAAA

SEQ ID NO: 190240 - protein, 65 aa, Zea mays
  Clone ID: MRT4577_10507C.1.pep
FSGPVFPDGAPDPNVDMHIANRGDHSGTVLSCYHNEDGRAKGRPDKQEGRRALLDTWLEPKLADP

SEQ ID NO: 190241 - protein, 60 aa, Zea mays
  Clone ID: MRT4577_105080C.1.pep
LKLLNYRALELKVLAQVRVRFSLASDLGHSVRITDSFMIIIIIHSPEEAYSSNIMVSTVV

SEQ ID NO: 190242 - protein, 351 aa, Zea mays
  unsure (1)..(351): unsure at all Xaa locations
  Clone ID: MRT4577_105081C.1.pep
MHSSIPQTIKYPQIARWLARMEKQLPALTGGSKAATTTPFYLALDHRAAATSSSPPAEAPTLPPSAAAVSDPSRQSNSDRGSEIIKAKIMSHPLYPALLRAFIDCRKVGAPLEIVGRLSALADDVETNSDGRQEEQPADPELDQFMEIYCHMLVRYRQELTRPIQEADEFFKSMEAQIDSFSLDDNGYEEGGGSSDEDEQETXLGRPSGPXTGSPSGEGKELKNHLLNKYSGYLSSLWRELSRKKKKGKLPRDARQKLLHWWQLHYRWPYPSELEKAALAESTGLDAKQINNWFINQRKRHWKPAPPTMALGTPDYRMGQHGGGASSSSASAGLRVQGQYFTGGSSYPRGP

SEQ ID NO: 190243 - protein, 99 aa, Zea mays
  Clone ID: MRT4577_105082C.1.pep
IGWPQELENMSILFTLCLDVSHLPPMSYHILYASGNTTNDMQRGGSHSKTYWITPSNSTAPSTDSCCCAINNATISCSCSNDTKTTTKVLLMHKAETVV

SEQ ID NO: 190244 - protein, 51 aa, Zea mays
  Clone ID: MRT4577_105083C.1.pep
LAPQYPMRRTPADVPPSSIRRDFMSSTVLIAKGGAYGQNAGEMRCGAIDRG

SEQ ID NO: 190245 - protein, 50 aa, Zea mays
  Clone ID: MRT4577_105084C.1.pep
SIGTNARGDKYENRHVYTVAVARMTHHTLPLLELNIAWGPQACMHVAYRR

SEQ ID NO: 190246 - protein, 41 aa, Zea mays
  Clone ID: MRT4577_105085C.1.pep
RWKVITLPCTYTTLPCTYTIMVACNSKTRKMINLKKKKKGA

SEQ ID NO: 190247 - protein, 749 aa, Zea mays
  unsure (1)..(749): unsure at all Xaa locations
  Clone ID: MRT4577_105086C.1.pep
MSVASAAAAASLIASTSLSVPDRIRLHPRPALPPLPCFRRRSRVCLVRAILEDRPSPPAEEDAKRYGLNGNGSGLGYDDAAVQAYLGSNGNGSASGNGGAVKQNPEVAGSSAAIVPAPVPPAEGERRRKERVEEIGREDAWFKQSSAEVSVAPGGRWNRFKTYSTIQMCSRNSLGVFTFIFKAWLNNQKFTYRGGXTEEKKIMRRKVLAKWLKESLLRLGPTFIKIGQQFSTRVDILPQEYVDQLSELQDQVPPFPSETAVKIVEEELGASVNEIFDRFDFEPIAAASLGQVHRARLNGQEVVIKVQRPGLKELFDIDLKNLRVIAEYLQKVDPKSDGAKRDWVAIYDECASVLYQEIDYMKEAFNAEKFAENFKKLDYVKVPEIYWAHTTPQVLTMEYVPGIKINRIKQLDKLGVDRKRLGRYAVESYLEQILSHGFFHADPHPGNIAVDDVNGGRLIFYDFGMMGSISQNIREGLLEVFYGVYEKDPDKVLQAMVQMGVLVPTGDMTAVRRTAQFFLNSFQERLAAQRKEREMATAELGFKKQLTKEEKFEKRKQRLAAIGEDLLAIAADQPFRFPATFTFVVRAFSVLDGIGKGLDPRFDITEIAKPYAKELLRFNDAGVEIVVKDAKKRWERQSRAFYNLFRQPDRVEKLAQIIERLEQGELKLRVRTLESERAFQRVAAVQKTIGYGVAAGSLMNLATMLYFNSIRGPATIAYSLCAFFGLQVLIGLVKVKKLDRQERLITGTA

SEQ ID NO: 190248 - protein, 427 aa, Zea mays
  Clone ID: MRT4577_105087C.1.pep
TRPAEYLQKVDPKSDGAKRDWVAIYDECASVLYQEIDYMKEAFNAEKFAENFKKLDYVKVPEIYWAHTTPQVLTMEYVPGIKINRIKQLDKLGVDRKRLGRYAVESYLEQILSHGFFHADPHPGNIAVDDVNGGRLIFYDFGMMGSISQNIREGLLEVFYGVYEKDPDKVLQAMVQMGVLVPTGDMTAVRRTAQFFLNSFQERLAAQRKEREMATAELGFKKQLTKEEKFEKRKQRLAAIGEDLLAIAADQPFRFPATFTFVVRAFSVLDGIGKGLDPRFDITEIAKPYAKELLRFNDAGVEIVVKDAKKRWERQSRAFYNLFRQPDRVEKLAQIIERLEQGELKLRVRTLESERAFQRVAAVQKTIGYGVAAGSLMNLATMLYFNSIRGPATIAYSLCAFFGLQVLIGLVKVKKLDRQERLITGTA

SEQ ID NO: 190249 - protein, 400 aa, Zea mays
  Clone ID: MRT4577_105088C.1.pep
MDNALRITDASSRRPTNLGKDLAMTEPAADRKCQSLVMENNAVKEKNPGEKSKSAVIGHADSYPSQFLETNLGKQQYRNGYKNQEFREKDIFNHSNSSAFSRYGNKRIEPSGEIQFFPSPCVIGQGHVNGKNPVFQPDGVLLPPNEHNTGESTRQARISLDSRTEGAAILCSTSAREDAGANSSSHRKDSMSHPSYGFIPVPIPVGATMPYHYGAILQPVYYPQSPLMHCDSAGINKAAIQHASGQPNYHEAPGKPSHVLIEHKQSEENHQLHHSRQILRESGEPIDMARAHVDRANQTASCSQGICKGSGCTCSGEADINANTMVALESGNESGIQNGDRSRREAALMKFRMKRKDRCFEKKVRYHSRKKLAEQRPRVKGQFVSQKLNSATTTDAEADS

SEQ ID NO: 190250 - protein, 155 aa, Zea mays
  unsure (1)..(155): unsure at all Xaa locations
  Clone ID: MRT4577_105089C.1.pep
MEKALLRYCASFLTPDDKRLILRIKDQAKQMIQSEVLQAMVQMGVLVPTGDMTVVRRTAQFFLNSFQECLTAQRKEREMATAELGFKKQLTKEEKFEKRKQRLATIGEDLLAIAADQPFRFPXATFTFVVRAFSVLDGTGKGLDPRFHITEIAKP

SEQ ID NO: 190251 - protein, 265 aa, Zea mays
  Clone ID: MRT4577_10508C.1.pep
MLPSTPHPTVLSVIHSEIPTILNVLVATRPAERQVLVRDDETGKSVAFDQRIRNLKEVYTSDGCKMFCRGSVQTILPANRNWRAGRLCTSLEEKITEMEQEATEIKQINSERLDRKRKLFADRDSIDLELRQLKRKREDEELHVERKKAQLVDTKKISIDNSHAAAVDTSELVVEMMQVKEDIENQELVVQKINLKLTDALQEENNRRASYKDFIESVHAEMGSISDAERELQLVEEKIHDAEQEKAHYERVMETKFLSPITATE

SEQ ID NO: 190252 - protein, 242 aa, Zea mays
  Clone ID: MRT4577_105090C.1.pep
TVLSVAGGAVDFLVKPVRKNELRNLWQHVWRRHAMNCQTNGSENNAASNHISANVANGSKTGENSDEESDAQSFGSKRDTEIHSVEAVQDIRRDEVAGSSKNNELQNKSYDGVNTKVDVSKYTNGAPSGSEKNVRSKCLNGITSAKVAEQIMDNALRITDASSRRPTNLGNGLAMTEPAADRKCQSSVMENNAVTENNPGDKSKGAAIGHADSCPSEFMVTNLGKEHHLNGYKPRIQGKRYL

SEQ ID NO: 190253 - protein, 145 aa, Zea mays
  Clone ID: MRT4577_105091C.1.pep
QSARLPQICRTTCCSSPTHQQPTSAISRQQGKLGGGSLRHGVQAYSRHQQQPMANAVDDPMADEAGVEDAFTQEITDYSYVPRYHVLSWMETVEGMVAGVAALPPVYLILNRGAIFFYISSSSCSPCVAGAGFNRSREEMLVDLL

SEQ ID NO: 190254 - protein, 301 aa, Zea mays
  Clone ID: MRT4577_105092C.1.pep
MVKLATARECRAYSLGAGAGSGTGLRNRWEYINAGVYIFAAVLLVGGFLAQLLPWGGPSSPGLVVAAIGLAGLLAVNTHDLLAHAAGVDYRLGMVVGLDAQMGLVELGVPAVQIVGTALMLVAVVFFVIQMERGYRHSLAMHGLNLLIAGPALWCLGSVQNICQFYERASGHVQLLQKSVQIPLLLGSTLFLIAGIVNRHDRRSRHSGFVVLGRNWAWFCLFGSLLFLAGGLLNLLKVFKTQQMGGRGLEKLRGGSQERLALEREGKVPLILEHGHGGRRGPAIPPPPPGSYKDALVSSAS

SEQ ID NO: 190255 - protein, 194 aa, Zea mays
  unsure (1)..(194): unsure at all Xaa locations
  Clone ID: MRT4577_105093C.1.pep
MSCSEEHLFQLXADARGVRDLPXQGGADGKNGFVSIRNRPCKVEEVSTSKTGDDGHGKCHFVDRDIFDGXKLEYIVPSSHNCVFLYANRTEYQLIDISEEGFVSLLTSHGNSKDDLILPTDETLVAQIKERFDSDKDLDVTVQSAMGEDHSCAVKDVHPHQLPWLCGRNPTVSQLRSENKRITTCIATETFTLT

SEQ ID NO: 190256 - protein, 102 aa, Zea mays
  unsure (1)..(102): unsure at all Xaa locations
  Clone ID: MRT4577_105094C.1.pep
MARMVQRXLTYRERHKYAXTEYNLTLLGNTPGGRLSDQDTKKRASGPKCPVIAKKILGISHQRPAEYKTCKELLNRTTEIPTYGXALSGSACERXIIRAFLD

SEQ ID NO: 190257 - protein, 145 aa, Zea mays
  Clone ID: MRT4577_105095C.1.pep
FGTRLFSFIRLFLSRAAESRLEKVRRTAPPPAAEKPKPPRAVSEEEVRACLQRLDSLESLCGHLATRPAQIPEDKERVLLSSFERIRSVEADLERTKRVLNATVAKQKALVEEVALESVQELPRAKVHNSSPIQCPPPSSNGLLE

SEQ ID NO: 190258 - protein, 166 aa, Zea mays
  Clone ID: MRT4577_105096C.1.pep
MWVTPWCTVGSQTQIAGAPDQEGVLHRIAEPYKKRSSLMAPNAGAGLPRPTPARTALSNSKVSNIDKYEPEQDLSALSPRLSAMQSSLSIYMIAAQSAGATEDVMKMYLPIVLGQALGPQVHQATKQQDPPLVPEVFQIMRNRISDIGEAAMIKDFYSGSNDSAFI

SEQ ID NO: 190259 - protein, 43 aa, Zea mays
  unsure (1)..(43): unsure at all Xaa locations
  Clone ID: MRT4577_105097C.1.pep
MATAGKVIKCRAARAWEAGKPLSIEEVEVAPTXAMEVRIMILY

SEQ ID NO: 190260 - protein, 87 aa, Zea mays
  Clone ID: MRT4577_105098C.1.pep
YAYSFVLLEYGSSRVGSLTNRASSLTNRAMMLAQFVKKFKRANLSRAGLTMNRVSHQVSSISSSPTPDRFTVCPNHTGKFYKHTGKP

SEQ ID NO: 190261 - protein, 52 aa, Zea mays
  Clone ID: MRT4577_105099C.1.pep
WYWRYKHSESCVIIYTYVVRSQKGKRAKGRSYIFTTQLLLMLLVRTASCVFE

SEQ ID NO: 190262 - protein, 45 aa, Zea mays
  Clone ID: MRT4577_10509C.1.pep
RADPCEFRRHTTNYNAEHRKRPEKGRGIMQDRHRARQSRNSHTLY

SEQ ID NO: 190263 - protein, 153 aa, Zea mays
  unsure (1)..(153): unsure at all Xaa locations
  Clone ID: MRT4577_1050C.1.pep
AGTTERPPIPTIESSPPPPPRXGVKKKKRAPTKGNQKSPKPKGKTAPPRKTNQXPRAKQTPAPQGRKGPKKKGTSKQGAPRKKKPGPRDQKKKTNGAPNGXPATGRGNSPPKKKGPPQXPPTPRAEGPPQKNXTAPEQEKAPREGQGPPPQKG

SEQ ID NO: 190264 - protein, 186 aa, Zea mays
  unsure (1)..(186): unsure at all Xaa locations
  Clone ID: MRT4577_105100C.1.pep
MATGPRSLHALLGGGAVADLLLWRRRNASAAAVVGATTVWFVFERAGYSFPSVLSNALLLLVAILFFWAKSALLLNRPLPPLPNLEVSDAIVEKAANXXLVWINRXLAVGHDIAIKRDRKVFIKDQVDEKRWCSVQCTIKAHRYHHPAGQSAKQKKTEKKTFCCIVEHLWLSSESDSPFIFDPLFH

SEQ ID NO: 190265 - protein, 198 aa, Zea mays
  Clone ID: MRT4577_105101C.1.pep
MATGPRSLHALLGGGAVADLLLCRRRNASAAAVVGATAVWFVFERAGYSFPSVLSNALLLLVAILFFWAKSALLLNRPLPPLPNLEVSDAVVEKAADYALVWINRLLAVGHDIAIKRNRKVFIKVILILWLVSFVGMLFNFLTLIYIGVMLSLLVPPLYEKYQDQVDEKVGVAHSIISRHINTIVTRAGQSAKEKKTE

SEQ ID NO: 190266 - protein, 76 aa, Zea mays
  Clone ID: MRT4577_105102C.1.pep
GFALTTYVALPLLYWTDTYYARRFPLISPHVYDDAGRPYDTGRVLNRDTFTLNLGGYDAYSRINVSVLFAVNYGIG

SEQ ID NO: 190267 - protein, 74 aa, Zea mays
  unsure (1)..(74): unsure at all Xaa locations
  Clone ID: MRT4577_105103C.1.pep
XDISLAALTDEERAQRDQRARLAQHAEGARQYSLAPATTAPAQWLPLLQTLRPGQALAQNTVGTKRRVARQCCL

SEQ ID NO: 190268 - protein, 198 aa, Zea mays
  Clone ID: MRT4577_105104C.1.pep
MATGPRSLHALLGGGAVADLLLWRRRNASAAAVVGATTVWFVFERAGYSFPSVLSNALLLLVAILFFWAKSASLLNRPLPPLPNLEVSDAIVEKAANHALVWINRLLAVGHDIAIKRDRKVFIKVILILWVVSFIGMLFNFLTLIYIGVMLSLLVPPLYEKYQDQVDEKVGVAYSVLSRHIDTIITRAGQSAKQKKTE

SEQ ID NO: 190269 - protein, 63 aa, Zea mays
  Clone ID: MRT4577_105106C.1.pep
VIRLLLRILWRGLMRSAPAMLVFSRIYASMYHSKVHMGPQKPIFKDPLLASRFPFSRSFGGAA

SEQ ID NO: 190270 - protein, 97 aa, Zea mays
  Clone ID: MRT4577_105107C.1.pep
SYKSAAAPGRGESFMDRLSCKPTAKVTQGGTERPASQLHYTRSLQSLFAESEMTTSPDTSAHELLSRGRPGLTGLLVDIECHERAALLRNERRGHPQ

SEQ ID NO: 190271 - protein, 45 aa, Zea mays
  Clone ID: MRT4577_105108C.1.pep
KMQPSSSSDPKGKEKIRKEREHFSLSRHQRQAASVRTPRVADAWS

SEQ ID NO: 190272 - protein, 328 aa, Zea mays
  Clone ID: MRT4577_105109C.1.pep
MVQYNFKKITVVPPGKDFIDIILSRTQRQTPTVVHKGYAISRIRQFYMRKVRYSQQNFYEKLSTIIDEFPRLDDIHPFYGDLLHVLYNKDHYKLALGQINTARNIIAKISKDYLRLLKYGDSLYRCKCLKVAALGRMCTVVKRISPSLAYLEQIRQHMARLPSIDPNTRTVLICGYPNVGKSSFMNKVTRADVDVQPYAFTTKSLFVGHTDYKYLRYQVIDTPGILDRPFEDRNIIEMCSITALAHLRAAVLFFLDISGSCGYSIAQQAALFHSIKSLFMNKPLVIVCNKTDLQPLEGLSEDDMKLVMEMKAEAMKTITQAVGPNEEG

SEQ ID NO: 190273 - protein, 69 aa, Zea mays
  Clone ID: MRT4577_10510C.1.pep
QRGLKTMGLGYSLAFMNPIQTITFLHNAHNSPISRFDPQYLSYKLSLMCENTIVQSYTIQQAFATCILP

SEQ ID NO: 190274 - protein, 104 aa, Zea mays
  unsure (1)..(104): unsure at all Xaa locations
  Clone ID: MRT4577_105110C.1.pep
ATGLRVFGYGSVIWNRGFDFDYXILRSIRGYTRTFNLACMDQRGTPEHPARTCTLXTRHEDICCGIAYCXRGGPHDELTALQYLERXGWEYDQKISIDFYKEGD

SEQ ID NO: 190275 - protein, 149 aa, Zea mays
  unsure (1)..(149): unsure at all Xaa locations
  Clone ID: MRT4577_105111C.1.pep
GPLRAKKXXXENPXXQPYXXQXAXXXGIXPXXPXXLQQSSALLHQLPLVHLVXQGIXFFXLQQLXLXNLTXYSXQXHSPPFNQLXSXNFXSYXQQQQLPFXXLPXXYPXQFLPFNQLXXXNSPXYLXXQQLLPFXXLXXXXPSTFXTQP

SEQ ID NO: 190276 - protein, 52 aa, Zea mays
  unsure (1)..(52): unsure at all Xaa locations
  Clone ID: MRT4577_105112C.1.pep
NESLQRENFFIPHTKMSTTKNTGCTTCXRGPVQICYLPITLIIMTSLNDLKA

SEQ ID NO: 190277 - protein, 108 aa, Zea mays
  Clone ID: MRT4577_105113C.1.pep
DSCVRIPMQACRRGRLDDRRAIFAGARDRNVTGPYNLRSFLPLPAVPVNTSFLPDALNVCSLLLQGDRIHHMLRVSALGLVLRFTHLEPRLRLLRQNTPFHLRLQAHL

SEQ ID NO: 190278 - protein, 69 aa, Zea mays
  Clone ID: MRT4577_105114C.1.pep
AHCSLLCFRLRYDFSLDTKYSSSSGLSSSTLQRRFSGGVRHHYSSKVSGSKPPCRSGELESSGRRTGEQ

SEQ ID NO: 190279 - protein, 44 aa, Zea mays
  Clone ID: MRT4577_105115C.1.pep
GGSRVGRWTRWTWQPSYSSNSMYLRNNDDAPDSGLHCPVWSRSV

SEQ ID NO: 190280 - protein, 65 aa, Zea mays
  Clone ID: MRT4577_105116C.1.pep
IDCSIVKQLSKKCLVLSAHKCENKQRNNYIACMQGNALSMILVLCYSLRPGLQAWARMERERKMV

SEQ ID NO: 190281 - protein, 215 aa, Zea mays
  unsure (1)..(215): unsure at all Xaa locations
  Clone ID: MRT4577_105117C.1.pep
PPPGPXSVPALFLPFPSPFFPGLPPDFVETRIPPPPWPEPPPPPPSPWPNESVPGEGEGPPIPYPPPPAGWPFPXPAAPPVFPFGKRPVGPPPXLGWPPPWAPPAFPFLLPVRFLCGLVRGPPFPPGAPFALVPPPLGPRPGPPPPAPPCVGIPPPRGPAPGPFLQKKKKKKKKKKKKRKYKKEKRKKEKEKKKYPASGRARLERANYMQISPSG

SEQ ID NO: 190282 - protein, 188 aa, Zea mays
  Clone ID: MRT4577_105118C.1.pep
GTTDGGSGSHPTTNIFSESLDAGSTNRDGTASRPPIQKYALSSHITPWLTPKATPKIMSTSASPRQISTTATPKLMSGATSPTKSRIEAHMSMTPWYPSSKQSSAASSPPRGGSNPGRTPRVDGKEFFRQARSRLSYEQFGAFLANIKELNAHKQSREETLKKAEEIFGPENKDLYLSFRGLLNRSMP

SEQ ID NO: 190283 - protein, 95 aa, Zea mays
  Clone ID: MRT4577_105119C.1.pep
EPRVLKATDCNYKCKFYSKSASDDGRKHPNITQGGQDTNKGFSTPQPGLTAKQIHASRSVFLLLVTVITCALWGDLLCVLLQGGQVLGWLGEIPL

SEQ ID NO: 190284 - protein, 78 aa, Zea mays
  unsure (1)..(78): unsure at all Xaa locations
  Clone ID: MRT4577_10511C.1.pep
MADISLLLAEHFEKTARRGAPGGDSGSDSGTAGETRNFWAAATVWSSCVESASAAAYGVRFTVSVXHVXPKTGLALAA

SEQ ID NO: 190285 - protein, 151 aa, Zea mays
  Clone ID: MRT4577_105120C.1.pep
MASEMLAAAAAAAKRPSTPASSTTTTVSSLGEDEILEIFLRLPDLPAFVRAALTPPLVARRRPLLPVIPPPLPRPPPGATPRAVPRPDRHRDPHVRLRAPLRPRRRCRPAATSSSPPSRRRTTLPRGGRSPTAAKAAFSSGTCSTGRRSPP

SEQ ID NO: 190286 - protein, 87 aa, Zea mays
  Clone ID: MRT4577_105121C.1.pep
VLRRSSKGATTRRRSSLTRLRLHLGFQDQSALKSMPKMHPDSDCDRIDMVGKIRRLSNQPNWFHHKIRLESTGIVKTSQRSESVPAL

SEQ ID NO: 190287 - protein, 81 aa, Zea mays
  Clone ID: MRT4577_105122C.1.pep
HSQWCPPPACLIVAGARTTLVSSSPCSFHSGRCPCWLSYFAIVCFRGFSGSPIMGAAIIVRWDRGVNTVVQQTSSRIPSLR

SEQ ID NO: 190288 - protein, 81 aa, Zea mays
  Clone ID: MRT4577_105123C.1.pep
LLQGQGKKGFRLLLCCCQGLRLKILGPFHRAGVCPVPLNVTRFSKTPPLGLGLKLSLRFGLARKLGPFSPKAPGDLTHLEF

SEQ ID NO: 190289 - protein, 184 aa, Zea mays
  unsure (1)..(184): unsure at all Xaa locations
  Clone ID: MRT4577_105124C.1.pep
MTPAAGNGSATAAPPPPFLMKTYEVVDDPATDDVISWGPGNNSFIVWNTPEFARDLLPKYFKHSNFSSFVRQLNTYGFRKVDPDRWEFANEGFLRGQKHLLKTINRRKPSLQGNSQPQQPQSQNAPVPSCVEVGKFGLEEEIERLKRDKNVLMQELVRLXTAQQTTDHQLQTLGKRLQGMGVTA

SEQ ID NO: 190290 - protein, 99 aa, Zea mays
  Clone ID: MRT4577_105125C.1.pep
KWIELLKQSDEYWEMGDIVHTLTNRRWLEKCVTYCESHDQALVGDKTIAFWLMDKDMLSACVRALIEHRLPWTLLRRQLRCCIRPPPPRARRSRHRRPR

SEQ ID NO: 190291 - protein, 471 aa, Zea mays
  Clone ID: MRT4577_105126C.1.pep
MTPPFLMKTYEVVDDPATDDVISWGPGNNSFIVWNTPEFARDLLPKYFKHSNFSSFVRQLNTYGFRKVDPDRWEFANEGFLRGQKHLLKTINRRKPSLQGNSQPQQPQSQNAPVPSCVEVGKFGLEEEIERLKRDKNVLMQELVRLRQQQQTTDHQLQTLGKRLQGMESRQQQMMSFLAKAMQSPGFLAQFVQRNENSRRRIVAANKKRRLPKQDGGLESESSAASLDGQIIKYQPSINEAAKAMLRKILNVDSSHMFESMGNSDNSNNNNNNLLEDYMPAGQAFESSSSTRNSGVTLAEVPANSGLAYVGTSSAICSPPAAPEMQCPVVLDNKAYKQVASMSAVPPVSSDMGIIPEFSDLADLVSVDILGGAFEMMPGPEFPLPEEGDDGTTMYNNNDEEAQSLPGIINSIWEQFLVGSPLSTDNEEVDSAGGLYAQEDGWSKVGNIANLTEQMGLVSSTNHRDSGNGLY

SEQ ID NO: 190292 - protein, 600 aa, Zea mays
  unsure (1)..(600): unsure at all Xaa locations
  Clone ID: MRT4577_105127C.1.pep
HRWRAGGARSFHSPFLSIAYTSGGAGTPKTLSPHTTANRNHSAPPSPSRPGPGRAPLHDAGVRQVLSGSRWWEDAGRCHGPCRRRRGGRVDGDHGGGAPSHGARGGGGAPXTAHAAAAAGNGSATAAPPPPFLMKTYEVVDDPATDDVISWGPGNNSFIVWNTPEFARDLLPKYFKHSNFSSFVRQLNTYGFRKVDPDRWEFANEGFLRGQKHLLKTINRRKPSLQGNSQPQQPQSQNAPVPSCVEVGKFGLEEEIERLKRDKNVLMQELVRLRQQQQTTDHQLQTLGKRLQGMESRQQQMMSFLAKAMQSPGFLAQFVQQNEKSRRRIVAANKKRRLPRQDGGLDSESAAASLDGQIIKYQPLINEAAKAMLRKILKLDSSHRLESMGNSENGNFLLENYMPGAQAFESSSSTRNSGVTLSEVSANPGLPYGGGGGTSSGLSAICPPEIQCPVVMDNMSSNQVPSMSAVPPVSKATIDMGIPEFSALADLVNEGSVDIPGGAFEMPGPEFPLPEGDDSVPIETDETMYNNNDETQSLPGIIDSFWEQFLVGSPLSADNDEVDSGSPQENGWSKVGNIGDLTEQMGLLSSTNHRDSGNGL

SEQ ID NO: 190293 - protein, 125 aa, Zea mays
  Clone ID: MRT4577_105128C.1.pep
PQSYWTEYSLMRQSCISPSNFAVISSLSSCAGLKLLTAGQQVHCDAVKWGLDLDTSVSNVLVKMYGECGAMSDYWKVFNSMAEHDEVSWNTMMGVMASSQTPISEIVKVFNNMMRGGLIPNKVTF

SEQ ID NO: 190294 - protein, 171 aa, Zea mays
  Clone ID: MRT4577_105129C.1.pep
PQSYWTEYSLMRQSCISPSNFAVISSLSSCAGLKLLTAGQQVHCDAVKWGLDLDTSVSNVLVKMYGECGAMSDYWKVFNSMAEHDEVSWNTMMGVMASSQTPISEIVKVFNNMMRGGLIPNKVTFIMAEHDEVSWNTMMGVMASSQTPISEIVKVFTNMMRGGLIPNKVPF

SEQ ID NO: 190295 - protein, 60 aa, Zea mays
  Clone ID: MRT4577_10512C.1.pep
PEGCILVSQVMLLATCVFVIKFALCQLLVSVFHHGCYHDPCSLQHVMWVNVACLSGQVLC

SEQ ID NO: 190296 - protein, 72 aa, Zea mays
  unsure (1)..(72): unsure at all Xaa locations
  Clone ID: MRT4577_105130C.1.pep
PHAALCGPSRPRSRLPMASPPARPQGPAXFXSMLSRLWYLAFIVLSIDYIFFFFLNVYELIQFCALFFFFFF

SEQ ID NO: 190297 - protein, 138 aa, Zea mays
  Clone ID: MRT4577_105131C.1.pep
YIAPPLGFSGIPPHTAARTRDGRSNGGSNYAAAMVNVPKTKKTYCKNKECRKHTLHKVTQYKKGKDSLSAQGKRRYDRKQSGYGGQTKPVFHKKAKTTKKIVLKLQCQSCKHYSQHPIKRCKHFEIGGDKKGKGTSLF

SEQ ID NO: 190298 - protein, 175 aa, Zea mays
  Clone ID: MRT4577_105132C.1.pep
MALASRSAAAAVARVLLALAASAAEAGSNSPAPAPAADCISQTARLIDCIDYAQKGSSARRTSAACCGEVKTAVASPGIEGCLCSLAGSNSTNLGFPIDMKRELALPGARGASNAAFSKCNIYELSPTEAPAPAAVGGPSSGGAKASSPHAATSTPPMTATALMAAAAPLLAYHC

SEQ ID NO: 190299 - protein, 160 aa, Zea mays
  unsure (1)..(160): unsure at all Xaa locations
  Clone ID: MRT4577_105133C.1.pep
MPRAIGGGAAYKGGIKGYWKRRGYDRIDXRGAAPPAPSLQRSLAAARRSLSXGGRRRRGWRVRRRAGVLGRRLLRALSPRRLLARLRDAYVNAMLRLASSAAVAGYGGAGPYCTAADPFARPRPLTREYDEKALVEIYRSILARGEAGPVVAAARLPAVL

SEQ ID NO: 190300 - protein, 111 aa, Zea mays
  unsure (1)..(111): unsure at all Xaa locations
  Clone ID: MRT4577_105134C.1.pep
MCPKVAIFLALSLLFAATAHDCXPNCSGPGNPTSPTVPTPSTKLHRRCPIDTLKLKRVQPIRLRLSQVQLPQHEQCCPPLEGLLQLDTTLCLCTDIKANVLEIHLNAPLSL

SEQ ID NO: 190301 - protein, 112 aa, Zea mays
  unsure (1)..(112): unsure at all Xaa locations
  Clone ID: MRT4577_105135C.1.pep
RPTELCRTPVLPLHKRTCAELLSYVNLIKEDGRSIGAELTNTCEGILNLLVSHLKPSSTAAESQXFYRKNTGDYHRNLAEFNTAADRKESAENTLADYNADQDIALAELAPT

SEQ ID NO: 190302 - protein, 63 aa, Zea mays
  Clone ID: MRT4577_105136C.1.pep
SSRPSHRLLYGHGLSPSYSSATFKDALRVYKIFAYHVLHLYVWKQLVSGLVLHHARSAGRGLP

SEQ ID NO: 190303 - protein, 94 aa, Zea mays
  Clone ID: MRT4577_105137C.1.pep
CSPKTESVGVLSITPVKFGDFDEVPGLSLPSDSYRDHNTSRGHRHTEDVAHLKNVQKDASELKPETDTCTTIDEASPIMVQGTETPNHDSGLIA

SEQ ID NO: 190304 - protein, 305 aa, Zea mays
  Clone ID: MRT4577_105138C.1.pep
MCSIFPSHSVIGVSSQAQAAGGGGGGFQSPESRASSMSSGSGGGGSLPSPSGGPACSRSWSISEDSLRRYVGYASESCIQELLAASSDSGRGGDDDDGWKVLVYHNGVEISKRRTGPAHVFRSRWLLQDVSPEQFMAAASAVDAAKQWESDQLVESSYIRELGDDLSIIHLKFGDASSSTRRPARRRDLVVYERRQAMDDGTLVVAVASLPKEIAAGLLPPPAATGKGGGGSVVGRSLLLQSGWVVERLDGDAGSCVVTYVVQLDPAAGWLPRCIVSRLNSKLVMIIAKLRRIAQATVPAAAAEV

SEQ ID NO: 190305 - protein, 53 aa, Zea mays
  Clone ID: MRT4577_105139C.1.pep
SQLVMRQASLKKHKQQQDHCCEENEESLDKPNLSVCPILQQIGQNLHKNGSHN

SEQ ID NO: 190306 - protein, 91 aa, Zea mays
  Clone ID: MRT4577_10513C.1.pep
FRKLSSGVPRIPPWQRIQYSIRPVAASQSSHSTVQDDQSGGTCLELALGYNEIMIATYVLEKVAPTALGPRTHVSDRHRSELCGLQKVFWF

SEQ ID NO: 190307 - protein, 186 aa, Zea mays
  unsure (1)..(186): unsure at all Xaa locations
  Clone ID: MRT4577_105140C.1.pep
MCILSLDALCCRNAKCSVRPHLDHRPLNRSTTHTADPLKWGQGTKGLTGTHLDDSNTXGGGYRVPLEKIERAVLSDRNAPLSSPPSTGASALXSARPRLEGSRERLFDCTMNATHTYGVTTAIXGLLNTRRTKXLSVLQKEFILYLLVCCFGASSRNGYTLPPEITRAPMIARIHXLTQDYSSIRF

SEQ ID NO: 190308 - protein, 117 aa, Zea mays
  Clone ID: MRT4577_105141C.1.pep
LEELLVYLMETLSKCGSGSFKSLDNNQRFLAKLKAEDAAVDRVLISHTHRGLTLLFEPLPNHVVYQGCAGPWPVQCFRCARQVFDPSWLVMSPAIVYRVQRCWCLMVSRKYVSKILY

SEQ ID NO: 190309 - protein, 82 aa, Zea mays
  Clone ID: MRT4577_105142C.1.pep
NFFRQIRVGKHVGFVFLFTQRPACSLRLRCGCGCGGLQYFSLYGLEGGTPNSCNIFILQSAPPPHKRVLLKKKNPPPLYANN

SEQ ID NO: 190310 - protein, 91 aa, Zea mays
  Clone ID: MRT4577_105143C.1.pep
KKEETGAGRAIRADAAGQDRAKDDQGHPRAEGSRDERRPRHDGQGDQAGGHAEQHEGDKQRHRQRQASGLLQRQRASMEHHMQPRGQRPQR

SEQ ID NO: 190311 - protein, 586 aa, Zea mays
  unsure (1)..(586): unsure at all Xaa locations
  Clone ID: MRT4577_105144C.1.pep
XSTSDGLWGGSVGRESSSSMINWSVQNKDQSFFHQLEGVPLGLHSNKVTTLFNYARLLXGVGDSVRASIFYRFIIFKYPDYIDAYLRLAAIAKQRNNVQLSIELIGDALKIDERYPIRNSXRPTLGSLELQSDEAWLTAKEHFRNAKEATKGDTYSLLQLGNWNYFAANRPEKKAPKIEATHREKAMELYQTQVLKQHRSNMFAANGIGILYAEKAKWDVAKELFTQVHEAASGSIFVHMPDVWINLAHTYFAQGHFQQAVKLYQNCLRKFFHNTDATILLYLARTHYEAERWQDCRKTLLRAIHLAPSNYLLRFNVGVSMQKFSASTLQKTKQTVDEVRATVTELQNAIRVFSLLSVASTYHSHGFDERKIETHVEYCKHLLDAAKVHRDAAEQAEQQNKQKMEVARQIALAEEARRRAEEQRKFQLERRREEDELKQVKQQEEHFQRVKEQWKTSSNTPGKRKDRSKTEDEEVGNKKRRRKGIRRKDQKTKMQYGEEEDEYKDEPEADDDYADLARYNGADNSERAPDHLLAAAGLDDSDAEDDMGHPQSAIERKRRAWSESEDDEPVKKPAAQPSPGADGLSE

SEQ ID NO: 190312 - protein, 116 aa, Zea mays
  unsure (1)..(116): unsure at all Xaa locations
  Clone ID: MRT4577_105145C.1.pep
MSGGTIHTPTTFYPFADANXGDSGAATGSKDYVHVRRDLRQGGRXLSTTRTLRRXFSYIKILNDLKKEFCCNGTVXQDPELGRXVSWTVSTXQNLKCFLAQRRIVKKEHIKIHHVY

SEQ ID NO: 190313 - protein, 68 aa, Zea mays
  Clone ID: MRT4577_105146C.1.pep
EFLRLHPINGGSYICCSVECCIHGLRHQLAAVHCVVIQDELSESHAQKSKPSSGSREHVHGVDDNISV

SEQ ID NO: 190314 - protein, 68 aa, Zea mays
  Clone ID: MRT4577_105147C.1.pep
RKHDPVFRPVQATELQPVDMKNPLGARAIQDGPALVRRQIRSVQHQLRCVVGARNAVVQRMANDDDLP

SEQ ID NO: 190315 - protein, 65 aa, Zea mays
  Clone ID: MRT4577_105148C.1.pep
LGALSGCYGSLLFYKMFGSPKPRSCHEAPAKSEPRAPPGAFPAWNQSPPRAPRQASLMDRRKGPP

SEQ ID NO: 190316 - protein, 104 aa, Zea mays
  Clone ID: MRT4577_105149C.1.pep
CCSRVRLDMIMRGLLALLAGSDCAQTGRLRLLPCSKMVNHWAPRPVDCRYLHASDFRREDLHTRPLLDAHREVAARDDRHLRMYARVEIYLTRTRVGMVQLHTN

SEQ ID NO: 190317 - protein, 158 aa, Zea mays
  Clone ID: MRT4577_10514C.1.pep
MAPPAVSISPICCVPYPASGPRRARTPPSSLRRFPRFAARRSSGGGGGTRPEPKPDDNESKAVLDAFFLGKAFAEALTERVESVVGEVFSVVGQWQAEQQKQVQDFQEEVVQRAQKAKEKAATEVSDDKGAKSLREPSATIVATTTTSSPPATPTQTE

SEQ ID NO: 190318 - protein, 50 aa, Zea mays
  Clone ID: MRT4577_105150C.1.pep
INPNKVAPVKTQLSNPPKQIQVSVAPHSFTPLYLALVKPKLVGEIKCVCC

SEQ ID NO: 190319 - protein, 93 aa, Zea mays
  Clone ID: MRT4577_105151C.1.pep
GPNVGQISRTGGTRGPPPTNFICVYPAPLPSMKGGGKKPLSGSLTLRRSNLTAKNVGSLLVGHPENKFNKGAFKTKPVLGLENLQPPAPKEAV

SEQ ID NO: 190320 - protein, 82 aa, Zea mays
  Clone ID: MRT4577_105152C.1.pep
HNHRSPLFRSPANLIPPATPKPLARSLAPRAHRHPRIPCLTISLTTKCASSTMPSASSITTATVSSHPPSLELSYVHCVTTH

SEQ ID NO: 190321 - protein, 49 aa, Zea mays
  Clone ID: MRT4577_105153C.1.pep
RCSMPSCRVCTSARTCTNKFRLSVQCSVYQPISLFPLLLADPASLMLMA

SEQ ID NO: 190322 - protein, 116 aa, Zea mays
  unsure (1)..(116): unsure at all Xaa locations
  Clone ID: MRT4577_105154C.1.pep
QGIPPGQSPVLALKIFLVXGSANTILLHFLGVSSSLELLRFVTLFHTKIAPVPKPPLRFVTLFSTKTAPVPKTALRSPQILLSWKVNPPLWWWFQTVVPSGFIVPLDLPSFLTTLA

SEQ ID NO: 190323 - protein, 80 aa, Zea mays
  unsure (1)..(80): unsure at all Xaa locations
  Clone ID: MRT4577_105155C.1.pep
EREKIKIHKLVRSCVKLTEICYTNNSSKQGEFCNLYKIAEILVVXLRPPTEKCSIRYQEGMWGNRRLIVTHESADECASA

SEQ ID NO: 190324 - protein, 91 aa, Zea mays
  Clone ID: MRT4577_105156C.1.pep
MSFRSIVRDVRESFGSLSRRGFDVRISGLPGLSGHHHRGKSFGPPGEPHGGAVVADQNGWVGLPPELLRDVMKRLEEGESTWPSRKDVVAC

SEQ ID NO: 190325 - protein, 303 aa, Zea mays
  Clone ID: MRT4577_105157C.1.pep
MPGDGGAAGSARWVCAVLSVFPPPSKAKNASFEQGANFAITGATALDTDFFRKRGLGSTVWNSGSLRTQIQWLRDLKPSLCSSAQGTRCKEFFAECLFVVSEFGGNDYNAPTLSGTDLREAYKLMPHVIRAISDGVEQLIAEGAKDLIVPGVMPSGCFPVYLTMYADPKEGHGSRTGCLKRFNTFSWVHNAMLKRALVKLRAKHPGARIIYGDYFTPIIQFILQPKKFGFYKQPPRACCGAPGRGPYNFNLTAKCGEPGASACADPKTHWSWDGIHLTEAAYLHIARGWLHGPFADQPVVQAS

SEQ ID NO: 190326 - protein, 51 aa, Zea mays
  Clone ID: MRT4577_105158C.1.pep
CLPFVILTEVTFLFLLPLSYREDLQGKVNMCPWDSHSWDTHVCHFCQLILS

SEQ ID NO: 190327 - protein, 343 aa, Zea mays
  unsure (1)..(343): unsure at all Xaa locations
  Clone ID: MRT4577_105159C.1.pep
MPGDGGAAGSARWVCAVLSVFPLLAAAAAAAAQGRYRAVFSFGDSLVDAGNLVTEGIPDYLATARPPYGQTYFGYPTGRCSDGRLVVDFIAQELGLPLPPPSKAKNASFAQGANFAITGATALNTDFFRKRGLGSTVWNSGSLRTQIQWLRDLKPSLCSSAQGTRCKEFFAECLFVVGEFGGNDYNAPLFAGKDLREAYKLTPHVIRAISDGVEQLIAEGAKDLIVPGVMPSGCFPVYLTMYADPKEGHGSRTGCLKRFNTFSWVHNAMLKRALVKLRAKHPGARIIYGDYFTPIIQFILQPKKFGFYKQPPRACCGAPXRGPYNFNLTAKCGEPGASACADP

SEQ ID NO: 190328 - protein, 65 aa, Zea mays
  Clone ID: MRT4577_10515C.1.pep
HAMAQYICHTMVHPLHHPSVVTADDHTTGVYAVNTAKHISNAAACCTCIICITVVVVPAMVPIFF

SEQ ID NO: 190329 - protein, 72 aa, Zea mays
  unsure (1)..(72): unsure at all Xaa locations
  Clone ID: MRT4577_105160C.1.pep
SNLIKFGPVPLLLCAGDKKKXXHLKKILFFLLIFNKNPFHFSQNAFSNLQTHSCTINYLIFFFFKVNFFCFH

SEQ ID NO: 190330 - protein, 102 aa, Zea mays
  Clone ID: MRT4577_105161C.1.pep
TASVLYLETTIIEMIQICRTSYTSNMTLNAAHTPSRFPEVPALQLPCQKRALTPEGDTTVPCQASRLSLWLNQCRQFSLEIVDVSMGYKAQEMKAVYIPITT

SEQ ID NO: 190331 - protein, 42 aa, Zea mays
  Clone ID: MRT4577_105162C.1.pep
MANAMMVLKGLDLTVERYDTVEAVSLTVIALNHVVRGKGKDL

SEQ ID NO: 190332 - protein, 71 aa, Zea mays
  unsure (1)..(71): unsure at all Xaa locations
  Clone ID: MRT4577_105163C.1.pep
GNIIQNGPPLKALLTNRTRIYLIPSQNTNPQENVVVQPKPKPIPLTKNKNLPPMKIRSETQPNSLPCHGVX

SEQ ID NO: 190333 - protein, 105 aa, Zea mays
  Clone ID: MRT4577_105164C.1.pep
MSSSWTESQNNLFERALAVYDKDTPDRWHNVARAVGCGKTAEDVKRHYKYLKTDVKHIETEEGGRGSQSSSPAGAGAGGSGSSSSSSWGRDNGDKRMTRHPNMPQ

SEQ ID NO: 190334 - protein, 105 aa, Zea mays
  Clone ID: MRT4577_105165C.1.pep
MSSSWTESQNNLFERALAVYDKDTPDRWHNVARAVGCGKTAEDVKRHYKYLKTDVKHIETEEGGRGSQSSSPAGAGAGGSGSSSSSSWGRDNGDKRMTRHPNQPQ

SEQ ID NO: 190335 - protein, 74 aa, Zea mays
  Clone ID: MRT4577_105166C.1.pep
SARAMTALLKKNAKFVWSDKCQANFEESKKRLTTAPVLILPDLSKNSIYCDASRLGISARSSLAPSLTTSTHMV

SEQ ID NO: 190336 - protein, 88 aa, Zea mays
  unsure (1)..(88): unsure at all Xaa locations
  Clone ID: MRT4577_105167C.1.pep
HIVVKIYSFSPSQLGVGAPFAVFLASRMLYITSEVFLFNSYSSGQVRKVVSIEPFILPSMVRAINQAISAHWHGFIQAGTCYRIXLVF

SEQ ID NO: 190337 - protein, 93 aa, Zea mays
  Clone ID: MRT4577_105168C.1.pep
RGLWFNRKTLKTPGFKKIKKSPREPKTRVKTGNGGPRPKKKKPFFWNVKGPPRKKKTLSFFQLKPSLCGFFFGPGGWVPLFFNTPEGFPKKKI

SEQ ID NO: 190338 - protein, 43 aa, Zea mays
  Clone ID: MRT4577_105169C.1.pep
VHLQRSWSSVGTSHIAHEGQWDGQPGPPLPPQNCWPGIGHRRR

SEQ ID NO: 190339 - protein, 49 aa, Zea mays
  Clone ID: MRT4577_10516C.1.pep
ISARLVEIVGAPAERGERGSEQHPHGSPPLAWVSPSKLMAENPSTRIKA

SEQ ID NO: 190340 - protein, 91 aa, Zea mays
  unsure (1)..(91): unsure at all Xaa locations
  Clone ID: MRT4577_105170C.1.pep
LCEAEADISCFDSSLPGVRVVLKHRYADFIVHEVARDGALMQLTXIDLHTDSVGVNEDDMADPSAEADHSQALQSFQAICGDADCNALRGL

SEQ ID NO: 190341 - protein, 53 aa, Zea mays
  Clone ID: MRT4577_105171C.1.pep
NGGRDLPPEMLSELYHSILPNGIKTTPGPGLGYFEKAPNRWIDLMREAKSTSP

SEQ ID NO: 190342 - protein, 50 aa, Zea mays
  Clone ID: MRT4577_105172C.1.pep
NSMSACKQDTCVIIPLEYPQDDFHTLKLISHLHVVTVGMVPSRQNSGSGR

SEQ ID NO: 190343 - protein, 98 aa, Zea mays
  Clone ID: MRT4577_105173C.1.pep
LLAHRMPIKAEIRACDSHTMPKQVSAGKRAAARPHTSALQRSSPCQRPLSPVSRCKFKRMRACTSNIGLLLRHSVRPPDYLAYLVDMLVYLNVYDLEL

SEQ ID NO: 190344 - protein, 98 aa, Zea mays
  Clone ID: MRT4577_105174C.1.pep
YLIFLGGVVLGWGVVLKPPNPHLLKKNERKPKIIYPPIHFNKWGLRTILKAPKKTLLGGAKMGKKQKNPGRDERGPLLSSFDQQEKLAFDKKTHSVQL

SEQ ID NO: 190345 - protein, 83 aa, Zea mays
  Clone ID: MRT4577_105175C.1.pep
TKNVFGFACMNMRLYEACLHARVRSQRASLRSLTRLSFLHAGRLYWLIQQPNKMCFKVPRMQLHHLSSEPNMRIIISCGSSIG

SEQ ID NO: 190346 - protein, 192 aa, Zea mays
  unsure (1)..(192): unsure at all Xaa locations
  Clone ID: MRT4577_105176C.1.pep
MQASREMARLGVLVLVALLAADTTTAQLAQAQGSSYSYGSAPPPPSPSPPAQTPPPAPTPPTPKLRYNFYKRSCPYAEDIIKQAVRNATNVNPGLGAGLIRMAFHDCFVRGCDGSVLLDATPANPRPEKLGPPNFPSLRGYEVVDAAKAALEKACPGVVSCADVVQFAARDAVFFLSGSXVVYSLPGGRFDG

SEQ ID NO: 190347 - protein, 238 aa, Zea mays
  unsure (1)..(238): unsure at all Xaa locations
  Clone ID: MRT4577_105177C.1.pep
MICITGALCHDRAPGPNLISPAVXHATVVSISSIEELRAIISRGSERRHTAGTNMNDESSRSHLILSVIIESRNLQTQSYARGKLSFVDLAGSERVKKSGSAGKQLKEAQSINKSLSALADVIGALSSDGQHIPYRNHKLTMLMSDSLGGNAKTLMFVNVSPAESNLEETYNSLMYASRVRCIVNDTSKHVAPKEIMRLKKLIAYWKEQAGKRSDEDELEEVKEERISKERADNRLTG

SEQ ID NO: 190348 - protein, 103 aa, Zea mays
  unsure (1)..(103): unsure at all Xaa locations
  Clone ID: MRT4577_105178C.1.pep
AHLSAADRDASCQTQACHDTVWLSXYHHTVSGVPISESPDCLYIXSHAYRDTQYAYSDKAEGSKCQYGQLVNLTGSLDYILRMGCADXSGITPTELDLRILCT

SEQ ID NO: 190349 - protein, 152 aa, Zea mays
  unsure (1)..(152): unsure at all Xaa locations
  Clone ID: MRT4577_105179C.1.pep
RVDPAFAXXGLLQLRAGLGVFANLRPAVVLPQLVDASTLKREVAEGVDIMVVRELTGGIYFGKPRGFGTNDKGDDIGFNTEVYSATFYSQLHSETNCKIMSHKPWLTVLKIILKLTTYEHDKKNGKRTENWSRLYYCTNIFITALTYFSKCL

SEQ ID NO: 190350 - protein, 85 aa, Zea mays
  unsure (1)..(85): unsure at all Xaa locations
  Clone ID: MRT4577_10517C.1.pep
MASIDASSRAVPLVRALDKLMEASSAPGNGTALRHVAVAXGLRGXNTCAPLRRYEGAASEDQNLXSTSSCTASSDYGVPILFSDI

SEQ ID NO: 190351 - protein, 1197 aa, Zea mays
  unsure (1)..(1197): unsure at all Xaa locations
  Clone ID: MRT4577_105180C.1.pep
VERKNNLRRIPLESLLESIQNQHDAAGKREPWTYVSVGPQTREKFTLEDMLCFQKDSIPTSLLKISNDLVSRSIKLFHVILKYMGIDSPAIISLEERIEFVEKLYKHTLKRSELRDELFAQISKQTRNNPDRGWSIRAWELMYLCASSMPPSKDIGAYLSEYIHFVAHGATTDADVRVLALNTLNALKRSVKAGPRITIPAWEEIEALLTSRKLTTIVSFLDETFEESXLDMAQLCDALRLAGLXKLSVYMIVFLMQTQVKKKYLRILSTWYNQLLMDXRLHICIWSTWFWKDFHYLWFRFLHCKLVFKKRLFRESDEAVTDPMFVQLSYVQLQHDYILGNYPVGRDDASQLSALQILVEIGFIDNPESCVEWISLLERFLPRQVAITRAKRDWELDIISRFQLMEHLSKDDARQQFLRILRTLPYGNSVFFSVRKIDDPIGLLPGKIILGINKRGVHFFRPVPKEYLHSAELRDIMQFGSSNTAVFFKMRVAGVLHIFQFETKQGEEICVALQTHINDVMLRRYSKARSANSVTSQNDVNHAYKPPNIEMYEKHVQELTKTAEDSQKQADQLREDLQLKTKQETEMQEELEGLRDTLQSERQSSKDIKNELDKLKSLCDEKESALQAALMEKSRLETRLTSGQGRERDTLTTVGSVNNDIEMLAKLKEELKSYQKELDASKEVSKKLMSEKNILDQKVQRLERMKNEEKSAMEKVYADECCKLKSQIAELEQKLEVATRSLNVAESNLAVRNAEVDSLQNSLKELDELREFKADVDRKNQQTVEILKRQGAQLVELENLYKQEQVLRKRYYNTIEDMKGKIRVFCRLRPLSDKELSFEEKNIVCSPDEFTIAHPWKDEKSKQHIYDRVFDANTSQEEVFEDTKYLVQSAVDGYNVCIFAYGQTGSGKTFTIYGSENNPGLTPRATSELFRVIKRDGNKYSFSLKAYMVELYQDNLVDLLLPRNAKQLKLEIKKDSKGVVTVENVTVVSISSIEELRAIISRGSERRHTAGTNMNDESSRSHLILSIIIESTNLQTQSYARGKLSFVDLAGSERVKKSGSAGKQLKEAQSINKSLSALADVIGALSSDGQHIPYRNHKLTMLMSDSLGGNAKTLMFVNVSPAESNLEETYNSLMYASRVRCIVNDTSKHVAPKEIMRLKKLIAYWKEQAGKRSDEDELEEIQEEXISKERADNRMTS

SEQ ID NO: 190352 - protein, 141 aa, Zea mays
  Clone ID: MRT4577_105181C.1.pep
APSAGRLPRADFAPWTKLTTRPRQPPSRFGRGCCAIAVTYKTEPRLLLNHLASSLEIPRHRERAESLREGRGSCRTYESTMPPPKSRWKGVENHPCKWSMAAASLDVVGAPRHRNSSSESEFARDPRRIASRELQTAFPPR

SEQ ID NO: 190353 - protein, 103 aa, Zea mays
  Clone ID: MRT4577_105182C.1.pep
MNTSTDAFAAICIDLGVGGRDKKTNHTTPHSDDDYVKLHVKLYRLLDRRTKSNSNGDILKRLFMRIIKSPPICMRRLVKFMERKEKSIAVNVGAIADDKTDHE

SEQ ID NO: 190354 - protein, 122 aa, Zea mays
  unsure (1)..(122): unsure at all Xaa locations
  Clone ID: MRT4577_105183C.1.pep
MLGAAAPAPRVARPRIPLSPTISRTSDQEPELGSGGSGAGDGAGCSGGWSDQRGGGHEGDGEEEKMEHSLSMADKLNLDYAELVGAGGVMGYMKSGCQISSAAXAYHGLMLCVMHTQLPVRP

SEQ ID NO: 190355 - protein, 57 aa, Zea mays
  Clone ID: MRT4577_105184C.1.pep
VKLGRPRQVSLPISDLCLGWGRSRLSGSGDAPRRMRGQHFRDRYLGSSTIVYGYSTP

SEQ ID NO: 190356 - protein, 51 aa, Zea mays
  Clone ID: MRT4577_105185C.1.pep
KKIWGGFPGVSPLLIFFFQSRKKKKKKKKKKKKKKKKKKKKKKKKKKKKKK

SEQ ID NO: 190357 - protein, 48 aa, Zea mays
  Clone ID: MRT4577_105186C.1.pep
IRLELICLVISHPKGSWILRTCEGYTATANDGSHRLERRRWLPFDANI

SEQ ID NO: 190358 - protein, 123 aa, Zea mays
  unsure (1)..(123): unsure at all Xaa locations
  Clone ID: MRT4577_105187C.1.pep
MEHAXAFLARALTTPLPASAALPRGRPARVGGAAVVSERKPPGAVASTTNYVVPVDAAPFGITRPARRDPSGPQQARAGRHRAGLLPGRLRLRPRIPWYHAHKRVSFYAPGSQGGWWDSIAER

SEQ ID NO: 190359 - protein, 67 aa, Zea mays
  Clone ID: MRT4577_105188C.1.pep
LGQRGVAVHQLRDSLQLWQAPFITPVLFTLRHKGLVVAREPSTIWSRIPHRQGVEHSSLTMAQDRSC

SEQ ID NO: 190360 - protein, 52 aa, Zea mays
  Clone ID: MRT4577_105189C.1.pep
GLVVEPPLLMGVGLMPMPKGGQRDEKEWSGFFPKAGFRESKILKEFGAGVAF

SEQ ID NO: 190361 - protein, 190 aa, Zea mays
  unsure (1)..(190): unsure at all Xaa locations
  Clone ID: MRT4577_10518C.1.pep
GRRCRSGTPRSLRAPAPAPARRTAPRGGPPRXIAXAPPGTPGSGAAAAAAASPPAAAGPAPAPRRRAAAAAAGPAAAPGGRPRDPAGRRAPRRRTPRGGSGGCTPAAAGGGAAASGAPAPSSPPGNPCLARPGQRLSGFAPGFPGRVRASWLAVVGGGKVGATRCAWCFLRICRYGAVAMRGRRPPASYP

SEQ ID NO: 190362 - protein, 68 aa, Zea mays
  Clone ID: MRT4577_105190C.1.pep
KRRFGPNPAFGGILGKFVKKKLLGLFCFSQFCLNVLARAMAHDTGRFFFFIPTVRFVKERFHSALIYM

SEQ ID NO: 190363 - protein, 144 aa, Zea mays
  Clone ID: MRT4577_105191C.1.pep
YPFHTVSHKAGQILIPNMGQFCIQVVTAVVCVHVVCRAPEVQGLQTARVLLTASLSTICSSLGQPRPHVPFSSIAIHTLELYRSTAIRFLERTTLVYVGCPAIVETEHYPAPPRRIWRQTRDRCLHLAAAHKGLGVARRDVVRQ

SEQ ID NO: 190364 - protein, 45 aa, Zea mays
  unsure (1)..(45): unsure at all Xaa locations
  Clone ID: MRT4577_105192C.1.pep
SYRTRDGENQGAVIWISEGLFNVKKWWSIIYSNFFLFXKKLGVSN

SEQ ID NO: 190365 - protein, 77 aa, Zea mays
  Clone ID: MRT4577_105193C.1.pep
VLGLIDWLFLQFGPPFLLRGQVYIAMPGVGCPWSGFRAAIGKARRPFSVWKGFPRLLVSHLCRSFQSSTCCKLQQRS

SEQ ID NO: 190366 - protein, 48 aa, Zea mays
  Clone ID: MRT4577_105194C.1.pep
PTPLQNNHRNRSSGTFKEGISTTLFGLATPRKQLDSHIVVICIERTRG

SEQ ID NO: 190367 - protein, 188 aa, Zea mays
  unsure (1)..(188): unsure at all Xaa locations
  Clone ID: MRT4577_105195C.1.pep
MEKGSAPAMALALAMLLACSSIAAVTAQETERIEGSAGDVLEDNPVGRLKVFVYDLPSKYNKKLLKKDPRCLNHMFAAEIFMHRFLLSSAVRTFNPEEADWFYTPVYTTCDLTPKGLPLPFKSPRMMRSAIQLIATNWPYWNRSEGADHFFVTPHDFGACFHYQEEKAIGRXGILPLLQRATLVQTFG

SEQ ID NO: 190368 - protein, 82 aa, Zea mays
  unsure (1)..(82): unsure at all Xaa locations
  Clone ID: MRT4577_105196C.1.pep
EXVEISGEPSGRQSEIPTTFEVLFDILPWSRKSGAPPLPFGLQGPGPRRXPIRXREDIGQVGTLCAGXSTSRSKITXRSSLR

SEQ ID NO: 190369 - protein, 415 aa, Zea mays
  Clone ID: MRT4577_105197C.1.pep
MGTGSARALALALAVLLACSDVAVVTAQETERIEGSAGDVLEDDPVGRLKVYVYDLPSKYNKKLLKKDPRCLNHMFAAEIFMHRFLLSSAVRTFNPEEADWFYTPVYTTCDLTPKGLPLPFKSPRMMRSAIQLIATNWPYWNRSEGADHFFVTPHDFGACFHYQEEKAIGRGILPLLQRATLVQTFGQKNHVCLKDGSITIPPYAPPQKMQTHLIPPDTPRSIFVYFRGLFYDTGNDPEGGYYARGARASVWENFKNNPLFDISTDHPPTYYEDMQRSVFCLCPLGWAPWSPRLVEAVVFGCIPVIIADDIVLPFADAIPWEEIGVFVAEDDVPQLDSILTSIPTDVVLRKQRLLANPSMKQAMLFPQPAQPGDAFHQILNGLARKLPHGSNVFLKPGERALNWTAGPPGDLKPW

SEQ ID NO: 190370 - protein, 85 aa, Zea mays
  Clone ID: MRT4577_105198C.1.pep
LLLKGGQILPSLGAPVSPGQPGKATRGGHVGQGVIHKRWSRGLGLLDMFPRSRVEAEKMAPFCGTIEGYDRFHLIQFYSLMFLFI

SEQ ID NO: 190371 - protein, 419 aa, Zea mays
  unsure (1)..(419): unsure at all Xaa locations
  Clone ID: MRT4577_105199C.1.pep
IGYLEAGRVRKPTSARLAVILACSDVAVVTAQETERIEGSAGDVLEDDPVGRLKVYVYDLPSKYNKKLLKKDPRCLNHMFAAEIFMHRFLLSSAVRTFNPEEADWFYTPVYTTCDLTPKGLPLPFKSPRMMRSAIQLIATNWPYWNRSEGADHFFVTPHDFGACFHYQEEKAIGRGILPLLQRATLVQTFGQKNHVCLKDGSITIPPYAPPQKMQTHPIPPDTPRSIFVYFRGLFYDTGNDPEGGYYARGARASVWENFQKHPLXDISTDHPPXYYEDMQRSVFCLCPLGWAPWSPRLVEAVVFGCIPVIIADDIVLPFADAIPWEEIGVFVAEEDVPKLDSILTSIPTDVILRKQRLLANPSMKQAMLFPQPAQAGDAFHQILNGLARKLPHGDNVFLKPGERVLNWTAGPPGDLKPW

SEQ ID NO: 190372 - protein, 136 aa, Zea mays
  unsure (1)..(136): unsure at all Xaa locations
  Clone ID: MRT4577_10519C.1.pep
GPVGDDDEDDDDDDKGDDELDGPEGDGSGKSKPSRSEKKNPKALLXPGMEPITGGNPGPGKKSQNMPFGISKPDGVQNPNLDPHVIFREGKIQDPNFQLQTPASKQFKGSDPDPMIPKPETSSPGPEDHQEEGGDQ

SEQ ID NO: 190373 - protein, 68 aa, Zea mays
  Clone ID: MRT4577_1051C.1.pep
SSGRPGRYKLFFFFFCFFLFFFFFFFFFAQITSPACHANTTGWQTSPIPGQGKHRGQPPTRGAPPQHN

SEQ ID NO: 190374 - protein, 170 aa, Zea mays
  Clone ID: MRT4577_105200C.1.pep
GKKIFKKKNLKIVLRKFVVKRKKEKKNGGGGQRAEKKKQTEAQKFQSQQSLGLGQKSGGNMFKKKKRGGGKTTGSQKKKRKGQSLNEKKPLLVGAVPATNLGKKIKRGAPARTSSPDPTRGGALFGVVENTPRFGKRGPTFEFLAFLGGVAFKKPRTKRSLAKPLRGAEG

SEQ ID NO: 190375 - protein, 63 aa, Zea mays
  Clone ID: MRT4577_105201C.1.pep
FSIQLNINNYTLHRRAGNLEIEIKIELDKYPSDGSCPARLLLLKSRASMQPCRRAWASRWRTA

SEQ ID NO: 190376 - protein, 133 aa, Zea mays
  Clone ID: MRT4577_105202C.1.pep
MALAGKASVALFLAVNLAVFAMASACGGNCPTPTPSTPSTPTPTPASFGKCPRDALKLGVCANVLGLIKAKVGVPPTEPCCPLLEGLVDLEAAVCLCTAIKGEVLGIKLNLPVDLSLILNHCGKTVPTGFKCL

SEQ ID NO: 190377 - protein, 64 aa, Zea mays
  Clone ID: MRT4577_105203C.1.pep
NPGGSMEFFFPPPDPSSFFPPSVGFFAPGPFSVFKVPGTLPLKEGPPPKFSPGVFFFPPNYQVF

SEQ ID NO: 190378 - protein, 111 aa, Zea mays
  unsure (1)..(111): unsure at all Xaa locations
  Clone ID: MRT4577_105204C.1.pep
DKPRCSQPSLLDFMPRPYRWSPPPCSLIMRMPLSREITAWVFDSLALVVVLVGIKGATTAVDRWCGWYTGARFPLIIVQHHPPDLVAQDLFHQAPSXAPRSSAVSRRQESL

SEQ ID NO: 190379 - protein, 129 aa, Zea mays
  Clone ID: MRT4577_105205C.1.pep
WFGRFLARLVPPPRWRSPVGFGKAFFFLGSWFRAPLLSSVLELEPGLLARAGLCPPFSGWFWVGKGVPGFLVGILRVGFRFSAGIVGYSCGDSVGGFCRYFWADASAYANLVGALVGFRRFFHRICFFI

SEQ ID NO: 190380 - protein, 82 aa, Zea mays
  Clone ID: MRT4577_105206C.1.pep
NLAISVCSTCTISISNASQLVQPWRLCQESFRSLRTSALFISATSFSSLSITLSCKAFKLVDNARCCHARYQSRSVGNTPND

SEQ ID NO: 190381 - protein, 125 aa, Zea mays
  Clone ID: MRT4577_105207C.1.pep
LPHIMCNRPYRTIDRIRGIIITIEAIITLDCYIVIPGKNRSWPSRGSMVSSGRWSTGLKEANWRVPAPYLIVSIAYVGHGSARRGRRRQRRGGSSSRTRHAARRAPHDGTAARGGQLWCSLPQRP

SEQ ID NO: 190382 - protein, 44 aa, Zea mays
  Clone ID: MRT4577_105208C.1.pep
PVVRWLLTILGHTGASRGRCWLESIYYPLRRATLRRSWAPCRAI

SEQ ID NO: 190383 - protein, 78 aa, Zea mays
  Clone ID: MRT4577_105209C.1.pep
RACFINHGTGRRPLGGEGQYATERRQRGWEMHLHSCSSCWGCPHREARPSPREEQERDMARTAGWPPRTGDPCRSPTG

SEQ ID NO: 190384 - protein, 53 aa, Zea mays
  Clone ID: MRT4577_10520C.1.pep
GVYCDLPNCSIRSCFVKSCQLLKKKKKKKKKKKKKKKKKKKKKKIKKKKKKGA

SEQ ID NO: 190385 - protein, 218 aa, Zea mays
  Clone ID: MRT4577_105210C.1.pep
MQMMLFCHRVTVSYQVEVQEECNKQQNAERELQSALQKVQDLLIRYASPESRLNVCLLMKSHVFLQSKELEKSYMNELRQQKALKEMLEKQRQEIDVMRRQQEEAYAALYNANEQKVTLEQRISEIELYVKDKEDELARNKHQLEALQADCDRIQQERDAAIREATELHEKNRLGVFAPSEALNTKFSLIELQQATQDFNPMFKVGEGGFGSVQKKVS

SEQ ID NO: 190386 - protein, 63 aa, Zea mays
  Clone ID: MRT4577_105211C.1.pep
HEIGWFPGAGVESLGRRWGQFLFLCCLEWQRSCRDFFRCMFLRCCNRYFCSVCCHAFISPSNM

SEQ ID NO: 190387 - protein, 69 aa, Zea mays
  Clone ID: MRT4577_105212C.1.pep
LTINWLYSGCMQVRRGRSTTPHHAARRRRRRRSVRHGAARASDRRWSVGVSWCRRAPAWASIGIFFARP

SEQ ID NO: 190388 - protein, 120 aa, Zea mays
  Clone ID: MRT4577_105213C.1.pep
TGVGAGAWVPRFSFRFRLRPHRCSSLQSAESSRFRDLSGSHRPGGGESGGVAVAGAAAISRALALCRATCSPAQGALRRQVPGGFYDKMASSDIPPQKSQAPVDDSQNSQILTSKSCCTK

SEQ ID NO: 190389 - protein, 67 aa, Zea mays
  Clone ID: MRT4577_105214C.1.pep
ISIHPFHSSSGPPTLSAGSQLLKLSNISFLALIISHNEHYPNFLLTFPFLPLFPLLLTTFHKPAYIQ

SEQ ID NO: 190390 - protein, 257 aa, Zea mays
  Clone ID: MRT4577_105215C.1.pep
MEKKVAEDGKASGPKIPPRPHGNRLGSFRQQFHHLRPISRRLGEAHGFLSTWRRILDRHLANSMSRFEGPPEPSVSETARHASSLGRMTTRLRARRWQREAENPTSIDSSTPDSGQPVNNTFDLPRRSSNPFPSEGMDLLRHIAFAGLEDSERFATAVSELRRIARPSPYGASTSSNPPNPEPIDGTHIAMALAADQASNSSTMAVIQEDAAFAESAGEPSNAGSSRSLRRRRGSGALGSLDVDGGDLHQNKRRRLN

SEQ ID NO: 190391 - protein, 67 aa, Zea mays
  unsure (1)..(67): unsure at all Xaa locations
  Clone ID: MRT4577_105216C.1.pep
SSCXCVSSCKCGKNHPXLQETSTAAQATVVLGVAPEKKDAPEFREDAXHHGEDAHGCSCGGNCKCDP

SEQ ID NO: 190392 - protein, 161 aa, Zea mays
  Clone ID: MRT4577_105217C.1.pep
MAADDAARSSRRMDLNLYLGLPRAPRARRPDLGFDLALGTPMLSSSSPSSSAASADAPPLETDPLHPPYSPSRADLMRPPTPAHEPYNPFAPEAHPPYVPPPPLPVAGALPVLADELEFGFSDAHLGLVERLDRPSSSTASSSFRPDLAERYRHLMSLGRV

SEQ ID NO: 190393 - protein, 217 aa, Zea mays
  Clone ID: MRT4577_105218C.1.pep
MHAYVSSEFGSRWRRILDRHLANSMSRFEGPPEPSVSETAQHASSLGRMTTRLRARRWQREAENPTSIDSSAPDSGQPVNNTFDLPRRSSNPFPSEGMDLLRHIAFTGLEDSERFATAVSELRRIARASPYGASTSSNPPNPEPFGETQIATALAADQASNSSTMAVIQEDAAFTGSAGEPSNAGSSRPLRRRGSDALGSLDVDGGDLHQNKRRRLN

SEQ ID NO: 190394 - protein, 111 aa, Zea mays
  Clone ID: MRT4577_105219C.1.pep
PSLGTTQRVTGSLIPKRVGNPWVLAFPQKKQFFQYTGFFFVTLFWLGHHPPVEGPSFSIPIALYRKRGPPWRALVSLKKAIVQLEFFPLKEKKKKKKKKKKKKEKKKKKSG

SEQ ID NO: 190395 - protein, 72 aa, Zea mays
  Clone ID: MRT4577_10521C.1.pep
SAGPRQQKMLTRVGRQRAQRDQLGPPAGGSALAPTAHDRRRRRARPPVATNYTRSRGSPLLIKNPTRPPTRP

SEQ ID NO: 190396 - protein, 165 aa, Zea mays
  Clone ID: MRT4577_105220C.1.pep
MAGVEEEGEVAALREALRQQVQAVEELRAELEEERQAAASGADEALAMILRLQAEKAAERMEAEQFHRVAKERIQYDEDTLAFLRAVVFHQEMEISSLNRRLLAVHATGDDPLSPAVDLPWLRKLAKSGVASRRNASLPAAHLEELCSDSTSSSTRTPTRRGWAT

SEQ ID NO: 190397 - protein, 94 aa, Zea mays
  Clone ID: MRT4577_105221C.1.pep
PPYEYYSFGCRSGWISSLPDGLRLGPSFSGVRQVNRNNNNNSNNTTNTRIMRHMPPQRQLSYFSMPQLRQNSLPDSSPLRGGEINGQVSKEFLS

SEQ ID NO: 190398 - protein, 80 aa, Zea mays
  Clone ID: MRT4577_105222C.1.pep
KNGQIKLFFQPGKDNMLSETQKFLKLVSQSLFCPKTWKADQAVSPVSPRGGLTNFGGGLLLQQPNQLPRKGLFLGPLGRP

SEQ ID NO: 190399 - protein, 75 aa, Zea mays
  Clone ID: MRT4577_105223C.1.pep
LDCVLVCASCSSSRRSYFVVVSSSSSKNFLILSSKRHLILASISHLVLGEQILPFSIDTCSFLCEVMCTYCGQRL

SEQ ID NO: 190400 - protein, 125 aa, Zea mays
  Clone ID: MRT4577_105224C.1.pep
TQTPSTLHRSSALRPHALIRFCPCLRTQIRRPRPWRRAGPPASLAFASTIASLAFISAQTTSTHPPHARRTRPASDAHLRNRRSDDEDAAAQDDELVVDLADLAPAPMATRKRMLLKFVIVGNSM

SEQ ID NO: 190401 - protein, 100 aa, Zea mays
  Clone ID: MRT4577_105225C.1.pep
FFFCPPKFFLFPHFIKPLILKNLSFTQFNSFKTISFFPNFLNKKKPLPIILFKKFHTLIFKLNPPFNPPLNPRFFLFSPQFTFYFSNPLNPLLLIFFLFF

SEQ ID NO: 190402 - protein, 151 aa, Zea mays
  Clone ID: MRT4577_105226C.1.pep
MNRLGPKPAQVGPIAAESRPRPRARWRLYRNALEVLSNRKRVRLLFPGVTDISQKGPRVLVNSQLAVPDGVQARPRSGEQLRRPIEAVTGANLRLRLNPSPQECFPQLNCTIGGLGSSGHGGRKQSGNKVVFPAMGAGLVQLKGSGSITEA

SEQ ID NO: 190403 - protein, 70 aa, Zea mays
  Clone ID: MRT4577_105227C.1.pep
SVTAKVGIKLLCPLRCAASGRSTVGPEWSCPHQSGPGGYVANLRTDDSSTAANVSFCGRQIVLESNGVDE

SEQ ID NO: 190404 - protein, 98 aa, Zea mays
  Clone ID: MRT4577_105228C.1.pep
QANKPSCRLTYLLHLHHGDGRVTRALACSHQRLERPRLHRLPPPLPGGLPPHLTDASLGISSSIHVAATETNPIVVTIAALFVDARDPCNVVVTTRHV

SEQ ID NO: 190405 - protein, 59 aa, Zea mays
  Clone ID: MRT4577_105229C.1.pep
VVFNSWVVFAANVLVWSGPRSFWRWSKNLLLGSCVGWVLAPHCSRKPARGRFFEKKCNQ

SEQ ID NO: 190406 - protein, 51 aa, Zea mays
  Clone ID: MRT4577_10522C.1.pep
SRLIYNVTYSHSFSSTAWEIVISRPSRASKPQLQHRLGESCIAYPFKTFEV

SEQ ID NO: 190407 - protein, 68 aa, Zea mays
  Clone ID: MRT4577_105230C.1.pep
KADKNKYLANKKGGRSLRSILAYVCMQRSSSSIVCTNVHFIRRRSRSYVVQEICRALAKSISYKEIFL

SEQ ID NO: 190408 - protein, 117 aa, Zea mays
  Clone ID: MRT4577_105231C.1.pep
MALLRVVSTAVLPAACCVVLLLLSTTAPVAMAGSLRDDCRAFCRPRCEGYGADLCHALVNGFPLLQNVLEATCAERFYEVCQPICMNICTANTLTPAAGPGTAPPPPPPPPPCGKQY

SEQ ID NO: 190409 - protein, 153 aa, Zea mays
  unsure (1)..(153): unsure at all Xaa locations
  Clone ID: MRT4577_105232C.1.pep
MSTATAPGVSFAKSGSGSRAVAPAIRSASFIGYAKQTPNLSGLRMSNKFRVSAAAVHKVKLISPDGEEHEFEAPEDTYILEAAENAGVELPFSCRAGSCSTCAGKMTXPGRLXQSEGSFLDEXXQMGEGYLLTCISYPKADCVIQTHQEEELY

SEQ ID NO: 190410 - protein, 339 aa, Zea mays
  Clone ID: MRT4577_105233C.1.pep
MRGGYSGRCGFAGGRHSSSRSNDGRGYHGNPCLTMHQPWASLLVHGIKRVEGRSWPSPITGRLWIHAASKVPDPDTIKAMEDFYREIYAVDGITGIKFPDHYPVSRLLGCVEVVGCLRSEELVCWEHVPESVRLEGLTDFCWLCENPQKLVVPFEMRGYQGVYNLERRIYDGAVRGLLPVQGPLPVKFPLPDPRDPFSLKPGSLTFAASKPTLQKSESVAAAIAGARAAATQFSKKDRKAAASSEIGTEEQSWGSHGGSSSVDCNGLSIVHGSYAHLQNQNRPSIFPSTQANSQNPNSEPRRSPRLEFGASNRLVAVALSELKQLSLSKKGTGQAVPRS

SEQ ID NO: 190411 - protein, 96 aa, Zea mays
  unsure (1)..(96): unsure at all Xaa locations
  Clone ID: MRT4577_105234C.1.pep
QQQQRAHFYQCVGLLXQHNQQLQGHXVLHHEQSLEXHQGQSHEHQYQQHFQGHDKQQQPQXPQHYXQGQEKSQQQQCHCQELQXTTWCSYNYYSSS

SEQ ID NO: 190412 - protein, 86 aa, Zea mays
  Clone ID: MRT4577_105236C.1.pep
QPTRHRSWLHALSQGCSSLLCKTSAAFRHAAQSVKACAFMSHVLEENRTTPVESHRRAACCPTEGSPASHDPRDNLGRPLTTLEFS

SEQ ID NO: 190413 - protein, 307 aa, Zea mays
  unsure (1)..(307): unsure at all Xaa locations
  Clone ID: MRT4577_105237C.1.pep
MAGILAWAXDVVGAFFCSDDEADDDARAAAKAAMTPAQRLRAADLDARAASLRRAIQDLRLRVPPPHVAQRLPQVGGGSLXSSAALALQLNAHSSTKEQEMEVTEHNLKTQLENALKELEAAQHKASTATSGTAENALLEAKSVTDLKSKDLEEKKRELELLDNKVQTLEKEWSVVEEESLKKPTPAQREKVLERQLHSLIEQLTAKQAQAEILATDVHSKEKELERLNHLHRNLYGGANETGAPRSRLSRGLLSGPEDYYYDPKAGRKPYQAGVRTEGQNRLMILRSAIVLYVLLLHVIVFIKISV

SEQ ID NO: 190414 - protein, 65 aa, Zea mays
  Clone ID: MRT4577_105238C.1.pep
HPKGLTYAVRMWHLVRTTTCISQHDNMIHNRLILVWLSLLMYWYLPPRSHIVLIVKKLPIHFMPV

SEQ ID NO: 190415 - protein, 348 aa, Zea mays
  Clone ID: MRT4577_105239C.1.pep
MAGILAWAADVVGGAGGSDDEADDDARAAASAAMTPAQRLRAADLDARAASLRRAIQDLRLRVPPPHVAQRLPHLHADSLASSAALALQLNAHSSTKEQTQQREVTLQEENAAYEKAISECKQKIQEKQMEATQLLSNLEEMEVTEHNLKTQLENALKELEAAQHKASTATSGTAENALLEAKSVTDLKSKDLEEKKRELELLDNKVQTLEKEWSVVEEESLKKPTPAQREKVLERQLHSLIEQLTAKQAQAEILATDVHSKEKELERLNHLHRNLYGGANETGAPRSRLSRGLLSGPEDYYYDPKAGRKPYQAGVRTEGQNRLMILRSAIVLYVLLLHVIVFIKISV

SEQ ID NO: 190416 - protein, 137 aa, Zea mays
  unsure (1)..(137): unsure at all Xaa locations
  Clone ID: MRT4577_10523C.1.pep
TPPGGPGKGQNPTHGGPEQGDPSPAPSWGKTRPKPVPGGXGNPSQTHKKNEPEAKKEKPGGPKGGPNPXNGGAPPAPFPNRKPGGPTKKKKRXPPGRGGMGNGPPSPSPXQGPAGXGGXRLGEAGPPPPRGGKPVPP

SEQ ID NO: 190417 - protein, 63 aa, Zea mays
  unsure (1)..(63): unsure at all Xaa locations
  Clone ID: MRT4577_105240C.1.pep
LLGFFFCIERWGGLQLIGQGXGVGVQFYCIVAENVCFFVTFPRIWSLIFGGGGWFLHFLMVLF

SEQ ID NO: 190418 - protein, 46 aa, Zea mays
  Clone ID: MRT4577_105241C.1.pep
RQQGEAAPLTVHEPLVVGGNVGPLDDQLQVDHHLNHLQQGLVLVGA

SEQ ID NO: 190419 - protein, 113 aa, Zea mays
  unsure (1)..(113): unsure at all Xaa locations
  Clone ID: MRT4577_105242C.1.pep
HRCWQDTTRTTTSRKVLMGDSEVNKSHILARFARNECSLYSKATIGGEFRTRPLFFDQRXXKAQIWDTAGQERYIFVSPPHYTGALGALPAYATTTRQTLQHAPRWAVPTPPH

SEQ ID NO: 190420 - protein, 57 aa, Zea mays
  Clone ID: MRT4577_105243C.1.pep
LRRTLRRIQSATGCCPRHLTCIYLFHTDQSEVTQADFTLNSSITWAPDDIISLLYLI

SEQ ID NO: 190421 - protein, 75 aa, Zea mays
  unsure (1)..(75): unsure at all Xaa locations
  Clone ID: MRT4577_105244C.1.pep
GGGAKCGSIMEAIIEEGSVQKVQGQEGNDGQPQERLXRVPTPRRAGILTXFWXRCVAGDNTFKWTKRWVHTVGGL

SEQ ID NO: 190422 - protein, 93 aa, Zea mays
  Clone ID: MRT4577_105245C.1.pep
NTFLMFDFNVFCIGGGKHTYFLLGITPFRGRQKKQLHHTSLGFRNAQSPQNHGWGAQGFKLPFCGGESSPGFFISKKMAWFYISPCQKFSNAL

SEQ ID NO: 190423 - protein, 84 aa, Zea mays
  Clone ID: MRT4577_105246C.1.pep
LSKGLPYGPITRNNWGFATDYKGPAQAFTEKKLENILVPLPSSPGFPPAGWANSSWISVAQSGPPGPLKHRRIWLRFLRLHWES

SEQ ID NO: 190424 - protein, 462 aa, Zea mays
  Clone ID: MRT4577_105247C.1.pep
MLEVSTLRGPTSSGSKAEQHCGGGGGFVVGDHHVVFPTSGDCFAMVDDNLLDYIDFSCDVPFFDADGDILPDLEVDTTELLAEFSSTPPPDDLLAVAVFGADDQPAAAVAQEKPSSSLEQTCGDDKGVAVAAARRKLQTTTTTTTTEEEDSSPAGSGANKSSASAEGHSSKKKSAGKNSNGGKRKVKVDWTPELHRRFVQAVEQLGIDKAVPSRILEIMGTDCLTRHNIASHLQKYRSHRKHLMAREAEAATWAQKRHMYAPPAPRTTTTTDAARPPWVVPTTIGFPPPRFCRPLHVWGHPPPHAAAAEAAAATPMLPVWPRHLAPPRHLAPWAHPTPVDPAFWHQQYSAARKWGPQAAAVTQGTPCVPLPRFPVPHPIYSRPAMVPPPPSTTKLAQLHLELQAHPSKESIDAAIGDVLVKPWLPLPLGLKPPSLDSVMSELHKQGVPKIPPAAATTTGATG

SEQ ID NO: 190425 - protein, 54 aa, Zea mays
  Clone ID: MRT4577_105248C.1.pep
GTGNSRCRRHASGGSERVARVGDTSWLIVRYREFLDEDGSVGHAGVRWGDALYI

SEQ ID NO: 190426 - protein, 82 aa, Zea mays
  unsure (1)..(82): unsure at all Xaa locations
  Clone ID: MRT4577_105249C.1.pep
LAARXXXPASCXXCXCPXVVARXXXXPLSAXXVXXXGXXXSVXXVLXPXXXPSXLLSSWXXXXLXPPAASRPAPXXXXWXRR

SEQ ID NO: 190427 - protein, 76 aa, Zea mays
  Clone ID: MRT4577_10524C.1.pep
TKEYFTTRGLSTNCCCIHSLIHHITPTSYPYSLPNQKLFIKKHQPQPTPHHYREKISTRVKVIPLLHKLSCFLDST

SEQ ID NO: 190428 - protein, 132 aa, Zea mays
  unsure (1)..(132): unsure at all Xaa locations
  Clone ID: MRT4577_105250C.1.pep
THRAVSDHEATLRCWALSFYPAEITLTXQRDGEDQTQDTELVETRPAGDGTFQKWAAVVVPSGQEQRYTCHVQHEGLPKPLTLRWEPSSQPTIAIVGIIAGPXSLGAVITGAVVAAVMWRMKSSDRKGWSYT

SEQ ID NO: 190429 - protein, 68 aa, Zea mays
  Clone ID: MRT4577_105251C.1.pep
IYFFIFLYKRDPPQSRQGGPGALPSDPPLIFLEVVGKKGEPGGPQHGAPGREPNQEGPGGPGPQGPGG

SEQ ID NO: 190430 - protein, 79 aa, Zea mays
  Clone ID: MRT4577_105252C.1.pep
SRKGPCPAPEQVFFCVPLSGGHWGPPCPPPPHCFPICFFVKTSFCPKKKKKKKKKKKKKKKKKKKKKKKKKKKKKKKKN

SEQ ID NO: 190431 - protein, 95 aa, Zea mays
  Clone ID: MRT4577_105253C.1.pep
ALFDAGHLWSITILTNNQQGAGVGSLTGHNEGDHSLRSILELPSQLASVETQFEFQTVASAWWGRPSTLPCRCYRPIYYSDAWTNAWADAWAHAW

SEQ ID NO: 190432 - protein, 67 aa, Zea mays
  Clone ID: MRT4577_105254C.1.pep
PVWPGRTTVTRPASCRIEIIAGCTKGLDKSLSNYLSMDTPGVDVHLTSATGEGRLVPDLLFTPAYLR

SEQ ID NO: 190433 - protein, 110 aa, Zea mays
  Clone ID: MRT4577_105255C.1.pep
GQASYLALVVTFQGHRVLVEVSNGSVRGRQLLGAVMAAAGGGREATTSGCGLKRRYAPHDQEEETMNQDQPSKEDRCGRIWSGIDLLKDVTENKHVLPTGLEGIDRLLGG

SEQ ID NO: 190434 - protein, 125 aa, Zea mays
  unsure (1)..(125): unsure at all Xaa locations
  Clone ID: MRT4577_105256C.1.pep
KQQGGPHLMAIPTLGFVSQFFNSKKSKTWPGKSSPFLFFFLGQGRQRGPHDTCGRPWGFLRGSSRQIKGGGFGSNSQTLISGPDKRVKILGFWGLGKKERRDKKQLFFPPFLQHACXGLLLPSNL

SEQ ID NO: 190435 - protein, 83 aa, Zea mays
  Clone ID: MRT4577_105257C.1.pep
APRRKLGIRLESFLTPRSSALARNTELGGLCRTAAGALPMRVHMGFERLFCTTDTMASFRPTMCTRSPYYASGTSHYERLMTS

SEQ ID NO: 190436 - protein, 78 aa, Zea mays
  Clone ID: MRT4577_105258C.1.pep
KGANLGKRKFDREKLGHGSLLLGLPQIGDNKMPKNPATEGPGLFNRTQRVHSIQKGGKTEGGGVQPQPVGKGIKKLKP

SEQ ID NO: 190437 - protein, 122 aa, Zea mays
  Clone ID: MRT4577_105259C.1.pep
MKGRPLFKSPLPRSYLSETSSVASAAVATHRVYQVWRGKNRFLCGGRLIFGPDASSIVLTVALIMTPLALFVAFVSFRLAELIGKPLGTAVPATAMAVGIFDVVVLILTSGRDPGIIPRNAR

SEQ ID NO: 190438 - protein, 58 aa, Zea mays
  Clone ID: MRT4577_10525C.1.pep
GETHKEREQHSTLLPRIEMVTLSLMSMLACRHYQMPIILSMVHSDSYVVLLMTDLPIL

SEQ ID NO: 190439 - protein, 41 aa, Zea mays
  Clone ID: MRT4577_105260C.1.pep
PVCMGELYAELLMCASPLRMNGDLKLSTSFDSLYAVTNWPR

SEQ ID NO: 190440 - protein, 67 aa, Zea mays
  unsure (1)..(67): unsure at all Xaa locations
  Clone ID: MRT4577_105261C.1.pep
THVAECIPHESRIPGNHRGCFAIAPSGGAVVSDEGKLXEXPSYNKALHRSKWYTFRPDTRATARNHA

SEQ ID NO: 190441 - protein, 84 aa, Zea mays
  Clone ID: MRT4577_105262C.1.pep
PLNRTLIHNLIHTFAYLKHSSGGLYKNLWSCRRTLPSIFPIYFTYFIYFTITPTLNRQYSDPLTISYTNSIPSHHYPYIITPNY

SEQ ID NO: 190442 - protein, 104 aa, Zea mays
  Clone ID: MRT4577_105263C.1.pep
GKAPTNRQQQMVEQIGPALNQQAVANPAAHLQQQLPINQLNGGNPAGDPQQRQQLLKPLAGPNPLGPAFPKKQQLPPNSQFFLMNPALGGQQPIVGGPLLLEKK

SEQ ID NO: 190443 - protein, 34 aa, Zea mays
  Clone ID: MRT4577_105264C.1.pep
NYNNYYTSNTTNHHNAYITSVLIILDQLQLLNFT

SEQ ID NO: 190444 - protein, 60 aa, Zea mays
  Clone ID: MRT4577_105265C.1.pep
TLWGETLNKGTSDHFQGGIISKGLKDTGLIFKLVKGLGATGKNHPCFSFGGFIDLNHLHV

SEQ ID NO: 190445 - protein, 116 aa, Zea mays
  Clone ID: MRT4577_105266C.1.pep
ALSIQIIEFSFRYLTSFLLSRNYKLWSSSITPTYFETNHESRISFLIPISDSFRLYPTAYDILLGSIYDPSYYSSLFDDVLNNACNHQGDKQNFSNDNCSTSSCHTPLLKSFANDV

SEQ ID NO: 190446 - protein, 356 aa, Zea mays
  Clone ID: MRT4577_105267C.1.pep
MVSLRCTTAHHSLLGSPTCLARPRRRPCPVVRAAVAVEAGAQAKVSLIRIGTRGSPLALAQAHETREKLKAAHSELAEEGAIEIVIIKTTGDMILDKPLADIGGKGLFTKEIDDALLQGRIDIAVHSMKDVPTYLPEGTILPCNLPREDVRDAFICLTANSLAELPAGSVVGSASLRRQSQILYRYPSLKVVNFRGNVQTRLRKLKEGDVSATLLALAGLRRLNMAENATAVLSVEEMLPAVAQGAIGIACRSNDDKMMEYLSSLNHEDTRLAVTCEREFLAVLDGNCRTPIAAYAYRDKDGNCSFRGLLSSPDGSKVFETARSGPYSFDDMVEMGKDAGHELKAKAGPGFFDSLQ

SEQ ID NO: 190447 - protein, 128 aa, Zea mays
  Clone ID: MRT4577_105268C.1.pep
WVPRAGRDFLPSPPLPRFHPVPLLSRSTRTIHPPAPDADGEPLLLLPPEEEGHQGQRVQEEEEQQQAAGRLGLCHMPLWGAAASAAPAAEGDAARAPSGSGGGVKVIRSLLPTRRRLRLDPPAKLYFP

SEQ ID NO: 190448 - protein, 87 aa, Zea mays
  Clone ID: MRT4577_105269C.1.pep
MASRLASRLLLRRPAAVLSLLQSSRHARHFSTQLLEGVPRLPKPTCERYFLRNASPYQIWSRSFASENGDLVEAVVPFMGESVTDGT

SEQ ID NO: 190449 - protein, 70 aa, Zea mays
  Clone ID: MRT4577_10526C.1.pep
MGSFPFFFVAGGPPPFETCWSGAHVFLWLIITPRLWSFKTRPQLLFPKSGFFCPFFWGGGHGNSEFVIPS

SEQ ID NO: 190450 - protein, 68 aa, Zea mays
  Clone ID: MRT4577_105270C.1.pep
PLFLPHRFPIVFTEVLTRTGGESEQIVMTDLSCSVPLYSSSSLASSTINPILQKVFITYSPDPNYIII

SEQ ID NO: 190451 - protein, 232 aa, Zea mays
  Clone ID: MRT4577_105271C.1.pep
MAEADDAAAARRRTVTTEYRNKLLNCRELETRVRTGRENLKKAKKDYDKTEDDLKSLQSVGQIIGEVLRPLDSERFIVKASSGPRYVVGCRSKVDKEKLTAATRVVLDMTTLTIMRTLPREVDPVVYNMLHEDPGNVSYSAVGGLSDQIRELRESIELPLMNPELFLRVGIKPPKGVLLYGPPGTGKTLLARAIASNIDANFLKIVSSAIIDKYIGESARLIREMFNYAREH

SEQ ID NO: 190452 - protein, 51 aa, Zea mays
  Clone ID: MRT4577_105272C.1.pep
VAWADSWCVWVLENTIRSRTAHQLMKCGACNLVGRKKKKKKAAPQAATFCC

SEQ ID NO: 190453 - protein, 106 aa, Zea mays
  Clone ID: MRT4577_105273C.1.pep
SPSDGKGCPPPGAPKTGGGTKRRRKCPEQEIGGPNILWSDRGEGPLIKIGGDTPIVRGGTGDQTRGRPLNFFPFAKGAKRPLCRAPPGEKLTLEVPPFFPPRGFFF

SEQ ID NO: 190454 - protein, 437 aa, Zea mays
  Clone ID: MRT4577_105274C.1.pep
FLSFQIIFSIGPKSSRKYSKRALPVLAKDSHVVVHNDGLTQGQPSLQATLQTQKYPIIQSKSHIKPSDQLQASFSRENSPSLFRPSIELGEVSLPSDSTPISSDLTSASNLLASLVKSGFKPNNHSDAQALGPSGPLPVASLSLQNAAGENTTLQAHTPNTSRPPLPPPPSTQSAEKAAPLSSLLSSLVAKGLISSPAYDSSSAVISQPNKASSMNVKDATASAVPLLALRPSVGKASSNSDSSAPTNASLTKAIEIKMSDLIGLEFKPEKLRKYHEHVISSLFDDDQSHQCKTCGNRFRLEELSLHTSSCGQRKSETIYTGIAPKRWYPSKNIYIDGSHEIEDSTEASDGDLGSAEEVCEFMVPSDERQIICALCGEPFDDIYSFEKGDWMYKDAVFLDYPKGESSCRNSVEGEEHVPIVHVRCMPRGSNDGMEVD

SEQ ID NO: 190455 - protein, 88 aa, Zea mays
  unsure (1)..(88): unsure at all Xaa locations
  Clone ID: MRT4577_105275C.1.pep
IYPRVRADQIVSCLNEYFDGKLSAWTIVDPIPDVNNEPVKVXAADHFHYFVXKSGXDVLTVLYYPLREHFTKLMPLLDESTTTLPNDL

SEQ ID NO: 190456 - protein, 115 aa, Zea mays
  unsure (1)..(115): unsure at all Xaa locations
  Clone ID: MRT4577_105276C.1.pep
LPRRRPALRLRPAWGPPSSGLWPRSWGGGSRPCRGSRRCRSLRRAXSRGAPGPPGSCRPPGRARPSSAGRPCRRGRGCRXFLRSPAPWRRLLLPCLLRPFGFXGVRCGSVPVSVP

SEQ ID NO: 190457 - protein, 334 aa, Zea mays
  Clone ID: MRT4577_105277C.1.pep
MMAAAKALSSLVLVLLLAVASQEAAATITKRDFPPGFIFGTGSSAYQIEGAVAEDGRKPSIWDTFTHSGHSVDGSNADVTADQYHKYKEDVKLLSDMGVDAYRFSIAWPRLIPDGRGAVNPKGLEYYNNLIDQLLAHGIQPHVTIYHFDFPQALQDEYNGMLSRKFIDDYTAYAEVCFKNFGDRVKYWSTVNEPNIEPIGGYDQGILPPRRCSFPFGALSCDNGNSTTEPYIVAHHLLLAHASAASLYKEKYQAKQGGKIGLTLLGWWYEPATQTPEDIAAAERMNDFHVGWYMHPLVHGDYPPVMRKNVGSRLPSFTGEELKRVLGSFDFVGF

SEQ ID NO: 190458 - protein, 63 aa, Zea mays
  Clone ID: MRT4577_105278C.1.pep
EKPKATGISLGLDKVNGRWQRQYKQLTAAPQHQHLKWIISPILSKENSARLQHHCISTRLPKG

SEQ ID NO: 190459 - protein, 171 aa, Zea mays
  unsure (1)..(171): unsure at all Xaa locations
  Clone ID: MRT4577_105279C.1.pep
LVANAKKGAXDRKGGDSTKKTLSRPXRPALQFPVMRVXRYLKXRRYTQSVRTXAPVYLGVVVXYLTSEVLELAGYALRYDXKTFISPSHTVLAMMNDEGRRLAANVSTDRSQGDCASTLSLSPSSIRLTMISPRMPRPASMLSLRSLLYPDRRFAASPKWIALLQILQGAI

SEQ ID NO: 190460 - protein, 108 aa, Zea mays
  Clone ID: MRT4577_10527C.1.pep
HASPIKGSTFTQFALVSSYTAVGRDDGFLSRWSTCVLFPPSASSERYISCWRSSEIRGDHGRPGRRPIDSVGPPGGGVRRASSRRMKEGVAPPSRSHGGRKRGLTEAI

SEQ ID NO: 190461 - protein, 74 aa, Zea mays
  Clone ID: MRT4577_105280C.1.pep
ERLTGAPRLHTAIPFCHPISFTHPDITKATVCRAKKYVGKDGRAEMILKKIIGVGKGSDYIDLAAYRSTSGSLR

SEQ ID NO: 190462 - protein, 159 aa, Zea mays
  Clone ID: MRT4577_105281C.1.pep
MALLSLLAFLLATAAAPAAVAAVGNATYDGSKTDASPAVLCNGEGCEPPAQPLPIYGYPSPAAPSLPSAPPAPPSAPGSQTPVPAGDRRLLRRCRGAAATATEPRASWRRWLRALLQHLSCLASCAAARSRYWWLLRDGYGLHLFTVDSGVVTLASKTV

SEQ ID NO: 190463 - protein, 123 aa, Zea mays
  Clone ID: MRT4577_105282C.1.pep
MPPSKLLNKKGSNENGDSDVNPNSVAAAAAMKEAMQFAEARLKAAKELMEIKGVSSKFRKRPVHHKSTKSTEIKEYNAPEKAHLFGEKLDMRRLVKEENQSNDIALLDKNTGNVALEHNDHDK

SEQ ID NO: 190464 - protein, 103 aa, Zea mays
  Clone ID: MRT4577_105283C.1.pep
GPQMGVGPPPGQRRAPPPASNEIKGPVGPPPPGIFLTHKGYLAFTPGGNFLTQKMVGPFGNREKRLPFLFPKDYFFFFKGPGACLFFGGPPPKGGVLQGQPPP

SEQ ID NO: 190465 - protein, 80 aa, Zea mays
  Clone ID: MRT4577_105284C.1.pep
WGLKNPQQRAVSSNVVSPPGATLLETVYSPPKLVRGVLTPKGFVLKKTVPNRICWLSPLLFSGALKKKTVPTIYKSQMIL

SEQ ID NO: 190466 - protein, 135 aa, Zea mays
  unsure (1)..(135): unsure at all Xaa locations
  Clone ID: MRT4577_105285C.1.pep
LCLSPLPFCIYSTQPSTGFASWPFNSLRVRMTLVGALYVDVNELQNKLVKYPKVLIGFCAXAPVISAEKAYXLQMFVVEMTNKGFQPSFMMDMCXSXHGKYMXACWLMFRVDVVSXDVNSVVAPIKTKRTIHLVD

SEQ ID NO: 190467 - protein, 103 aa, Zea mays
  unsure (1)..(103): unsure at all Xaa locations
  Clone ID: MRT4577_105286C.1.pep
QSRKAARKLSEMQFKQXSKYLKPLLGTIQSSPQSXQIGPKVEXLIVKDRHMQSELMTRHSTVVDNMEKKLRRQHVXNSIAFQQQLIGALTQEDESLLESNSDI

SEQ ID NO: 190468 - protein, 51 aa, Zea mays
  Clone ID: MRT4577_105287C.1.pep
EPGHVKDRLINNHIKGDGNRIISWAYRTGLPYVRAMIQWGGLLLLHIVHDR

SEQ ID NO: 190469 - protein, 40 aa, Zea mays
  Clone ID: MRT4577_105288C.1.pep
RGEAAQGQDLFLSLNFFFFFFFFFIFFFFFFFFFFFFFFF

SEQ ID NO: 190470 - protein, 113 aa, Zea mays
  unsure (1)..(113): unsure at all Xaa locations
  Clone ID: MRT4577_105289C.1.pep
LLIAEPVGGADFYGGTVLRLVLPAGGSDADKDGKRGFEDTIELQLXNCARRLEEAADDDVVNADPADGNVKMTVDAPADDADNSXAXPNVQTVGWSTVRSXRMNVMTVQAVMS

SEQ ID NO: 190471 - protein, 96 aa, Zea mays
  Clone ID: MRT4577_10528C.1.pep
RPRRPSLHIVEWAKKKMGSYEPAVNILDPKLRGMPDQLVQEMLQTLGVAIFCVNTAPSERPTMKEVVALLKEVKSPPEEWAKTSQQPLIKPGSQQG

SEQ ID NO: 190472 - protein, 69 aa, Zea mays
  unsure (1)..(69): unsure at all Xaa locations
  Clone ID: MRT4577_105290C.1.pep
MSPKPXSTALLLLAAATVLSLALSDLTHDNFLNNKKVTVHNLSSHYITLTLEPXSNNPPLFTRTYTLHP

SEQ ID NO: 190473 - protein, 100 aa, Zea mays
  Clone ID: MRT4577_105291C.1.pep
VHRNRIRIKEQSQIVISLLYLKLSSTLLNFQNPCESNESMILPSDASYTHDPCLVPLIDALRPVSSAGAVIVHGSTRTSIASYGPHTLCSKVGPNAERVG

SEQ ID NO: 190474 - protein, 40 aa, Zea mays
  Clone ID: MRT4577_105292C.1.pep
AGLPSHNDTILCNLIHHLILDDLMDGYREKIHLDGTNYYI

SEQ ID NO: 190475 - protein, 258 aa, Zea mays
  Clone ID: MRT4577_105293C.1.pep
GLTAVRLLFTIVIALMFGTMFWDLGRKTKKQQDLFNAMGSMYAAVIYIGVQNSGSVQPVVVVERTVFYRERAAGMYSAFPYAFGQVAIEFPYISVQTLIYGVLVYSMIGFEWTAAKFLWYLFFMYFTLLYFTFYGMMAVGLTPNESIAAIISSAFYNVWNLFSGYLIPRPKMPVWWRWYSWACPVAWTLYGLVASQFGDITDPLEDSVTGQSVAQFITDYFGFHHDFLWVVAVVHVGLAVFFAFLFSFAIMKFNFQKR

SEQ ID NO: 190476 - protein, 93 aa, Zea mays
  unsure (1)..(93): unsure at all Xaa locations
  Clone ID: MRT4577_105294C.1.pep
PVGLETNAQACGACQLVEKEVTXEFGSEYIYPCLRAGAGHERXXLLGTYMAMPGIAKAVVDVGXEVGADASCHGLTXGKAVITIAFSLHFYAL

SEQ ID NO: 190477 - protein, 59 aa, Zea mays
  Clone ID: MRT4577_105295C.1.pep
TFSKNHRALKLNRLRSYGRGKCLPMIRLRTMGQMRAIPTRLLKICLHLLLYWMEFNETN

SEQ ID NO: 190478 - protein, 115 aa, Zea mays
  Clone ID: MRT4577_105296C.1.pep
GGVPHCSRTSCFRGGFLTEGLFFPKPPPGGFFVFLAPGAITGILPLKPKNGPCPYSQKFFLGGQRGQGLFCFSVAGGGGPLTALGYPSFKSTPKIFWGWRVCGLLRGGWVSSLKS

SEQ ID NO: 190479 - protein, 118 aa, Zea mays
  Clone ID: MRT4577_105297C.1.pep
LDDAAMVKKLLDTVPDRLFPVVAGIEQFCDVETMPFEEALGRLKAFDERSRRRTHAGGERRDDQLLLTEAEWKARKKKKSTIGKCFNCGNRGHFARDCPKPKKEEALFANAEEEATLL

SEQ ID NO: 190480 - protein, 421 aa, Zea mays
  unsure (1)..(421): unsure at all Xaa locations
  Clone ID: MRT4577_105298C.1.pep
IGYSDLLEARGLSLSSVLMKQLRPSVEQALDSNLRRIEESTAALAAADDWILTYPPTGIRPLARSSGNLALQPKLSSSAHRFNSMVQDFFEDVGPLVSLQLGGSAMDGLLKIFNSYVNLLISALPGSVDDEVNLEGLGNKIVRMAETEDQQLALLANASLLAEELLPRAAMKLXLYEPGQQXDSLRRRGPENQNRAAEQRAWKRKLNRMVEKLRDSFCRQHALDLIFTEEGDTRLSAEMYIDMDNTVEDPEWVPSAIFQELYAKLNKMASVAADMFVGRERFATLLMMRLTEAVMLWLSDDQSFWEEVEEGPRALGPVGLQQFYLDMQFVILFGQGRFLSRHVHQVILDIIDRAMRAFSATGMDPDRILPSDDWFIDVAQESISRIGGGRARVANGDREVNSPTASVSAQSVSSVRSLGSS

SEQ ID NO: 190481 - protein, 213 aa, Zea mays
  Clone ID: MRT4577_105299C.1.pep
DAWVRNTEWSADFPDMLDVLLAERRVDEALDALDEAERVSVDAKRKQTLTAAEVSALKRSISDNRQRLADQLAEAACQSSTRGIELRAAASALKRLGDGPRAHSLLLSAHNQRLQCNMQTIHPSSTSYGGAYTAALAQQVFSVIAQALSDSVDVFGNESCYASELVTWATKQVMSFALLVKRHVLSSCAAAGGLRAAAECVQISLGHCFLLEA

SEQ ID NO: 190482 - protein, 50 aa, Zea mays
  Clone ID: MRT4577_10529C.1.pep
PARKKKSLFFARWAPIKVWALLFGGRPPPFKTFSYGPHLKFGGLAPPPAI

SEQ ID NO: 190483 - protein, 42 aa, Zea mays
  Clone ID: MRT4577_1052C.1.pep
RWIASLNLQILFLGKLESLPPEKSCNMAANSEINPYCIYICM

SEQ ID NO: 190484 - protein, 76 aa, Zea mays
  Clone ID: MRT4577_105300C.1.pep
TKQAPCRFTDYPHSHSPLFTFEISKSCVGLDIRYLQRERREKKKKRVLQFFFFFVVSPSACVFLINSFMRKKKKKK

SEQ ID NO: 190485 - protein, 247 aa, Zea mays
  unsure (1)..(247): unsure at all Xaa locations
  Clone ID: MRT4577_105301C.1.pep
QVCSLQNFHTQKNISCLLRHLTCSSLQELYAKLNKMASVAADMFVGRERFATLLMMRLTEAVMLWLSDDQSFWEEVEERPKALGPVGLQQXLILNLLDQRHSPGFIKECSPFXCRARVCACLFPAFQFSKPPRPSPDSXIPFLLCLPFQFYLDMQFVIIFGQGRFLSRHVHQVILDVIDRAMAAFSATGMNPDSVLPGDDWFMEVSQEVVSIISGRGRVANGDREANSPTASVSAHSISSFRSHGSS

SEQ ID NO: 190486 - protein, 774 aa, Zea mays
  unsure (1)..(774): unsure at all Xaa locations
  Clone ID: MRT4577_105302C.1.pep
AKFVFCSGLPGDDLFPVAAQEVVSIISRRGRVAHRARAASSPTAPVSAHPDAYVQSKCQTMNEKEIRHLCSYLQDLKKASAEEMRRSVYANYAAFXIKTFMVILEXKGEMVSIRNLLNTQAALIHGLSEGVQIDSLTSGPEGSAEDDISNVEDQEPSEIQKWSADFPDMLDVLLAERRVDEALDALDEAEXLLLMQNEQTLTAGTEVLALKRSISDNRLLLTELQLVFACPXEPXGSFSQMAASALKRLGDGERAHSLLLSAHNQRLQCNMQTIHPSSTSYGGAYTAALAQQASAVIPRYAIXSFSGKVVSYLGMCIKSYWTSLIERXSVXLPRGWTLTCAAAGGLRAAAECVQISLGHWAGLEARPMGTGXEQPHSLRXRSPCRQLDLSAAPSVHSFCINITVGICLDVFVLVHMCEXSSAANLALQPKLSSSVHRFNSMVQDFFEDFAPLLSLQLGRSSMDGITQIFNSYVNLLISALPGSMDDEANLDGLGNKIVRMAETEEQQLALLANASLLAEELLPRAAMKLSSINQSMDDLHKRGTDKQNRVPEQREWKRKLQRMVDRLRDNFCRQHALELIFTDEGDTHLSAEMYISMDNTVEEPEWVPSPIFQELYVKLNRMASIAAEMFVGRERFATLLMMRLTETVILWLSEDQAFWEEIEQGAKPLGPLGLQQFYLDMQFVIIFGQGRFLSRHVHQVILDVIDRAMAAFSATGMNPDSVLPGDDWFMDVSQEVVSMISGRGRVANGDREVNSPTASVSAHSISSFKSHGSS

SEQ ID NO: 190487 - protein, 102 aa, Zea mays
  Clone ID: MRT4577_105303C.1.pep
NRGNSKPWLEKRPHFFFFLKKPNRGKKKRAIWARVPGTKMGSFFLKFCCLRLGEGHLEKHVFPNVKGPRGGPRDATLVKLPLFFGPMPQTVGGASGPKKIAA

SEQ ID NO: 190488 - protein, 111 aa, Zea mays
  unsure (1)..(111): unsure at all Xaa locations
  Clone ID: MRT4577_105304C.1.pep
MHHLGIVHGDXEHSMGIYATASXPGASFXITKWGASGIGNIDIKKAVQDVWASAXDGTGKQTIVRLTGDFLVXQVNFTGPCMGDVTIQLDVKLLTTTAVLHYKDHRIWIKI

SEQ ID NO: 190489 - protein, 127 aa, Zea mays
  Clone ID: MRT4577_105305C.1.pep
SPHLPVWFHHQLSPPSTVVRCALALLSCPKIHGHSALRPQTRCNRLPSAACLTMLSFARNLTVRMMSSVYMTPSMFTSAAAWSFNGQVSVFPSYESVNVFKGLLALARNSVCPSVWVLLLGLAVLLC

SEQ ID NO: 190490 - protein, 45 aa, Zea mays
  Clone ID: MRT4577_105306C.1.pep
LLHRMLNFYLTDENEIDNVNCFIFRNIYYLNYIGKKYLQLINIYN

SEQ ID NO: 190491 - protein, 70 aa, Zea mays
  Clone ID: MRT4577_105307C.1.pep
WAINMFSHLLFKCFRLFIHNHVFHVIVTMLLFNGTGSQQLIPFLSVPWVSGSVSMFLLTVASGLVSIRVE

SEQ ID NO: 190492 - protein, 65 aa, Zea mays
  Clone ID: MRT4577_105308C.1.pep
ASPRLIESQSSGAAQHARGLRLQTYFSASCRSETILCINLLWCLSSIYTIHITISIWCLQCLLFI

SEQ ID NO: 190493 - protein, 104 aa, Zea mays
  unsure (1)..(104): unsure at all Xaa locations
  Clone ID: MRT4577_105309C.1.pep
LLPLVXVAAAPSVCFSSVXGGLSGSXSSVSFPVLALFRFSGSSLCCPFLGLFSRLSVVXLLLFCLLALVLVFAGPLRGXSPRCALLGSLXYKNWKIVXVFXXSS

SEQ ID NO: 190494 - protein, 71 aa, Zea mays
  Clone ID: MRT4577_10530C.1.pep
SHSTHLPSTLHSILLIYILLNHINFKTSLTILNFIINYISIHNYLSYLYNHNKISNIYTILNLTLSYILLY

SEQ ID NO: 190495 - protein, 127 aa, Zea mays
  Clone ID: MRT4577_105310C.1.pep
EEDEEGHRRGCAAMSLRSASSVATRQCCAVPPRFDPEGRRPGFVLGSSPGRNSNLDRILFWIRIETNDSCRDDRISNRLIFSTRNQTWNMPNRLKRGLKRIVRGRNRVAELLNSKGSDWDLQQASGN

SEQ ID NO: 190496 - protein, 100 aa, Zea mays
  unsure (1)..(100): unsure at all Xaa locations
  Clone ID: MRT4577_105311C.1.pep
GRKGGGGGDPGTKRGGGGGGGGTRAKGGGGNWTTNSGGRGTKGGRKXRQGGGNXGGKTMQKGGTIGGFGKKNWRGGQGAGGRNQRGGPGACPQANPREKT

SEQ ID NO: 190497 - protein, 63 aa, Zea mays
  Clone ID: MRT4577_105312C.1.pep
AVWVCSRYLVVAALCLRRSRPTGCFMDVFAFHSPGVFSAPRVLFWASTFVSNKMSPKTTQKGG

SEQ ID NO: 190498 - protein, 215 aa, Zea mays
  unsure (1)..(215): unsure at all Xaa locations
  Clone ID: MRT4577_105313C.1.pep
MAVAHAPPRRGVLPLLLVAALVAALPATCAAARSKKSYTAIFSFGDSLSDAGNLIVNGTPKALTTARPPYGMTFFRKPTGRCSNGRLVVDFLAEHFGLPLPPPSQAKGKDFKKGANFAITGATALEYSFFKAHGIDQRIWNTGSINTQIGWLQDMKPSLCKSEQDCKDYFSKSLFVVGEFXGNDYXAPLFSGVPFSDVKTYVPLVARLSXMGVRN

SEQ ID NO: 190499 - protein, 118 aa, Zea mays
  unsure (1)..(118): unsure at all Xaa locations
  Clone ID: MRT4577_105314C.1.pep
MXTVLGSPAAPAFFFSTASLRGRRAPTGVALAAAKEGIMGRSASSRGRLRAHATYNVELITAEGEVELQVPEEAYIXLEQGEEDAINLAYSWRAESCSSCAAKGDSGSVRQSERSYLD

SEQ ID NO: 190500 - protein, 89 aa, Zea mays
  unsure (1)..(89): unsure at all Xaa locations
  Clone ID: MRT4577_105315C.1.pep
SLFFPFCDGNLXANYAAEHFGLPLPPPSQAKGKDFKKGANFAITGATALEYSFFKAHGIDQRIWNTGSINTQIGWLQDMKPSLCKSEQD

SEQ ID NO: 190501 - protein, 198 aa, Zea mays
  unsure (1)..(198): unsure at all Xaa locations
  Clone ID: MRT4577_105316C.1.pep
MRVGPRRHSCLPPTPAAAMAVAHAPPRRGVLPLLLVAALVAALPATCAAARSKKSYTAIFSFGDSLSDAGNLIVNGTPKALTTARPPYGMTFFRKPTGRCSNGRLVVDFLAEHFGLPLPPPSQAKGKDFKKGANFAITGATALEYSFFKAHGIDQRIWNTGSINTQIGWLQDMKPSLCNXQDCKDYFSKSLFVVGEFG

SEQ ID NO: 190502 - protein, 73 aa, Zea mays
  Clone ID: MRT4577_105317C.1.pep
VNALLASWGERADYALAGGAPRTFPCLTVHLLPLTLRLQARRLMTAVTGPPHIARRLFPRRMLAMEGPKNSIH

SEQ ID NO: 190503 - protein, 71 aa, Zea mays
  unsure (1)..(71): unsure at all Xaa locations
  Clone ID: MRT4577_105318C.1.pep
LFIVHLXHFFFRGYNXLGGNPAFPPNPLPPSPSPLAXSARPPDRLPTVXRLLAPGRALXSPLPPGCGAPPP

SEQ ID NO: 190504 - protein, 85 aa, Zea mays
  Clone ID: MRT4577_105319C.1.pep
SGKGISRKTYVIKVFPSTASPIISHACIHRCKTTQVIPHSLSGCYRLPIQSTEPSTIKASPLEACISFIYIRHLSRPAATFLVAV

SEQ ID NO: 190505 - protein, 106 aa, Zea mays
  Clone ID: MRT4577_10531C.1.pep
HLTCMPLLVCLADISCSPHSDVHAVLWFSDLLLRGTDFVIFRILFRSLACVKGISNLPLLCCLLHSWIMCTFSTSSVPYTTLPPSSDPPTNPHVSYMARLSSSRYK

SEQ ID NO: 190506 - protein, 60 aa, Zea mays
  Clone ID: MRT4577_105320C.1.pep
TTRPAKNGYHPPRPLMGAGLPQPRRPRQEVYSLRFRIRMGSRRPLGGHHTQDLRMFQPED

SEQ ID NO: 190507 - protein, 83 aa, Zea mays
  unsure (1)..(83): unsure at all Xaa locations
  Clone ID: MRT4577_105321C.1.pep
STYVPYRDSXMTRILQDSLVGNCRTTIVICCSPSSYNESETKSTLLFGQRAXTIKNTVCVNVELTAEQWKKKYDIEIDKHKIL

SEQ ID NO: 190508 - protein, 53 aa, Zea mays
  Clone ID: MRT4577_105322C.1.pep
KNLISRVPNRLENILEKKPPMILPRRSSVIPLPSAAAPRRFPRKPSQPATSAR

SEQ ID NO: 190509 - protein, 54 aa, Zea mays
  Clone ID: MRT4577_105323C.1.pep
ITPFSLSHDPLLFAPRPSMPRCSQSFSLGNDNPSDQLVVPFQVNELGHALEMMF

SEQ ID NO: 190510 - protein, 56 aa, Zea mays
  Clone ID: MRT4577_105324C.1.pep
VVHIAAANPHCYHAHTEIIRADGWELEGHDLEGVLGKQSRRHVIKHIADSWARLAP

SEQ ID NO: 190511 - protein, 167 aa, Zea mays
  Clone ID: MRT4577_105325C.1.pep
ASPQAFRLGKFVQSLNALLAHPHPPPSLALLAYGGEGVYYFVEQFVWIAKAGLLPAHLLPRLQRLSAWAELLGYVGSILIKLEEVAKIESSIKKRLVKDCDKESEAVKTMQGKLLLKRMSVVQDVADAVMALGDVTDGKGLLGSSTLMAAAGLLSALISTHKNWNSC

SEQ ID NO: 190512 - protein, 75 aa, Zea mays
  Clone ID: MRT4577_105326C.1.pep
SNIDRKLFVKCNGPVCKGALKIVSRCEEGQSKKIEVALLCIQWVSQGFMCDLSPILLEKVQTVVGFLHVKTLQMQ

SEQ ID NO: 190513 - protein, 69 aa, Zea mays
  Clone ID: MRT4577_105327C.1.pep
HPRGVHGSHVLHTTMVGIPHFKAVIQGLRLFFCTPSNGDVPKPEGLPPLVCNGLCIELKSLMVFMIIVS

SEQ ID NO: 190514 - protein, 83 aa, Zea mays
  Clone ID: MRT4577_105328C.1.pep
SVKTSAFPTANFVDPHFSSCRNLNQKSPPIGGEFPMKSSAQVKGFFKKTMFIPLKIGVFCPKKKKKKKKKKKKKKKKKKKKKK

SEQ ID NO: 190515 - protein, 187 aa, Zea mays
  unsure (1)..(187): unsure at all Xaa locations
  Clone ID: MRT4577_105329C.1.pep
TKVNYPAQPVNPQHYIRAPGKPQPGXFRPPGGSINPGQETPPAPVELPGAGVYFPFDPGXRAPPNRGPPGDPGGGGGWAPRVKPCSPPRNFPLPRAFGPPPPGGPKRPGPPTPPPPNNRPPPGNKPFGPTPWGFVANAPVTAKGLCGILCEGGIFFFFFFFFFFFFFFFFFFFFFFFFFFFFFFFFF

SEQ ID NO: 190516 - protein, 46 aa, Zea mays
  Clone ID: MRT4577_10532C.1.pep
LLLHLTTENKLSAIASHANPKFIQTLKMIIQCQIKFIHRFFLLKNH

SEQ ID NO: 190517 - protein, 36 aa, Zea mays
  Clone ID: MRT4577_105330C.1.pep
HSISTSSCPWHTTAFVHSIASLSDPLEPLRARCATR

SEQ ID NO: 190518 - protein, 89 aa, Zea mays
  Clone ID: MRT4577_105331C.1.pep
RRSSNLRRQNLRRPTKHHRRPIAPHRQRPAAPPAAGRRCPTVSPPPSYGYSSSLSSSLSHHPPSLSNNVRRSVQFSLFRCRFKLMVKTS

SEQ ID NO: 190519 - protein, 142 aa, Zea mays
  Clone ID: MRT4577_105332C.1.pep
SGYSLIAGDVISCRYVGLGAMRVSFTIVLVDHRDASGGAVDGWNRCRVLEVALVVLLCMVCGGRHLGCGHGLVQDLLHICSVRVSGHGDRSFRGTCGVNCRGGGNNHWLPPAICCLCGFCPAGAGVWVASGKFTPGSALVTL

SEQ ID NO: 190520 - protein, 51 aa, Zea mays
  Clone ID: MRT4577_105333C.1.pep
NPGHKNQEIEDISRIRRQVIVPCGTLQEDPSHGATKIGRPFHDRRLGHGRA

SEQ ID NO: 190521 - protein, 128 aa, Zea mays
  Clone ID: MRT4577_105334C.1.pep
MDISAASKVTKMKRNIFECKIDYCHMTFKTEAELAVHKKNMCTVSSCSRHFRSHRYLRRHQSAHNDDMPYKCPWDGCNMAFKWSWDRAEHFKVHAGAKPYKCTTPGCSKIFKFVSDFTRHRRRCKPQR

SEQ ID NO: 190522 - protein, 58 aa, Zea mays
  Clone ID: MRT4577_105335C.1.pep
EDVRVFLSTMTVVDLGEAAHEVVVRHLHLGAVVGAFSPSLAHRVAGTGLLLFHLLGHL

SEQ ID NO: 190523 - protein, 90 aa, Zea mays
  Clone ID: MRT4577_105336C.1.pep
TVRVRSCCRTEIHREDSWALIRDLCQAHWGGHVTQQVSAFPLTSYHCEISRMCHSLSAALLDSWRGFRFSPVPTCIAALMVARYQEHASA

SEQ ID NO: 190524 - protein, 53 aa, Zea mays
  Clone ID: MRT4577_105337C.1.pep
PYSVSRRPELQGYYCQGLVPLTIICAGSTDITGLDKIAAAQRSLAGIPFERLL

SEQ ID NO: 190525 - protein, 112 aa, Zea mays
  Clone ID: MRT4577_105338C.1.pep
MWNYAACVATNMPSGEVEAQAGGSGRWRPKQQHHHALVIRKVRADNVDREFKLIRAVIERLPYLSMDTEYPGVIHHHPGAVHHCTLTEPQRYVLLKFIRDALHLIQVGLALA

SEQ ID NO: 190526 - protein, 57 aa, Zea mays
  Clone ID: MRT4577_105339C.1.pep
LKDNPFQKRCSNAESSVCHDHLILAPPWRSTRSCPGVLCDKACDLKQVRSVVPYHQI

SEQ ID NO: 190527 - protein, 90 aa, Zea mays
  unsure (1)..(90): unsure at all Xaa locations
  Clone ID: MRT4577_10533C.1.pep
RNRGGCLPCSLPAACLFTRPAGLTKWGLXPARSTELLRRPLTMSCGPCASSPISSSRWRATTARKGHHSRRTPTVGLNYHAHRTTSIFLI

SEQ ID NO: 190528 - protein, 143 aa, Zea mays
  unsure (1)..(143): unsure at all Xaa locations
  Clone ID: MRT4577_105340C.1.pep
RGVPYNLHTGGWRPRPELLATRCSRILNSTWRPLASLRSPIPLQCSLHTVVRTRHAAXXXLTTPQQVSNGILSGSRRPMDERVAALVADAVQRLALRHQHRHQRQRHAPXXXXXXXXXPLLLDXXXXXXXXXALMAQLAKCCR

SEQ ID NO: 190529 - protein, 127 aa, Zea mays
  unsure (1)..(127): unsure at all Xaa locations
  Clone ID: MRT4577_105341C.1.pep
AIKARGGWRGGGRSRRSXQAAADAASWCVALSLVAMLVVXHAGRRGRRRRRAPVVVVRGAALSARPCEEIYVVAEGETLHSISDKCGDPLILERNPHVHDPDDVFPGLVIRITPXSPGRSMAIHRSS

SEQ ID NO: 190530 - protein, 45 aa, Zea mays
  Clone ID: MRT4577_105342C.1.pep
YKSEYCKMARNIFKLNFIIVEVCLQQQVYVNRQIESRCRHKKKWA

SEQ ID NO: 190531 - protein, 64 aa, Zea mays
  Clone ID: MRT4577_105343C.1.pep
KLKGFSLTLLTFIWGKSKKKKKISLGCFLPKKKKKKKKKKKKKKKKKKKKKKKKKKKKKKNSRG

SEQ ID NO: 190532 - protein, 384 aa, Zea mays
  Clone ID: MRT4577_105344C.1.pep
MAEDKKSVDPTLVGFYEAMERTNVEKITDEMIAGLSGSSSDSESFDVESENKDAEERPWIPSHVVFENSTVKHGKIEVMKGKYFHDISIVRAGGESIVPLSKADKVVQWFYVKNDLSKREDVRGIIQCPIRSLFGIRRPLIASENKEHIAYKVWPLVNDWEMSKDTAAGSSEGGLVYLRYTYRYRSQFGEPNDDWLEAVEVTSDELLGAFMKAEDEAMNTAFSARGKRRLNRVFDVIEFFYHDYCFPARKQGAKRKIATSTSSVAPKLKRVNILTHRPKLHSLEKAGTLPVVEKMKIVEYAEATSSASKIIAVVTAKATVTPLEGTEVGSSKTEEHPKLQSPPTMTGLPKLKTATTITPRKGRRMTSVLNAVLKSSKLPTPIST

SEQ ID NO: 190533 - protein, 47 aa, Zea mays
  Clone ID: MRT4577_105345C.1.pep
NRTLEPYDRRLYFSINTLGSKIISQGPCYYSLCYGHLHRGPPLYKCT

SEQ ID NO: 190534 - protein, 68 aa, Zea mays
  Clone ID: MRT4577_105346C.1.pep
DHAKVFNIIMIRMPDCYMTISVYADIDGLVIISSLKGEKDLTVGYNPMRGVYLCLLFGCVMYHWKVTG

SEQ ID NO: 190535 - protein, 200 aa, Zea mays
  Clone ID: MRT4577_105347C.1.pep
MSAKPTSKTFGKSTREVPASTEKAKKWYPAGDDAENKKVRKAVRSWTPRSSLQPGTVLILLAGRFRGKRVILLKSLDQGVLLVTGPFKINGVPLRRVNSRYVIATSYKVDISGLDESKIEEISQPKYFTAEKAKEKAGEEAFFKQGEKPQKKEVNSSRAADQKAIDKALIANIKKVDMLASYLSSSFSLRKGDKPHEMAW

SEQ ID NO: 190536 - protein, 60 aa, Zea mays
  unsure (1)..(60): unsure at all Xaa locations
  Clone ID: MRT4577_105348C.1.pep
QPGPXSPPPPTPVRGFAPQGAGPLGQPPRPTPPGGPPXAPFPPGGGFNPFPPPLNPPGPF

SEQ ID NO: 190537 - protein, 133 aa, Zea mays
  unsure (1)..(133): unsure at all Xaa locations
  Clone ID: MRT4577_105349C.1.pep
FFRTMHMDWIGEQLPSNWRTKRMQXHAIMFNEHXRTEMHKGASXDPRDVVLXDISQEAIILXLENDMATDAADAMILNPLYRQLNNKCIMLLXTGNRAPDKQNERGLQRHLVLPSIDTSKETLVVHPIESAVD

SEQ ID NO: 190538 - protein, 591 aa, Zea mays
  Clone ID: MRT4577_10534C.1.pep
MALSGRALLLFKLLLLLLACLLFLLELSRGKEEAFSLRNLPPFHKASSYPAGCPTTYDYIIVGGGTAGCPLAATLSHRYRVLLLERGGSPYGDRNVSYMQNFHIGLMNMAPDSPSQAFISTDGVINARARVLGGGTCINAGFYSRASPSFIQEAGWDEDLVNKSYPWVEDKIVQWPKIAPWQAALRDGLLQAGVAPFNGYTYDHVSGTKVGGTIFDETGYRHTAADLLSAGDASNLKVLLHASVHKIVFGSRQGRLKARAIGVEFTDEDGRHHQAFLNSNRDSEVIVSAGAIGTPQLLLLSGIGPKNDLKNHNIPVVLHNRYVGKGMADNPMNSIFIPTRSPPRQSLIETVGITEEGVFIEASSGFGQSSESVHCHHGIMSAEIGQLSTIPPKQRTLEAAQKYAHNKLNLPKEVFHGGFILEKIDGPMSTGHLVLTDTDVRNNPAVTFNYFSHPQDLNRCIYGIKTIERILKTNRFSELSADGAGLSMERVLNMSVQANVNLIPKHTNDTESLEQFCKDTVITIWHYHGGCHVGKVVDQHYRVLGVSGLRVVDGSIFSKSPGTNPQATVMMMGRYMGVKILRERLGRAAGV

SEQ ID NO: 190539 - protein, 59 aa, Zea mays
  Clone ID: MRT4577_105350C.1.pep
KHLKEKLYCVTVTTICIRTGFCAAESDVPLVSEISFSLLRLCTDLNSFLFTGVLVQGMN

SEQ ID NO: 190540 - protein, 40 aa, Zea mays
  Clone ID: MRT4577_105351C.1.pep
VLVHPKPPRIAIIATPRYPFPWLLCACLVFMYRFMCLIMG

SEQ ID NO: 190541 - protein, 116 aa, Zea mays
  Clone ID: MRT4577_105352C.1.pep
LVPPFLLFARGGLLFGSFAPVCFPAVAVLRSFLLVPWVGPPFAGALSSVCSRAPCCLCPWCFRFLSPGRGGFLPFVSGLWLCAPVWSPYFVRPCVGYCMLAASRCPPLLFSFLPPV

SEQ ID NO: 190542 - protein, 274 aa, Zea mays
  unsure (1)..(274): unsure at all Xaa locations
  Clone ID: MRT4577_105353C.1.pep
MGATPVRWPRVLTPAQLAGAIRQQKDPLEAAHLYWDAPRRYPHSYRHNDDVRSTLLGTAAGSPVLPSLLRRVLPSSPSADSLLAASIPKLSPPDAVSIFRSSLPSSPSPSWSLSFTALLRHLVSQALLPEAARLFADFTRPPTLSIASADLTLLIIGLCRVRRPDLALQVLDEMPNLCLAPGRDAYRAIVPALCDAGMLDEATHVGYFMMWPVSQKGCDADVMVYRTLLAALCAAGRXEQAELVLDKVLXKGLRSPSSRRSLRGPMXAVLSVED

SEQ ID NO: 190543 - protein, 63 aa, Zea mays
  Clone ID: MRT4577_105354C.1.pep
VSRKDFSMRVCSRLVTRAIGSDLVILYVCRNHVINGQKGLNGKKKFRQKKIFLLSFIKLKYKI

SEQ ID NO: 190544 - protein, 40 aa, Zea mays
  Clone ID: MRT4577_105355C.1.pep
NLYCSSCFNLSFYIGFCFLNVLQAIVCLDCRRICKMNTFF

SEQ ID NO: 190545 - protein, 100 aa, Zea mays
  Clone ID: MRT4577_105356C.1.pep
RRAETLCLLLPVQRRYPVPSVIPHQPLHARLPEHHHPGSHHAWPTILRMPRSCMQRTPPEMTTPATTAEHSVKAIAATAAGNLGVPFLMPPGCNYLIMMS

SEQ ID NO: 190546 - protein, 102 aa, Zea mays
  Clone ID: MRT4577_105357C.1.pep
SPLPELENYRKRYIYIQPRSLLNGGKEHDTMLRTSNHTQLNAMLQMQLPGFLSIPLRGVTNRGRRSRPVIMFNSHRKIPVIDTDAAQQRVRAKMSVYREAID

SEQ ID NO: 190547 - protein, 81 aa, Zea mays
  Clone ID: MRT4577_105358C.1.pep
VLRLLRPLLPPLRLVAPPVGAFPLGVLVAAVWWLRPPPAGSVSGLLLASRGSSSALRRALRWRRGCARGLAGCPGLGWARA

SEQ ID NO: 190548 - protein, 98 aa, Zea mays
  Clone ID: MRT4577_105359C.1.pep
MADEAQAPNPARFTARELAAAEQLIHLSESSCSSSYAAALPRGSAASASSTSSPRSVNAPPQPATPIPPPPPPAAAAAEDHEEGQDQQEVGGRRRRNK

SEQ ID NO: 190549 - protein, 115 aa, Zea mays
  Clone ID: MRT4577_10535C.1.pep
ISADLTIAFSLLAAFCLIQAANDSGREHLVSCADRPVVAASVPGFLPGPRAHPDHVLPCGYLLGAATTPTSSLCLRLSNLGCSGSARASRGLSKWLPTSTSTSLVNNFGMSTLHR

SEQ ID NO: 190550 - protein, 62 aa, Zea mays
  Clone ID: MRT4577_105360C.1.pep
PGDRLFWGSKTLLRRMIPLTVNASNLLESGLLHAGPTPLITRYLSLICVCYAFKIRGGGGVF

SEQ ID NO: 190551 - protein, 523 aa, Zea mays
  unsure (1)..(523): unsure at all Xaa locations
  Clone ID: MRT4577_105361C.1.pep
MATRMKDVARRSTKKYVEEALYRRLFRKGSTPQAVREEVDGFLDSRKRAFKWEVGVCVRRMRRNALYRPSLKLSEVMARRGMNPTVSDQAIRLDLIAKSRGIAAAEKYFLDLPETSKTHLTYGALLNSYCKELMTEKAESLMEKMKELNFAFTAMSFNSLMTMYTKVNQAEKVPSIIQDMKADDVLPDVFTYNVWMRALAALKDIPGVERVIEEMKRDGRVAPDWTTYSNLASIYVEAGMFEKAEAALKELEKRNTSNDIEAYQFLITLYGRTQNLVEVHRVWRSLKRDNPRMANMSYLNMIQVLANLKDLSAAEACFKEWEARHIHPPKTNTKGSGADNTPGADPKSPSNPPNNQSGTKETGDGTAEDLQPKHPKYDIRVANAMIKAYITEGMLDKAVAMKKRAKMRGGRLNAKTWEIFMEHYLKTGDLKMAHWCADRAMKKGHSSGRIWVPPPAVTETLMSYFEENKDVDGAERYVGALKKVQKDLGAPVFEPLVRTYAAAGKNXPGMRXRLKIENVEVGE

SEQ ID NO: 190552 - protein, 49 aa, Zea mays
  Clone ID: MRT4577_105362C.1.pep
LDSRNPLSCLCGGGAVLAHCRVFGAADSDTAALFGCYHKLRFHKLIACR

SEQ ID NO: 190553 - protein, 581 aa, Zea mays
  unsure (1)..(581): unsure at all Xaa locations
  Clone ID: MRT4577_105363C.1.pep
ERPLENGSPPNPGYQSCYVSTSXQDHSPSTSNSDGQDRTGRIIFKLFGKEPSTIPGNLRDDIVNWLKHSPTEMEGYIRPGCLVLSMYLSMPAIAWDELEENLLQRVNSLVQSSDLDFWRKGRFLVRTGSKLVSYKAGMTRLSKSWRTWNTPELTFVSPIAVVGGQKISLILKGRNLSIPGTQIHCTSTGKYISKEVLCSAYPGTIYDDSGVETFDLPGQPDFILGRCFIEVENRFRGNSFPVIVASSSVCQELRSLEVELEDSQVLDVSSDGQIHDCRQSKTSVQVLHFLNELGWLFQRASACTLSTRPDVSDLDLTQFSIARFRYLLLFCSERDWCSLTKTLLDILAKRSLASEELSKETMEMLAEIHLLNRAVKRKSRNMVHLLVKFVVICPDNSKVYPFLPNLPGPGGLTPLHLAASIENAEDIVDALTDDPQQTGVTCWQTVLDDDGQSPETYAKLRNHNSYNELVAQKLVDMKNNQVTITVNGDGIRADRLGNDVGDRKKSGVQALQIRSCSQCAILESGVLMQPVRSRGFLARPYIHSMLAIAAVCVCVCVFMRALLRINSGKSFKWERLDYGTI

SEQ ID NO: 190554 - protein, 137 aa, Zea mays
  unsure (1)..(137): unsure at all Xaa locations
  Clone ID: MRT4577_105364C.1.pep
PASDLALPRLFLFPQGLLVGIFFGAAAAPAVWLAXGPFPPGSFFXLVFPSFGGRSLSLVLFPSLQKEAARFVFLPSRPPFWASGPLFPSPFLLSLPGPSRPGALRCFLPSFPCRWCPAPCCPWSTRRFLTCNVLKLF

SEQ ID NO: 190555 - protein, 84 aa, Zea mays
  unsure (1)..(84): unsure at all Xaa locations
  Clone ID: MRT4577_105365C.1.pep
KHLGEVFGDLNFKKGPVPRFGDKPGGLKVVDFFGPPGEMFQNGSPPRGMTKGGGFFPMQLPKFXVVPPPLQNQISVAKTKENAG

SEQ ID NO: 190556 - protein, 247 aa, Zea mays
  Clone ID: MRT4577_105366C.1.pep
MDSEHWISRLAAAKRYYAAQLGRVDDVPGMGTEEVEMEVEDDGDMEMELEMALELGDATWPEVACPYCYEDHDVASLCIHLEEDHPYEPHAAPCPICSQRITRDMLNHITMQHGYLFKNGHRSRRFIVPESHAISLLSRDLRGTHLQALLGGGHGHRSNNAVTTNISSDPLLSSFGLSFSASDAPEPSKSASSIPDGTAIRKETPVQPWESSIDSSLTSEEREQKRKQATGRATFVQGLVMSTLFGD

SEQ ID NO: 190557 - protein, 98 aa, Zea mays
  Clone ID: MRT4577_105367C.1.pep
HGRGGQPGNSEPVPGGGPFFPKGRPFKNRENKGKSTHPGKISIPGKIPKKKSPERKRETPGGPNGGRKSQNLGCPPGRDWNRKNSRAGIFNVSPTERG

SEQ ID NO: 190558 - protein, 229 aa, Zea mays
  Clone ID: MRT4577_105368C.1.pep
LLLFEIASPVKNSENEYLSLPLLYGAKINNLILSGEWWRLLTPMCLHSGFLHIALGCWALLIFGPRVCRAYGQRTFFLIYILGGICGNLSSFVHTPVITVCGTGPVFSLIGAWLVYQGQNKQVIDKDVSESMFWQAVIAAALSFLLSIFGRIDNWAHLGATISGIFFGYLTCPSVEFDNSAKNGQKEAVALIRQQAHPCKSAAVFFITILAFAVLAFAYGTQFNNMDLE

SEQ ID NO: 190559 - protein, 475 aa, Zea mays
  Clone ID: MRT4577_105369C.1.pep
ATGIPYTFAPCVAVCRDPRWGRCYESFSEDTRLVHLMTSNMVAGLQGDVPAGHPKGVPFVGGAKKVAGCAKHFVGDGGTTRGINENNTVLSFHDLMRIHMPPYDNAVINGISSVMISYSSWNGVKMHENKFLITDTLKNKLNFRGFVITDWQAVDRITNPPHQHYYHSIKETIHAGIDMVMIPYDYPEFVADLAKQVKQGQIKLERIDDAVSRILRVKFAMGLFEDPLPDPRLTKELGAQEHRALAREAVRKSLVLLKNSKKGQAKPMLPLPKTAKKILVAGSHAHDLGSQCGGWTIKWQGERGNNLTGVGTTILEAIKKVLDKKTSVDYVERPDKDDLAKSAEGYEYAVVAVGEPPYAETAGDNKNLTIPSPGPEVIKDVCGLVRCVVLVVSGRPLVLQPYVDYMDALVAAWLPGTEAQGITDVLFGDYGFTGKLPRTWFKSVDQLPMNYGDKRYDPLFPFGFGLTTKAAASHD

SEQ ID NO: 190560 - protein, 112 aa, Zea mays
  Clone ID: MRT4577_10536C.1.pep
ISPSRARGGKGQRRAQDQSSPQGQNPGESKNRTPRTAREPRANNAQGGRPSQKGEVGHTTSLDPTGNRTTGTIPAKIRGLTDLSGLNLTTNKVSGETPNACNNNTTKSSSGG

SEQ ID NO: 190561 - protein, 122 aa, Zea mays
  Clone ID: MRT4577_105370C.1.pep
MDYSMQGSKDSYSPQVHNHLYPDAQPGLSYPPPPPPTAAAMANLPQGGYGYQYQGYLGEAANPPPPYYYTGTGSWPEQPPAPSDGAPFRYRYQHQDDADCITFLRGCLAGLCCCCLLERCCI

SEQ ID NO: 190562 - protein, 73 aa, Zea mays
  Clone ID: MRT4577_105371C.1.pep
PLPSLKTNQQKNFFTIILQLSLHIYLEPFFLLCKINFSQPQKTSLNKQTKINLLYETTFFFIIPFSHFSISLT

SEQ ID NO: 190563 - protein, 119 aa, Zea mays
  Clone ID: MRT4577_105372C.1.pep
HPCASPGPDEGQEENSIFNNVNGDVNDYIDQAARHAERYEDMDKDIETVDMTEHTEELTDLVRDLYTNAYKTVIAAWRTVCCIEHYVEHKEDYQHIDLLVDYIKEFHAKINAVLNSIWD

SEQ ID NO: 190564 - protein, 259 aa, Zea mays
  unsure (1)..(259): unsure at all Xaa locations
  Clone ID: MRT4577_105373C.1.pep
MSLTTPAVCSVNDVQGLLQMDATAFFHPSLWGDFFVKYKPPTAPKRGHMTQRAELLKEEVRKTLKAAANQITNALDLIITLQRLGLDHHYENEISELLRFVYSSSDYDDKDLYVVSLRFYLLRKHGHCVSSDVFTSFKDEEGNFVVDDTKCLLSLYNAAYLRTHGEKVLDEAITFTRRQLEAYLLLDPLEPALADEVSLTLQTPLFRRLRILEAINYIPIYGKEAGRNEAILELAKXKFNLLSLXYCXELKEVHCKSRL

SEQ ID NO: 190565 - protein, 91 aa, Zea mays
  Clone ID: MRT4577_105374C.1.pep
QLDIDNPQSIRALRDFLLQEYGGLNVLVNNAGIAFKVVDPTPFHIQAELTMKTNFFGTQDVCTELLPIIKSQGRVVNVSCSVSLRALKSCS

SEQ ID NO: 190566 - protein, 70 aa, Zea mays
  Clone ID: MRT4577_105375C.1.pep
TQEYHGAYGLLLVGIEFLPRVTLTERPLMPNIDLQVCTVNQALPAHRNNHLVTDNVSELETLMTHNITYW

SEQ ID NO: 190567 - protein, 55 aa, Zea mays
  Clone ID: MRT4577_105376C.1.pep
MSDSEEHHFESKADAGASKTYPQQAGTVRKNGFIVIKNRPCKVYVCAVLGSAVFH

SEQ ID NO: 190568 - protein, 132 aa, Zea mays
  Clone ID: MRT4577_105377C.1.pep
NQLFSVHSPLKPVSVWRLSFGSLEGPMQLWPLESPPLVFHKVPFFFCAHCWRLRDRDQACPPHNPPSFFFSVSPWVVFGPVVSPRRVFFKVLSPCGLCFKPVGFFGGVPPPFPRTSCGGPSMFYHEKMIFVF

SEQ ID NO: 190569 - protein, 158 aa, Zea mays
  Clone ID: MRT4577_105378C.1.pep
CVMLGYLDDDKATKAAIRDNGWFYTGDVGVMHPDGYMEIRDRSKDVIISGGENISSVEVESVLYSHPAVNEAAVVARPDDFWGETPCAFVSLKEEGSTAADVIAWCRQRMPHYMVPRTVVFRDELPKTSTGKIQKYVLRNLAKEMGSTHKGASRISKM

SEQ ID NO: 190570 - protein, 110 aa, Zea mays
  Clone ID: MRT4577_105379C.1.pep
GQAPLKLLFQKLRPCCAVQPKLWLLHILLRKIFRRIGKPRKGKSSFCAWGWGLPCICIQSFGFLVSPANFPNAHFFVLLCTRAPINISQGTGGNPVSHSCALKYIAGALP

SEQ ID NO: 190571 - protein, 101 aa, Zea mays
  unsure (1)..(101): unsure at all Xaa locations
  Clone ID: MRT4577_10537C.1.pep
MCTARSRIIESSMNGVELCIVNTDVEAMPMXPIEPDNLVQIGXELTRVLGAAENPDIGLNSXKDIQELVEXTTDGANMVFVTAGMVGGTGTGGTPIIGGIA

SEQ ID NO: 190572 - protein, 116 aa, Zea mays
  Clone ID: MRT4577_105380C.1.pep
VRLQVPVRNSRVDPRVRPYVRMYLLPDKRRSGRRKTHVSKKTLNPVFDQSFDFSVSLPEVQRRTLDVAVKNSGGFLSKDKGLLGKVLVALASEELAKGWTQWYDLTEDGTRPQVIT

SEQ ID NO: 190573 - protein, 207 aa, Zea mays
  Clone ID: MRT4577_105381C.1.pep
KNDAVRALDIYKRATNQSERLSEFYEVCKTIHIARGEKFLKIEQPPASFMQTMEEYVRDAPAMKDKAILAIEYNKEPEEEVKPTSPPPVSEPEVEQEPEPEPEPEPVKEEAPAAEPTDLLGLNETHPAVAEIDERNALALAIVPIDDVPKAAPAFENGVAGWELALVTAPSSNETAVASGKKLAGGLDLLTLDSLYEDANRRASQPA

SEQ ID NO: 190574 - protein, 278 aa, Zea mays
  Clone ID: MRT4577_105382C.1.pep
MAAGGDGVARQAELRRIEGNICFKKARLGAAIDCYTEAIALCPDVAVYWINRALCHFKRKEWAKVEEDSRRALALDYTLVKGHYLLGCALLEKEESALAIKEFEKALTLLKSVDSTYEMAEDIWQVLAKAKYLDWEKHSTERLWRMESLKEACETALQEHHFLTGTLEEDSNRSDNEYSEQIKLLSEVFSQATVADTPTDVPDYLCCQITFEIFRDPVITPSGVTYERAVLVEHLHKVGNFDPVTREPLKEHQLVPNLAIKEAVQAYLKEHSWAHKLN

SEQ ID NO: 190575 - protein, 51 aa, Zea mays
  Clone ID: MRT4577_105383C.1.pep
ACNPLLTNVGKSNTAICICELYIMISFPAGARTNICPPQFAAARESPDTPE

SEQ ID NO: 190576 - protein, 131 aa, Zea mays
  unsure (1)..(131): unsure at all Xaa locations
  Clone ID: MRT4577_105384C.1.pep
RPESSGTIGALLAAKICPILRHLALSECDANATICPXLXQAPIAALLYAYRPSMTASVCENAARQRYMLQQAMATSNXDLXPLFFQQSPALSLVQSLVQTMTAQXQCSRLVLPVISQVALANLSPYSQQQQ

SEQ ID NO: 190577 - protein, 74 aa, Zea mays
  Clone ID: MRT4577_105385C.1.pep
TNRIGCRGRSIRCRRRNARLAQISGWMDQDLSVMAATSTRVIRLIVGGRRTRGCMQEGTANLLTSTRAWHHRSI

SEQ ID NO: 190578 - protein, 92 aa, Zea mays
  unsure (1)..(92): unsure at all Xaa locations
  Clone ID: MRT4577_105386C.1.pep
MVPPLAAKIFGLLRLLGLFAGAVPAPIFPNGWQAPLASFFPRTLXPAGFWVWETPIFKPSRSHQAIPVGIXPLSPLFLQHXSALLHQLPWGL

SEQ ID NO: 190579 - protein, 88 aa, Zea mays
  Clone ID: MRT4577_105387C.1.pep
VKLALTFTPAAVRTQHFLPAATAKQAFQYMPQIKSQSQCMHACDSNLIFSRKLATALTTTRRGRLTAAGVDLSAMGCMLHHIPQEKRG

SEQ ID NO: 190580 - protein, 38 aa, Zea mays
  Clone ID: MRT4577_105388C.1.pep
ARIFGKLLELGFFFKVMTSNILCPSSHRWNLESRTSFR

SEQ ID NO: 190581 - protein, 111 aa, Zea mays
  Clone ID: MRT4577_105389C.1.pep
MTPVAGPIEGGRMGVLSASREGDVMACTDNSWGRSHKMRENATLISSYDHDVMTASGISWANKKTKFSPIFWDRTSPKPPHSNAFRDTKAVEPVPSKLPTTATLPAQDHIT

SEQ ID NO: 190582 - protein, 89 aa, Zea mays
  unsure (1)..(89): unsure at all Xaa locations
  Clone ID: MRT4577_10538C.1.pep
GPLPLVFRLGGGMHIFVKPLSGKPIPLGVXGSAPLAKVRAKFRGKEGFPPDQKGLFFFGKQLGDGCPLADSTLQKGGPLPLGLRPRGGQ

SEQ ID NO: 190583 - protein, 170 aa, Zea mays
  unsure (1)..(170): unsure at all Xaa locations
  Clone ID: MRT4577_105390C.1.pep
PVVPVFARCPAVGPRLAVLGGWXPLGFGPVAXVXVLXAAXGGXRXGAPXRSARSFFACAGAGGGXXVAGGXXXXXXALXXAGAXXAGAXAWXPLPXLLVARAGCXGLAPVAGXRFLAVXGXRXARRGGFGRXAXWFXPAARAWRGLARVRAPPSAAPAVARGRSXGSLYA

SEQ ID NO: 190584 - protein, 123 aa, Zea mays
  unsure (1)..(123): unsure at all Xaa locations
  Clone ID: MRT4577_105391C.1.pep
SNNLAGAGGTDNSLRRISHDNFIGHRGLCGYRLGSTCESTENRYIPSIXNADIIVITVREMVMLLMILVSVCLSDNSLVDNDDSVNNPEINGPCMIVILHMNMALHDFDDIMRTTENFSEKCI

SEQ ID NO: 190585 - protein, 75 aa, Zea mays
  Clone ID: MRT4577_105392C.1.pep
IKDARMFGIQSSTTFTTASRMPLDQSLLTPIGRLCLSIVWDTWFHRKKRMYAIYNDCFMCLRPVWRGLVALDRGW

SEQ ID NO: 190586 - protein, 42 aa, Zea mays
  unsure (1)..(42): unsure at all Xaa locations
  Clone ID: MRT4577_105393C.1.pep
YTHSLNVCWXLNHQNLIEMAQGHISLSISPFLVIYANTIKSN

SEQ ID NO: 190587 - protein, 134 aa, Zea mays
  Clone ID: MRT4577_105394C.1.pep
MAFYGACVAAPLTHFLTMVQKQLPGKILLQQLITVIFFFPIQNTVYLASMAIIAGAKTTDQVRGAVRAGLVPMTKGMCALHPILLTSANLFVPKEMFAPFFSLVGFCLGTFFNTMAKKRIAAAAAAEKAEKKDT

SEQ ID NO: 190588 - protein, 47 aa, Zea mays
  Clone ID: MRT4577_105395C.1.pep
IQTKILIEKLGQLFALMLIVSIYEFKFPHLYGHQKLSSIPSFPRKSW

SEQ ID NO: 190589 - protein, 80 aa, Zea mays
  unsure (1)..(80): unsure at all Xaa locations
  Clone ID: MRT4577_105396C.1.pep
KEPERDRKKVKNIKHSGNISLDDVIGXAKTMPNKAMGKGLAGTGKGNLGTWVRVGCTRDGEGPKDLQQEIDYWEGENPSV

SEQ ID NO: 190590 - protein, 104 aa, Zea mays
  Clone ID: MRT4577_105397C.1.pep
VRGRVGGASALACTAAARRGGGGFYSTWPGRPPCRRTDPILGAGGVSGRPAPDAARHPRQQATAEVRRQILLRLLSPYQKSWTCRRTRSASRAASARWSCSRSS

SEQ ID NO: 190591 - protein, 251 aa, Zea mays
  unsure (1)..(251): unsure at all Xaa locations
  Clone ID: MRT4577_105398C.1.pep
MANEFPDEVLKSVFPLLDGKDLVFCMLVCRQWHEIAKDDYFWKCICSRKWPSICKQPPSGANYKKLYLTFSKPREMQNLPVPRLTFEDIVFYIDMWLEGSLIFSQAVSGRTLRAGLQGAPPPGIPDILAAHLSSQDCILMLEVEPKLXVPMGPAITVSVLANRKDSNKMACIINKSTFDYIDSNAARALAYEYLRFSPRHPFTSDIRAWMSLLFLCKGANTIEVFGIELDFCDAAKSEKEILWLLDMLDWK

SEQ ID NO: 190592 - protein, 84 aa, Zea mays
  Clone ID: MRT4577_105399C.1.pep
VSSPIFSLLTFSLFLKFLAVLSSNWSYVIYRLFFWDSFMFSVIDALLHVGHTKVCRRTGISSLNFQACLSALVFKTTLCTIAYL

SEQ ID NO: 190593 - protein, 66 aa, Zea mays
  Clone ID: MRT4577_10539C.1.pep
LETDKKKKKKKKKKKKKKKKKKKKKKKKKKKKFKKKKKKKKKIFFNFPGGLLKREIFENFKKIGGG

SEQ ID NO: 190594 - protein, 218 aa, Zea mays
  Clone ID: MRT4577_1053C.1.pep
YPRGTFLSLWTAGSLGTDFKAQLVEGQAQINTLQSEDSGVFVGIEDAKSLQMTEVFSSTISTNMASLMEVFAGGSLEMKVMEKVGCQKYSATQWESDKPNEYQRQIHYKFSKKLSPVGGEVTGTQQKSLMPNKKGWVIEEVMELQGVLLGDFFTLHIKYQVDDLAPKQRASNVQVSLGIEWSKSTRHQKRIEKNVLSSSSARLKEMFNLASRELSHAR

SEQ ID NO: 190595 - protein, 68 aa, Zea mays
  Clone ID: MRT4577_105400C.1.pep
SFSPCAKVGGLRLGSSQAWGVIQLCVVLSRAKLVSLVLAHGQSALSLLGQKLFCVPTEFVSSPFPSSV

SEQ ID NO: 190596 - protein, 127 aa, Zea mays
  Clone ID: MRT4577_105401C.1.pep
SLILPTCPLVSVMSGTTPTPTPTPTPLPPPPPPPPAARPARYDFLNSKPPPNYVAGLGRGATGFTTRSDIGPARAAPDLPDRSAYAAAGGPAVGRSRGKPPGEDDGDDDGGDEEKGYDENQKFDEFE

SEQ ID NO: 190597 - protein, 88 aa, Zea mays
  Clone ID: MRT4577_105402C.1.pep
VSRISDQLLRCLASSRFSNTIAWSRSAHRAHPPHKETYLDIPAVDPSSRRWRARNSRCTGECDVRMRRRCCVRRARRRLPRCVAGGAA

SEQ ID NO: 190598 - protein, 85 aa, Zea mays
  Clone ID: MRT4577_105403C.1.pep
LLDDITKSFAPTSCQREHFGFRTRQTSSVCKNFGHTPLFSSPLVRLVCTCYCSSEFRQSDTDIRADHKNVLAAMELRLFSIFFGH

SEQ ID NO: 190599 - protein, 97 aa, Zea mays
  Clone ID: MRT4577_105404C.1.pep
VHNVTLWGQSCILASRLHFLIQILVLFACFGCVVINHQKGGDCKENGPRAFWLIEFWCLMNNTIRELIRFLVFVFVVHRMRRGLDQGNEDATPQMKT

SEQ ID NO: 190600 - protein, 81 aa, Zea mays
  Clone ID: MRT4577_105405C.1.pep
LDANIVMWRGTLSRHHRSRPSKTLQLDSYHVLHRVALVHVGFGGRNVGMRAPAMASVVRGRAPPPRSIGEGRGHRGQGDTP

SEQ ID NO: 190601 - protein, 88 aa, Zea mays
  Clone ID: MRT4577_105406C.1.pep
APSRRPPFLFFCLFFCSFFFFMLIMMETRNKKKPALGRCTTQRAQKKSSRFQKPGVFKGPVFLKRPTPLANRNFVFFQSPSFFSFEFF

SEQ ID NO: 190602 - protein, 73 aa, Zea mays
  Clone ID: MRT4577_105407C.1.pep
SSPSGARFCACSCCVPLPLVLSVLGRSSSLFAFAPWLPRSPALCLLRSLPSFCVPGCLSLIRPPVRLLLRLST

SEQ ID NO: 190603 - protein, 61 aa, Zea mays
  Clone ID: MRT4577_105408C.1.pep
THYDRRSRYTFTTWVPNILPPLALLALLGSATIASIIPQGSLALRAIIPQFPPTKLLSMGL

SEQ ID NO: 190604 - protein, 80 aa, Zea mays
  Clone ID: MRT4577_105409C.1.pep
HISYIYPEIIIKPCVMCSLKMCLLFKNACFCSHMECIHTCTKSSVKKSVIIRLLIQPLVELMLRMQSCSCGIAPASCRCC

SEQ ID NO: 190605 - protein, 51 aa, Zea mays
  Clone ID: MRT4577_10540C.1.pep
QDSVLHPISSHLSNPDIRSVIFSVSSDKPRATSRGEVTIVQAIRIQVANVV

SEQ ID NO: 190606 - protein, 83 aa, Zea mays
  Clone ID: MRT4577_105410C.1.pep
PAPPGCSPFFFFVQHYASPHLKKNNPRPKTLAAPKKNPPHPARQAPTPAPPRNGGGTMLKKNVPTIAQRIAPPTKKTMAHTRW

SEQ ID NO: 190607 - protein, 138 aa, Zea mays
  Clone ID: MRT4577_105411C.1.pep
HASETFNLPLLMLGGGGYTIRNVARCWTYETAVALDCEIPNELPYNDYFEYSGPDFKLHISPSNMTNQNTPEYMEKIKQRLFENLRMLPHAPGVQMQAIPEDAVHEDSGDEDGEDPDKRISIRASDKRIACDEEFSDS

SEQ ID NO: 190608 - protein, 93 aa, Zea mays
  unsure (1)..(93): unsure at all Xaa locations
  Clone ID: MRT4577_105412C.1.pep
IYCLXQGLGVHFLFRLMSPKTTFLYQTPTQTLQIKQSLPQYTYRYSLKTVLHKYTPYQQFHFLTFSKPSYHKTGTLLYLSPHCKHKILYNNCS

SEQ ID NO: 190609 - protein, 44 aa, Zea mays
  Clone ID: MRT4577_105413C.1.pep
PAGPFFALPAGPCCAGVHAALTAVVPLRVQGDGVELKRLRMRKG

SEQ ID NO: 190610 - protein, 52 aa, Zea mays
  unsure (1)..(52): unsure at all Xaa locations
  Clone ID: MRT4577_105414C.1.pep
EELIGEDQNLLFVEYKNVIGAGRAXWPIISSINQKEEGRGNEDRLPLIKDNR

SEQ ID NO: 190611 - protein, 190 aa, Zea mays
  unsure (1)..(190): unsure at all Xaa locations
  Clone ID: MRT4577_105415C.1.pep
MSTPAGDGEDPGAGTPEAAAPFSADWKERILVPVVAAGVAGAGFGLVSRHRXALARSALPXTYAANLSIVAGCYGGARELARDARATTPDDLMNSVVGGLASGAVLGRIQGGHFGAVKYAVTLAVAGTALDYAAMKLSPQWRDWKEHLSVDTKDWFTVPEWSPIQVLDEEALAKKREREELLFAQQALGK

SEQ ID NO: 190612 - protein, 88 aa, Zea mays
  Clone ID: MRT4577_105416C.1.pep
GESRAPWEGPRPAGRSRGRGKHGRRSSTAHADRAPQAGRGQSCISMQLSCWGNRPHVGRKMRKRESRLGMDGVFGGDGEIFSRERGLS

SEQ ID NO: 190613 - protein, 98 aa, Zea mays
  Clone ID: MRT4577_105417C.1.pep
VHVSIICGSIPVRQVECSTANLFFMARGSGAAPVMVPSLPSPTHTISSCRPLFAISLSVLLCFMVGCQPLSRMSCSSYFPVTLQLLLLRVDRTQMKFL

SEQ ID NO: 190614 - protein, 181 aa, Zea mays
  unsure (1)..(181): unsure at all Xaa locations
  Clone ID: MRT4577_105418C.1.pep
RRRKIPAHTRSXXTKSXAXRDKXTSXXSXXRKXXXVHXXGVQAXRRHLPHXSTXXXGGFSXXGXAXRVPPAGRVAARPRXXARARXGDXRXSGRXTTAKGAGGRGSAAPTEALRRLGAPGGCCFPAVVXSTWSGAXXGGWCWVRWXGGGFRLKPLXVYPSXXRGACLRRLLXAGERXGVGH

SEQ ID NO: 190615 - protein, 168 aa, Zea mays
  Clone ID: MRT4577_105419C.1.pep
MSWLLVAAVLAGFALGPSAGTDHIVGANHGWNPNINYSLWSGNQTFYVGDLISFRYQKGTHNVFEVNETGYDNCTMAGVAGNWTSGKDFIPLPAARRYYFVCGNGFCLQGMKVAITVHPLPHNATSKGSSSHADTGAQEEAAAAALGTRSAAWLATLAVAAAAVAAFC

SEQ ID NO: 190616 - protein, 232 aa, Zea mays
  unsure (1)..(232): unsure at all Xaa locations
  Clone ID: MRT4577_10541C.1.pep
LPSWSGSSLLCNSPXPXFSPXXFXXXLPQKKFNXXIXXPXXLGAAPSXXPPSPPLAGGSPPPPXPXPXXXPPXXXXXXXSPXXXPPPPPPPXXXXPPPPSRPPRPPPLLFCPPPPPLPPPAPSPSPPPLPPSPPLGPPPPPPSPPPRALCSPPRPPPPPPXPPPPRCLSPSRPTPPPLFPPPXPPXPXPPASPSPPPLIPPPPPPXPPPAPPPLLPXPSTPXXLPPXPLSPP

SEQ ID NO: 190617 - protein, 85 aa, Zea mays
  Clone ID: MRT4577_105420C.1.pep
KKAFVQSINRVGPPLKRGTIFFGPFKLKGPLGGPKKKRTPFGGGGPLAPVKIPPPGSSGGGIGLFCIRGKAFRGGQGNPILFQGC

SEQ ID NO: 190618 - protein, 96 aa, Zea mays
  Clone ID: MRT4577_105421C.1.pep
RGHRAVQVRRQPSSIRVHLGLAVEPYAVQLQWSKVADRPRSRHQTARRPRRRSTRRQRPKESSNMPDNDDIVDMELERETMGTATQLPRVENWRVA

SEQ ID NO: 190619 - protein, 113 aa, Zea mays
  Clone ID: MRT4577_105422C.1.pep
FVSRAGLPRERWRPARLSRCRAPALAGSPPRRAFLSCQRLCSHACPFIQIIHNLSIALQARENNGSIKKSHNCARRASSVQWDSSCCSPIAVGRKEHRTGGMKEPGPKATPVH

SEQ ID NO: 190620 - protein, 62 aa, Zea mays
  Clone ID: MRT4577_105423C.1.pep
MWPAATMFALGFLLCPFPALSPSARNLTALLPELRDLFGSLYRHCRQEFFLLASTRRRRRGS

SEQ ID NO: 190621 - protein, 99 aa, Zea mays
  Clone ID: MRT4577_105424C.1.pep
MGQGKEVKTRPDPDVEIQEKGEIFFFYRPKVGKDEAHGPDDVQRMYIVLRPESGRAVEEKQAPDSGKEGRKRRRQGDGGQGRSEEKGVESGHGKQEVNI

SEQ ID NO: 190622 - protein, 54 aa, Zea mays
  Clone ID: MRT4577_105425C.1.pep
SVSIASQVVHLFATTIGTCLFYTTAPAMNIMHCQTIKVRHDIVFSDRMLYSPGQ

SEQ ID NO: 190623 - protein, 266 aa, Zea mays
  Clone ID: MRT4577_105426C.1.pep
MGANMMSWSMQVALVVALAFLVGGAWCGPPKVAPGKNITATYGSDWLEAKATWYGKPTGAGPDDNGGACGYKDVNKAPFNSMGACGNLPIFKDGLGCGSCFEIKCDKPAECSGEAVVVHITDMNYEQIAAYHFDLAGTAFGAMAKKGEEEKLRKAGIIDMKFRRVKCKYGEKVTFHVEKGSNPNYLALLVKYVDGDGDVVGVDIKEKGGDAYQPLKHSWGAIWRKDSDKPIKFPVTVQITTEGGTKTAYEDVIPEGWKADTTYTAK

SEQ ID NO: 190624 - protein, 77 aa, Zea mays
  Clone ID: MRT4577_105427C.1.pep
KKKKKKKKNKKKNLSTQKQALSTSTLSSIFAKLITSKNKLTDYNPKHLASTLSSAYTYNISQIAFLVTSLFALLRVL

SEQ ID NO: 190625 - protein, 92 aa, Zea mays
  Clone ID: MRT4577_105428C.1.pep
PPVPGLKGQKKTPFFSVLGPACKNQGHPLEEVFLEGGKVGPGPQKTNSPFSSPRSFFWGAQETQKVRFGTQPVAFWFYLSLPLGPPKYFAVI

SEQ ID NO: 190626 - protein, 74 aa, Zea mays
  Clone ID: MRT4577_105429C.1.pep
MPHRDVISATAAIGALTRGGRHRDALALFSRVLADGVAPNEFTFGTVLRSDTALRVRAPRVGVQLHACAAKLGL

SEQ ID NO: 190627 - protein, 235 aa, Zea mays
  Clone ID: MRT4577_10542C.1.pep
MGNCCPGSGDAEPAPAASADPSSHLHSGSLSLKAGASAGSAPTPTKPPAPIGPVLGRPMEDVRSIYTVGKELGRGQFGVTSLCTHKATGERFACKTIAKRKLSTKEDVEDVRREVQIMYHLSGQPGVVELKGAYEDKGSVHLVMELCAGGELFDRIIARGHYTERAAASLLRTIVEIVHTCHSMGVIHRDLKPENFLLLSKDEDAPLKATDFGLSVFFKEGEVFRDIVGSAYYIA

SEQ ID NO: 190628 - protein, 68 aa, Zea mays
  Clone ID: MRT4577_105430C.1.pep
LPKTFPKTHLFFTINHFKKFFLIQHPPFLNQFLPLKIFFLPPNPFLLNPFYKRIKHLNPLSISLSPLF

SEQ ID NO: 190629 - protein, 63 aa, Zea mays
  unsure (1)..(63): unsure at all Xaa locations
  Clone ID: MRT4577_105431C.1.pep
PLNWLRGEFALFLVDMLCWWPLIRSGQXRNRRGSFWASGDTPSFLQLDGLPWSGPTHEKGTQT

SEQ ID NO: 190630 - protein, 118 aa, Zea mays
  Clone ID: MRT4577_105432C.1.pep
MEIIIIISLVILLALGALFVIPKSQNKGKSKRNDLGAGTTSRSFTTEEISKHSTREDCWIIIKDKVYDVTPYVEEHPGGDAILNNAGGDSTEGFFGPQHGTRVFDIIEDFCIGQLKAS

SEQ ID NO: 190631 - protein, 90 aa, Zea mays
  Clone ID: MRT4577_105433C.1.pep
FPSRPGRAMLHPHNCLNRVAMAHVNPLLQIAVPLLITSFLPSKASNNIPRSPPGGENNFMPAMVSLTCSVNHPFIRWMSQLIKGTHYYHM

SEQ ID NO: 190632 - protein, 110 aa, Zea mays
  Clone ID: MRT4577_105434C.1.pep
MASTNPNPASLSAPLLSDSISPAHAANGHATNHRHHHDGAVAASVCGDAGDPFVFLSEDRPPRDRGPSPADPFRNGTPAWCGGAYAWARTLLLLPVAAVRLALIGLAIAV

SEQ ID NO: 190633 - protein, 44 aa, Zea mays
  Clone ID: MRT4577_105435C.1.pep
SPNSRDRRLICAHWTHLDASSLTGIAAIASYCMSEAVSEHSNAH

SEQ ID NO: 190634 - protein, 121 aa, Zea mays
  unsure (1)..(121): unsure at all Xaa locations
  Clone ID: MRT4577_105436C.1.pep
NPVVFTLISVQVDNWVYEEANSTFIQHQAISQRLMDTNSNXFRKLEQPFMRASGRGYWDPTEHTMDRFRELYSQVQGKIQGIDRWIDCPDWLTDSFQHSTQIQVETILLPLGLLYNVWVCD

SEQ ID NO: 190635 - protein, 76 aa, Zea mays
  Clone ID: MRT4577_105437C.1.pep
LNACFGNQKNRGRHSVKLLTRSATRSNKLHSMLGTDPKPFLQILPRPKHFIFYIKSAKHLYIRPRSKHRNNAKTHP

SEQ ID NO: 190636 - protein, 386 aa, Zea mays
  unsure (1)..(386): unsure at all Xaa locations
  Clone ID: MRT4577_105438C.1.pep
MGQNMLQPQVLCLCSIILTLFFTLLQPTAAQITAPWEVDALKAIRGSLIDPHGNLSSWNRGDPCMGNWSHVICYNATGSDGYFHVKELQLLSLNLSGILAPELGQLSQMKIMDFMWNSIGGTIPKEVGNITSLELMLLNGNQLNGSLPEEIGFLPNLNRIQIDQNHISGLIPKSFANLNKTKHFHMNNNSLSGQIPPELSRLPSLVHLLLDNNNLSGYIPPELSKLPNVLIIQLDNNNFSGSTIPSSYGNISTLLKLSLRNCSLEGPVPDVSGIPQLGYLDVSWNQLRGPIPSIQFSSNITTNXLSHNNLNGSIPGIFSGLPYLQRLSLDDNNLXGSVPSNIWQDIDLRGNKSLVLDFQNNALNNLSTPLSPXXHVTILLHGNPVC

SEQ ID NO: 190637 - protein, 60 aa, Zea mays
  Clone ID: MRT4577_105439C.1.pep
RDGFPSDLNDICGKRSQVTVDCHPPKSPTAVVLSTTSISIQSPPNTSLSSPVCIKTHSVL

SEQ ID NO: 190638 - protein, 489 aa, Zea mays
  unsure (1)..(489): unsure at all Xaa locations
  Clone ID: MRT4577_10543C.1.pep
MRSPPRCLRRCLLHLHSGRLSLKAGASRGPRVSVAPLAVADMGNCCPGSSSSAEPAPPQPPDPSGSSRPVASPASVSPTAAPAPARPPAPIGPVLGRPMEDVSSIYTVGKELGRGQFGVTSLCTHKATGQRFACKTIAKRKLSTKEDVEDVRREVQIMYHLSGQPGVVELKGAYEDKGSVHLVMELCAGGELFDRIIARGHYTERAAASLLRTIVEIVHTCHSMGVIHRDLKPENFLLLSKDEDAPLKATDFGLSVFIQGRLICXCSHSPPWFHCIITFISAAYDVLNHPRIREDGEAPDTPLDNAVLGRLKQFRAMNQFKKAALRVIAGCLSEEEIRGLKEMFKSMDSDSSGTITVDELRRGLANKGTKLSEAEVQQLMEAADADGNGTIDYEEFITATMHMNRMDRDEHLYTAFQYFDKDNSGYITMEELEQALREKGLLDGRDIKEIVAEVDADNDGRINYTEFAAMMRKGDPEPSNPKKRRDIVL

SEQ ID NO: 190639 - protein, 77 aa, Zea mays
  unsure (1)..(77): unsure at all Xaa locations
  Clone ID: MRT4577_105440C.1.pep
CLLKLLGLSARACTRTICPQCSQAPIASVITPYLSPPEDXVCENPIIQPXYRIQQAVTSGNLTLXSPSGLKQTLALL

SEQ ID NO: 190640 - protein, 50 aa, Zea mays
  unsure (1)..(50): unsure at all Xaa locations
  Clone ID: MRT4577_105441C.1.pep
DNRWSEMNEGRNEFKYNEXREEDRKELHIRIFHDSLXEEVGEXEKVEEKV

SEQ ID NO: 190641 - protein, 203 aa, Zea mays
  unsure (1)..(203): unsure at all Xaa locations
  Clone ID: MRT4577_105442C.1.pep
MPEETPFREKLPEEEEGVTFAFYSKIALLSSLAHYTFYSNKEIFLRELISNSSDALDKIRYESLTDPSKLDSGKELHINLIPSKQDRTLTIVDTGIGMTKADLINNLGTIAKSGTKAFMEALQAGADISMIGQFGXVGFYSAYLVAEKVTVITKHNDDEQYAWESSAGGSFTVRTDTGEPMGRGTKVILHLKEDXTEYLEERR

SEQ ID NO: 190642 - protein, 49 aa, Zea mays
  Clone ID: MRT4577_105443C.1.pep
RHRVQREAQGHDLGVPPEPSRTSRPRGVRGSHPETERRLALLNQRELLI

SEQ ID NO: 190643 - protein, 166 aa, Zea mays
  unsure (1)..(166): unsure at all Xaa locations
  Clone ID: MRT4577_105444C.1.pep
PQPAPDPVPRTTSPKPMPMKRLHKAPXTRPSRRPRPQPASATASGRQAPAHATPPSTQPALGSPPPPRXLPPENTPACTVAGPVYAQRAEGPAPLGEPQQRRXXSPPPPPPRRARRVPNGGPPRSPAXMNPTGPPTAGQSASPVVTAFPAQSTRRATLPTPGSARV

SEQ ID NO: 190644 - protein, 63 aa, Zea mays
  Clone ID: MRT4577_105445C.1.pep
SGREATSFIYRLERRLPLQITALVVSMLRLGLRKHWARISDRRKQFDLDPHPRSQGHYRTIRI

SEQ ID NO: 190645 - protein, 134 aa, Zea mays
  Clone ID: MRT4577_105446C.1.pep
MHFYYKEIITLLLHPTPGKTVFEPLSKFSLLISFNQVDKSPRPPLKEKKIQESLCFSAELDVPTLPKPKRVARTPKVSPAGVVLMAPSFSLPGLCLQYILVLLCMGVCVGLSYLPIEKSKFLGNGNYVLYFIIF

SEQ ID NO: 190646 - protein, 66 aa, Zea mays
  Clone ID: MRT4577_105447C.1.pep
LFFFFFLFSFVLGTMKLSTIYNPVILRQTVSPITPKTLKSFYGGKTSGLPGYDDLKGQTLLPTGSN

SEQ ID NO: 190647 - protein, 166 aa, Zea mays
  unsure (1)..(166): unsure at all Xaa locations
  Clone ID: MRT4577_105448C.1.pep
GLGGGLKKIFFFFFFFSPKTTPFSDHQISISSEFMTQQALHLHRCQQVTRAGGGLILQRGGGPNNKKLLPPALFFLLSREVPVPPAPSFFPFLAPFSSKAFLSLSGGFSGVSPSWEFLALGFPAPAPLRXGSPLFPRVILPVPLTLVFPSPPPLPEKTRGPPPNSP

SEQ ID NO: 190648 - protein, 61 aa, Zea mays
  Clone ID: MRT4577_105449C.1.pep
LIKRLLSCDQVSLALTNTIDSSGSPIAVHQVGRFSIAVTLIALPYHRAVLLPMPLSLVELS

SEQ ID NO: 190649 - protein, 379 aa, Zea mays
  unsure (1)..(379): unsure at all Xaa locations
  Clone ID: MRT4577_10544C.1.pep
PRVRLCAGGELFDRIIAKGKYTERAAASLLRTIVEIVHTCHSLGVIHRDLKPENFLLLNKDEKAPLKATDFGLSPXPRTRGFRDIVGSAYYIAPEVLKRSYGPEADIWSIGVIVYILLSGVPPFWAESEHGIFNSILRGQVDFTSDPWPRISQGAKDLVRKMLTPDPKQRISAYDVLNHPWIKEDGEAPDTPLDNAVMNRLKQFTAMNQFKKAALRVIAGCLSEEEIRGLKEMFKSMDSDNSGTITVDELRRGLAKKGTKLSEAEVQQLMEAADADGNGTIDYEEFITATMHMNRMDRDEHLYTAFQYFDKDNSGYITMEELEQALREKGLLDGRDIKEIVAEVDADNDGRINYTEFAAMMRKGDPEPSNPKKRRDIVL

SEQ ID NO: 190650 - protein, 69 aa, Zea mays
  unsure (1)..(69): unsure at all Xaa locations
  Clone ID: MRT4577_105450C.1.pep
SXPDIXXWAGQAKASSIKCREGRSLPTXXSSIQPTMKGTERVMPCPVDVPGYHPSTRSVVQHAHPGRRV

SEQ ID NO: 190651 - protein, 87 aa, Zea mays
  Clone ID: MRT4577_105451C.1.pep
VPPEPLRRGVLGLGGARRRVRFEINAGDSLNNRFRPIRALESDAVFSVDDDLIVPCSALRFAFSVWRTAPSVMVGFVPRMHWPTDPV

SEQ ID NO: 190652 - protein, 102 aa, Zea mays
  Clone ID: MRT4577_105452C.1.pep
NEWSWSGRQAPTLAKRRRRPTGAPFPFGCKEEVSFTANLGIFVRNFCKSLALVSSVSCFYLVLSSLQFNFAPPKFEQKLKLKVSSVAEFIAMQLMMRRVFLN

SEQ ID NO: 190653 - protein, 65 aa, Zea mays
  Clone ID: MRT4577_105453C.1.pep
SNCHPLCVVPGGDLSVVQRSVCMISNSTSIVEVLSPIFRRFNLIFAKLSPQVFVRLCLKGTGMVA

SEQ ID NO: 190654 - protein, 162 aa, Zea mays
  unsure (1)..(162): unsure at all Xaa locations
  Clone ID: MRT4577_105454C.1.pep
VWXXKXXSLVCRPVSGRTVIAFFGGPPCGPRALRAPSPGLPHARPAXDRRHFRPSASFVALPLARASLFSPPVPPLGAXXGPRALQGLPSXYLPHARRPTPALDRIYSEWLSSTYFSSSENLVRCCRVVVAFXGRILVSFGAREGFLLPMSRVSVCVNLIPP

SEQ ID NO: 190655 - protein, 60 aa, Zea mays
  Clone ID: MRT4577_105455C.1.pep
ESGIGQAAAGPAKFKLEVYAVSVPLADPPVIRDRHVACEILLRELSRTATVRGTLGARAE

SEQ ID NO: 190656 - protein, 66 aa, Zea mays
  unsure (1)..(66): unsure at all Xaa locations
  Clone ID: MRT4577_105456C.1.pep
WACSFGKQGFXEAILELDPLKEESFKGSPFVMQVLCXNLTLRTFDISEAPWEKIREGPKPDLKEGQ

SEQ ID NO: 190657 - protein, 74 aa, Zea mays
  Clone ID: MRT4577_105457C.1.pep
GTLAPLACVDGFLVRAPLRGIFSFRHSQAIAPSFDPQFLYQSSRCFCGPHSVRDLPARVYARSPRLLTAGMHYC

SEQ ID NO: 190658 - protein, 104 aa, Zea mays
  unsure (1)..(104): unsure at all Xaa locations
  Clone ID: MRT4577_105458C.1.pep
MVFCQMAIPLIVEVPHRXGGASXCREGTPLAMFLLTCVVSCGLSWSWGSMFWTFPGKKKVHSAGHLLGMALNLALCYAQMQYFLIMLWRLKNAILAYYAMWIWS

SEQ ID NO: 190659 - protein, 89 aa, Zea mays
  Clone ID: MRT4577_105459C.1.pep
TTSPAHPSSTGKAFNFLGPKNAGRGGAVTAASLSCPGFRCRFLFTANKVLGRFIGRRFLPLLIKTALTVVTYAFNLEFFEHIMLRSIHF

SEQ ID NO: 190660 - protein, 135 aa, Zea mays
  unsure (1)..(135): unsure at all Xaa locations
  Clone ID: MRT4577_10545C.1.pep
PQGAKNMTLLMGSSATEPRHSAPWLVRRPASRYPFLCVTPGSQEHDSPYGVFVRQTRLLGARAWLAGRSSLRCGEGSSASVGGPEFLPQGLLDLVSPGGLFPCRQLRGFHGCLADRPKTILQLWMHEXEVRADQL

SEQ ID NO: 190661 - protein, 72 aa, Zea mays
  Clone ID: MRT4577_105460C.1.pep
THAGGYTPSHAYDLQDAQRQLGGRLPGAVPFCPRWSLLTMETSSSNWHLALLAMPFLMLLLTRKASHPNWIV

SEQ ID NO: 190662 - protein, 91 aa, Zea mays
  unsure (1)..(91): unsure at all Xaa locations
  Clone ID: MRT4577_105461C.1.pep
RVFFFFFFFFFFFFFFFFFFWERKGPRPLFFLNFCYXFYWEPVFVCWSRQRARDAFGFQIWGNTVFPTRANPRNVGVRVRGFFCGGFWRLW

SEQ ID NO: 190663 - protein, 83 aa, Zea mays
  Clone ID: MRT4577_105462C.1.pep
GFWPSVPSAQLPKPPLCVDASILGHPPHDNVVVFLHPSLLVKKGCKAVISHTSSFGVRPKRYGSYYRVWLGKKKKRTKKKKAC

SEQ ID NO: 190664 - protein, 89 aa, Zea mays
  Clone ID: MRT4577_105463C.1.pep
LTSMALIEGGEAPHPRSPCQQPKRQLPHCRISRPRCHLPTKQAPDPRKRDGAAGLGARLPGVRLPGGSTEPRMTVCWGKARRPRITSLP

SEQ ID NO: 190665 - protein, 83 aa, Zea mays
  Clone ID: MRT4577_105464C.1.pep
CICINVLEHVYVVATSFQKKGGKKKKKKKKKKKKKKKKKKKKKKREKKKKKKKKKKKKKQKKKKIKGGGLFKGPRFTSPSFQP

SEQ ID NO: 190666 - protein, 39 aa, Zea mays
  Clone ID: MRT4577_105465C.1.pep
VTNKQTKLVSNGIIGIKHHLRTDLLSRTRYFSPNITYLL

SEQ ID NO: 190667 - protein, 69 aa, Zea mays
  Clone ID: MRT4577_105466C.1.pep
MASCSWPTSSSGGSSRCTPSQLALQEALRFVASVVNEDVIMSPTKQLLVPRERIISSCKGFRCGPYCLH

SEQ ID NO: 190668 - protein, 44 aa, Zea mays
  unsure (1)..(44): unsure at all Xaa locations
  Clone ID: MRT4577_105467C.1.pep
GVSQXXGSVASVRXASCLXLCLXGVAVGXRXCXSCRXXXCLSTX

SEQ ID NO: 190669 - protein, 635 aa, Zea mays
  Clone ID: MRT4577_105468C.1.pep
MRYMLQESKRKQLSSQKISMELTSLSLISKASYVAEEPPQKHMVFNDYGFHKAGLSEKDCKSWKGQGDWEETWGETYSKKRIPALFVINISSGEVRPVKQIPRSLSVGQVIWAPSSSYSLVFVAWSSDNGFQGTPRKLGIKYCYNRPCALYAAPDPFGQEAEKSLTEGNKGETTTMIKLTANLSSAFFPRFSPDGKYLVFISAKSAVDSGAHNATNSLHRIEWCTDGKLDGSLGVADVVPIVLCPKDNCFPGLYCFGLLRDPWLTDGQTMIISSVWGSREVILSVNVVSCELSRVSPQDSDYSWNVLAVDKNNILAVSSSLITLPQMYYGIKVSQTESNWEWQGVSTPFPKPSDKISSVLAEHKFSILKIPISNPTDELANGAKLPFEAIFVSHKDSASNPTIVVLHGGPHSVYPSSYSKSLAFLFSQGYNLLVVNYRGSLGFGEEALQSLPGNIGSQDVNDVLTALDLVIKRGLIDPSRVAVVGGSHGGFLTTHLIGQAPDTFVAAAARNPVCNLSLMVGTSDIPDWCFVEIYGKEGKKYFSESPSVDDLCQFHQKSPISHIAKVKTPTLFLLGAQDLRVPVSNGLQYARALKERGIETKTIIFPEDIHGIDKPQSDFESFLNIGVWFKKHMGK

SEQ ID NO: 190670 - protein, 289 aa, Zea mays
  unsure (1)..(289): unsure at all Xaa locations
  Clone ID: MRT4577_105469C.1.pep
MVVLVRVLVACAKFRCPAANLLLSASTSRVRAQPGGPLLRQRTSKVSLRSIAMATTQASEAAADKGLPLAVDATMVDEYASQSKLLQEFVKIPTIGKAWIFNSKDDDMSKAVVSIGKSDLLANKRRQFLLNTHISKSPSKSVDFQWSPFPTEISGVSAIVPSPSGEKLLLVRNSEDDSPTKLEIWGPCQLENEIHIAKSVHGSLYTDEWFEGISWNQEETFIAYVAEEPPQPKPVFNDYGFKKEGLSEKDCKSWKGQGDREETWGETIPXKRIPALVVITSPSGGVRPV

SEQ ID NO: 190671 - protein, 108 aa, Zea mays
  Clone ID: MRT4577_10546C.1.pep
GCIVLAQCLAVVPQLALGALRICLCLWRGPGACVDVCAVLSPFSCCVLCFWCGLCSGPGCPHCCLVVLVAGAWSALRPPVGSVGVWPPPPVGGAGVLSWPLRWCGVVP

SEQ ID NO: 190672 - protein, 71 aa, Zea mays
  Clone ID: MRT4577_105470C.1.pep
ARARKLGSCISAALYSFFFALPLFSFFGVKGAWAGQRPLCLCWKYKKGGLTPCRFSKPPNHIRCFLNYSPH

SEQ ID NO: 190673 - protein, 59 aa, Zea mays
  Clone ID: MRT4577_105471C.1.pep
NAGFQVSKYLPYGPVEHIIPYLIRRAEENRGLLSASAFDRQMLRKELVRRFKNAVMGRE

SEQ ID NO: 190674 - protein, 48 aa, Zea mays
  Clone ID: MRT4577_105472C.1.pep
QQWLTRGNSSLSCLHGLRALLMRTLSHIAIHATYYLIPQYTPTEELVH

SEQ ID NO: 190675 - protein, 85 aa, Zea mays
  Clone ID: MRT4577_105473C.1.pep
VQRLLKALIGRMIKSLPPDHWTNFVEGLRQLLWPTYPPRRGLNSSTSTFSLANTSLANKLAKMTSMSTLGFHMLTYASVSTSHGG

SEQ ID NO: 190676 - protein, 281 aa, Zea mays
  Clone ID: MRT4577_105474C.1.pep
MVGVLSNRVDRDDLKAGDHIYTWRAAYIYAHHGIYAGDGMVIHFTRAAGHEIGTGTFLDWFLYSSSPAATEGPPCQKCGHLVKSDGVITSCLDCFLDGGSLYLFDYAVSPAFFLAKARGGTCTLAASDPSDVVIHRARYLLDNGFGMYSLFKNNCEDFAIYCKTGLLVETAFSVGRSGQLASLTAAFSAVASSPLRFLTTSAGGLAIVTSGMYCFGRYVSDIGVRRDVVKVPVERLVEQNVTWIPQCVATETDIAAGAPQQQLEVPCAVAEEASVIQPAAP

SEQ ID NO: 190677 - protein, 72 aa, Zea mays
  Clone ID: MRT4577_105475C.1.pep
KNPIRFSTPNPVMAADASRMASTSCSSPQPPPGAGAVSPGAADWPEDRRAGGGRGGPPSAPTNGKAAADAMG

SEQ ID NO: 190678 - protein, 281 aa, Zea mays
  Clone ID: MRT4577_105476C.1.pep
MVGVLSNRVDRDDLKAGDHIYTWRAAYIYAHHGIYAGDGMVIHFTRAAGHEIGTGTFLDWFLYSSSPAATEGPPCQKCGHLVKSDGVITSCLDCFLDGGSLYLFDYAVSPAFFLAKARGGTCTLAASDPSDVVIHRARYLLDNGFGMYSLFKNNCEDFAIYCKTGLLVETAFSVGRSGQLASLTAAFSAVASSPLRFLTTSAGGLAIVTSGMYCVGRYVSDIGVRRDVVKVPVERLVEQNVTWIPQCVATETDIAAGAPQQQLEVPCAVAEEASVIQPAAP

SEQ ID NO: 190679 - protein, 173 aa, Zea mays
  Clone ID: MRT4577_105477C.1.pep
MLAATMYYHNKTKMPPPPCSCFSAVSVPFSSFKTITMLLLLLLILQQLSAAAVAGMATTKLGLSDVVTDTCDRCSKSNPQVNYTLCVSSLSSDPESRQADLHGLAIISAKLLRSGAVAMEAKMADLSRKERPWSPRRSCLDACVGVYRNSLYDLGSSIVAIQERRYADAKTSM

SEQ ID NO: 190680 - protein, 182 aa, Zea mays
  Clone ID: MRT4577_105478C.1.pep
MVGVLSNRVDRDDLKAGDHIYTWRAAYIYAHHGIYAGDGMVIHFTRAAGHEIGTGTFLDWFLYSSSPAATEGPPCQKCGHLVKSDGVITSCLDCFLDGGSLYLFDYAVSPAFFLAKARGGTCTLAASDPSDVVIHRARYLLDNGFGMYSLFKNNCEDFAIYCKTGLLVETAFSVGRSGQLAS

SEQ ID NO: 190681 - protein, 201 aa, Zea mays
  unsure (1)..(201): unsure at all Xaa locations
  Clone ID: MRT4577_105479C.1.pep
GSWPSRVYAQTAKYPMANSVAQDMFGIIPGDTDYRIFAEDITNIPGLDIIFVLGGYFYHTSYDTLENLLPGSIQARGENLFNLVKAFTNPMLLKENEISNKAAKDGIEDVGAVFFDYLTWFMVFYSRDISLILHSLPICHFLLAPLFLKFPNVTLMSWFVTLLGFMRGMVLHTFGVILAIYIPALAAALRLLFTKXIEWFC

SEQ ID NO: 190682 - protein, 56 aa, Zea mays
  Clone ID: MRT4577_10547C.1.pep
PLQPPPNWSSPALAVLRLCLPVVNGRLIEGMHVRYRPCLNGIFPGAPASHCPLSVW

SEQ ID NO: 190683 - protein, 52 aa, Zea mays
  Clone ID: MRT4577_105480C.1.pep
KWKEFIQRADLSSSDCRNGFLRLLEEVLQPHDDPLESMYFLGCRALELNYCG

SEQ ID NO: 190684 - protein, 102 aa, Zea mays
  Clone ID: MRT4577_105481C.1.pep
GYSRKDLGVSYVKEKQLRVNMGISKLREKVKEHQEKFHSAAKIAGTNPVEWMENADRWIVGFLEKFEEGCHMMETAIKGRIQEGLKRQGRSESNLSGEDSDS

SEQ ID NO: 190685 - protein, 93 aa, Zea mays
  unsure (1)..(93): unsure at all Xaa locations
  Clone ID: MRT4577_105482C.1.pep
VCVGTGRQRFVVRTECVNHPLFRALLEKAKKAFGYAAAGPLALPCDAXXAFVRVLEQIEDAGRAAAVARCGLVRGHSAYRLLVPARPLLVGRS

SEQ ID NO: 190686 - protein, 72 aa, Zea mays
  unsure (1)..(72): unsure at all Xaa locations
  Clone ID: MRT4577_105483C.1.pep
PPPPQKKTTDRDXSKEGHXKSDDTSRSTTWRCRRWWPPLWNASAMATASEPERREPRRLRLRVTREASEPSP

SEQ ID NO: 190687 - protein, 125 aa, Zea mays
  unsure (1)..(125): unsure at all Xaa locations
  Clone ID: MRT4577_105484C.1.pep
MAATAGVGGGGGANAAVAEQIAQAVRSTSNLLQLMEQSSPAQFVNQDDQQRCTXSQVHLAKLPKNLLEKASFAKNTDHVLHQLPQVISSLDAYMDRSLQSASQIKTVTQXLLSNIEMTHLKSMFA

SEQ ID NO: 190688 - protein, 162 aa, Zea mays
  Clone ID: MRT4577_105485C.1.pep
MAATAGGGGGGGAKAAVTEQIAQAVRSTSNLLQLMEQSSPAQIRDSMVRILDGFTFVLKVHLAKLPKNLLEKASFAKNTEHVLHQLPQVISSLDAYMDRSLQSASQIKTVTQLLSNMENTQLSDEAEIFGFLVCSRFNFRNLLSPTQRNWNRGIVNSPSLEK

SEQ ID NO: 190689 - protein, 83 aa, Zea mays
  Clone ID: MRT4577_105486C.1.pep
FMALFKSGYPVVFNLVQVLAWRLLMQLVSILHPCLLHQRIRPLLLVIGCRERRPHTTVCVCLSCNRSKFGLYDPVVQLQHIWH

SEQ ID NO: 190690 - protein, 49 aa, Zea mays
  Clone ID: MRT4577_105487C.1.pep
KCDKKKKEKYKKKKKKKKKKKKKKKKKKKKKKKKKKKKQKKKKKKKKKT

SEQ ID NO: 190691 - protein, 161 aa, Zea mays
  unsure (1)..(161): unsure at all Xaa locations
  Clone ID: MRT4577_105488C.1.pep
MASSQVDVAGMAATAGGGGGGGAKAAVAEQIAQAVPSTSNLLQLMEQSSPAQQLPQCCAEVSMVQHGGLDGSSXQVHLAKLPKNLLEKASFAKNTEHVLHQLPQVISSLDAYMDRSLQSASQIKTVTQLLSNMEKTQLKSMLPSSQRKEDQKSTKPLRTQG

SEQ ID NO: 190692 - protein, 125 aa, Zea mays
  Clone ID: MRT4577_105489C.1.pep
MAATAGVGGGGGANAAVAEQIAQAVRSTSNLLQLMEQSSPAQVHLAKLPKNLLEKASFAKNTEHVLHQLPQVISSLDAYMDRSLQSASQIKTVTQLLSNMEKTQLKSMLPSSQMKEDQKSTETQG

SEQ ID NO: 190693 - protein, 120 aa, Zea mays
  Clone ID: MRT4577_10548C.1.pep
PRHGHASLHAQISAGRFVFLCVTPGSQEHDSPYGVLGRRAAALSATAWFAGRPGLRCGGGSSGAVGAPEFLTEGLLDLVSPGGPLPCRQLRGFHGCLANRPKKILQHWMDETELRAEKWE

SEQ ID NO: 190694 - protein, 90 aa, Zea mays
  Clone ID: MRT4577_105490C.1.pep
RMSWGKKESGTRLGYSSRPSHGRAAARHSGGGRHSRHWRSLPRATPRPQAIPWSPPPAVVGERTDYAHTRGGRRRPPFLPFSRKRTGGPP

SEQ ID NO: 190695 - protein, 146 aa, Zea mays
  unsure (1)..(146): unsure at all Xaa locations
  Clone ID: MRT4577_105491C.1.pep
SSIDSSPHHGIPLRSRDSKILSQRITALHISHDMPPPPAAPRSKVGSXTWVTASANSTAASVDDLKNCHAHFVEVYQDTLFHLILTADYLNIKCLLDLTCQTVADMIKGKTPEEIRKTFDINNDFSPEEXTXILRENQSCFRVMKC

SEQ ID NO: 190696 - protein, 123 aa, Zea mays
  Clone ID: MRT4577_105492C.1.pep
MAATAGGGGGGGAKAAVTEQIAQAVRSTSNLLQLMEQSSPAQVHLAKLPKNLLEKASFAKNTEHVLHQLPQVISSLDAYMDRSLQSASQIKTVTQLLSNMENTQLRYMLPSSQKKKDQKSTEP

SEQ ID NO: 190697 - protein, 40 aa, Zea mays
  Clone ID: MRT4577_105493C.1.pep
NSNHNLLNKTFAKKYLGFKHKGPKLQKLFMIHFWTRGYGF

SEQ ID NO: 190698 - protein, 106 aa, Zea mays
  Clone ID: MRT4577_105494C.1.pep
LTSPRHSGRISFCRLMLERSEYDGLADWLYASIRHKDPSLPTVCATFYYLVGECCYGVMELFFMSWRCYKESGKKKKKTTISCRCFSGFNFDSLDILKKMCKCLSN

SEQ ID NO: 190699 - protein, 117 aa, Zea mays
  Clone ID: MRT4577_105495C.1.pep
QNVRPLETLTRFTTRKPSHISRAPSRLRTPHPPYRPPLPVLLPPYPAGAHTYTQLGSLPELSIYPPSSAPNSFHITKPVAESYYYHLLCCIKNTSQTLITMIYYGLAKKLHPDTNKG

SEQ ID NO: 190700 - protein, 174 aa, Zea mays
  unsure (1)..(174): unsure at all Xaa locations
  Clone ID: MRT4577_105496C.1.pep
TNYARSLAGISMVGNMLGXMXDGYANHLMFDRYIGKFLHIVLDDCFEAXMNGEKIPEKVPFRLTRMLAKTIEDSVIEGTFRTTCETAMQVLLTDIHTVMDMMEAFVHDPVLNRRMINFNEDPHESNYGNVHAHTDANTEETMADAELMQPQIRARERALVQDVNQVGDANDDVN

SEQ ID NO: 190701 - protein, 124 aa, Zea mays
  Clone ID: MRT4577_105497C.1.pep
ARTTEWSGCTNLHWKDAPVSMTPTIKWLLGLGLPVWLYSGDFDAVCPLTATRYSIADLELSVMEPWRPWTATREVGGYVQQYTGGLVLISVRGAGHQVPYFRPERALVLLRSFLKGTLPPYVVD

SEQ ID NO: 190702 - protein, 61 aa, Zea mays
  Clone ID: MRT4577_105498C.1.pep
PIPYFQKYTYPIIKTGFNLTPHLASFNTKPHPTRSVALPLTSISQAPPINTQSPQNKSKRF

SEQ ID NO: 190703 - protein, 54 aa, Zea mays
  Clone ID: MRT4577_105499C.1.pep
PAGGAERQAHGSPGKRAVYRSWSLVQLQGTQPIAVGPDSFVFAPVLRLRLLCVA

SEQ ID NO: 190704 - protein, 101 aa, Zea mays
  Clone ID: MRT4577_10549C.1.pep
VSFLVHRTSGHSGQLLGGVGRLADDLERYRALRRRTSSGSDRTKLEGGGGVCFFFFFFFFFFCRKICFLDYSQAPLLTRFLENKFVVATQVSDLPLEPCHA

SEQ ID NO: 190705 - protein, 81 aa, Zea mays
  unsure (1)..(81): unsure at all Xaa locations
  Clone ID: MRT4577_1054C.1.pep
HXSXSLSLSLSYXNCHHTILGLGNSAAGAVASSLTSLHVGSPHHFSIHTRATVLPFLFNPNPNQPYPLSVGSNFKPLTVSS

SEQ ID NO: 190706 - protein, 124 aa, Zea mays
  unsure (1)..(124): unsure at all Xaa locations
  Clone ID: MRT4577_105500C.1.pep
PGVRISLAGEPRATTSASLPTVPMARTKQTARKNTGGTAPRKQLATKAARKSAPATGRLKKAERYPPSXFTLRESRXYPKSTELLIPSLPFQRLVRENAQDLQTDLXRFQSSARAELKEAFEAY

SEQ ID NO: 190707 - protein, 76 aa, Zea mays
  Clone ID: MRT4577_105501C.1.pep
GAGAVITVVRRTDKVYKMEIFGKTLTGKTITLDGRSSDTIDNGKGKIQDHEGIPPDQQRVIFVGKHLEDGRILADY

SEQ ID NO: 190708 - protein, 105 aa, Zea mays
  unsure (1)..(105): unsure at all Xaa locations
  Clone ID: MRT4577_105502C.1.pep
GIHKVVQKGSRDAXYLKDRLKVAGIGAMLYELTPTXVLXRSTDEASARPWAVAREWNICHPWGTTTVNIVKLDYVLNEVAEKRATRDQDGISPSRCIDRVAGFEN

SEQ ID NO: 190709 - protein, 64 aa, Zea mays
  unsure (1)..(64): unsure at all Xaa locations
  Clone ID: MRT4577_105503C.1.pep
SYSGRPLFFXXXAEXKLGNLFNTLSGRSFIPSTWAGHGRIPFSSCQSKVLNRHHQRQIYSKLVF

SEQ ID NO: 190710 - protein, 57 aa, Zea mays
  Clone ID: MRT4577_105504C.1.pep
YVSSEFGSSPSLLIPLPCFPPLLSSPAETAFLPCAAARSPCSPAVLQELGTCKSKLS

SEQ ID NO: 190711 - protein, 78 aa, Zea mays
  Clone ID: MRT4577_105505C.1.pep
AFRKDEHGVVNAVPLLDLATSGLGAEQEYGKYKHIVELSKAIFGLRVNYVQWEPELQKSWDDNQVLEGYLKGTLGFNF

SEQ ID NO: 190712 - protein, 102 aa, Zea mays
  Clone ID: MRT4577_105506C.1.pep
TERAAGPAGPSVPPGVAPARAPAERGAEGEQRGPSDAGGCCEPGQLSTHLTLSPPMNFFAFFAVFFFFFLFFSFFFFFFFIVFFFLIRLTIEGCNDPRDLVE

SEQ ID NO: 190713 - protein, 172 aa, Zea mays
  unsure (1)..(172): unsure at all Xaa locations
  Clone ID: MRT4577_105507C.1.pep
YAVAPSKILVTQLNFAGSSRYGTGGHTXGLYKIASLFMKKTAQKPKAAAVSASAPHISDDLGKRHGADXRIYQPHGLLHRCDAPDDLTXRGPXDYGYNPVGLRKKTRSTPSXQDYYLIHARWAMXLSAADAAIPEGSNKFRANSMPEGVWLKNGALLLECNTLHYLGNIIPI

SEQ ID NO: 190714 - protein, 53 aa, Zea mays
  Clone ID: MRT4577_105508C.1.pep
EISASSAPEAQFQVVKPPTPSRTLPKGPTGNPWPGQKLQVEQSQNSTVQGTSP

SEQ ID NO: 190715 - protein, 40 aa, Zea mays
  Clone ID: MRT4577_105509C.1.pep
RYELSLCTPSICAHTVLHNLTISIGVKQARTCLRINRTRG

SEQ ID NO: 190716 - protein, 487 aa, Zea mays
  unsure (1)..(487): unsure at all Xaa locations
  Clone ID: MRT4577_10550C.1.pep
MAKLLKPWYAAFVNRFLAMVAVASIVAAALRRAWPAFSMDDVVGSLGAARPVHVLMAVILAAGVAKLRRLRRPRDVYLVEYGCFRPRPCFRAPFATCLEHVHLLPYLVDDESVSFAIRLLERSGLGDETCLPYSYHYMPPDRSLEAAREEAELVIFSAVDEVFARASVRPXEIDVLIVNCSIFTPTPVFADMVVNRYGSRADVQCLNLSGMACGAGLVSIGTSKNLLQVAPPGTRVLTVSTEILSSQYYVGSERAMLLPNCLFRMGAAATILSNSPERARFRLGRLVRTMTAARDADYRCIFQEEDGEGILGVRLSKDLTTTAGHALKRNIAAFGPLVLPVSEQLLVAMSLLKRKFMSGRRARVRLYRPDFRKAFEHFCIHAGGRAVIDEVQRGLGLSDEDVEASRMTLHRFGNTSSSLVLYELAYIEAKARMRAGDRVWMISFGAGFECSCVALECVKPPADAGGPWADCIDRYPVHLPEVAKDNI

SEQ ID NO: 190717 - protein, 154 aa, Zea mays
  Clone ID: MRT4577_105510C.1.pep
ARLTRRGAASRRPRAGGTTPCGPAPCLLEHSRRRAARHQVSDWGPPPRGRTRRSFGVGSRACVGSRGFEYHFVGKTPGAHVSSRFLWYAKACRAFLAKPPLRLRTRLRKLPAIARPLEPVVVAMQGSPVRNRRAAERRKSPSQQWTGRLMKGCG

SEQ ID NO: 190718 - protein, 265 aa, Zea mays
  unsure (1)..(265): unsure at all Xaa locations
  Clone ID: MRT4577_105511C.1.pep
PGSAAPPRLRPHLARLASFLIVFAVGYSLGLLSSSTRPPPPRPSQSQSQSQATTIARPHADALFPASSNSNGTAASSYPRSPPHDLFRFRERCGEPVPSDAVVRTLLDRLFGGESPYAGFPPERTAALLRPAAARPRGWGSTGAVFAELMEAVRPAVVVELGAFLGASALHMAAVARNLSLSPAILCVDDFRGWPAFRDRFRRDVPPPRHGDALLLPQFMANVVAXEGARVVLPLPFLTXSALAALCDWGVYADLIEVDAGHDFH

SEQ ID NO: 190719 - protein, 42 aa, Zea mays
  unsure (1)..(42): unsure at all Xaa locations
  Clone ID: MRT4577_105512C.1.pep
ILENRDITIYKIXYNHMIHXYXYSDIVEITTHAKHYXLYSQP

SEQ ID NO: 190720 - protein, 98 aa, Zea mays
  Clone ID: MRT4577_105513C.1.pep
LHPDLDKAGKFNYLMHASSELNRLARANCNQTSFFVAWTEGKKRKKWLGKTHTLRVLPVAHRSIRSVATDAHHLLEGCTSTGRGTMLDMGRYLSTYGI

SEQ ID NO: 190721 - protein, 47 aa, Zea mays
  Clone ID: MRT4577_105514C.1.pep
YLYKLFRALELPYTIYKHIHHNNQTWYKCVYRLRPSHTNLYFYLDFT

SEQ ID NO: 190722 - protein, 108 aa, Zea mays
  Clone ID: MRT4577_105515C.1.pep
KGRGNNKTEGTKTQKTEKTERGGEKKNRGQKDTTRCQKEEKTTEENMYSTGVMGLGIGEDQKTVGKANKSGVNLPIPTAGRTEFEATKPIMRRPTFSRPGPQCGGRRS

SEQ ID NO: 190723 - protein, 222 aa, Zea mays
  unsure (1)..(222): unsure at all Xaa locations
  Clone ID: MRT4577_105516C.1.pep
GNQPXRRNAXTYXLFXTLVXSXXLLIALIYTXXXXGSLNILLLTLTAQELSNSXANNLIXLAYTIAFIVKIPLYGLHLXLPKAHVEAPIAGSIVLAAVLLKLGGYGIIRLTLILNPLTKHIAYPFLVLSLXGIIITSSICLRQTDLKSLIAYSSISHIALVVTAILIQTPXXFTGAVIXLIIAHGLTSSLLFCLANSXYEXTHSRIIILSQGLQTLLPLIAF

SEQ ID NO: 190724 - protein, 129 aa, Zea mays
  Clone ID: MRT4577_105518C.1.pep
PLGQPSARRMYSAATHRRHIGTTPPTKSSGFTAPRPPGSTHGHDLHGTTHGHGFQASTESRPRSLHGFNGIQPATAPRLRPNPAAPLHGATASRLPRTGSTASRLRSSFGRFSELLIPPLAVQVSRGHW

SEQ ID NO: 190725 - protein, 86 aa, Zea mays
  Clone ID: MRT4577_105519C.1.pep
DVCIAEDHDVEQSILDPSVIVVYDTLLYILSVCKFVVVAHNSGKFNRLFQYSLQSACILHPQYSARVHNLVHETARSLLHLAGVLR

SEQ ID NO: 190726 - protein, 145 aa, Zea mays
  unsure (1)..(145): unsure at all Xaa locations
  Clone ID: MRT4577_10551C.1.pep
LVRHLDDDQGLHHATVSRSSTEAEYKAIADATAEVIWIQVLLRELGISLPRPPSLWCDNIGATYLTANPIFHRRMKHVEVDYHFVRERVAMNQLDVRHISSKDQLADIMTKALPAPAFTHLRHNLNLLDRXRLRGGISNIIYFPT

SEQ ID NO: 190727 - protein, 77 aa, Zea mays
  Clone ID: MRT4577_105520C.1.pep
DVKFIHPLHSPRLGKLAFLNTSIHMVTIDILLTFASLRHSNTSSTAFAIWVLLLQCTAILQSTFVSLSIPLVQFGRA

SEQ ID NO: 190728 - protein, 116 aa, Zea mays
  unsure (1)..(116): unsure at all Xaa locations
  Clone ID: MRT4577_105521C.1.pep
CAGIKAQAHGDPVTWKLMDKEHALLLSNXRSDIDRLVEXSLPQRXGCLGSAIPIMKKSSQRLPGIGWPMRPAEYLCLERSCAQHEKTLXXPLRRLINFPTSVWLAISVAATPLTPA

SEQ ID NO: 190729 - protein, 71 aa, Zea mays
  Clone ID: MRT4577_105522C.1.pep
MPMACCRTQLSPLRLALRATGFTPQNTCSVEANDSTVTPSDDVGNKRRRLDSATSTCAISTWLRLGLPLPP

SEQ ID NO: 190730 - protein, 81 aa, Zea mays
  Clone ID: MRT4577_105523C.1.pep
MGNAACGPPSGFPPGGRCRRRRGLMVVQHVILDVHGELFSGGVSGCGVPPASKAAIAALKEVKAGEGDGDGDDALGECAIC

SEQ ID NO: 190731 - protein, 90 aa, Zea mays
  Clone ID: MRT4577_105524C.1.pep
VRLAFPVFFFLAAAEFAAGTRSPSAFVQNAIYSNRITIFSKTYCPYSMRAKHIFRDLKEDPYVVELDTRDTVNALSNGQLQKLLGKSQSQ

SEQ ID NO: 190732 - protein, 95 aa, Zea mays
  Clone ID: MRT4577_105525C.1.pep
MALVRLAFPVFFFLAAAEFAAGTRSPSAFVQNAIYSNRITIFSKTYCPYSMRAKHIFRDLKEDPYVVELDTRVDGRDIQSVLLDLVGRRTVPQIQ

SEQ ID NO: 190733 - protein, 161 aa, Zea mays
  Clone ID: MRT4577_105526C.1.pep
MKNVAKCDTWCELQNPVNHRVFERKLRPKPLGRGHACLGVTQFPVFFFLAAAEFAAGTRSPSAFVQNAIYSNRITIFSKTYCPYSMRAKHIFRDLKEDPYVVELDTRVDGRDIQSVLLDLVGRRTVPQVFVNGQHIGGSDDTVNALSNGQLQKLLGKSQSQ

SEQ ID NO: 190734 - protein, 104 aa, Zea mays
  Clone ID: MRT4577_105527C.1.pep
SIFFCATPGAARGGAFRAHYRVAPGLTGGNSKRKIEPPKKGHLARSKCKKGSLTGATGVEACFFRALKGSWSLPGTGYGYTHPTGHYVPTTKTTWAPHFGAWPP

SEQ ID NO: 190735 - protein, 65 aa, Zea mays
  Clone ID: MRT4577_105528C.1.pep
RNSDLVQGDLSGSSNCFLSDRVVHGGLVGSIKSDHKQHPPRRMHADVRQESLERQPYHYLLPRRM

SEQ ID NO: 190736 - protein, 195 aa, Zea mays
  unsure (1)..(195): unsure at all Xaa locations
  Clone ID: MRT4577_105529C.1.pep
MEAFGGFFVDEKAARVENIFLEFLKRFKESDGAGEPFYEAEMEVMRSRESTTMYVDFAHVMRFNDVLQKAISEEYLRFEPYLRNACKRFALEHRAGENRAPLISDDSPNKDINIAFYNIPMLKKLRELGTAEIGKLTSVMGVVTRTSEVRPELLQGTFKCLDWGKLXKNVEPQFXKYTEPIXCRNATCXRQNKWA

SEQ ID NO: 190737 - protein, 69 aa, Zea mays
  Clone ID: MRT4577_10552C.1.pep
PVIPHPTPKSCSILIHAKSPSAGLFILELHHFAHLAFAPGFSPPPPRPSFFLPSNPRITSTLSLISPFK

SEQ ID NO: 190738 - protein, 51 aa, Zea mays
  Clone ID: MRT4577_105530C.1.pep
PFSPVISCFDPLPLLFLLLDLPIIFSFAFRGVQLLPLHINLLHIHSGLVPH

SEQ ID NO: 190739 - protein, 95 aa, Zea mays
  Clone ID: MRT4577_105531C.1.pep
FRLGFGLSLLGFSADWWPWGWWPFMDCLCCCWALFLSGLFKSCIFACMLPHSVIFLQGHCMPGDSKVPVRGWTLYGFKIAANGAWAGVPFFGPPF

SEQ ID NO: 190740 - protein, 57 aa, Zea mays
  Clone ID: MRT4577_105532C.1.pep
SKQQATQLADHEDECLRRKILYGDHLTVHVYIYNVFSFSCIVYLCGLYSYFYFPTRP

SEQ ID NO: 190741 - protein, 90 aa, Zea mays
  unsure (1)..(90): unsure at all Xaa locations
  Clone ID: MRT4577_105533C.1.pep
MWCRMTLVLVHCLAMFGSLELQPEMHEVADSMVDRLRTIGRNSDGQFIAVDLRVDMLNKKGCQNSDIDGEKSCYNAQEIAXVLRQIGMTR

SEQ ID NO: 190742 - protein, 171 aa, Zea mays
  unsure (1)..(171): unsure at all Xaa locations
  Clone ID: MRT4577_105534C.1.pep
AFGCTTRARALVETHSHTRACDTIYLLYSDLYYKIQCAALHSGDSEKTVATQIIILAQHIPFARCGVIEKRPTHSAFQNMRTLSVESDTPCXSGILSAGCGGYTHSDTCTLDSPIXPAPLALFPLSFSTCAAFPPEDLYMGLXIGXRYIALHGLYPKKHYDRDRAHIVPYP

SEQ ID NO: 190743 - protein, 74 aa, Zea mays
  Clone ID: MRT4577_105535C.1.pep
SSGNNAEYFFFFFFFFFLALLGYYPLVCFYPSTAVTTRLGVLSQTTTLLDGASWCDKRRPARRCYHPRRPFLEN

SEQ ID NO: 190744 - protein, 41 aa, Zea mays
  Clone ID: MRT4577_105536C.1.pep
RCRCELTCFKASDYLYISDFEPLKYGLTVLGFIKTSTASGV

SEQ ID NO: 190745 - protein, 82 aa, Zea mays
  unsure (1)..(82): unsure at all Xaa locations
  Clone ID: MRT4577_105537C.1.pep
DSLTLLIGDKPVTVFGIRNPDEIPWGEAGAESVVESTGVFTDEDKAXSHLKGSAKKVVISTPSKDAPIFVVRVNEDQCTSGV

SEQ ID NO: 190746 - protein, 100 aa, Zea mays
  Clone ID: MRT4577_105538C.1.pep
AYAHASVHAFFHVIPDSLPEPVTNATASPKHEQASRESAQPAKRTSVRGEQYNVCSELSLHRGALRPHRRCLLFYFNPDTDAPPNSDCTALLTLMPIPMK

SEQ ID NO: 190747 - protein, 69 aa, Zea mays
  Clone ID: MRT4577_105539C.1.pep
AVSIVIESAWRTTTIHHVGSLGVARRLTDVSYNCQCKYSCSTVYVGEGCCVPFSSRVIAQENSERSHVF

SEQ ID NO: 190748 - protein, 87 aa, Zea mays
  Clone ID: MRT4577_10553C.1.pep
PLFPRDIVAQLIFRVGPPAVVAERCSSEEGAVDYAPPVSRRLESVYKQLVLPLRFLHSCARSVQICSPLARYAPFRASGLAVASAVP

SEQ ID NO: 190749 - protein, 92 aa, Zea mays
  Clone ID: MRT4577_105540C.1.pep
WCGSVFGILGSKPQLNFQIMVRQTEKKIQDRDLPAGLAFFVFFLFISFFPLAGHVHALHCWRIFHRSAACGASRSTSRASHLLHPHRSLWCM

SEQ ID NO: 190750 - protein, 155 aa, Zea mays
  unsure (1)..(155): unsure at all Xaa locations
  Clone ID: MRT4577_105541C.1.pep
FSYTFFFFKPPLGGGGAFFFPPPPFFSGGGVYSFGRRKPRAPPPSPFFSLFFLFLLCSSAPPLRPPPPPSPPFFPVSPPFLPXPPPCPRPSPPPPLWLSPFFGAPPLLVPAXFYSFGCAVLVLSPPPAGPSPPTRPGASRLLLFRGGRAPPGGPA

SEQ ID NO: 190751 - protein, 419 aa, Zea mays
  Clone ID: MRT4577_105542C.1.pep
MICFNSDFSDLVPASPPSPSDRRQFPCPHSHRGRGSPFLPRQSIRSSQRREEEMGSNAAGKPPPPPAAAVSWEFHATGPRNLTSPGWRDLIRSSWRDPSYRRIAVSCFVQAAYLLELDRQEGRAGEAALAPNWWKPFKYKLVRPLIDSRDGSIYGALLEWDQLAALADLIVAKPQGAPKVVLALRGTVLRQLTVVRDLEDDLRLFALESLRGSVRFTGALEVLKSAIHRHGSANVCVAGHSLGAGFALQVGRALAKDGTFVECHLFNPPSVSLGTGLRKIQEKASSVLKRYISRSGGGGSSSSSNVSPGPGEELQAAAARDGVGEEVMSREVKRWVPNLYVNSCDYICCFYADRSGVATVTEEKRSGVHSKLYVIAKGPSKFLEAHGLQQWWSDDSELHLAVHDSKLMYRHLKSLYVQQ

SEQ ID NO: 190752 - protein, 448 aa, Zea mays
  Clone ID: MRT4577_105543C.1.pep
MLPALIALLLSLLPAVADAASMDPTERETLFRVMEAVSSDRDWRVESPDPCGGPWPGLECKPAADAGAARMHVTRLDFGVEPNPTCKDSASFPPEVFTLPHVQSLFFVDCFTNPAATTALALPPPANLSATGLQQLSIRANPALSGVMPPALASLRSLQVLTISQNGLVRGEIPPGIGDLTSLLRLDLSYNSLSGPVPSQIGQLKSLVGLDLSYNSLSGAIPSRLGELRQLQKLDLSSNNLTAGIPDAVANLTSLTFLALSNNGLTGRFPPGISGLRSLQYLIMDSNPMGVPLPSELGSLARLQELRLAGSGYSGPIPDAFGQLASLTTLSLQDNNLTGPIPAALSRLGRMYHLNLSNNALGGAVPFDRAFLRRLGGNLDLSGNSGLCLDDRSALRGIGACRGGGDGGTPMSSSARTSSGSRGVRGSLVGAACVAVCCLLALNEHALY

SEQ ID NO: 190753 - protein, 82 aa, Zea mays
  Clone ID: MRT4577_105544C.1.pep
GILNALSVSRPGSPAILLQMTEHRKRTRKPLLRYLLVNPGNLQTEGGLIHNYIYKRGTNRNKHDADLFEFTCCILAVDKNRT

SEQ ID NO: 190754 - protein, 124 aa, Zea mays
  Clone ID: MRT4577_105545C.1.pep
PDFVASFVALLPGFIGCCRDLTGAYPRRRSTAPSFPAGGPPDGIRRLALHRGSTRRRPRDQRKLPQGREHRRRHLQDPAATVLLLMRHEMTHNKLVCNAGFILKLHLHQFVEGHQQDHDPPADG

SEQ ID NO: 190755 - protein, 74 aa, Zea mays
  Clone ID: MRT4577_105546C.1.pep
TFLLPPNFLTPSMAFQFFVWRGFILVLSQFSQLGFQFFFVNIFLFESFFEAWSPKTYFFFWHPLFFFPVSVFCP

SEQ ID NO: 190756 - protein, 77 aa, Zea mays
  Clone ID: MRT4577_105547C.1.pep
AGRGSCPARARRPPAARLPLAPPMPPPMALLPLSSASATAAMPPFHSCPPDAMILKKQQEILIASKTPQRNTYSQQR

SEQ ID NO: 190757 - protein, 282 aa, Zea mays
  Clone ID: MRT4577_105548C.1.pep
MSSQVDSRSQSAGKRARTDGSRREDDWVCPSCKNVNFAFRTTCNMRNCNQSRPADHTAMQTPPRYPTSGGYMSPGTPPSMYLGGGAPPYGSSMFNGPAMTRYGITQFPGGSAYPYGYGGRISMGSPYGPMQMAGPTAYSGGSMMGAGGMYGMPMDRYGLIPAGSGPMGTRAGSYSDEDSQKKSAGAGRDNDWECPNCHNINFGFRTVCNMRKCNTPRPENQGSKPDGLRGSKPKTPEGSWKCEQCNNINYPFRTKCNRPQCGAEKPSQTNNANESAEDQDNQ

SEQ ID NO: 190758 - protein, 60 aa, Zea mays
  Clone ID: MRT4577_105549C.1.pep
QLHPPLNLQQSLAYVKPVFLHIGSIHRIFTCNSYFHVTCRCARVVHRYRDQCTCIMPTIA

SEQ ID NO: 190759 - protein, 124 aa, Zea mays
  Clone ID: MRT4577_10554C.1.pep
FGTRPISILPSSAPFPACARHAGDLGGAWARPLSDGVSRFPSCLSPVPSPLVLCEPAGDSACVPLSLSPPAFGGSSTAPGLGGYAARGLRAIGANGRCSTKAVAPLSEPYAPMRSVTRPLSASA

SEQ ID NO: 190760 - protein, 84 aa, Zea mays
  Clone ID: MRT4577_105550C.1.pep
PFNQLGALNPVVYLQQQILVPFSQVGAANRASFFKKQQLLPFFQQFGGNPATLLKIQQLLPFVQLVLTKPKASYQKHIIGGALF

SEQ ID NO: 190761 - protein, 109 aa, Zea mays
  unsure (1)..(109): unsure at all Xaa locations
  Clone ID: MRT4577_105551C.1.pep
RSVFPVRPPFFFFFFFFFFFFFFFFFYXXFFIAEPKINTGRPNHFFHQINIFTQITFLPHTLKIHFSQNKIPYSYPKPLYSLSNPLFYLNHHPSLFLSKNPLFNFSSFT

SEQ ID NO: 190762 - protein, 92 aa, Zea mays
  unsure (1)..(92): unsure at all Xaa locations
  Clone ID: MRT4577_105552C.1.pep
VVKVPNALTIKTMEPVPEVIIANSSHVMPTTEGTPTKAAKTFLMLSLGIMRKTNTREHTKKPRRTPTVHNVAPNNSILRNLXWRLQQIPKCF

SEQ ID NO: 190763 - protein, 149 aa, Zea mays
  Clone ID: MRT4577_105553C.1.pep
MFLLSGADAQMPYRLDHILVADGLPPWLFGARLRQILCHQCLWMPVAAPGCRCVPFWGHLKELHKAGKLCEPALVAGDPIVTSLGNAQQASVFRSSTDACVAFLENKDKVSYARVSFNGMHYDLPPWSISILPDCKTTVYNTASVRLGT

SEQ ID NO: 190764 - protein, 85 aa, Zea mays
  Clone ID: MRT4577_105554C.1.pep
IQFTSWCDGKDMEGGKNQSKRLRFQRAFRYGGPAGRPARPLRRSRRPVGYWCCYVMSAVGGCARRAVSRFLAAAAAAADPERRRR

SEQ ID NO: 190765 - protein, 277 aa, Zea mays
  Clone ID: MRT4577_105555C.1.pep
MAGSASRLAILLVLLAASPLLGATQKAAPGPASSSGSGAGAADAAPPTDVNKALKDEQFSEFRQLLHDTRVDTQINAQLTDSYNGLTIMAPTNAAFDKMKAGVLNGLSPQEQIQMVLYCVLPRFYSLSMLGTLSGKVNTQGSGHDGPYRYDIKRSGNNVNVSTGVNWMLLGSPVSKDFPLAIYPVDKVPLPYELFGPKPPTPAPAPAPAPGPAKAKTKKKKKSAAIAEPPTADDDDTGKGGKGLGKGGAKRHRKVLRDNIQGITKPAIRRLARRGGV

SEQ ID NO: 190766 - protein, 119 aa, Zea mays
  unsure (1)..(119): unsure at all Xaa locations
  Clone ID: MRT4577_105556C.1.pep
WKSSRGLDPREAGIRHEGKVEDVDQDQDNEEKNXKKIKEVSHEWSLVNKQNPIWMKKPEEITREEYAAFYRSLTHDWEEHLAVKHFSVDGQLEFMAVLVVSKRAPFDLFDTTIQAQTTI

SEQ ID NO: 190767 - protein, 283 aa, Zea mays
  Clone ID: MRT4577_105557C.1.pep
MATTSTPRLATLLVLLAAASPLLSAAQKAAPKAPAAAKAAPGPAASSSSGAGAADAAPPTDVNKALKDDQFSEFKQLLHDTRVDTQINAQLTDSYNGLTIMAPTNAAFDKMKAGVLNGLSPQDQIQLVLYCVLPRFYSLSMLGTLDGKVNTQGSGHDGPYTYDIKRSGNNVNVSTGVNWMLLGSPVSKDFPLAIYPVDKVPLPYELFGPKPPTPAPAPAPAPAKSKTKKKKKAAGIAEPPTADDDTSASDDQKAAAAPPGAAGSWAAAALSALAAAALGAGLF

SEQ ID NO: 190768 - protein, 108 aa, Zea mays
  Clone ID: MRT4577_105558C.1.pep
SHQGKFCCSQLSDCPPYSRCLCLRPASPRALCCPPDRWLFARRSGGPCPSRALMSLCTGGVPAPVHDMPRGGLGRVFMCFMSRCVRTPSGVDRRADVNGTAQCSFGVR

SEQ ID NO: 190769 - protein, 216 aa, Zea mays
  Clone ID: MRT4577_105559C.1.pep
MAGKEMTPNSKAAAPPATIRLVNFISEDQLDEVKRTRGERVEDGTAQRDKPLFQILQENKEKKDAEFNERFKHRPPKALDEDETEFLDKLALSRKEYEQQVANEEAEQLRGFHEAVAARSTVVHELETPTVSRPEESRPKPPTKRSQPALLKNIIISVKPHAKKPKVETEAKPAPEERRPSDRHGSDQKQPDDTKATLGSLVAYDDDDDESGEDVD

SEQ ID NO: 190770 - protein, 33 aa, Zea mays
  Clone ID: MRT4577_10555C.1.pep
CMIRHNPFISFHAEEIAFIGLSCLHQATQQNCM

SEQ ID NO: 190771 - protein, 58 aa, Zea mays
  Clone ID: MRT4577_105560C.1.pep
ELCLSTLFYLEEEKVYNTYLNKDRVTTPNIILARRILQESPRHQQSSIAANCMRSSIT

SEQ ID NO: 190772 - protein, 88 aa, Zea mays
  Clone ID: MRT4577_105561C.1.pep
SAIFTCDLPLVSWPHLPSCSGLLIQLCTHMPAFIAPYFPILDNLLSCLHCLHHSAHCWNLPISCSDCKEFAGTVGSFRHLATDRLICS

SEQ ID NO: 190773 - protein, 288 aa, Zea mays
  Clone ID: MRT4577_105562C.1.pep
GSRLNKQVLGALPLPLPYTITAFQLAFGSLLIFLMWATRLHPAPRLSAAQLGKIAPLAVGHMLGTVFTNMSLGKVAVSFTHTIKASEPFFTVVLSALFLGEVPSLPVLGSLVPIVGGVALASFTEVSFNWTGFWSAMASNLTNQSRNVLSKKLLAGDKDVMDDINLFSVITVLSFLLSCPLMIFAEGIKFTPGYLQSTGLNLQELCVRAALAGLCFHGYQKLSYLILSRVSPVTHSVANCVKRVVVIVSSVLFFSTPISPVNALGTGAALAGVFLYSRLTRTKKPKDA

SEQ ID NO: 190774 - protein, 61 aa, Zea mays
  Clone ID: MRT4577_105563C.1.pep
KGLLKRGNNREETRGTLPTGKAGEKKRKTIGPNSIGKKTFKGRKADYVSPMHGLGLHLKNS

SEQ ID NO: 190775 - protein, 176 aa, Zea mays
  Clone ID: MRT4577_105564C.1.pep
MPATALPICLLENLWILLTGFWSAMASNLTNQSRNVLSKKLLAGDKDVMDDINLFSVITVLSFLLSCPLMIFAEGIKFTPGYLQSTGLNLQELCVRAALAGLCFHGYQKLSYLILSRVSPVTHSVANCVKRVVVIVSSVLFFSTPISPVNALGTGAALAGVFLYSRLTRTKKPKDA

SEQ ID NO: 190776 - protein, 177 aa, Zea mays
  unsure (1)..(177): unsure at all Xaa locations
  Clone ID: MRT4577_105565C.1.pep
LCLGIIRTGFWSAMASNLTNQSRNVLSKKLLAGDXESSFHQSSTARPVNSNENCLVTQDVMDDINLFSVITVLSFLMSCPLMLFAEGIKFTPGYLQSTGLNLQELCVRAALAGLCFHGYQKLSYLILSRVSPVTHSVANCVKRVXXVIVSSVLFFSTPISPVNALGTGAALAGVFLN

SEQ ID NO: 190777 - protein, 225 aa, Zea mays
  unsure (1)..(225): unsure at all Xaa locations
  Clone ID: MRT4577_105566C.1.pep
GEKPPPKNGLFLENPPPFEGPLGRPPPYGTKKRAPPTKGCPKAGFRVNRGLKGKKCFSSKIGKKGSQTSLGKQRGHKLPPVPWPGPPXANPPPPGAVNSGVPXPGPQTGGEPGAQKRSPGGKGFPAPPIPPHQTTPGPLKGKNPPGPPPGGGPPPPTKMAGRPPPXPPSFPPGKPAPRPARLLXSPPPPPGEKGASFLGASSPPPPPRPRAPGAAGGRGGGLPPP

SEQ ID NO: 190778 - protein, 59 aa, Zea mays
  Clone ID: MRT4577_105567C.1.pep
KRWLPVSSISETIIRVGDPPHTPSDLLQIKFSIDQIPVSNRYKHRLRAAYQSIIRHHST

SEQ ID NO: 190779 - protein, 49 aa, Zea mays
  Clone ID: MRT4577_105568C.1.pep
NLARPKSDILRIASLLLGEESRIFCNIGWIVTAHPLLELLTQSSHTQKT

SEQ ID NO: 190780 - protein, 73 aa, Zea mays
  unsure (1)..(73): unsure at all Xaa locations
  Clone ID: MRT4577_105569C.1.pep
VPPLPEERRLRAAHRGNVNADLVRRHRHRHRHRVRGAVGWHGXHPSVGVGGLGSATAGERGSVRVVSCVXVIS

SEQ ID NO: 190781 - protein, 89 aa, Zea mays
  Clone ID: MRT4577_10556C.1.pep
LNTQYVKEQKATKNSLGSSAANCSESSSLSSSLSFSSSVEDRKDDSSSHVAADNGSDKIGRVADPHRRDPHGSPDGSDSDQPRKSGSHD

SEQ ID NO: 190782 - protein, 111 aa, Zea mays
  unsure (1)..(111): unsure at all Xaa locations
  Clone ID: MRT4577_105570C.1.pep
QLPASSRIHPVVNLSXLKLAAGFQGTAHSDLPITLPDFSVPIQVLQTRGVTKGHRQVQQVLVEWSRLPKELATWEDREVLQXSFNSCLXWGQAGSQGEGNVSNVREPTSPK

SEQ ID NO: 190783 - protein, 107 aa, Zea mays
  Clone ID: MRT4577_105571C.1.pep
SGAQLPPPGFRSGGVSCSPIVTGAGYSFLDLPAGLIHHWGPGSDRFRNPCFGGRHHGPLGPRRGDAFSTACLKTRMVGPQYCWRGLCLPLFLCRGGGVGSLLVGGPL

SEQ ID NO: 190784 - protein, 74 aa, Zea mays
  Clone ID: MRT4577_105572C.1.pep
PRTRRGSPKVSLGQVLKRTRRGQSPSLCFASAGGHLPFIGVGCSTARHGWDIFPEKLCRTWCPELPHLCIIRRC

SEQ ID NO: 190785 - protein, 96 aa, Zea mays
  Clone ID: MRT4577_105573C.1.pep
KNFLGPPEEVSFFLHLAERGFFFRAPRALFCFDPSAFNLFEPFEGFFFLGFVLLFTFLGFKGGVFSETKEFLSHKTPNFRTNKKKHLPRPLWIPPA

SEQ ID NO: 190786 - protein, 36 aa, Zea mays
  Clone ID: MRT4577_105574C.1.pep
MAAAWEVLAVLLVAAQVASAAQVTAPAFLWAPKNYG

SEQ ID NO: 190787 - protein, 76 aa, Zea mays
  Clone ID: MRT4577_105575C.1.pep
KIKNFWRAVFFFVTTANTHIIPGLSKTYLERIQKHGPRGKHPPRGGGGGFFFTQQEGYSKTTSVQKPNLIKSGLHK

SEQ ID NO: 190788 - protein, 85 aa, Zea mays
  Clone ID: MRT4577_105576C.1.pep
MRVLLVALVFLVLVGSATSTHTTGGCGCNPPPPVNLPPPVHLPPPVNLQPPVHFQPPVNLPPPVHLQPPVNVPPPVNLPPPQCHY

SEQ ID NO: 190789 - protein, 88 aa, Zea mays
  unsure (1)..(88): unsure at all Xaa locations
  Clone ID: MRT4577_105577C.1.pep
SXRASSDPVQSXAGDXSXMRSRLRQVXSHRRHSYYSRGPNPALXGRAGAGATWPLMECVPTAATLLTAWXSCSATPPGRXRPRPATSX

SEQ ID NO: 190790 - protein, 150 aa, Zea mays
  unsure (1)..(150): unsure at all Xaa locations
  Clone ID: MRT4577_105578C.1.pep
RINGFNVLCGVGILTTSYGIKEGGWSSLLLLPLLGDSSCYTGLLMKRCIDSSPNIGTYPDIGQAAFGVVCRIFVSVVLYLELYASCVEYITLLGDSMSSVFPLAHFDLNAHTLFAITTALAILPTXGGVMATIAVIVFLFWVGSCSASRW

SEQ ID NO: 190791 - protein, 63 aa, Zea mays
  Clone ID: MRT4577_105579C.1.pep
DFSQQTFFIGKFGSIPLKDYHFGSIPLLSHLHVGPHESMTCEVHGIYLKFGSFNGIDPIVPFS

SEQ ID NO: 190792 - protein, 50 aa, Zea mays
  Clone ID: MRT4577_10557C.1.pep
LTAISPVAPPIIFLRFLLTILGRLPTINRWPTYYTQSNHPPTPFPSPSPH

SEQ ID NO: 190793 - protein, 90 aa, Zea mays
  Clone ID: MRT4577_105580C.1.pep
GQGSFPLQHQTGVFWEKTRPARLLNQPLPFFPGQKGRLAPTPRKPVKLCVPFPARVPGPCWGPLKKRAPQKNLFSVSPPQKNKQGYFGGV

SEQ ID NO: 190794 - protein, 124 aa, Zea mays
  Clone ID: MRT4577_105581C.1.pep
YESRDGQRHLRKTFEPNSSSIWPSSFFLRKSSTTEREREEAPCSCCSGRRTNSAFHSSWRTNSSSLLLQLRQRPRLHPPLHELLLRLPAGVRFATTRAAVVMRKRKREECGGYGDEEEAWRGQC

SEQ ID NO: 190795 - protein, 111 aa, Zea mays
  Clone ID: MRT4577_105582C.1.pep
TSESTVVCSSEIPCASHRLMWKPELSEGAATFDHHHSRPWNLNHHRREFPTATLPYSISLFCASLYWGRCLRPENLRVARVLGASVSPAGWALNLYGEEPPAARVSRVRLS

SEQ ID NO: 190796 - protein, 69 aa, Zea mays
  Clone ID: MRT4577_105583C.1.pep
CVGLLACINCLQYDFVMSSMVLIMSSLRCCILRLSVQSTSHLVNYNTQTLGKYISPHVMLIIKHQNLLS

SEQ ID NO: 190797 - protein, 73 aa, Zea mays
  unsure (1)..(73): unsure at all Xaa locations
  Clone ID: MRT4577_105584C.1.pep
RPRGRTRGRRLSGEXIKAQASKLLILGLACSHPDAKLRPKIRDVRLVLLDKNPVPQLPLSKAPILLYCKPTCT

SEQ ID NO: 190798 - protein, 135 aa, Zea mays
  unsure (1)..(135): unsure at all Xaa locations
  Clone ID: MRT4577_105585C.1.pep
MGEDHDLITLDTCLKXEXILTGLLSVYGLNVXGMDRHYYYAGDATXVNLTHVWKRPRGEDNPPGHLRARLDYHDDMDAKXYMMTRGTLPPTLIHTDVTHYLAFKGADGNYVFTPRKIYNGPDTDMXALKHALLGL

SEQ ID NO: 190799 - protein, 55 aa, Zea mays
  Clone ID: MRT4577_105586C.1.pep
CSDFTNKRGGVYSLHIIIATARVNMACILEVDELLMAYSHPAGASPIEGGARCSS

SEQ ID NO: 190800 - protein, 46 aa, Zea mays
  Clone ID: MRT4577_105587C.1.pep
ARYEQSSGQFFKYEPRPLMVCVRCAGQIILVGSSPHARARSLGRPL

SEQ ID NO: 190801 - protein, 295 aa, Zea mays
  Clone ID: MRT4577_105588C.1.pep
MSPMLADMESPQLKASRDVANAMAAKVKLLQRELKTLKADLAFSKERCAQLEEENRLLRDGNHDADEDLIRRQLETLLAEKTRLAHENTVYARENRFLREIVDYYQLYMQDVVNLDDDDDDIEEEDDDYDVDADDVELEAEQYQDRRKCLPSRLVLEEEEHQAADPGAEPQSPTEQTESPRMLNTNSGGGVTPDHESPRILNTNSGGGGTPDRESPRMLNTNSGVTSDHESPRMLNTNSGGTPDHEPPRMLNTNSGVEIASESPRMLSTNTGGNTNESPRGYKDDGSSPETTRDG

SEQ ID NO: 190802 - protein, 75 aa, Zea mays
  Clone ID: MRT4577_105589C.1.pep
PVATRPSRLSSPTDRAIRNIKALKEITATHLLAYPRQTTCRDPSAPSTNQSGAESRTIQRPPNIQDHPNLQSKPR

SEQ ID NO: 190803 - protein, 88 aa, Zea mays
  Clone ID: MRT4577_10558C.1.pep
HHDHHHQRPPQPPPQPAPPRPPRAALEGAADATRASWYTCDFAARNDDACAPLLLPAAPGRGSRFAAGYTRSATGGQPVLGFGWCSWC

SEQ ID NO: 190804 - protein, 143 aa, Zea mays
  Clone ID: MRT4577_105590C.1.pep
RFLTDISRQRRDQLELERYRHQLEELVEARTAELAEATEAAQAASLAKSAFLANMSHEIRTPMNAIIGLTYLAQSDAVEPVQQQRLQKVANAAEHLLSVINNVLDFSKIEAGKLQLERVEFSVDEVLDNVANMTLQSAAAKGL

SEQ ID NO: 190805 - protein, 76 aa, Zea mays
  Clone ID: MRT4577_105591C.1.pep
IKVFCRPLPCAPRRGHKAVLGGSSDRHKYSRALLITVIYWSLGHMPWQVLAVGHTCNICTGLMRLILLHGFWPSRF

SEQ ID NO: 190806 - protein, 95 aa, Zea mays
  Clone ID: MRT4577_105592C.1.pep
DHPFVITTFHTPSTVEAAVPGRRSSLGFVGQRTPASVTVKHLVVPDLLVPPQLPKARAAVGLRLVPRLAPHCRRMSLPPTSKKGPRRRMIVHTLK

SEQ ID NO: 190807 - protein, 56 aa, Zea mays
  Clone ID: MRT4577_105593C.1.pep
KVDVCVLIVDYSSSFKHLVSGLLDIIFSPMSTAITASFKLDVHNFVGLSSLQVIQY

SEQ ID NO: 190808 - protein, 186 aa, Zea mays
  Clone ID: MRT4577_105594C.1.pep
CKPIRASMIASSIQQLLKVEMPERRDNQNRPSFLRSLLVGKNILVVDDNKVNLRVAAAALKKYGANVSCVESGKDAISLLQPPHCFDACFMDVQMPEMDGFEATRQIRQTEMRVNEERKNKLVLIEGSTFVEYHLPVLAMTADVIQATYEKCIKSGMDGYVSKPFDEEQLYQAVSRLIVGTTDSTV

SEQ ID NO: 190809 - protein, 58 aa, Zea mays
  unsure (1)..(58): unsure at all Xaa locations
  Clone ID: MRT4577_105595C.1.pep
FNFDPCNILLDGSEKKKKKKKKKKKKKKKKKKKKKXKXKKKKKXKKKKKKKKKKXKXK

SEQ ID NO: 190810 - protein, 426 aa, Zea mays
  Clone ID: MRT4577_105596C.1.pep
MSCFPCFGGGKGNNDDADAESPGDAAPASNMTPPAMVQAPAAYFPAPAAAPTAAAPPKPGGGNQAHEASADDSALRLAITGQAFAFRELAAATDHFTPYNLVGEGGFFRVYKGRLEKSGQTVAIKQLDKHGFQDNMAFLSGVAKLSQLHHENLVDIIGYCADGDQRLLVYESVPAGTLEDHLFDLPADKKPMDWCTRMKVAHGAAQGLEYLHETANPPVVYGEFKASHILLDEKLTPKLSDFGLAQLGQAGGSMPVVASPMMGSFGCCAPEYDRTGQATMKSDAYSFGVVLVQLISGRRAVDTSKPVDEQNVVTWAMPMFKDQKRYHELVDPLIKKEYPAKALNQVVAMAAMCLQEEDSVRPLMADVVMTLGFLTAMPPDPPAPAAPPPAAAPEPKEDKESDHSDSSSSSSSDDDEDNEEEETEEQ

SEQ ID NO: 190811 - protein, 116 aa, Zea mays
  Clone ID: MRT4577_105597C.1.pep
MLESIKVERAKYSLMCFQFPVGRIHRQLKQRTQANGRVGATAAVYSAAILEYLTAEVLELAGNASKDLKVKRITPRHLQLAIHGDEELDTLTKGTIAGGGVIPHIHKSLINKSSRE

SEQ ID NO: 190812 - protein, 49 aa, Zea mays
  Clone ID: MRT4577_10559C.1.pep
EIITDCYNYLTDRSHSSLKRYKNSTHKDIIHLCYVGIVMHSINANLYIK

SEQ ID NO: 190813 - protein, 197 aa, Zea mays
  Clone ID: MRT4577_1055C.1.pep
GDLEQSLRHTEGFAESVRRCCQTSMAEFDAGMTDTAVKHVQWDASKVRNKLQEHIQAHVECIRNAKLAELRANFEKKLSDSISGPVQSILETGERDSWACIRRLYRREIENAALSFSASLSEFDLDQTISNKMVSDLREYARSVVETKAREEAGNVLMRMKERFFTVLSHDKDSMPRSWMLDEDIRTITREARLGAL

SEQ ID NO: 190814 - protein, 75 aa, Zea mays
  Clone ID: MRT4577_105600C.1.pep
SALLLLAVRPCSASARLRPYSPYAIDAHDQLRPRCEESGRGGRIGSNRGRNCLWRPAGRGREGRGKGGDGRCRRE

SEQ ID NO: 190815 - protein, 54 aa, Zea mays
  Clone ID: MRT4577_105601C.1.pep
HSKTKFVVLLTMFNFSQILVSVLPCSTSLPSMRYITPFESILPLSRHWLSKSRA

SEQ ID NO: 190816 - protein, 97 aa, Zea mays
  Clone ID: MRT4577_105602C.1.pep
IYKPPGHSAPDMVYLGAMTNFDVTYNWIQDKCVPLVREITFENGEELTEEGLPFLILFHMKEDTESLEIFQNEVARQLISEKGTIDFLHADCDKFRH

SEQ ID NO: 190817 - protein, 145 aa, Zea mays
  Clone ID: MRT4577_105603C.1.pep
VYSLGVVFLELLTGMQPISHGRNIVREVLAANQSGMIFSVVDNRMGSYPAECVEKFAALALRCCQDETDSRPSMVEVVRELDMIWRMTPGTENIASSESGVMGMGSNSTSTPTASGSRMDDHYISSMEVSGSNLLSGVMPSINPR

SEQ ID NO: 190818 - protein, 113 aa, Zea mays
  Clone ID: MRT4577_105604C.1.pep
HRGHQRRLAAPASITLVDEAAIASSMLLVYGGSAVSLVSSRVVVLRSALFSSGAFSTWMAWHEWAAGEYHGASLSGSSHAPPSSVDITDRWCYAPASPVASIHSALVNGGDRG

SEQ ID NO: 190819 - protein, 186 aa, Zea mays
  unsure (1)..(186): unsure at all Xaa locations
  Clone ID: MRT4577_105605C.1.pep
ALFCVVFXFFFFPGKKGLPRPTYVFIYSREHTIPIQENKGEPPHPXVHTQPLTXHRVPSQPDATANYLTSPSELLKSDHPVSMSGTSTLDKXEVNLTSVKPKSQQRNAPAALDKSRTLFFFSLSXEGEKEERKESGKGKKTRTLPEVLPSRFYRSNPGLVARRHRITLLGGLSPFTRHSGHRCLRH

SEQ ID NO: 190820 - protein, 124 aa, Zea mays
  Clone ID: MRT4577_105606C.1.pep
TAWAIWLSGYLLHGRCELHHSQAQQRVQDPLEDSFPGRVPAQAFGELQSPPLKASQSPWGRGGPIVPSRVPSYVGSRLWLPLCPNCSGAFFAPPPPMPGSAQQSKPFVELWVLACFSHLGGVLL

SEQ ID NO: 190821 - protein, 40 aa, Zea mays
  Clone ID: MRT4577_105607C.1.pep
CLFWLHYVCIVLIQVAEQPSVDPKHPQVDVVQPELIAGKP

SEQ ID NO: 190822 - protein, 77 aa, Zea mays
  Clone ID: MRT4577_105608C.1.pep
HRPRPPRSQLPAGMGASGGPLVSVKALEGEMVTDAPGIGLPPVFGAPIRPDVVRLTHKLLCCNTSQSYAVWRRAGHQ

SEQ ID NO: 190823 - protein, 182 aa, Zea mays
  Clone ID: MRT4577_105609C.1.pep
MVFTDDEDDFLEQWWEKEESDDDDLVALLLILAEDEERSHKKRRPGSMPGRQTVPRDMHAGNLHIVADYFADPPIYNDKFFRRRFRMSKPLFLRIVQGVEAHDHYFRQRPNAVGLLGATALQKVVGAFRMLAYDVPADSMDEVVRIAESTMIEAFKHFVQAVVDVFGEQYLRPPICIFHLLF

SEQ ID NO: 190824 - protein, 88 aa, Zea mays
  Clone ID: MRT4577_10560C.1.pep
PHHTLSINVKSRGGGFRDVHKTPHIALHCLLFTTLAGRMEHLKLYMHICCATCLSCMRNLLEVKHQYAILLMQLKLSHLDTRVGACVF

SEQ ID NO: 190825 - protein, 34 aa, Zea mays
  Clone ID: MRT4577_105610C.1.pep
SSGCSYALMRWTSYKPLNLDSTSSVSSGLVPLQR

SEQ ID NO: 190826 - protein, 55 aa, Zea mays
  Clone ID: MRT4577_105611C.1.pep
SCFLSRRDLAITLTMGGCCRNGLDLKTHDNHLYKTLDQRIPVHKLHIINKQTSDM

SEQ ID NO: 190827 - protein, 77 aa, Zea mays
  unsure (1)..(77): unsure at all Xaa locations
  Clone ID: MRT4577_105612C.1.pep
TNSLRHTTQRPNINPXQQVPSCRVLISYTPIMNQCVXCLRHHSNPEVNPYGSPQCQALQQQCCHQIRQVEPLQRYQA

SEQ ID NO: 190828 - protein, 53 aa, Zea mays
  Clone ID: MRT4577_105613C.1.pep
LSRADATTLVSHNETMAVNGQRGERYQVNWGAGADELAERDLDEVKRMVAQAR

SEQ ID NO: 190829 - protein, 134 aa, Zea mays
  unsure (1)..(134): unsure at all Xaa locations
  Clone ID: MRT4577_105614C.1.pep
HFKASTTKYKKKKXXXKRTXXKKKPXXQXWVXLHKAMDVRCYLAPDRINRQXXTGSLAGLXPXSPSSNXAPLSNIVLLXXSPSLAVXXXSXRLXVLLAGFLPXHKTAFXSLCVKNCXSQGQVFXPSWRWCRSGX

SEQ ID NO: 190830 - protein, 45 aa, Zea mays
  unsure (1)..(45): unsure at all Xaa locations
  Clone ID: MRT4577_105615C.1.pep
FGFFRFFCFFLIARNKNQNLXCIVPTAPHHQDQTNYTFKSMLTLR

SEQ ID NO: 190831 - protein, 47 aa, Zea mays
  Clone ID: MRT4577_105616C.1.pep
GLCSGATPLSSSILRHGFYGFYGMGLHFRTRWNARTFWRTSTVYYNL

SEQ ID NO: 190832 - protein, 135 aa, Zea mays
  unsure (1)..(135): unsure at all Xaa locations
  Clone ID: MRT4577_105617C.1.pep
PPPKNGRSFQPPFSRGGVWPFXTKKTHRADQVLFSPPKPKKHQFVNLQYKKLWWEAGKRFVKLRLSPKALKTIEKEGLDAVGAKVGMAPANKWATSGPLRWAPHLLVGGPGLALLFPGQWVYFGWPRSLLCFLCF

SEQ ID NO: 190833 - protein, 46 aa, Zea mays
  Clone ID: MRT4577_105618C.1.pep
QSPHLFFILPILKRPPGLLAFIIPPTQPLYLSNHHNFSLFEFFNFY

SEQ ID NO: 190834 - protein, 685 aa, Zea mays
  Clone ID: MRT4577_105619C.1.pep
MAPPFACAMHGRALLAAAAAALLASAVTLTLLPSAAAQPWVGPWPTCDDTTGNYSAGSAYAKNIKQLILSLQANASNTPALFATGSAGAGADAVYGLILCRGDLSPTDCFDCGTNAGQDVYRVCNGTRDAALVYNQCYVRLAPTDFLATTNNTGMRDLINGNSVPAGVNVTAYDGAITRLLNATARYAVDSSAPSLSPRKYFATGQMAGVDPRFPTGIWSMAQCAGDISPVQCRSCLDDLLAQWWQKFDSKEIGARLDGSRCNLRFETGNFYTGSPMVKLQMNGEEAAPAPVPSTDVLPGTTGGKKNSVGKLLGIILPIVFVAAIAAIALCIWIVRKKRTYQGTNLPQTDTTYMAEDIESIKSILLSLPSLQAATNNFDESNKLGEGGFGTVYKGNLSGQEVAVKRLPKGLDQGLEELKNELGLMAKLHHRNLVRLEGFCLEEGERLLVYEYMPNKSLDNILFDHEKKRQLDWRKRFNIIEGVARGLQYLHEDSQNKIVHRDLKASNILLDSNMNPKIGDFGLARLFLQDQTRGITNHIVGTFGYMSPEYVMRGQYSIKSDVFSFGILVIEIVTGQKNNGHYFDEQNEDVVSIVWKHWSEGTLAEIIDDSLGRNYSETEVLKCVNIGLWCLQQNPMDRPTMSDVMVMLNDDDTSSLPAAAKPTFFLDASSGYSYTSGTISHPSAR

SEQ ID NO: 190835 - protein, 48 aa, Zea mays
  Clone ID: MRT4577_10561C.1.pep
KTILLLILYTMQNLHLCYGLYCVSTCDLPSHFTLEPRTVNCTSMLTID

SEQ ID NO: 190836 - protein, 221 aa, Zea mays
  unsure (1)..(221): unsure at all Xaa locations
  Clone ID: MRT4577_105620C.1.pep
LAEEVKRAPLLAAAMNHAADHTELTSRLARPNKGNFSRYHLPTSSPSSAMARXCDRSFTTXSDKEHSQDAVHMXNPSEIPLKHWIPSNSTLEACYSMYQFEXPWKAYGKRQTHXNTICHCDQERRLDGSNSYVXSISYHXYNNHVRLLKKMFMHAYRISISCSRRLTTGTXEGDINPDAIKXYRILIILVLQKRVKPYETILHWXDAPQALYENYGGYVDK

SEQ ID NO: 190837 - protein, 47 aa, Zea mays
  Clone ID: MRT4577_105621C.1.pep
KWCKQVFYKWCKGVDKTVPGIILLRIGANKKWDPSGVSVNSLVAVPF

SEQ ID NO: 190838 - protein, 32 aa, Zea mays
  Clone ID: MRT4577_105622C.1.pep
QKEAHKSFFKHAMKFGILLLNLALPASVYAQN

SEQ ID NO: 190839 - protein, 44 aa, Zea mays
  Clone ID: MRT4577_105623C.1.pep
HLQQAQVRLVLDQGRQGLGRLPGGGSRTRKAIASGKPARVTRPK

SEQ ID NO: 190840 - protein, 62 aa, Zea mays
  Clone ID: MRT4577_105624C.1.pep
HEEGWVRGQLLREAAASWLQRREYTVPLSMKKEWLIHGALSHYNFTLRFVTWERLLIIICTE

SEQ ID NO: 190841 - protein, 244 aa, Zea mays
  Clone ID: MRT4577_105625C.1.pep
MAEPEVGVAADTAMETEAPEAAGQKREREEVVDPAAEGGEAAVEEAAAAKKPKLEEETKEVEEASSEEKAEETAEENKEETAEGKTEEANEKTVEAERKPVKLGPKEFSSSVEMFDYFFGLLHYWTPQIEFNKYEQMVLEDLLKKGHAEPAKKIGAGVEAFEIRNHPVWQSRCFFIRRIDGSSDDFSFRKCVDNILPLPEDMKVGNGKKSGGHHKGGGGGGGGRGGGRGRGGWRGGRGRGRRGG

SEQ ID NO: 190842 - protein, 493 aa, Zea mays
  unsure (1)..(493): unsure at all Xaa locations
  Clone ID: MRT4577_105626C.1.pep
MPPKKASATGAATLQPLDPNQDVLSLREARSQKRKAASPTPPEDDLDQEIQNLEMLHQQGQRKKEKMARLADLQRQIDEASEEVRHLAQDDQNRRPPRRELHQEGFYNEDDWYEDFHHGNFAFDDASPLSTELQATPWPQSYKPPQLPMYDGHSDPKQFLMSYEATISSYGGNTAVMAKSFVMAVKSVAQTWYSSLRPGTITSWQKLKDMLITSFQGFQTKPVTAQALFQCTQDHEEYLQAYVRRFLRLRAQAPTVPNEIVIEAMIKGLRPGPSAQYFARKPPRTLEKLLQKMDEYIRADNDFHQRREEAFRFSEMTRGFGGRFHPRHVXGSQQQRPQYSSQAXGQQQSSFRPPAPRGRGARGFGGRFGDQPRKNYYLFCGEDKGHTRMCHVTIQKQKEIAEAAAQQSQSKQVMHTASYHSPYIPEYVGNHPAASVASASQPQASWQQPPLPPPTQRGQQSEGSQHTHLQRDFREESEARTVNSTVPESKHIY

SEQ ID NO: 190843 - protein, 49 aa, Zea mays
  Clone ID: MRT4577_105627C.1.pep
LINEPRHVIEPILMISISINYLPLKAYNSSSSSHSEVIHVQSMGKRVAI

SEQ ID NO: 190844 - protein, 87 aa, Zea mays
  Clone ID: MRT4577_105628C.1.pep
AISRQECRPVCVRLDRSLTRALHMDSKLAVIHLDCQLSVLLERCTCDSGSLYHESHALPELCQPAAYVTTGAHHAWYPGEEDSGHTQ

SEQ ID NO: 190845 - protein, 329 aa, Zea mays
  Clone ID: MRT4577_105629C.1.pep
MAKSFVMAVKSVAQTWYSSLRPGTITSWQKLKDMLITSFQGFQTKPVTAQALFQCTQDHEEYLQAYVRRFLRLRAQAPTVPNEIVIEAMIKGLRPGPSAQYFARKPPQTLEKLLQKMDEYIRADNDFRQRREEAYRFSEMTRGFGGRIHPRHVRLIHNFTQSDDRGSQQQRPQYSSQASGQQQSSFRPPAPRGRGATGFRGRFGDQPRKIYCLLCGEHKGHTTRMCHVTIQKQKEIAEAAAQQSQPKQVMHTASYHSPYIPEYVGNHPAASVASASQPQASWQQPPPPPPTQQGQQPEGSQHTHLQRDFREESEARTVNSTVPKSKHIY

SEQ ID NO: 190846 - protein, 74 aa, Zea mays
  Clone ID: MRT4577_10562C.1.pep
QRVDALVGGGVSQSLYITVLPLGNCHTCALVEAPALQLLFPHRCLKKKLSAALYGVSHSRRCQIPPQHRAMLGG

SEQ ID NO: 190847 - protein, 38 aa, Zea mays
  Clone ID: MRT4577_105630C.1.pep
YPLTLGIPLNATRDLNAKNWHKPIRDVLLHFPHRTASP

SEQ ID NO: 190848 - protein, 441 aa, Zea mays
  Clone ID: MRT4577_105631C.1.pep
RQGPHYKNVSDHHSEAKRDCRSRSPVESTKAGLTYCFVPLSFYTEDDWYEDFHHGNFAFDDTSPLSTKLQATPWPQSYKPPQLPMYDGHSDPKQFLMSYEATISSYGGNTAVMAKSFVMAVKSVAQTWYSSLWPGTITSWQKLKDMLITSFQGFQTKPVTAQALFQCTQDHEEYLQEYVRRFLRLRAQAPTVPNEIVIEAMIKGLRPGPSAQYFARKPPQTLEKLLQKMDEYIRADNDFRQRREEAYRFSEMTRGFGGRFHPRHVRSIHNSTQSDDRGNQQQRPQYSSQASGQQQSSFRPLAPRGRGARGFGGRFGDQPRKIYCLFCGEDKGHTTRMCHVTIQKQKEIAEAAAQQSQPKQVMHTASYHSPYIPEYVGNHPAASVASASQPQASWQQPPPPPPTQRGQQPEGSQHTHLQRDFREESEARTVNSTVPESKHIY

SEQ ID NO: 190849 - protein, 425 aa, Zea mays
  Clone ID: MRT4577_105632C.1.pep
PKKAFPTGAATLQPLAPNQDPLSLREARSQKRKATSPTPLEDDLDQEIQNLEMLQQQDDQNRRPSRKELHQEGFYNEDDWYEDFHHGNFAFDDASPLSTELQATPWPQSYKPPQLPMYDGHSDPKQFLMSYEATISSYGGNTTVMAKSLVMAVKSVAQTWYSSLRPGTITSWQKLKDMLITSFQGFQTKPVTAQALFQCTQDHEEYLQAYVRRFLRLRAQAPTVPNEIVIEAMIKGLRSGPSAQYFARKPPQTLEKLLQKMDEYIRADNDFRQRREEAFRFSEMTRGFGGRFHPRHVRSIHNSTQNDDRGSQQQKPQYSSQASGQQQSSFRPPVPRGRGARGFGGRFGDQPRKIYYLFCGEDKGHTTRMCHVTIQKQKEIAEAAAQQSQPKQVMHTASYHSPYIPEYVGNHPAASVASASQPQAS

SEQ ID NO: 190850 - protein, 314 aa, Zea mays
  Clone ID: MRT4577_105633C.1.pep
MPPKKTSSGLGAALQPLDVNQDTLREARTQKRKATSLTPQEEELDQEIRDLEAIHQQVERKREKMLHLSDLQKKIDEAAEEIRHLTQDDQDRRPPQRELRQDNSYNDDDWYDDFHHGNFAFDDASPLSAELQATPWPPSYKPPQLPMYDGHSDPKQFLMSYEATISSYGGNIAVMAKSFVMAVRTQAPTVPNEIVIEAMIKGLRPGPMAQYFARTPQTLEKLLQKMDEYIRADNDFRQRREEDYRFSEMTRGFRGRIHPRHVRSIHSSSQNDDKGGQFQRPHHNSQSSGQQQSSFKPPTPRGRGGRGFRGRYGD

SEQ ID NO: 190851 - protein, 396 aa, Zea mays
  unsure (1)..(396): unsure at all Xaa locations
  Clone ID: MRT4577_105634C.1.pep
DQNRRPPHREFHQEGFYNEEDXELQATPWPQSYKPPQLPMYDGHSDPKQFLMSYEATISSYGGNTAVMEKSFVMAVKSVAQTWYSSLRPGTITSWQKLKDMLITRFQGFQTKPVTAQALFQCTQDHEEYLQAYVRRFLRLRAQAPTVPNEIVIEAMIKGLRPGPSAQYFARKPPQTLEKLLQKMDEYIRADNDIRQRREEAYRFSEMTRGFGGRFHPRHVRSIHNSTQSDDRGSQQQRPQYSSQASGQQQSSFRPPAPRGRGARGFGGRFGDXPRKIYCLFCGEDKGHTTRMCYVTIQKQKEIAEAAVQQSQPKQVMHTASYHPPYIPEYVGNHPTTSVASASQPQASWQQPPPPPPTQRGQQPEGSQHTHLQRDFREESEDRTVNSTVPESKHIY

SEQ ID NO: 190852 - protein, 162 aa, Zea mays
  Clone ID: MRT4577_105635C.1.pep
FKETGLKSNNQKKKERGTKKKHRRGRGEKTEKKKKKKKKKKKKKKKKKKKKKKKKKKKTQSKGRGAKNRPTKREGKHKKPPAKNGGAAAPQETTQPGTRGTRGTTPTKKTPKPTKRSGPKRHQKAHKPRGTATNRSPPHPDGKKNAGDRTTGPRKESPASEG

SEQ ID NO: 190853 - protein, 66 aa, Zea mays
  unsure (1)..(66): unsure at all Xaa locations
  Clone ID: MRT4577_105636C.1.pep
YVLNXXSPPLFDTNEGYVFKHQSQCFVFITLVKWLQRTSPLFFLVKCLYYYYYSGSTDMDKTHLSH

SEQ ID NO: 190854 - protein, 117 aa, Zea mays
  Clone ID: MRT4577_105637C.1.pep
MASPSSSPSRKALSKIACSRLQKELAEWQVNPPAGFKHRVTDDLQRCPSAIVALPIPFPQQEIPAVRGLLDSFLRGSVLGYRFLVRESSTSSALDATRRDAIRRVRFGLAYICFPYY

SEQ ID NO: 190855 - protein, 159 aa, Zea mays
  unsure (1)..(159): unsure at all Xaa locations
  Clone ID: MRT4577_105639C.1.pep
MNAKNNGGCSRLMRWVVDVAGAAGTLYTGETYKLQVDFPEHYPMEAPQVIFLHPAPMHPHIYSNGHICLDWSTGYAKKFLEILLTNHDSMRWQLSLAXXILYDSWSPAMTVSSICISILSMLSSSPEKQRPADNDRYVKNCRNGRSPKETRWWFHDDTV

SEQ ID NO: 190856 - protein, 61 aa, Zea mays
  Clone ID: MRT4577_10563C.1.pep
VTKSTVSWRRDEGSGSRQHVFLAISLQESRSKRLLWFPQSRERKYREETVKIKASWEKVLA

SEQ ID NO: 190857 - protein, 68 aa, Zea mays
  unsure (1)..(68): unsure at all Xaa locations
  Clone ID: MRT4577_105640C.1.pep
NNKKRWVIDVTGAAGTLYTGETYKLQVDFPEHYPMEAXSVIFLHPAPMHPHIYSNGHICLDILYDSWS

SEQ ID NO: 190858 - protein, 112 aa, Zea mays
  Clone ID: MRT4577_105641C.1.pep
VDSIRPCLPPSSSFAIDEAEAQSIMRGDNLGHLLLHSLLRRVDTIEYTLPCRFRSSPPACRTVRLNSRARRMVSYHEQEVDDDELETEYSPSPQLSWPWRSAHTCLVLFYFP

SEQ ID NO: 190859 - protein, 87 aa, Zea mays
  Clone ID: MRT4577_105642C.1.pep
GSNRERPNLSLFIKYKTGFLYNPQFELDPKSWGKKFIMGWGAFFRALTRMVGSLHNFHWGGGGDFLRGDPPWRIPGGVADQTRAWRA

SEQ ID NO: 190860 - protein, 64 aa, Zea mays
  Clone ID: MRT4577_105643C.1.pep
TTPRTKTGREKIAITPSGITVWIGPHIAPYKVVHICIVQTFCIFVNTRKGAYWTINNSLRFFKP

SEQ ID NO: 190861 - protein, 68 aa, Zea mays
  Clone ID: MRT4577_105644C.1.pep
MAALFFQAESLSSRDGLLEGSPFFFCNLERPPVVLYNFSHSTLGTCSIILWSQNTWAIFLWSPTFFAN

SEQ ID NO: 190862 - protein, 116 aa, Zea mays
  Clone ID: MRT4577_105645C.1.pep
LGRPPVRKRGPPPLPISIRRGFVCDRPDHGQEPGLLHPELVAGGHLRGRPFLFSTPPPGSCGGSLTPGGLVPMLAAVDSAPTPRQEKAVRQLSPAVQLHREARSRFAPEFDGLSLL

SEQ ID NO: 190863 - protein, 98 aa, Zea mays
  unsure (1)..(98): unsure at all Xaa locations
  Clone ID: MRT4577_105646C.1.pep
WGGGASCWDNASPFQVWEGWAQLQLGAVGPLPPPFNFKLRGILKCLVSKPCFGGFLPPLNREKFGPPRLFNKIGNPGFFFLGGKKKKIKKSPPXXXVX

SEQ ID NO: 190864 - protein, 134 aa, Zea mays
  Clone ID: MRT4577_105647C.1.pep
PPPGAGILFLSAGQWGVGAPNTLSPLSRGPPPWGGSFSYGGGLQNPFLQPLGGPPARVKGGRDAFFFGPKAISLGRLGGYPSPGGAPGAKGGIFVKTSRFFFFARPSPGIPPPPPEIGVSCSWFSRCSDPFPSL

SEQ ID NO: 190865 - protein, 147 aa, Zea mays
  Clone ID: MRT4577_105648C.1.pep
DDSSDPRDLTGFGMPGYEVDGGGATGWLVSKSGEKSSIHQGHTRTRKPANTSSAQGRISKTRQRRRHEFNGGSGEQQQRPTLSLLSNSRLRSALIHLYAAMRMHSSEREGVHRRLAMGNREVWQSSPGRGPPPWDERRPRRCGRSRP

SEQ ID NO: 190866 - protein, 43 aa, Zea mays
  Clone ID: MRT4577_105649C.1.pep
HAFANSRSRRSSLYLALVSTTTPVMRRRASQGLYPRHSCRCRV

SEQ ID NO: 190867 - protein, 37 aa, Zea mays
  unsure (1)..(37): unsure at all Xaa locations
  Clone ID: MRT4577_10564C.1.pep
CVGXXWLGXSYFPPPPPRVXVRLSHSVSARSPFALGV

SEQ ID NO: 190868 - protein, 40 aa, Zea mays
  Clone ID: MRT4577_105650C.1.pep
GQSKNLVTLCVNPDLTKSTQNLVNIKHGNSIHQQTRLTSK

SEQ ID NO: 190869 - protein, 87 aa, Zea mays
  Clone ID: MRT4577_105651C.1.pep
TISIWGPLYISKTCIDRGRFELTGLVLKQHYCAQYEIVESMPLRRDTSQGLKCSVTPTFGNEPLLGSGLDGTSPAFRFLFYKTREIT

SEQ ID NO: 190870 - protein, 85 aa, Zea mays
  unsure (1)..(85): unsure at all Xaa locations
  Clone ID: MRT4577_105652C.1.pep
PWFYPPRPSFYPFMEKVPPPPPGSVPLNLSKGSVNVASRKTPPPLSRENIPSFXTGEFSPQPYPEGFFRLFAPPPRVRAILEKGI

SEQ ID NO: 190871 - protein, 75 aa, Zea mays
  Clone ID: MRT4577_105653C.1.pep
SAKIQVLLNSFGGKCFISAVENPRDVFKIPPKATSLAVFFFCSKGPYRPGTPSLALITPPKGSLFCANSARQKVP

SEQ ID NO: 190872 - protein, 131 aa, Zea mays
  Clone ID: MRT4577_105654C.1.pep
KRDRVPSSHRPGLNLAAAGDEPLGVTKSPWLHQLHTTASEPQLNLPSIRHTRREEWIRPPFSQKKQRASGDRQPTKGVDAPPWNQLLICSNTTCKLHVSATPLLLIHDPSDLKEQAAAEGNPRYLRRPRAY

SEQ ID NO: 190873 - protein, 92 aa, Zea mays
  Clone ID: MRT4577_105655C.1.pep
AGRSSLGGRTKETPSWAPNNNFAGWGDPQIKKAGCDASRFFRLSSGVCVSHPPPVWLVFPHLSPRLREEVGVPAPKKGPGHRLLPYEFLAMS

SEQ ID NO: 190874 - protein, 119 aa, Zea mays
  Clone ID: MRT4577_105656C.1.pep
PCTTTTILCACAGRPRAGPSRSAAWSRWRPRPMLLGTGTTLWKRAHRPPTARRSTVTFTLGAPCGWRPAVDFNLLRPALYTTFRNITAACSRARDALYGATCGLAECALLSYLTRALRG

SEQ ID NO: 190875 - protein, 57 aa, Zea mays
  Clone ID: MRT4577_105657C.1.pep
VSFVTSHLIHISLRVLVDYLVCLFCMDLADNLYFSQVYFLKKSGSHDDQLKELSFML

SEQ ID NO: 190876 - protein, 55 aa, Zea mays
  unsure (1)..(55): unsure at all Xaa locations
  Clone ID: MRT4577_105658C.1.pep
YFPHLEFIPAVFIHTRVAYIQPLYFFXSSHNYLFPKFNSYTLTITLNILSNLLKP

SEQ ID NO: 190877 - protein, 209 aa, Zea mays
  unsure (1)..(209): unsure at all Xaa locations
  Clone ID: MRT4577_105659C.1.pep
ADYFFKVSLIGHSXVXKSLIFARLRRNKIGLYFWDNVTLQFQTRTLVIDHGTAEDQICDTYALKRYLCEPRAYYTGALETLLFYDITRILSFYLMPRWLDELLDHADTNIGIMLXGNKSDLHEQRASSTVDALEFAEKENLFFLETSCAPGLKSEXAFQSVLTDIFKIHMKNNMLTDPNTMEXPSHAGDKVLVPGPGQEIPRACGAVPC

SEQ ID NO: 190878 - protein, 55 aa, Zea mays
  Clone ID: MRT4577_10565C.1.pep
GALRYLHCQELHLPVPQGHIQNQDGLLLQQLVLDLVLKYILNFPVTRLIHQSPQA

SEQ ID NO: 190879 - protein, 86 aa, Zea mays
  Clone ID: MRT4577_105660C.1.pep
RRRPKVGSPGTRVALPPRWTVNACCELVSYVTLRTVFYTCVNQGMYIVLLPICSYLSLWVSWISHVLLLRVCLKCGLRNNNNKRLR

SEQ ID NO: 190880 - protein, 70 aa, Zea mays
  unsure (1)..(70): unsure at all Xaa locations
  Clone ID: MRT4577_105661C.1.pep
LTNKXGLQNFNDIYIINAPISSLPKLQYNIFLKNLSLSHYHFNADPFPNTSQAKHGKKTTSSHNAMFYNL

SEQ ID NO: 190881 - protein, 58 aa, Zea mays
  Clone ID: MRT4577_105662C.1.pep
VHVLPLIRDLNLLCITSLIQVIGILPMEDWIIKSASIAKHASVFTKESLKVDNSCAIV

SEQ ID NO: 190882 - protein, 131 aa, Zea mays
  Clone ID: MRT4577_105663C.1.pep
TQVAPEATRPRARLPGRHAKEEDGPGEKLNYSVSLSYDDLSPELKQCFLYYSLLPKGSGFKKNRIISMWICEGFVQHDGRSESDQVDLEQIGDDYHRELAARNLLEPDDSNNNMWEYTLHDVVRSFAQFMA

SEQ ID NO: 190883 - protein, 86 aa, Zea mays
  Clone ID: MRT4577_105664C.1.pep
GDKQLCPGCCCDISQIAEWLKKQTLTANKYRTLCISSLGFSRMPFLTSLLVSCDDGESEPDFGHRPTIHVRGYYSEICWCREGRSS

SEQ ID NO: 190884 - protein, 55 aa, Zea mays
  Clone ID: MRT4577_105665C.1.pep
TNLTVNITALLSVMLQPYMPTVSATVHGQLQLPPPACSILLTNFLCTLPADTDWH

SEQ ID NO: 190885 - protein, 95 aa, Zea mays
  Clone ID: MRT4577_105666C.1.pep
TYRHDLSITDPHHFGGLQNPPRVGRRTLFCSPTSSFILLWSPTPVVHRLSLATPGRTIHATHWPMFLLAGVADQGAEGLAWDPPQQLGLVGDQHP

SEQ ID NO: 190886 - protein, 60 aa, Zea mays
  Clone ID: MRT4577_105667C.1.pep
KHSMSTSRGSQVPAACGLTSVTPVPIGATIFVLDCVGMGLQQVGCGWGISQNRTLCDEGG

SEQ ID NO: 190887 - protein, 70 aa, Zea mays
  Clone ID: MRT4577_105668C.1.pep
SREKIDHRYSIMRTTRSLYLGTIIFDTYKKIFEHMVHISYIKMIIANSIFYFSQKAEKGIPAGLEKPNRP

SEQ ID NO: 190888 - protein, 188 aa, Zea mays
  Clone ID: MRT4577_105669C.1.pep
MAAGLSFPRAGAPFILLRTSCFSPWAALVPRRRLLSGPPTAGDPPPPALPPTSKLAAPPVVGTPEPPLPFRAVEAEILRDIDPVVLLIKDILHSDRYGDGECLCPRDENVVVEKLLSYHPRAQDKIGCGLDAIMVDRHPEFRKSRCLFVVRTDGVWIDFSYQKCLRAYIREKYPSHADRFIREHFKRT

SEQ ID NO: 190889 - protein, 153 aa, Zea mays
  Clone ID: MRT4577_10566C.1.pep
PAGGRSPVRRLNLSGSRRIRLLSPSPVVDSWRRWPAGRRLPQARLGASGRGQVPRSCPARCHRAAYRKPQAAACLPHPQRYLADEPSRQQPHCPSHRRHGASRRRPGRALRRCLTKHGSTRILDLAYRQSTDSSCSCSFYKDQSFPLGFSHLA

SEQ ID NO: 190890 - protein, 84 aa, Zea mays
  unsure (1)..(84): unsure at all Xaa locations
  Clone ID: MRT4577_105670C.1.pep
AAMRYIQVYHCCNDMSSSWWLVGCDFLHVCPQMSYKQGTPAASASFVIFSTNKVYYVGLLILCLLGGLASSXLIAKMVFLCFAK

SEQ ID NO: 190891 - protein, 102 aa, Zea mays
  unsure (1)..(102): unsure at all Xaa locations
  Clone ID: MRT4577_105671C.1.pep
SNILSPKIQLIIQKIQALKTKKAIFQPANEVFQEKILHHSSLLDVGMVVAHQQNGLFGHVPLVEKMXSNPPTIFSGFSICRGFSFSPCHNPLGGYLSVDYYT

SEQ ID NO: 190892 - protein, 54 aa, Zea mays
  Clone ID: MRT4577_105672C.1.pep
HRGEHISECMASHSRCGCYVSYFTQAARYAAHDMLTARMWCVIYSGSQTHRQQL

SEQ ID NO: 190893 - protein, 49 aa, Zea mays
  Clone ID: MRT4577_105673C.1.pep
MRRSLFLQRLQRLGEHSSSLLESIRSATMVPPPTKNTLLPYTCSPTVVF

SEQ ID NO: 190894 - protein, 199 aa, Zea mays
  unsure (1)..(199): unsure at all Xaa locations
  Clone ID: MRT4577_105674C.1.pep
MGSSRTIVASPLLLLALLLLAFAATAEARVVPELFGEDQFQRTCNQVHFRKMCQSLTRLPRVTTPRELLLASMRVAAEKAREAKSRVDEFAARNHEGRPMESILGACSNGYDNVVQTLEEARKIVXAAGGGHXAQADDMNTKLSAAVTSASDCDNAFADFPAIRSPFLPMQRNVYRLVDNVLNIFVVVNQPEHAHKHGH

SEQ ID NO: 190895 - protein, 69 aa, Zea mays
  Clone ID: MRT4577_105675C.1.pep
GKRAPPGPPPPPPHPPPPPPTPPPDGGTTKKKNGTKYVVNKNFVYFFLVWFNRGSKKREKQGSQLLIQR

SEQ ID NO: 190896 - protein, 122 aa, Zea mays
  unsure (1)..(122): unsure at all Xaa locations
  Clone ID: MRT4577_105676C.1.pep
PCPLPAAQPLTPAPAYPPVHQPXPATAPPPAMSPPAPWPTSPPPXPXWASIAPPLSQTRVGSPRARPWLSCSPPHRHDPAQPAPXPPGAAVGTSPXPPSKNSPRSSRRTLVAPRPPLTEPAW

SEQ ID NO: 190897 - protein, 44 aa, Zea mays
  Clone ID: MRT4577_105677C.1.pep
QDFPPTRSLRLGVLFYVGQSVNKVKGSFVYSKKKKKKKSTGRPF

SEQ ID NO: 190898 - protein, 83 aa, Zea mays
  unsure (1)..(83): unsure at all Xaa locations
  Clone ID: MRT4577_105678C.1.pep
XFGNTCNHSLHLYTSNVQKHAIRAYYLNTISGPFYAQMEHHDASKSTTMQAETLVITLFIFTPATFXXXXXXXXXXXXXXXXX

SEQ ID NO: 190899 - protein, 111 aa, Zea mays
  Clone ID: MRT4577_105679C.1.pep
WSLLHCLCVAFTTTIRPDPRPAMLLSPRVSPECVSLCQGLPFCLIMPLMSMLMCSEMGSVQWTPSDTVDNITMIIIIMLSTAHVQCCEKDRPCLELRDFTVISSRLTLMRA

SEQ ID NO: 190900 - protein, 146 aa, Zea mays
  Clone ID: MRT4577_10567C.1.pep
LRPLARVASGRSPVRRLDLSGSRPIRLLSPSPVVDSWRRWPAGRRLPQARLGASGRGQVPRSCPARCHRAAYRKPQAAACLPHPQRYLADEPSRQQPQWPSHRRHGASAETTRKSAASLPDQARKHQDFGSGLPTVDRLKLFLFVL

SEQ ID NO: 190901 - protein, 42 aa, Zea mays
  Clone ID: MRT4577_105680C.1.pep
CLPTLPTTNRVHSQQMTPLFSSSYPRSGSRTVIYVLSSFVYM

SEQ ID NO: 190902 - protein, 153 aa, Zea mays
  Clone ID: MRT4577_105681C.1.pep
YPKQSHIADKLKFFFFFFSSELWLQTRFQIHANYQSVTTGRGLDLALSIRYLQLLQCKQEKTGGRAARAPFGARHVVVLVGDASASQLSCLAPAPLRLGWTADGPGLQGESPRTAAPPHPRAADRRRSPAWRHQRPTDVALGMVVAPHQLHLL

SEQ ID NO: 190903 - protein, 76 aa, Zea mays
  Clone ID: MRT4577_105682C.1.pep
AGLITNAPTTNIKAPTTPKKDATPNNADSATLPDTKLYSTNANNYSPCLHTSQNPPSIPPIQTPIPSILIQSQYPQ

SEQ ID NO: 190904 - protein, 181 aa, Zea mays
  unsure (1)..(181): unsure at all Xaa locations
  Clone ID: MRT4577_105683C.1.pep
QATVKHIRMTRAHIEHKIKWRWCETTLVPPSEAIALHALWLSNLDLAVPNTHTPLVYYYPRPDDANFCWGRPGLIAPRPSCCETSGRAARRVRSRTARRQFTCRCAMMRSRRLPEVSDTRLSLPCNVRQLLRPPLTEFYFGIDILQDLNTERLGYILAHPLVLVEERIKHALXRVNHSHVR

SEQ ID NO: 190905 - protein, 57 aa, Zea mays
  Clone ID: MRT4577_105684C.1.pep
QHMKWAFSKFIVSDQKGGRKKVRVRERGNPPNQSRVIKLPLMNTVIQFSLFIKKGKQ

SEQ ID NO: 190906 - protein, 87 aa, Zea mays
  Clone ID: MRT4577_105685C.1.pep
RTLTVCRMYIARAEVNRPSVAAFSNNPTRLRRLVVRQGPARTGLSPYQASHTRELGCGPSLSTPHQSTIRSARPPDSQAGLLPVRSP

SEQ ID NO: 190907 - protein, 239 aa, Zea mays
  unsure (1)..(239): unsure at all Xaa locations
  Clone ID: MRT4577_105686C.1.pep
WVPRGRPTSVEKFEAGGKTYEGFRQASKQDPGNKSPAWWTNQGWGYQPIYGSELNQPDIIAHKDASPSPYTVEAPAGEPVKFTWXTRVPAAXEEGWDCSHHGWTATYMAPCNGDCKNVDKTELEFFKIHQSALIDYRKGRYSSGGDPQGEVGYWGTDAIFYDNGNTQSVTIPKEIPSGNYVLRTEVVSIHNNGPVSNRQFWPQAFNIKVTGGDDSQKVPAGKKGTELYHSATSSSSGTS

SEQ ID NO: 190908 - protein, 44 aa, Zea mays
  Clone ID: MRT4577_105687C.1.pep
LSLKILDKKIALLTLITDRKKRISYAGYILHYLICITTYLNHDD

SEQ ID NO: 190909 - protein, 38 aa, Zea mays
  Clone ID: MRT4577_105688C.1.pep
SLEHSHGLSCTEMCVLMSTLFLVSRLKFRALCHVFSPD

SEQ ID NO: 190910 - protein, 113 aa, Zea mays
  unsure (1)..(113): unsure at all Xaa locations
  Clone ID: MRT4577_105689C.1.pep
SCLRVHFCPESARSSRSPSCAASPPPEGEEDESANVSATSVRTAPKNYQAISTISHISFAEEESISPKKPTSIAEVAKQRELSGTLLSEDDSKMKREDIGLALXELSGHDIML

SEQ ID NO: 190911 - protein, 148 aa, Zea mays
  unsure (1)..(148): unsure at all Xaa locations
  Clone ID: MRT4577_10568C.1.pep
MCLWMCGSSCLPLLTLCLSLLLAVLVLLLLVTGRGGLKEVAVIGNISVGSKASWRKLLLALIGVSYIXIMLLLLLGAAAKDAAKDVVVVGEATMFVDVEKFTLADFKVDVTAATDVKKEEGNNKAVAEEDSSFELITVDEVSVAEEGF

SEQ ID NO: 190912 - protein, 175 aa, Zea mays
  Clone ID: MRT4577_105690C.1.pep
MQNQIMCHACRTLLLYPRGASSVCCAVCQAITTVPPPGLEMAQLICGGCRTLLMYTRSADTVRCSCCNTVNLVRPVNNIAHVNCGQCRTTLMYPYGAPSVKCAVCNYVTATGVNTVAPTPSARPTSDGSSYSGSSTSAPKSQSQNVTVVVENPMTVDDKGKLVSSVVVGVTAGKE

SEQ ID NO: 190913 - protein, 80 aa, Zea mays
  unsure (1)..(80): unsure at all Xaa locations
  Clone ID: MRT4577_105691C.1.pep
AFARVXKKKKKKKKKKKKKKKKKKKKKKKKKKKKKKKKKKKKKKKKKKKKKKKKGGAFLGVQFLGGGVSKFFFFFWGPLI

SEQ ID NO: 190914 - protein, 110 aa, Zea mays
  Clone ID: MRT4577_105692C.1.pep
TEPEARRPGKGPRDPRPPGEDRRRDGTASQQRPRRGTEDEQIFLIQRFSQSGDDIRKYAHLLPVDPFCTSQTNKTSYTATHWGKKFPFELGYSQIPTLKFKTLAHPLSAA

SEQ ID NO: 190915 - protein, 88 aa, Zea mays
  Clone ID: MRT4577_105693C.1.pep
RSLMNFENSCGNSHHRVGLALYRVMCVQPILGFFRPERGVKVRSLWYLLHWLLGIAVCATVICDVYIWHRTYSREDRPEREAIDGAPH

SEQ ID NO: 190916 - protein, 139 aa, Zea mays
  unsure (1)..(139): unsure at all Xaa locations
  Clone ID: MRT4577_105694C.1.pep
PDRRAGGDPRXRGRGGKPRSRSXESKGKGEAGTGSRRTRPSKTSTPTQGXADXEAXXNPTDTRSGNDMAGGGRVPPERNLAPGEDDADAAHGHRGAAAAEEPGGTDTRPPDGPRAPGAEPRPSMERKLYGDMAEHGTHA

SEQ ID NO: 190917 - protein, 85 aa, Zea mays
  unsure (1)..(85): unsure at all Xaa locations
  Clone ID: MRT4577_105695C.1.pep
ALITSYICPYLSIPVIKDCXNLIIQTYTIQQAITSSIITQLTLIIQQLSTILQHIPGAHMVTHHINAQHLQHLAIRNHASYSEQH

SEQ ID NO: 190918 - protein, 41 aa, Zea mays
  Clone ID: MRT4577_105696C.1.pep
QDLGIPPLIKRGSLERSPVGLGSPLNCCRLHLNLFSAVQWS

SEQ ID NO: 190919 - protein, 54 aa, Zea mays
  Clone ID: MRT4577_105697C.1.pep
MGVRIRLARFGCRNRPFYRLMAAVSRSLGDGRNLRVFGYFNPFPGKVGGKRMGL

SEQ ID NO: 190920 - protein, 138 aa, Zea mays
  Clone ID: MRT4577_105698C.1.pep
MSVEILDGRTVQSFVEDERAFNSSVDARFVALDVDRDGRLSYAEMAGELMALRVREAHFGADAPAPAAELAALYGALFARFDRDGDGAVDRDEFRAGMREVMLAVASGLGVLPVQMVVEEGSLLKWAVDRELATTMPA

SEQ ID NO: 190921 - protein, 78 aa, Zea mays
  Clone ID: MRT4577_105699C.1.pep
FVFFFRPFFFLWFFFNFFFGFSGKFKTSKSIQILSATTGGYLNSNRKFETNCGQAKSDRIRPDYTPTPFIPTWVSLFK

SEQ ID NO: 190922 - protein, 173 aa, Zea mays
  Clone ID: MRT4577_10569C.1.pep
MERRRSRHALLLLSAVMASLVAGSTAGIYHIDGAGKGWRMPPNRTYYEDWAHTRQISIGDKLMFLYRSGVHNIVEVPTRELFDACSMRNITSRYQSGPTIIELTDPGERFYFCGVGEHCEAGQKLAINVLLVPPPPPDTDDDCSSAARLPGHAGAGLAVVCMCLVSALLTMAV

SEQ ID NO: 190923 - protein, 339 aa, Zea mays
  unsure (1)..(339): unsure at all Xaa locations
  Clone ID: MRT4577_1056C.1.pep
PRVRIDAVEIDVDALADTAGNVVIGGIMEHIEQAGIHSGDSACSLPTRTVSAKCLEVIRSWTTKLAKCLNVCGLMNCQYAISTSGDVFLLEANPRASRTVPFVSKAIGHPLAKYASLVMSGVTLPELGFTEEVIPKHVSVKEAVLPFEKFQGCDILLGPEMRSTGEVMGIDYEFSGAFAKAQIAAGQKLPLSGTVFLSLNDLTKRHLAEIGRGFRELGFSIVATSGTAXVLQLEGVPVEPVLKIHEGRPNARDMLKNGQIQIMVITSSGDALDSKDGLQLRRLALAYKVPITTTVDGARASIDAIKSLKNKSIEILALQDYFQTADASEDLQAVARTTP

SEQ ID NO: 190924 - protein, 56 aa, Zea mays
  Clone ID: MRT4577_105700C.1.pep
CRCTWQRVNQLSPVDTLFLCSSFRNRVCILILINFPRCFATHIVDLSPSYINTTLL

SEQ ID NO: 190925 - protein, 60 aa, Zea mays
  Clone ID: MRT4577_105701C.1.pep
GVHHGRQAGPSAVQSVNHRAGAGHMHRARAATSQTHALVDSDRHKHDVLLDAPLYARPLG

SEQ ID NO: 190926 - protein, 84 aa, Zea mays
  Clone ID: MRT4577_105702C.1.pep
VKQDVENRSADQSVETGKNDCRHAECKAAEIDDWLLQFADLFRNQVGIDADAHLDLHELGMELCSEALEVTVTSMEAQVLFELA

SEQ ID NO: 190927 - protein, 28 aa, Zea mays
  Clone ID: MRT4577_105703C.1.pep
LLSSSIVSFNGQTENSFTILFLTTYIST

SEQ ID NO: 190928 - protein, 187 aa, Zea mays
  unsure (1)..(187): unsure at all Xaa locations
  Clone ID: MRT4577_105704C.1.pep
MEVVGGVSLRPARLRHLTPGEASAGSFLPRRLQLARTAARPARRALVVEARGGRGWSDRQSQQQRPXPQLPKIEDDGNPRFVIFIRTANVYFWYPLNIVTGGTTAKIMLAAKDNFLGKYIYKDTLARNLATVIYKDEDDIIDLAKEQFRVLKGETEFRYGYKIVEKGNLXSALATSNVLELPKKEEL

SEQ ID NO: 190929 - protein, 665 aa, Zea mays
  Clone ID: MRT4577_105705C.1.pep
MAEPAILDPSPFDLRHYPAHLFDPDIPLAAADFPLGEFAGDDGCDGLDFDVPVDFSIDDFLLRSPDRGHDGDDSGEGSAAGSGPTASSLASPATSGTNSAVANVGNRKVKHEDSDEGRSGATPNWSLKRKQVSPGEATSDGAKCRRSGDGDVSPSASASRAATEDSDERGVGGEEEDKRRTARLMRNRESAQLSRQRKKRYVEELEEKVKSMHSVINDLSCKISFIAAENATLRQQLGGVGVSGPPPGVYPPPPPGIHFPWVSGYAMRPHGSHVPLVPIPRLKPQHAAAAVKVSKKPDVKKSVESKSKTKTKTKTKKVASISLLGLLFVAFVFGAFVPGFNHSLGLRGRSDNVMFGNFGQSDARVFSVTNHGKGPKGSFNSSDMISTDHDMMTGHDDGAGQKHRAANNSSEILPALLYVPRNGKHVMINGNLIIHSVMASEKAVAHKGSNSQSVKDHKETSVAIARYLSPPGKDMNSKEMFPPDAPLPQWFREGMEGPVLNSGMCSEVFQFDISPASAKSGGIIPASAKSASSVNATQKILKPSPAYRGKLKNRRIMYNEAIPLTGKTANNTKPQAFNSTAESSKVPDTDSKPASSVIVSVLADPREAGNGDGDPRVSPKPLSRIFVVVLLDGVRYVTYSCTLPFKSASPHLVELTLGPVQLSGP

SEQ ID NO: 190930 - protein, 270 aa, Zea mays
  unsure (1)..(270): unsure at all Xaa locations
  Clone ID: MRT4577_105706C.1.pep
MAAPTLTADGPRLGQQEMKKMSPSFHPTLWGDFFLSYEAPTEAQEAQMREKAAVLKEEVRNMIKGSHDVPEIVDLIITLQRLNLDYHYEDEINEKLTVVYKSNYDGGNLDLVSRRFYLLRKCGYDVSSDVFLKFKDQLGNFVEADTRSLLSLYNAAFLRIHGETVLDEAISFTMRVLQDRXYEKDAKQNKSILEFAKLNFNLLRLRYSSELKECTTWWKELRVESNLSFVRDRIVEVYFWMSGGCYDPSYSHSRIILTKIVAFITILDDT

SEQ ID NO: 190931 - protein, 59 aa, Zea mays
  Clone ID: MRT4577_105707C.1.pep
LVIYKNLVYTLLKITLENYLCLISNKTTDKISWLSNNPLVLIWQIIVITQSCELKTGTL

SEQ ID NO: 190932 - protein, 80 aa, Zea mays
  unsure (1)..(80): unsure at all Xaa locations
  Clone ID: MRT4577_105708C.1.pep
TXXSPXIXILPTTSPXPRDXLKLVXLPLGSFLSLGHXRCRHFEXFPIXWXPVTRRGYTNPWEMIPQKQGYFFFFFFFFFS

SEQ ID NO: 190933 - protein, 89 aa, Zea mays
  Clone ID: MRT4577_105709C.1.pep
AGRKILVCCQNGEDISICVALAILALLFDDNGCFDYGNYFVKRDVTKLEMRRRLVFICKFAVNARPSRGNLKQVYGFLSSQKELLSCLT

SEQ ID NO: 190934 - protein, 117 aa, Zea mays
  Clone ID: MRT4577_10570C.1.pep
FGSSDDIRKKHYRGVRQRPWGKWAAEIRDPKKAARVWLGTFDTAEAAAMAYDAAALRFKGNKAKLNFPERVVMPIQPQTNNNNSTSSSAPTTHALLLFHHHNKYIIIVLFQQKGFQI

SEQ ID NO: 190935 - protein, 224 aa, Zea mays
  unsure (1)..(224): unsure at all Xaa locations
  Clone ID: MRT4577_105710C.1.pep
QDKSRLHIEDSMDTDNTNASKSSEDGHVTDKIDKLKELSKLPDIYDRLTRSLAPNIWELDDVKRGLLCQLFGGNALRLPSGANFRGDINILLVGDPGTSKSQLLQYMHKLSPRGIYTSGRGSSAVGLTAYVAKDPETGETVLESGALVLSDKGVCCIDEFDKMSDNARSMLHEVMEQQTVSIAKAGIIASLNARTSVLACANPSESRYNPRLXSVIDNIHLPPT

SEQ ID NO: 190936 - protein, 142 aa, Zea mays
  unsure (1)..(142): unsure at all Xaa locations
  Clone ID: MRT4577_105711C.1.pep
MTFEDGNQALVKDSLDYNLLPVSQLCKMGYNCLFTDIGVTVFIRSDDSIVFKGVLDGQAGKQVGAHHPHKNIMTIDRPLEQLRMDLFDPITYISIGWXEKSQTQGTLKRFLRRAQXGLKIKKIRSDNGTEFKNSFGYGKDHA

SEQ ID NO: 190937 - protein, 57 aa, Zea mays
  Clone ID: MRT4577_105712C.1.pep
PPEPGRRQRLAPGRHSHNRRRTLILGSSARSSSWCAASPQGSRDAAVAAPGCGTRSG

SEQ ID NO: 190938 - protein, 140 aa, Zea mays
  unsure (1)..(140): unsure at all Xaa locations
  Clone ID: MRT4577_105713C.1.pep
CWPVNHTXLSPVGNLAIIAGEDTKPLLMAANRRKTIHSTKGHLACSFAWACCPNCLTFASCNCYKAGPTWNASYFTTSAYVSRGCTSSFTAIGSRSSRHFLSVTHATDFVHMFGMACDYYTTHELYSFGKVSCMLLRSCS

SEQ ID NO: 190939 - protein, 93 aa, Zea mays
  unsure (1)..(93): unsure at all Xaa locations
  Clone ID: MRT4577_105714C.1.pep
QLRDIVSSKPVNLDPLVYNMGENLFVCHKQLLCFRRLILKRRHILLMDEASSXVDSQSYAAMQKIMAEXSTEHTVISVAHRMPTVMHSDLLLV

SEQ ID NO: 190940 - protein, 81 aa, Zea mays
  Clone ID: MRT4577_105715C.1.pep
GQPPKLRLNAVLNSVTRRGPFLGNSLGVVAIIYNCTNSLIGSLRGKHDAGNTILAGALSGMLFKSTRGLRPMAISGGIVAS

SEQ ID NO: 190941 - protein, 62 aa, Zea mays
  Clone ID: MRT4577_105716C.1.pep
STPSSDDCDFLEEYRSARMRGFICQASLRQRKTSSRVQPPRVMLGSILPSLLSGGGYSSHYQ

SEQ ID NO: 190942 - protein, 81 aa, Zea mays
  Clone ID: MRT4577_105717C.1.pep
IDLKLYLCKDYLRFEPYLWNACKRFVLEHRAGENRAPIISDDSPNKDINNAFYNIVMLKKSKDGRMLNASSDTISWSVKSA

SEQ ID NO: 190943 - protein, 128 aa, Zea mays
  Clone ID: MRT4577_105718C.1.pep
YIFFFFFFFFFFVFLFFCGVFFFFFFFGNQTIFQGANNRKAFSWGAKTVSSPRSKFTPRTVFVFVLPPGHKEKYLPPHPGVLLRERFSIQSNQGPLLTGNRWTSFAWWVKKYIRGGPPCPKIPSQPLL

SEQ ID NO: 190944 - protein, 150 aa, Zea mays
  Clone ID: MRT4577_105719C.1.pep
RRDGARRRHGCSFAFVVVEPPPAPCSIQEQWNQNTGHFPTSRLDAIQLISSLRYCNGRDCSYVLLVLFRLYGQRNRSYYTREIEDTILLASQKPEVYDDIARDTCCKFGIDRPQVVPVQGLPQEKMKWNSNFSGRTSVEPVDDQVFQLVF

SEQ ID NO: 190945 - protein, 91 aa, Zea mays
  unsure (1)..(91): unsure at all Xaa locations
  Clone ID: MRT4577_10571C.1.pep
FCCRTSHDDNALTNAIEIFNXLGNVMSPLLIMQPHWVYVHASSVFSPSGAVHFMASSNDTGVRDYDMERFQLCNHFQFDCPVNASPFGYFF

SEQ ID NO: 190946 - protein, 142 aa, Zea mays
  Clone ID: MRT4577_105720C.1.pep
KLITSYYFFVPSPQIQSKYVDFHELNLTQKSPKVNQIVPAPFPPLGVHLKHENLISISNSSNRTKLVPFTFADLVSIRSNQDVKGTLVSPEVVLAQVQLEVYLSQICSTYREQCHHTLQASVKLRVWYPLFPYVRRTNSFQA

SEQ ID NO: 190947 - protein, 52 aa, Zea mays
  Clone ID: MRT4577_105721C.1.pep
MGQVVSDAVVQEQAAGNGGIIKNGREILLQAFNWESHKHNWWSNLEGRVADI

SEQ ID NO: 190948 - protein, 48 aa, Zea mays
  Clone ID: MRT4577_105722C.1.pep
EHIFSFFYNTLHCIDPFNFESNYQRNKSGADKSDNSTHLVCPTSRFLA

SEQ ID NO: 190949 - protein, 274 aa, Zea mays
  unsure (1)..(274): unsure at all Xaa locations
  Clone ID: MRT4577_105723C.1.pep
GWFFKDYXVESTTIPTNPRTSRPVGYAFVALSTPSEAERAIAELNGKAILDRKVSIQLARTPEAHAEGAGSGAEGNTGEARRRTSTRGRGRGRGRGGRAGRGGRATDAEGAEPAEASTEAAPAEAAPTNGAEKAAAPRERKQRGPPEDGVPSKTKVMVANLPYDLKEDRLLEIFKDYSPTQAKIALRPIPRFMVKKLQARGEPRKGXRGFGFVTLGSEELQQKACAEMNGKEIEGREIAVXKVAIDSPGKEXDAPDAPAEGEAPTTEATTPTRP

SEQ ID NO: 190950 - protein, 68 aa, Zea mays
  Clone ID: MRT4577_105724C.1.pep
SQASEWALAAAGLTTTPARKKTGPWGASSLWTAGTTWVDEAPAPLWTASPPRTADAAPPPTSRGQTER

SEQ ID NO: 190951 - protein, 147 aa, Zea mays
  unsure (1)..(147): unsure at all Xaa locations
  Clone ID: MRT4577_105725C.1.pep
EIYLYSLAMIYNQIVDYFLPNVYDEALIINYLHKQTRVFLPTRFXLIDIIEDSQGHXGLGIWTSXEGATAIRADIIIYKLTVIPGRPVYCPTNLDADHSLATTESAKXGSYSHQLIPGSLATVLAAIPRCQLYLQIAQREDRYTSSI

SEQ ID NO: 190952 - protein, 120 aa, Zea mays
  Clone ID: MRT4577_105726C.1.pep
RVQRRFQKFTVLALPHKRPLEIDKAQAFPTGLQPVVQVALPLQNGGFDLVPNPHWLQDGHRLLLGLSSRPSSSSPLWALASGKTSRTAKTASSTNSPLGLMLLFPGNLERTGFHHFLGRV

SEQ ID NO: 190953 - protein, 85 aa, Zea mays
  Clone ID: MRT4577_105727C.1.pep
GMPACYRCSMGMFVASVRPLKICHSLIRQRSRSAIPKGLSDPKHHAPDAATCGHLCRFGASTAGSASTAFNIPSQYQNPIWLTYL

SEQ ID NO: 190954 - protein, 149 aa, Zea mays
  Clone ID: MRT4577_105728C.1.pep
KNLSKRNFFGQRGNPNPFWGNKVGGSLPGFKNFLLNPPQRGGQNSVFPGRATPLKNFSPQKNGPKIPPLFYPKRAVPAKGDPVPNTIPLKDTNCFPLFFFPPHTFLGGPFLKGGEENFLGTFSGEKFLKKGPFPREHKKKRGGFKTFSF

SEQ ID NO: 190955 - protein, 38 aa, Zea mays
  Clone ID: MRT4577_105729C.1.pep
REDVAKGFCTLLLHHLEEALGISLLIHPIVHLANILSI

SEQ ID NO: 190956 - protein, 793 aa, Zea mays
  unsure (1)..(793): unsure at all Xaa locations
  Clone ID: MRT4577_10572C.1.pep
MRRYKRVPKIQHKNNKKNKTRVKIKEQRGNRRHPWSGAPDCPVPPIHPPSRRLSTSINGMKYFVIFIDCFSRMTWVYVMKHKDEVLNCFQNFCALVKNQFNTQVKMIRTDNGTEYVNKEFNAFLSRNGILHQTSCPDTPPQNGVAERKNPHILEVARSLMFTMNVLKFLWSEAVLTATYLINRTPSKILAMKTPCEVLLGENKFVVPPKIFGCTCFVRDHRPQVGKLDPRALKCIFVGYPTGQKGYKCWNPSERRLFVGMDVTFRETMPFYGEKTYLNFFLESASNSIDDASREGDNIEVDPKEHHSNKMEVVIGASQQKMQVVGPNEPESNSSHENNRSCGDNLQYKGEVYTRRKSHLHSEPHETNPSSSTEQFSPDTLETTDAPLISHREIEDPSSHDLPIAIRKGARAKAGVPPTRYGYEHDIGNYVSYASLSPSYRAFVASLHSIAIPRDWKEAQHDSNWREAMLEELKALEKNQTWEFVKLPKGKKSSQXEVYMEIPPGVSXARGSRKGDDEHEIAHLKENLSKEFEVKDLGHLKYFLGIEVDRSPQGIVLSQRKYVLDLLDETCMLGCRPIATPIDLNHKLCAESGDPVNKESYQRLVGRLIYLCHTRPDITYAVSVVSRYMHDPKSGHLDAVYRILRYLKSCPGKGIFFKSHGHLKVEGYSDADWASCLDDRRSTSGYCVFVGGNLILWRSKKQSVVSRSTAEAEYRAMSLVLCEMLWVKNLLSELNVLRRSPLRLGCDNKSAISIANNHVQHDRTKHVEIDRFFIKEKLDDGTLELSHIPIRQQM

SEQ ID NO: 190957 - protein, 44 aa, Zea mays
  Clone ID: MRT4577_105730C.1.pep
HTPRAQLTFTSTPNTVLTGGRAFLKARKIPNNLICLGNQQDVFQ

SEQ ID NO: 190958 - protein, 144 aa, Zea mays
  Clone ID: MRT4577_105731C.1.pep
MASRAKQLHAHYLVAGLGDPDKWTCLVKEYAANASLRDAALVYAKHLPRQTHHLPLLPALLKAAASRAGPGLGLGRSLHAEALKSAFAGELLVGTTLVSMYCKCGLLADARRVFDGMPGRNVVTCNAMLAEYAAAGDTGQAEVL

SEQ ID NO: 190959 - protein, 318 aa, Zea mays
  unsure (1)..(318): unsure at all Xaa locations
  Clone ID: MRT4577_105732C.1.pep
MGTLVGHVAPGAGFLLIGLWQLFSHTRLFLLRPSSYSAPVWFPVPGVRHLELILIIIGTVLSILMELVIGPAKHQPFDDDGTIPSDHLHNFEHASISLALLVFAAVTIHLDRARAPMRDAVSQLVAAAAFAQQLLIFHLHSADHMGVEGQFHWLLQTAIAVTLATTLLGIPYPXSFAVSLVRSASLVFQGVWFVVMGVMLWTPALIPKGCFLNFEEGXDVVRCRTDDALDRAKSLVNLQFSWYLTGTVVFVVLFYLQMAKLYPEEPQYLPLVKGGGSGSDGRFSIGDDDHDDEDDVEAAKRGGFGHVVSGTRPVEIER

SEQ ID NO: 190960 - protein, 113 aa, Zea mays
  Clone ID: MRT4577_105733C.1.pep
LGSSRPAGDPPVPQATGGRHKCPTSLSPAASRRGVSRSRVGADGGSTSSSPRRRRRSRSRVGAVPKPRQAAGRRPWSGAGTEPRMAPPPRGMRRRLRSASSRRLATALFVLSI

SEQ ID NO: 190961 - protein, 106 aa, Zea mays
  unsure (1)..(106): unsure at all Xaa locations
  Clone ID: MRT4577_105734C.1.pep
LENYFYNMRNTIKDEKIASKLPADDKKKIEDAIDAAISWLDANHARRRQDGSXMDKXMKELGEXCNPIIXANMYQGCGXDMGGAGGMDEDSPAGSGGPGPKIDEVD

SEQ ID NO: 190962 - protein, 125 aa, Zea mays
  unsure (1)..(125): unsure at all Xaa locations
  Clone ID: MRT4577_105735C.1.pep
MSPLPTMHARITRWTLTTSTHHHDLLGLPKIPAPDDNENAYRIAATTCSADNSADPXNANQWSPDSDRLNDPQKTHNDDQYGEDALMERMQGRNSSDFHSPLRHFRSTFSGCHHLLMYIPQEDDT

SEQ ID NO: 190963 - protein, 78 aa, Zea mays
  unsure (1)..(78): unsure at all Xaa locations
  Clone ID: MRT4577_105736C.1.pep
MAASTMAISSXAMAGTPIKVGSFGEGRITMRKTVGKPKVAASGSPWYGPNRMKYLEPFSGKPPNYLTGXFPGNYAWDT

SEQ ID NO: 190964 - protein, 471 aa, Zea mays
  Clone ID: MRT4577_105737C.1.pep
MAPHVLVVPFPGQGHMNPMVQFAKRLASKGVATTLVTTRFIQRTADVDAHPAMVEAISDGHDEGGFASAAGVAEYLEKQAAAASASLASLVEARASSADAFTCVVYDSYEDWVLPVARRMGLPAVPFSTQSCAVSAVYYHFSQGRLAVPPGAAADGSDGGAGAAALSEAFLGLPEMERSELPSFVFDHGPYPTIAMQAIKQFAHAGKDDWVLFNSFEELETEVLAGLTKYLKARAIGPCVPLPTAGRTAGANGRITYGANLVKPEDACTKWLDTKPDRSVAYVSFGSLASLGNAQKEELARGLLAAGKPFLWVVRASDEHQVPRYLLAEATATGAAMVVPWCPQLDVLAHPAVGCFVTHCGWNSTLEALSFGVPMVAMALWTDQPTNARNVELAWGAGVRARRDAGAGVFLRGEVERCVRAVMDGGEAASAARKAAGEWRDRARAAVAPGGSSDRNLDEFVQFVRAGATEK

SEQ ID NO: 190965 - protein, 63 aa, Zea mays
  Clone ID: MRT4577_105738C.1.pep
CSPAVLMLILGVWVSTSIQLSSWHVACQFWFIISVLFSYSWCILGEWKPWSFCNITQKLWLGA

SEQ ID NO: 190966 - protein, 144 aa, Zea mays
  unsure (1)..(144): unsure at all Xaa locations
  Clone ID: MRT4577_105739C.1.pep
PVNQKPPKPKKAQKRQKRRKGKRGGEGKTTNPPQKQKNPKKKRKQKKPKPKANKPRPETHQGRNPPKGEAQQAGRRPGGGRAPPRAGGKPGQKGYPGKTETPNEXPHTKGKGRGRPNRGGPQKTXCPLQPGFPHGPRAGRVPCG

SEQ ID NO: 190967 - protein, 549 aa, Zea mays
  Clone ID: MRT4577_10573C.1.pep
MARRRSQKNKKTQENPTRKEVTLEILFDDCSNYDSWSSSVINAFRTIDPRLEQIIDKSIFPSNFNGKINSEEDQRCYRLNYLAFDILTNSLSKEDYHAFISNYDESVHDAHDIWTRIRSKFDESKHDSSFCVSTSFGICDTNPCKEEEENERWRPNDESTSPKGLSSHFDSHMCCVANENDSGSTNEDEEEERSFVHLYARLSQEDKAVMFKLLERAREQSEARQRLEDILSIKMQHFDELTKEHEELKCSHVDLVQRYETISIEQDNASHCIAQLVNRNTLLKDQVEKLKIENLAFQEKYDMLLCSHENLRDDHIILNIAHEVVIENLKSQQPHSCTCIQIDTILPCANACCLSTSKFSFELEFAGTNDDSYQKLKEENERLRKSLTQLKGKCIAQPSQDNRDHMVKKLETGKTAACTTSLEENVKNLRITMRRKQKMKFNTSSKSLNHASTKGNIQASNKQGKKKSSKLGKRLCYTCRKKGHQCKDCPIGKNPTPNLSFDSYITRQPKVATCARKELKNYHVRNIKAYNMEESQGMSHRNRKHLRMF

SEQ ID NO: 190968 - protein, 63 aa, Zea mays
  Clone ID: MRT4577_105740C.1.pep
WGVFHFLSPSTSMRFDHLSVLANLLQQALASIVLTTTNFPIASSFLATSNNTILFISTTTSVP

SEQ ID NO: 190969 - protein, 200 aa, Zea mays
  Clone ID: MRT4577_105741C.1.pep
QPPLTRIATSARPSATAPSADPVSLPPGAMKPHPPPPHPRAQAQTQNSAKPLASSLPPMRSRRRSPSPLDAPPHRPPHPRPPRRHPPRSRLARAAPMERRLRFPEGERPMRPTDDSCRSHTGRRWRAGADGAADSASPRCIAGLQRGLRLPRLRMSLREELHIHRKLCGKDVQASCPCADRLRGVEKTWCPLRIARSIAA

SEQ ID NO: 190970 - protein, 82 aa, Zea mays
  Clone ID: MRT4577_105742C.1.pep
YIFFCKILYIIELIKICSISCGLSARFADFILGILNLACPLRIFKWCVLFVDRFGAANSVLEPNSCQAKPIYIIDAGDFFFL

SEQ ID NO: 190971 - protein, 165 aa, Zea mays
  unsure (1)..(165): unsure at all Xaa locations
  Clone ID: MRT4577_105743C.1.pep
GRREAGDQGLGCVRKAAFRAVVRTGASFFLFFFCVFGVLLVAVTAARTGRDCWDQVQRAQMLSHCQDFLDEVSDTGRCYRDVRGSSGRGGMRGSWHLEQCCDQLSEMDQECMCEGLKEIVKEQVRQSXILLGRQGTQEEEVVECARKLPQMCRMGRTCYQIRVPY

SEQ ID NO: 190972 - protein, 57 aa, Zea mays
  Clone ID: MRT4577_105745C.1.pep
PRVSCQEHRVIFGQRWVYQRGQNQGISCVLSCPSVESRCHLLIWVRLVNLERFCQLE

SEQ ID NO: 190973 - protein, 222 aa, Zea mays
  unsure (1)..(222): unsure at all Xaa locations
  Clone ID: MRT4577_105746C.1.pep
PNTSDVKXLIPXFFYMPEFLENSNSYHLGIKQDGEPLGDVGLPPWAKGSPEEFIHISREALESEYVSSNLHHWIDLIFGYKQRGKPAVEAANIFYYLTYEGAVDLENMDDMLQKSAIEDQIANFGQTPIQIFRKKHPRRGPPIPIVHPLYFAPQSITVTSVVPTIVTPLSVLFIGLLDSNVVMMNEGLILSVKLWLTTQLQSGGNXTFSGSLEPFFGIGSDV

SEQ ID NO: 190974 - protein, 70 aa, Zea mays
  unsure (1)..(70): unsure at all Xaa locations
  Clone ID: MRT4577_105747C.1.pep
EDKKXXXGQXXGXPKPXXXPXXPXXXPKKGAAXXXXXXXXXRQTKXXXXXXPXXRXXXAXXXEGTXXXQS

SEQ ID NO: 190975 - protein, 254 aa, Zea mays
  unsure (1)..(254): unsure at all Xaa locations
  Clone ID: MRT4577_105748C.1.pep
GRRAQSRAAAAAAEERLQSAIPITQRQQAGRCVQAHRSSLFRAHPHKQAPPPPPPPPPRRNRLVPPDLAARGRASRYMRAAPFSADGNGAGTIEALLWPHGXRRRRAPAVXEPTSVLDCRRSPSPPYSTSTLSXPWAAPRGTPFPAWRRFRRTAPPPAATTMRFHDGADIKPPLLGVPSAXTSSTPDAAGGLLLHAAPLLPRPSAPATSPAPAEAPPLYARQPVPPPXPAPAAVAGSTIPATAYHHALSAPATT

SEQ ID NO: 190976 - protein, 202 aa, Zea mays
  Clone ID: MRT4577_105749C.1.pep
STASVGRRPKVEVALLPLPLLPLSDLAPGDDRSEASAPGRGRRPATGVMLQGEPERVRCREPEAGGITEERRRRCRVRRARAPSAVQHRRRLQQQVPSAAALPVRPKQRLYGPRPVPVGTEGRRPHVPTRATPGGEIWGARRFLLGGGGGGACLCGWARNSEERCACTHLPACCRCVIGIALCSRSSAAAAAALLCALRPHA

SEQ ID NO: 190977 - protein, 177 aa, Zea mays
  unsure (1)..(177): unsure at all Xaa locations
  Clone ID: MRT4577_10574C.1.pep
ISRNIAEQEYRESGLAMADTSTNGGSETTSENTVGVENENRTLTTKEEVQSSFPDINKVSRDVLSQTENILGALMILSKNLSPHDQSVPTTGTNGKYDMIREEQGASAADSVQKADTVSSALLSIDAQEAEDMRRLFASAETAMEAWAMLATSLXRNSFIKSDFEKICFLDNISTDT

SEQ ID NO: 190978 - protein, 57 aa, Zea mays
  Clone ID: MRT4577_105750C.1.pep
DVLKALLASATAQFLGRGSSAPPSCHGDDDRAAADPIRRVFDALLLMDSRGLALRCQ

SEQ ID NO: 190979 - protein, 55 aa, Zea mays
  Clone ID: MRT4577_105751C.1.pep
HLVSTIRYLGSQKAGRTAHRDSQLKMHTAHPSIYWTRRSLRCKSDEVIWVWVGMN

SEQ ID NO: 190980 - protein, 104 aa, Zea mays
  Clone ID: MRT4577_105752C.1.pep
KNGGGFFPKQGLGKTKFLKNFGVGFPSKFFREIAPGPHNYFFTHIFICVGPRRAWGVNFINKKGGGASGFLGWPWFLAHTVGGFFKALGGFFFLEEAVKKYFPL

SEQ ID NO: 190981 - protein, 105 aa, Zea mays
  Clone ID: MRT4577_105753C.1.pep
VGVLLDLPLAGFWARAVRCVVRQLVREPHICFGACGSSVRAKCSAGVVRVLASSPMLLLCLFPLVLLCDVLRCPWGKTPRPRMARCGLKETGVGLEIFSPFERVR

SEQ ID NO: 190982 - protein, 578 aa, Zea mays
  Clone ID: MRT4577_105754C.1.pep
MLHYISSSPLRPRFLLLPSPPSNLRFLTMSASPSSSSSRSVRGAAVSVPSLGADEACAVADEAFRRYTSPSLLRRGGVGVAVVWFRNDLRVLDNEALLRAWAASEAVLPVYCVDPRVFAGSTHYFGFPKTGALRTQFLIECLGDLKQSLRKKGLDLLVRHGKPEEILPSIAKAVSAHTIYAHKETCSEELLVERLVSKGLEQVQIAQGGASVPKRPLNPRLQLIWGATMYHIDDLPFPVSSLPDVCTQFRKAGESGCSVRNCAKLPTSLGPPPSSSIDEIGGWGTVPTLESLGPSVTKSEKGMHFIGGESAALGRVHEYFWKKDQLKDYKVTRNGMLGPDYSTKFSPWLASGSLSPRYICEEVKRYEKQRVANDSTYWVLFELIWRDYFRFLSAKYGNAIFHLGGPRKVVSKWSQDQALFESWRDGRTGYPLIDANMRELSATGYMSNRGRQIVCSFLVRDMGVDWRMGAEWFETCLLDYDPASNYGNWTYGAGVGNDPREDRYFSIPKQAKSYDPEGEYVAYWLPELRSLAKERRNFPGASYIRQVVPLKFDGGNQRKDQQFNRQRRPNNVYIRQVK

SEQ ID NO: 190983 - protein, 176 aa, Zea mays
  unsure (1)..(176): unsure at all Xaa locations
  Clone ID: MRT4577_105755C.1.pep
NRVEAAPASPGLVVLLDPTRRDLGAQYELGGELGRGEFGVTYMCSPXSARYPYKSVSKRCLWTLVDMEDLRREVDILRHMPVHPNIVXLSVVYEDXAPAPYEDVVQLAMEFCEGXDLFDRIVARGHYIERAAITCTISRGSSRSASLYLSPLFLGSLMLRPALASGHCMLFNTLYY

SEQ ID NO: 190984 - protein, 54 aa, Zea mays
  unsure (1)..(54): unsure at all Xaa locations
  Clone ID: MRT4577_105756C.1.pep
XFXXSTINSXXTXXKKXKKNHLTPPXSXXYQXFXPPPSPHXXXFPKKKFYILPX

SEQ ID NO: 190985 - protein, 63 aa, Zea mays
  Clone ID: MRT4577_105757C.1.pep
MPPYLYNRSPNLNTGNLCSEPSPWLFPELEPSTNFFTFFLEPNSSGPKPLKLPKIHPVLLSHL

SEQ ID NO: 190986 - protein, 109 aa, Zea mays
  Clone ID: MRT4577_105758C.1.pep
ILALRFSSILWLLNKPLFFSHVLDYLYSIFFRKNSKRLRSSQIQGWETSYPNTSKQNGTQSHNTKPSTHLTSKNTTTPATQKGSCYQSKLSTLQPSPVCVSKSSPAMSS

SEQ ID NO: 190987 - protein, 222 aa, Zea mays
  unsure (1)..(222): unsure at all Xaa locations
  Clone ID: MRT4577_105759C.1.pep
DAWVLLPISSQWKXGKALGSGTFGQVYVGFNSESGKFCAIKEVQVILDDSKSKERLRQLNQEVDMLTQLTHQNIVQYYGSELTDEALSIYLEYVSGGSIDKLLKYYGPFKEPVIRNYTKQILSGLAYLHGRKTVHRDVKGANVLVGPNGEVKLADFGMAKHITSLAEIHSLRGSPYWMAPEVIMNKNGYSFESDIXSLXCTIIXMGTGRHSGHQFEHVHAMF

SEQ ID NO: 190988 - protein, 365 aa, Zea mays
  Clone ID: MRT4577_10575C.1.pep
MAHRRSQKNKKTQENTTRKEVTLEILFDDCSNYDSWSTSVLNAFRTIDPQLEQIIDKSIIPSNYDASEEDQRCIRLNYLAIDILGNSLSEEDYHAFITNYNEYIPDAHDIWTRIKTKFNESKHDSSFDTSTSFSSCDTNPLKEEEENKRWRPNDESTSPKVNRNTLLKDQVEKLKVENLAFQEKYDMLLCSHENLMDDHIILDIAHEVVIENLKSQQPHSCTCIQIETTLSCANACCPSTSKSSFELEFAGTKDDTYQKIKEENERLIRSLTQLKGKCIAQPSQDNRDHMVKKLETGTTVACTKSLEENVKDLRIAKRRKQKKKINTASKSLNHASIKGNIQEMGTKTCLTSFAGDGDGMKLWDA

SEQ ID NO: 190989 - protein, 73 aa, Zea mays
  Clone ID: MRT4577_105760C.1.pep
MRRLLLKIRKWPSVRRPIEEDGFANTVETDPTPKEILLTATIEEGEIILIEGKEGAANEMPQAGETSEEDEED

SEQ ID NO: 190990 - protein, 67 aa, Zea mays
  Clone ID: MRT4577_105761C.1.pep
RSNNHHNHLTRGTAGEHYTGNKQSTNHSIWKLTTGTASLFLSTGMVTHMLSSNGSLVAIIGNGSSLI

SEQ ID NO: 190991 - protein, 52 aa, Zea mays
  unsure (1)..(52): unsure at all Xaa locations
  Clone ID: MRT4577_105762C.1.pep
AARMGSXRSPAAAGHASLPRPCRDIPCSASGVRYLAACVRCQVSVHLCGEQW

SEQ ID NO: 190992 - protein, 108 aa, Zea mays
  Clone ID: MRT4577_105763C.1.pep
YLQYGPNPGHHAPGPGGSSAIASAILHLALGAVTYVTIDMGFLVESQSEEELPERLFGAVRIARMEMGAARYVELPPNEAMPETVCSGRAGAGFRVSSGKVVNHSRQQ

SEQ ID NO: 190993 - protein, 71 aa, Zea mays
  unsure (1)..(71): unsure at all Xaa locations
  Clone ID: MRT4577_105764C.1.pep
VGRACSVXCLWWRARGARALPGVLALCCCPCSSGXLVXCFALFSVSPGLXKCAPARXXGGRRLMNIVVPGI

SEQ ID NO: 190994 - protein, 94 aa, Zea mays
  Clone ID: MRT4577_105765C.1.pep
YGSIGIVSRAYGMDRPSWLCGRRSTDNSPGETYTSAYEKITDEHDSAKSSPNSTRSPEITFNELEDDNDVKVKVLSERLSCVLLDDRAKDDLVN

SEQ ID NO: 190995 - protein, 58 aa, Zea mays
  unsure (1)..(58): unsure at all Xaa locations
  Clone ID: MRT4577_105766C.1.pep
LRPPVGSEGGGGAXGGAXGNSSHTQFDHNKEQGGGGTGAGHDTPGFWSGMIGGSGASW

SEQ ID NO: 190996 - protein, 38 aa, Zea mays
  Clone ID: MRT4577_105767C.1.pep
MAGYTQAASRDVSAKPGHSNDVNSANDKKGAGVGSVVR

SEQ ID NO: 190997 - protein, 69 aa, Zea mays
  Clone ID: MRT4577_105768C.1.pep
EKVFWFSLPKVAFPCKPNPPFGCPCNPNLFPKAFYFLKPFASKEGPFEVHKFFFSTISIFLGAKFNEGV

SEQ ID NO: 190998 - protein, 128 aa, Zea mays
  Clone ID: MRT4577_105769C.1.pep
MNKSKWAMVRDRQTRRCLLEGQCEGGLYPLTISSAQDLTHALAARKINRDQWHARLGHPASQTVQSILRINNIMCSSESFSSVCNACQMAKSHQLPYSRSMNNASAPLELIHSDVWGPAAKKKKKKAA

SEQ ID NO: 190999 - protein, 46 aa, Zea mays
  Clone ID: MRT4577_10576C.1.pep
VIAPVRFTTGLRQHQLAHALSVLAVTVIRLVPQSMSTPWLLCIYAL

SEQ ID NO: 191000 - protein, 68 aa, Zea mays
  unsure (1)..(68): unsure at all Xaa locations
  Clone ID: MRT4577_105770C.1.pep
FMSNNKSCLNHYKDNKYLTIMRNGYTFGGKFNIECXKIINSVRGSILFICMLAEMIMSVETKESVMAF

SEQ ID NO: 191001 - protein, 149 aa, Zea mays
  unsure (1)..(149): unsure at all Xaa locations
  Clone ID: MRT4577_105771C.1.pep
MAPLGAAKFATECNISVRNHVPVFKHWKDYKNHSGLFNLFTGKLSAKFDINTSDAPVQKACSQMMKSAVRQQRYRLKKKYFDPFPLHLVAKKSPIRSMTDEEXNELVEYWKSPKKXETSQKNKENRSKVKFHQTTGSRSYMVHVETLGD

SEQ ID NO: 191002 - protein, 146 aa, Zea mays
  unsure (1)..(146): unsure at all Xaa locations
  Clone ID: MRT4577_105772C.1.pep
PRVRSWPFKRQLVVSRSIGGVEYYTVGYAMVEARWLHYLLQELHSMLTKSTVXCDNISVVYLSVNPVXHQHTKHVEIDLRFICERVAIGXIRVFHVLTSLQFADIFTKGFPCLEFQSSFNVCHRVSTVRGARHPLWLCYGPTMAQP

SEQ ID NO: 191003 - protein, 294 aa, Zea mays
  Clone ID: MRT4577_105773C.1.pep
MRNPPGRHLLCLSSRAVRSSSSSSALGPGPGAVTSAASPRPRAIAPGRPLRASSPSPPYAVAAAAYVEDGDWEEVVAGGPGTGEMEEEQDYRVVFWSPPTIDEVTGAVTSIQQVFENPLGLDSDTTDRQTTLLSASGHSSGNSSGSDDWIEPAAYVLNSTALLSREHRNVVDAFRLLQKDPTVQKMVMSLSCDKAVWNAVMNNEAVQDFRRSLHDGKENDRNENTGGPAEVFKWILESAQAKIFEFLENVQKIINMLIHTPEDDDNPDGYSDAVKVSFMLTVFVFIVVAIARIK

SEQ ID NO: 191004 - protein, 168 aa, Zea mays
  Clone ID: MRT4577_105774C.1.pep
GAWIKPFHRFNQNITYKKRVRLIPKARQRGSCIYILYSKGGGDLTIIAGRLSSNCEVRSGGGGIILGLSAAQEFWGAGSSLFQGPAKKTRAHQHVYGIIQWIRGQIGWELPKNPSKIIYINLSVKLRALGVFSILGRGSYRGRGITGLLGGQCVIKVVGLGRKNIFWL

SEQ ID NO: 191005 - protein, 75 aa, Zea mays
  unsure (1)..(75): unsure at all Xaa locations
  Clone ID: MRT4577_105775C.1.pep
SLFFSFLLXTFLNSLWSHSSHHSXSPISSHPYPIFLLARGYIHRTLFFFSTSYIHSSLPSSSPFILLIQFHSIIF

SEQ ID NO: 191006 - protein, 156 aa, Zea mays
  Clone ID: MRT4577_105776C.1.pep
EPAGTAAGSGRAITGSGTWHSEAKPKPVFMASKSNWHQIGLRQTFSFVVRNETGAPFRTGWLMMEHRLLNDDGEEKQQEEEGFLVYRVLCKVYRSPRKPEPSGNKAAAAASPGHKIEADDDESNDATLDENDDDESNDATWDANDDGLQCGATGGI

SEQ ID NO: 191007 - protein, 223 aa, Zea mays
  Clone ID: MRT4577_105777C.1.pep
MAMFARPLLATLLLLPAFLLSAASAADSKSNPADELVALINSNRTAGKASSVSDNQGLGCIALQYIKAYEGHCDQVDDKKPMESSFTDTFAPTCGVQATTLSKITGRLVACQSQYLAPAEAFGVLLVNDAKGLQILRSKNHTEVGAAVSGTDGGGPYFWCVLFSDGKPTTSFKVDGEVPKAAIHPGCFSGNNDDCSGPTNGAVLTSAGALRLVTAILFAVAAL

SEQ ID NO: 191008 - protein, 65 aa, Zea mays
  Clone ID: MRT4577_105778C.1.pep
LRGGGGGTGRGPWGNKKTPCAERTAPGGKTVGIKNDNPSGKNRGSRRTFVYENLTLPNSHLVKKT

SEQ ID NO: 191009 - protein, 57 aa, Zea mays
  Clone ID: MRT4577_105779C.1.pep
GGKSPFGSCKPDNLIQVLLIFWIWSELLVSKQYKQSPQVFRHFQNPGILFAPLGARF

SEQ ID NO: 191010 - protein, 80 aa, Zea mays
  Clone ID: MRT4577_10577C.1.pep
RWRFLALKFGKLLFFPLNRCMFFFPSLPPRMSFAPCFGSSLCLGLNRPAPGVGCHFTAQVFCARVRECLRIAGCPPFWGQ

SEQ ID NO: 191011 - protein, 34 aa, Zea mays
  Clone ID: MRT4577_105780C.1.pep
CHAVRNSIFESQMLLTISNTLLGLYVRTWPAPRY

SEQ ID NO: 191012 - protein, 197 aa, Zea mays
  Clone ID: MRT4577_105781C.1.pep
GGAGGRNGSSSSASAAAAAVTSSSAASTLSLPPPTGSLPSLTSALGLPGGASLASLLLGTAGSGGDHLGLFQAAMQSVVSSEATAYEMQQQQSQVDHLLGLGYGGATGAGAQIHLKPWMQEAAGAGGIMDSFYAPLLSSSLVPGLEELHVKAEVAGAGDHQQKPAPGDQQSASWELPTPSSSNVDANVIASDALMAA

SEQ ID NO: 191013 - protein, 241 aa, Zea mays
  unsure (1)..(241): unsure at all Xaa locations
  Clone ID: MRT4577_105782C.1.pep
IRHEGRGSAELVEAPVAYQENVDILDKDEDPPIVFALAAGSPRCVRALVGRSASINSRLREGLGPTLAHVCAHHGQPECMQELLMAGADPNAVDGEGESVLHIAVARRYTDCAIAILENGGCRSMGISNSQHKTPLHLCVETWNTAVVRRWVEVASLEDIAEAIDVPSPVGTALCMAAALKKEHEKEGREVVRILLAAGADPTAQDDPHCRTALHTAXMINDVELXKIILESRVDVNIRNA

SEQ ID NO: 191014 - protein, 60 aa, Zea mays
  Clone ID: MRT4577_105783C.1.pep
EKENLDNELPINKQIGARTRGFNEFLVLDPEECKKVVQKVGFGHYQHRFNNRGLLKGFEC

SEQ ID NO: 191015 - protein, 262 aa, Zea mays
  unsure (1)..(262): unsure at all Xaa locations
  Clone ID: MRT4577_105784C.1.pep
FGTRHGENPGANFQAMNSSHNSVNNSGGIVLHGSPAPSNIQQQNYSLLHQMHALRHTDIDPGSLAGKTTRPDVGSDASQIDWKSGQRFAHVANNQTKSAADNVGSPGVPGSFTSDMKILSFASRSEERNVNIPSQLPSGERPFPGMVTAQNDNQNQIQPMGTSATSNSVERSERPRINPQXAPSWFGHYGNYRNLLETTSVLNAQKPSAFIYNFPKGTCLEKNNNSAECRRASGKCRAQCIISHQRLPTNPARRRAENGCAN

SEQ ID NO: 191016 - protein, 264 aa, Zea mays
  Clone ID: MRT4577_105785C.1.pep
MAAAMPALLLLLVATAMMFSPAAARIPGVYGGGGWQSAHATFYGGSDASGTMGGACGYGNLYSQGYGVNNAALSTALFNQGLSCGACFEIKCEDQPGWRWCRPGSPSILVTATNFCPPNYALPSDDGGWCNPPRPHFDLAMPMFLHIAEYRAGIVPVTYPRVPGRKSGGVAFTFNGFRYFNLVLITNVAGAGDVVRASVKASGTGEWLPMSRNWGQNWQSSAILVGQALSFRVTGSDRRTSTSWNAAPRDWRFGQTFEGKNFRV

SEQ ID NO: 191017 - protein, 52 aa, Zea mays
  Clone ID: MRT4577_105786C.1.pep
MAHPEHQQDTPNLFNRWTFYHLLTNDISLNDYLAVNATKHAMYLPHTPVPYS

SEQ ID NO: 191018 - protein, 265 aa, Zea mays
  Clone ID: MRT4577_105787C.1.pep
MAAAMPALLLLVATATAMMFSPAAARIPGVYGGGGWQSAHATFYGGSDASGTMGGACGYGNLYSQGYGVNNAALSTALFNQGLSCGACFEIKCEDQPGWRWCRPGSPSILVTATNFCPPNYALPSDDGGWCNPPRPHFDLAMPMFLHIAEYRAGIVPVTYRRVPCRKSGGVRFTINGFRYFNLVLITNVAGAGDVVRASVKASGTGEWMPMSRNWGQNWQSSAILVGQALSFRVTGSDRRTSTSWNAAPRDWRFGQTFEGKNFRV

SEQ ID NO: 191019 - protein, 45 aa, Zea mays
  Clone ID: MRT4577_105788C.1.pep
MNWILHGRESTDVWVIGHECGYHAFSDYWILDDGVGLVLYSPLMG

SEQ ID NO: 191020 - protein, 113 aa, Zea mays
  Clone ID: MRT4577_105789C.1.pep
VRLPLSDLLMRYPRTSLFMVNITTPVVNIVNYSIRGHRQLLCLRRRQQHLLQHRKATAVTRYFFFSPPHLCRWFRNGGRNRQPADPAVGAPTCAPEIMLTVNLTLRPMLPSPT

SEQ ID NO: 191021 - protein, 555 aa, Zea mays
  Clone ID: MRT4577_10578C.1.pep
MARKRSQKNKKTQETKEVTLEILLSNCSNYDSWSTRVINAFRAVDPQLEQILVKSIIPPNYARENASEEDLRCIRLNYLAYDILSKSLSKEDYHAFIIKYDKPICDVHDIWTRIKSKFNKSKHGSSFCASTSFGLCNTNPCKEEEENDRWRPNDESTSPKGLSSHFNSHMCCVANTNDRGSTNEDEEEERSFVQLYARLSQEDKAVMLKLVERAREQGEARQRLESILSMKMQHFDELTKEHEELKCSHVDLVQRYETISIEQDNALHCIAQLVNRNTLLKDQVEKLKIENLAFQDKYDMLLCSHENLRDDHIILNIAHEVVIENLKSQQPHSCTCIQIDTILPCANACCLSTSKSSFELEFAGTNDDSYQKLKEENERLKKSLTQLKGKCIAQPSQDNRDHMVKKLETGTTVACTTSLEENVKDLRIAKRKKQKMKFNTSSKSLNHASTKGNIQASNKQGKKKTSKLEKRLCYTCQKKGHQCKDCPIGNNSTPNLSIDFHVTRQPKIATCARKEIKNYPMPKSQSLQYGGMPKDGNIYAFKCKYLNLSFLMCLV

SEQ ID NO: 191022 - protein, 66 aa, Zea mays
  Clone ID: MRT4577_105791C.1.pep
HEARGSHERQQVEPHLWSDFPIEEVAESSNGCSWLYIVAPFACWQQREMLPGPACRCSPDGPIIMT

SEQ ID NO: 191023 - protein, 58 aa, Zea mays
  Clone ID: MRT4577_105792C.1.pep
DNMSGDHELCLITVSAGRFLSTATDNMAFVCFAFSMDRATPVYPTTTTSHSCHLAVLH

SEQ ID NO: 191024 - protein, 91 aa, Zea mays
  Clone ID: MRT4577_105793C.1.pep
SCSHSYGSVLSALRAATARTPYSTRMTPELPIGVTIAVTSPLWPRIVPTRERDSCAPAMVADSVCCCKRCVGGGARESGRVCRPTVLGRVG

SEQ ID NO: 191025 - protein, 73 aa, Zea mays
  Clone ID: MRT4577_105794C.1.pep
NEARSRIIASLTRADTLKLMKTFTIYNNKLSESINRRAEGLLRDSTRCCANKILHDCWRLDTIPRVAEWSGKD

SEQ ID NO: 191026 - protein, 65 aa, Zea mays
  unsure (1)..(65): unsure at all Xaa locations
  Clone ID: MRT4577_105795C.1.pep
MCYFEFLPLFQPVSDDADPGHXGLVDLVHVKLGHEYKLVVTTYSGAERVMKMEQLLADESVTLAC

SEQ ID NO: 191027 - protein, 110 aa, Zea mays
  Clone ID: MRT4577_105796C.1.pep
SYILVNPIPKIPVGFQVLSLRGSDPAPSSIEAWNREPNRKQSKVRQDLARGKAAAARCIMRGRGCNSVSSMLSTTLCRWILSLSNFYHYLYPLDFMIMFYLRAVLIASFR

SEQ ID NO: 191028 - protein, 54 aa, Zea mays
  Clone ID: MRT4577_105797C.1.pep
LRPSWNCVVTVESIYAYPSVPFLYQFTAPGWSSPHHIVIVGILFLREFFHFFFI

SEQ ID NO: 191029 - protein, 110 aa, Zea mays
  unsure (1)..(110): unsure at all Xaa locations
  Clone ID: MRT4577_105798C.1.pep
FAFVFGTLXGGIGSLAPVDELTFWRVQSLQRKVVNALPPVCGLNPKLFRPFKSKGKAPCLGPKNIIGFGVFFPYEKMFLKKQLQIAPQIGTTPFQIFFNFRGFSLGPSFL

SEQ ID NO: 191030 - protein, 268 aa, Zea mays
  Clone ID: MRT4577_105799C.1.pep
MGDPPALKRPKLEKGDNDSTYCPRSASNGAGANVPPPRDDVEEDDISEEAVIALIAHRERDVERCKLKLLHYQSLLDAAEMKLEEAHSRLARFRDRKPPPTRSEPKLPTPPIQREPKPSPPPIRRDLKPSPQPPEKKAPSPAPQPSASPQLVIPGTNNRPAPRPQPMPGLKKAAAPSSSSSRAPLERSRKEEKPPKRKIEQKEHRNLIPSVRKSSATVLKFQGGNLVSSQHRRKLRCLELCPANDQLVVTSALDGLVTLWQVETRGYA

SEQ ID NO: 191031 - protein, 529 aa, Zea mays
  Clone ID: MRT4577_10579C.1.pep
MARRRSQKNKKTQESKEVTLEILLSDCSNYDSWSTSVINAFRAVDPQLEQILDKSIIPPNYARENASKEDLRCIRLNYLAYDILSKTLSKEDYHAFIIKYDKPICDMHDIWTRIKDKFNKSKPDSSFCASTSFGICDTNPCKEEEENERWRPNDESTSPKGLSSHFDSHICCVANENDSGSTNEDEEEERSFVQLYARLSQEDKAVMLKLLERAREQGEARQRLESILSMKMQHFDELTKEHEELKCSHVDLVQRYETISIEQDNALHCIDQLVNKNTLLKDQVEKLKIENLAFQEKYDMLLCSYENLRDDHIILNIAHEVVIENLKSQQPHSCTCIQINTILPCANACCPSTSKSSFELELAETNDDTYQELKEENERLKMSLTQLKGKCIAQPSQDNHDHMVKKLETGTTVACTTSLEENVKDLRIAKRKKQKMKFSTSSKSLNHASTKGNIQGSEEISCAKIKTYNMEESQRMPTYENLKRSKCKVKTTSLKGYSSPKRKKEIDSLSNLNWLRYAFYLILLNAFIH

SEQ ID NO: 191032 - protein, 62 aa, Zea mays
  unsure (1)..(62): unsure at all Xaa locations
  Clone ID: MRT4577_1057C.1.pep
CVENARPWAGANMTETLIGNKXYLSHRPAVNYEEGEQQCKDHDQLCMAAFASSAQHIQLACH

SEQ ID NO: 191033 - protein, 404 aa, Zea mays
  Clone ID: MRT4577_105800C.1.pep
APPPQSPGVPPRVGGGSHDNSHSPDLSVVSKLPEHPSHQEQFPSQTQEDTLQVDRTVVVTDSGQSSIFPASFNYQNAILEKAENNEVFVNPFVQPGAGCSADPEIIVKHVEFVQDTMEVDTIESCRTKLMGDNIASTSDTSTKLACSSLLHGRELSGTSLEDQGPGHSSESLANEKYDMKYHTDCTYGVNDKTLLVQEILSGADIWPEDKDSDGSAGMQVDNEASRGTSESLECPPCGVDDKAPSDLSFYSSHKLCTDVAILPKVVEGKVEQSRDENIVQTVENEAESVDTKTRTSISVEPMSHGQEISSTIHTRNTGASCESDELKEQNSKNTDASLDKSVAKMHELLKFPYPSGKVEMSTIRPEKRRHKLRLHHPAYLPFLGFLWSACFKKKICKVARKRKS

SEQ ID NO: 191034 - protein, 520 aa, Zea mays
  unsure (1)..(520): unsure at all Xaa locations
  Clone ID: MRT4577_105801C.1.pep
MASLVHPEHFQTERALGVVRRLLGWSAPAHARRIWAGTTPLGDLAAGEFVLFVSYLSCGLALPISPFFMLLLEELGLQLQHLTPHSILQAAIFAHLCEMFVGVAPCTSLFRHFLXVKSGKAKDHLGACYFQTRADSVGAYISSLSDARWENWRADWVIASTEASDHLVLPSDGPRLDKKQWRAKPPLTLEFEPVLDRIKSLATGGLTSMHMVSDFLRRRIALLQTRARLSCWFTGLNDLGRIHRGPSTDLSWEELELLVKVVTGESFVLETLIPPKGVPPLCDDQGLRAAILAWLPTLDKSGMVVRQTGGRDPHRGIQIPGVPAGGSQPTDAGLRVPPAALSPSDKGKGAASSSSAPGGSGRASSPSAPKVAPNGESGSQQQASAGSGAGDLPPPFTAEAASSGPQVPSATAEAVPSGPRFQATQAAQVAQAALGSQAVEAMKKALEDLWAEHRTEVQRIAAWADEASSALVPLGVSPIPVSKQSVSISDVLPVLDSASDAWTISLAPAWRLRVADSVGR

SEQ ID NO: 191035 - protein, 78 aa, Zea mays
  Clone ID: MRT4577_105802C.1.pep
GRPGVRTKPTSNPFLLFFNNQPIPSRGGLIKTMAGQKKQPPNPNLSTTITYTPFTISLSKLQFLPIRLTSTTTTLTPL

SEQ ID NO: 191036 - protein, 101 aa, Zea mays
  Clone ID: MRT4577_105803C.1.pep
MLPAFGNPLWVPEDVDDQQQHHAPPPTPMGLGPGQGHDEQNLLALASAAAMGAGGIFSSPAVLDDDWYFDPVAVAAGAQGQLLLAPGPAPDAGSQMFSLFN

SEQ ID NO: 191037 - protein, 125 aa, Zea mays
  Clone ID: MRT4577_105804C.1.pep
GRVGGRVGAALLVPLRVQCEEAARAAAARSCHAGTGASASAPAAAAAWKRSWTARRIATATLTFQVGFPWLGAGKRRTNRVDIAVLASLQLKKGSRRSHRLTKGSLVFRTTLRNKKRVVLFTISC

SEQ ID NO: 191038 - protein, 60 aa, Zea mays
  Clone ID: MRT4577_105805C.1.pep
CSVPVPRVLSAAARADRLLRFLLGEEARQVEAHEQRAAGEALSAGLGVGRRSGHGSEGLP

SEQ ID NO: 191039 - protein, 41 aa, Zea mays
  Clone ID: MRT4577_105806C.1.pep
LLLMLLKYVSPVRWQCIMILLLTLMQSRHQINNVVSQAYFS

SEQ ID NO: 191040 - protein, 89 aa, Zea mays
  unsure (1)..(89): unsure at all Xaa locations
  Clone ID: MRT4577_105807C.1.pep
TRRPVMFQLVPPCFGXPPIGLKAGWTGINPRNLKTCPWLLKRFIEFSKPPPPFGFNPLTNCAKGCVKPRFAPLPHLRRVVLKKSKIWAG

SEQ ID NO: 191041 - protein, 85 aa, Zea mays
  unsure (1)..(85): unsure at all Xaa locations
  Clone ID: MRT4577_105808C.1.pep
PRGNKKPGGHGGATPARXRXTEGERDQAQRRYTDLLNPSAXLILLXNVQYRGYFFIYINYVYKYINNITTPRPTGHSMDPGISLT

SEQ ID NO: 191042 - protein, 43 aa, Zea mays
  Clone ID: MRT4577_105809C.1.pep
MAHQTMNSAYPVHHRTVRWPKRQKLQRSESNGQVTWQAHRTVR

SEQ ID NO: 191043 - protein, 115 aa, Zea mays
  Clone ID: MRT4577_10580C.1.pep
PAIHPFGGNAEALLRLARANPMQPTAYSCGRPTASNLRLPGEDRKDATLQEVQDTIMAGVTECATDLDDRGGLSSVKSQRLVNVTADQKHATRADLVCLLQSIAQGLDDPVCVTV

SEQ ID NO: 191044 - protein, 44 aa, Zea mays
  unsure (1)..(44): unsure at all Xaa locations
  Clone ID: MRT4577_105810C.1.pep
MCDRCAEKWFPGHKCASPVQLHAIEEVWDLLAVXESLENALDPP

SEQ ID NO: 191045 - protein, 142 aa, Zea mays
  Clone ID: MRT4577_105811C.1.pep
GAWGRALRCCFLGGSSRPRGRASKAGPAGGCRTKCFNFTGRTRSSKWNFFGLKLNLRNRGGPRSPKTLPHWGAGPSPKKRQAATGGSFTTCPKSSGGWTRSFGLTPWVGAKWAPNRPGPRIGGPPPASDWNWVMVLAGFFLF

SEQ ID NO: 191046 - protein, 138 aa, Zea mays
  unsure (1)..(138): unsure at all Xaa locations
  Clone ID: MRT4577_105812C.1.pep
KGTPDTPPPKNRGPTQKKKKSPPXGQPGQPTQRGRGDQGPNPKRTRPNIPQAPKAAGPGKGRGPEKPGTNPGXADPXPQPQSTEEPKHPPPRNTTQNAHDQNTTANKTPPPPPNPTPPXGHTPTSTPTPTPPQNPPQH

SEQ ID NO: 191047 - protein, 136 aa, Zea mays
  unsure (1)..(136): unsure at all Xaa locations
  Clone ID: MRT4577_105813C.1.pep
LGSQDISPSSALLGLCVSAASALIXLPQCSLAPSAIIPQGLPPATXMSFEHLSVQANMQQQALGASVLLEAIVHLQQQXLLHLTIQGITRHHEQQYLPALSQLAMVNPEDYLQEQVVACNPLAVANVDRNQXQQQL

SEQ ID NO: 191048 - protein, 49 aa, Zea mays
  unsure (1)..(49): unsure at all Xaa locations
  Clone ID: MRT4577_105814C.1.pep
DRSCRAEIRNPNVKRSYSIRGVTRXALVTQRMLWALIFRSFISMGDFST

SEQ ID NO: 191049 - protein, 127 aa, Zea mays
  unsure (1)..(127): unsure at all Xaa locations
  Clone ID: MRT4577_105815C.1.pep
DGRDLVSFVLLGLQLGAPHSGPQAQATPPXXHPPPPRSXSPAPLPPARTTPPXQRPTSPSPRTRPPPPLTPPLPPRWLPPPPPHAREQAAPLRAPSSSSHQHETSGASRGGARRGACRAAASPRASH

SEQ ID NO: 191050 - protein, 37 aa, Zea mays
  Clone ID: MRT4577_105816C.1.pep
FTCKCCKSILPQGPIKWVHRTIPSRIVYLVYIRFDQL

SEQ ID NO: 191051 - protein, 195 aa, Zea mays
  unsure (1)..(195): unsure at all Xaa locations
  Clone ID: MRT4577_105817C.1.pep
TVCRTSCCLLFAAIALSEDHKPNRSDERKRIESAGGIVMWAGKVYTNHTKYTHMFPXQPNDPCHDLVFLLACCSXANELXGTWRVGGVLAMSRAFGNRLLKQFVIAXAGDPEIQEQEINDELEFLIIASDGLWDVVPNEDAVSLVKMEEDPEAAARKLTETAFSRGSGDNITCIVVKFEHDKPGGGGYSPPGDKS

SEQ ID NO: 191052 - protein, 349 aa, Zea mays
  Clone ID: MRT4577_105818C.1.pep
PAGLPGSLFTCLAWAGAPAASSDLSPHFSHAHSLLPSPITTLPLQFTPTAPPLPLKSRAIADPPPPRSGRLPSRPIGSCSVDGTLNCGYSSFRGKRASMEDFYDIKSSKIDDKQIHLFGIFDGHGGSRAAEYLKEHLFENLMKHPEFMTNTKLAINETYRKTDSEFLDAERNSHRDDGSTASTAVLVGDHLYVANVGDSRAVISKAGKAIALSEDHKPNRSDERKRIESAGGIVMWAGTWRVGGVLAMSRAFGNRLLKQFVIADPEIQEQEINDELEFLIIASDGLWDVVPNEDAVSLVKMEEDPEAAARKLTETAFSRGSGDNITCIVVKFEHDKPGGGGYSPPGDKS

SEQ ID NO: 191053 - protein, 151 aa, Zea mays
  Clone ID: MRT4577_105819C.1.pep
MARRLLVALLAASLLLPLARPDSSSSPPDTTAYDELRLRGFPRGLLPANVRAYTLDSGSGDFAVDLRSSCRIVLPAGSYLAAFSDRLTGRLDDRRISGLDGIRVRAFFRWWSITGIRADGDQLVFEVGSVSAKFPARDFNASLDCPAQAAS

SEQ ID NO: 191054 - protein, 455 aa, Zea mays
  unsure (1)..(455): unsure at all Xaa locations
  Clone ID: MRT4577_10581C.1.pep
MARRRSQKNKKTKENKEEEEENERWRPNDESTSPKGLSSHFDSHICSVANENDSGSTNEDDEDERSFMQLYAHLSLEDKAVMLKLLKRAREQSEARQMLEDVLSMKMLHFDELTKEHEELKCSHVDLVQRNALLKDQVEKVKDDNLAFQEKYDMLLYSHENLMDDHIILNIAHEVVIENLKSQQPHSCTCIQIETILPCANACCPSTSKSSFELEFAGTKDXISKAQRRXERLKISLTQLKGKCIAQPSQDNHDHMVKKLETGTTAACTKSLEENVKDLRIVKRKEQKKKINASDKSVNHASMQGNIQGNNQVTLHTKRSKKCSECFEKGHSIRSCPYIKNDLITNKDDKLCFKCSKKGHLIKSCPYLKQKGIVLEKKILTNHVASKKQEKKKSSKLEERLCYICRKKGHQCKDCPIGNYPISSLSIISHVTRQPKIATCARKVMRLPNANTKDS

SEQ ID NO: 191055 - protein, 345 aa, Zea mays
  Clone ID: MRT4577_105820C.1.pep
PAGVSSSSPASERQRLHPISFSPPHLRRTPITLFPPPAVQLTPTAPPLPLKSRDIADPPALRSARLRTRPIGSRSVDGTLNCGYSSFRGRRASMEDFYDIKASKIDDKQINLFGIFDGHGGSRAAEYLKEHLFENLMKHPEFMTNTKLALSETYRKTDSEFLDAERNTHRDDGSTASTAVMVADHLYVANVGDSRAVISKAGKAIALSEDHKPNRSDERNRIESAGGIVMWAGTWRVGGVLAMSRAFGNRLLKQFVIADPEIQEQEINEELEFLIIASDGLWDVVSNEDAVTLVKMEEEPEAAARKLTETAFSRGSGDNITCIVVKFQHDKPRSGGGDSPSSPRL

SEQ ID NO: 191056 - protein, 455 aa, Zea mays
  Clone ID: MRT4577_105821C.1.pep
HRPRGCLAAGRGGPSRRGVGLPLEGHTSLLRTSPPSTPRVQNPTIRATMPRLAAAAAAVSRRAGEALRRGAFGGLRPLSSLQPLNAASSDEVLVEGKTSARAAVLNRPGYLNALTTTMGARLNKFYQSWEDNPDIGFVMMKGSGRAFCAGGDVVRLHELITEGKLEECKDFFKTLYMFIYFLGTYLKPHVAILDGITMGGGGGVSIPGTFRVATDRTVFATPEVHIGFHPDAAASFYLSHLTGHVGEYVALTGEKLNGTDMIALGLATHYFMSGHLDLIDERLAKLVTDDPSVIDSSLAQYGDMVYPDKNSIVHRLEVIDKCFSHDTVEEIVDALESEAASSNEEWCILALKRLKEASPLALKVSLRSIREGRYQTLDECLVREYRMSMNGISKQFSHEFCEGVRARLVDKDFTPKWDPPALEYVTNDMVDAYFAPLGDSEPELKLPIESREAFV

SEQ ID NO: 191057 - protein, 112 aa, Zea mays
  Clone ID: MRT4577_105822C.1.pep
RRSTVRIYSRVDELTSRRPPFFFFFFFFFFFFFFFFFYKQKKTKNYKGVVNEQLRGGGINSPYTGPKNGETSNRRPKKRYDWQHPREDKELGGEKQVNKRWLQGHKFPEGGG

SEQ ID NO: 191058 - protein, 40 aa, Zea mays
  Clone ID: MRT4577_105823C.1.pep
STISHQAFTYLNHENALRVGVLYTCRYLCQSLAFLIFTMT

SEQ ID NO: 191059 - protein, 106 aa, Zea mays
  unsure (1)..(106): unsure at all Xaa locations
  Clone ID: MRT4577_105824C.1.pep
XRGXXPXDXXXXXXVXXPXNQFXNXXXVXSXNXXDXHAXXSGSXXVELXXARINGLVXKWRNPXCEXETKVLYNHTXLVVLIMPLVAXCNSXGXKARRPLGNCRTY

SEQ ID NO: 191060 - protein, 83 aa, Zea mays
  Clone ID: MRT4577_105825C.1.pep
CMYADIYPHSTPEISYDFPFHVSPSRSLRCRLPLHLEEGLMVNSILELFLCGHTVKILDVVRLICYVKMHCLLLRGLDGLDPG

SEQ ID NO: 191061 - protein, 89 aa, Zea mays
  Clone ID: MRT4577_105826C.1.pep
HRKRMEKDLNELQTLIEAHFENRKKEEEELISLKDRIEKRRAERAEQQRIRNEREKERQNRLAEERARREEEENRRKAEDEARKKKALS

SEQ ID NO: 191062 - protein, 121 aa, Zea mays
  Clone ID: MRT4577_105827C.1.pep
PPPGNVSQGAPHQMRPPEESIPPGERGAGWPPTQGPRIIKGARGGGTKREPPKIPNLVFTKTPFVFPPPPEGGGFRPQGYGFSPPPPKGVFFFFVGVPFLPLGPLRGKFFLGCGWPLKNFF

SEQ ID NO: 191063 - protein, 149 aa, Zea mays
  Clone ID: MRT4577_105828C.1.pep
MAAETAADDHDLRPPLADGAAAAGVGDASLAAAAGAAEALMSATSEQLTLVYQGDVYVFDPVPPQKVQAVLLVLGGYEVPPGLVNMAVSSANDEKNTTVAARRVASLMRFREKRKERCFDKRIRYSVRKEVAQKMKRRKGQFAGRSDFG

SEQ ID NO: 191064 - protein, 72 aa, Zea mays
  unsure (1)..(72): unsure at all Xaa locations
  Clone ID: MRT4577_105829C.1.pep
RAIRAPVVTACRAPPPQCXXTAHTGASAARAAGAGGGRVRQGRPWHRNATRGLXRRSPILVLLSPKHPNSEF

SEQ ID NO: 191065 - protein, 62 aa, Zea mays
  Clone ID: MRT4577_10582C.1.pep
RSLRICGDMVDHDASVAVSRLDKSDRYFTYASPMQTGKHVALQIFVVNMLLMIEMRQCLEVA

SEQ ID NO: 191066 - protein, 78 aa, Zea mays
  Clone ID: MRT4577_105830C.1.pep
ASDRTPSDSDRKSSDSCAWLADTECTVLLFILCSPEQGQCNIVLALKGPPRTLKIFRCSAGKLASSRTLVSTLNPMVG

SEQ ID NO: 191067 - protein, 226 aa, Zea mays
  Clone ID: MRT4577_105831C.1.pep
MDMSQEQEQDFGVLLKQGAEGRVFASTFVGRKCVIKERFSKKYRHPLLDSKLTLKRLNAEARCMTKARRLGVPTPVLYAVDPVLHTLTFEHVDGLSVKDILLRFGSDGVNEERLNDIATQIGNAIGKLHDGGLVHGDLTTSNMIIKNSNNQLVLIDFGLSFTSTIPEDKAVDLYVLERALISMHSSCGDVMEKILAAYRKASKQWCSTQNKLAQVRQRGRKRTMVG

SEQ ID NO: 191068 - protein, 96 aa, Zea mays
  Clone ID: MRT4577_105832C.1.pep
WICGGGGHCFAAPMVLSSVAGQQSDRRTIMDPRSAPPTWACPSVAVAAFYGTMGRRIWLGNAMLLASAAMTGVMGGGGGSSFRHRNRHAISPIIVC

SEQ ID NO: 191069 - protein, 281 aa, Zea mays
  Clone ID: MRT4577_105833C.1.pep
MPANFFCNSSILLRFIAQPCRNRNVHLPVLAARRPGTPPSSSGLPKHCFKLLLGFMDMSQEQEQDFGVLLKQGAEGRVFASTFVGRKCVIKERFSKKYRHPLLDSKLTLKRLNAEARCMTKARRLGVPTPVLYAVDPVLHTLTFEHVDGLSVKDILLRFGSDGVNEERLNDIATQIGNAIGKLHDGGLVHGDLTTSNMIIKNSNNQLVLIDFGLSFTSTIPEDKAVDLYVLERALISMHSSCGDVMEKILAAYRKASKQWCSTQNKLAQVRQRGRKRTMVG

SEQ ID NO: 191070 - protein, 32 aa, Zea mays
  Clone ID: MRT4577_105834C.1.pep
GLRTRHSAVGPVLRHILIATPDRYTVTVPPRL

SEQ ID NO: 191071 - protein, 112 aa, Zea mays
  unsure (1)..(112): unsure at all Xaa locations
  Clone ID: MRT4577_105835C.1.pep
FIELDKLFIGEISNNHLSCTLAPLSRLENLVMLNMYYNTLCGDLSHTPFFQKLTLRHIRLNHLLVVGXPAMXRPSITRTXSALRLPMTILVMVSALLLLTDTYVLARSRRRN

SEQ ID NO: 191072 - protein, 58 aa, Zea mays
  Clone ID: MRT4577_105836C.1.pep
SAPPKPPEPTKSSVNQAYYSMISQSVELIYLYLVPLTEINDGKPWNGIGSKIGSLVSY

SEQ ID NO: 191073 - protein, 61 aa, Zea mays
  Clone ID: MRT4577_105837C.1.pep
FGQSTGAEVPFFAPKVWVGKNGVEEVLGLGEPHEFEKKGVGNPKGGVKFSLGKGIKFAPGE

SEQ ID NO: 191074 - protein, 82 aa, Zea mays
  unsure (1)..(82): unsure at all Xaa locations
  Clone ID: MRT4577_105838C.1.pep
FLFKQGHEVYAXAIGTPLVACFAQAALRGAFKVVWIYKQPXITXTDYAMKVWNPCTKKCFTVDGTEGYALGGIMTGVVEQRP

SEQ ID NO: 191075 - protein, 184 aa, Zea mays
  Clone ID: MRT4577_105839C.1.pep
NTYLTLLTPRSDAFFDLKDSRARIQDVLLKSNVLLEVQRSLHENVLRVEDVPIDPTSQSTSAPAQSSQGLNSQPLSSDEAIGGPAGLWHFIYKSVYLDQYVSSEFALPIRNPKQQKRLYKAYQKVYASMHDKATGPHKTQFRRTEDYGELHRRSTTYFLVFRILIGLFLLVDSPSYTSCYIMCW

SEQ ID NO: 191076 - protein, 501 aa, Zea mays
  unsure (1)..(501): unsure at all Xaa locations
  Clone ID: MRT4577_10583C.1.pep
MARRKSQKNKKTTPKENKEVTLEILLSNCSIYDSWSTRVINAFRTVDPQLEQILDKSIIPFSYDRKNASEEDQRCIRLNYLVYDILSNSLSNEDYRAFIMNYNESIHDAHDIWTRIKNKFDESKHDGSFCASTSFGPCETNPFKEEEESDRWRPNDESTSPKVNRNALLKDQVEKLKDENLAFQEKYDMLLCSHENLMDDHIMLNIAHEVVIENLKSQQPHSCTCIQIKTILPCANACCPSTSKSSFELEFPGTRDDKCQELKEQNERLKMSLTQLKGKCTAQPSQDNRVHMVKKLGTGTTVACTKSLEENVKDLRIAKRKEQKKKINTSAKSLNRASMQGNIQGNPTLQLVLERGLRAAVVTEHAGRHHCLSGGASQMGHRSCSLRPESVWGRVMMAPPVDVASLCPRLGDVEAPPKPRSSLSSEAESEPLGRAERSSSSSGAEPESEPXGRAEQSSSSSGAEPEFEPWVGRSGVRRLPGLSPSPSPGSGGAEFAVFRGL

SEQ ID NO: 191077 - protein, 76 aa, Zea mays
  unsure (1)..(76): unsure at all Xaa locations
  Clone ID: MRT4577_105840C.1.pep
TPTNQSQQRRQTSNDTNEEHHDNDAYNTLTNRTPYQASXTHDHLTGSYAYDHFDKNTNSLLDPTDPEGRVQTLLGI

SEQ ID NO: 191078 - protein, 94 aa, Zea mays
  unsure (1)..(94): unsure at all Xaa locations
  Clone ID: MRT4577_105841C.1.pep
MATKILALLALLALLVSATNAFIIPQCSLAPSAIISQILPPVTXMGFEHSAVQAYMLQLALADSVLQQPIAQLQQQXLXHINLQTIATQQQQQF

SEQ ID NO: 191079 - protein, 128 aa, Zea mays
  Clone ID: MRT4577_105842C.1.pep
RPGTLTQEYESCPKPHPSFSSPSRCWWPASSSRIALLIRYAMHLTRRWRQPAPRLDLLSHPVARTRARSTTHAEPDQVPRSCDNLVSCYNMTERTSVAKRTMHARNALCRTSSTGPSPSDIICRGCTD

SEQ ID NO: 191080 - protein, 84 aa, Zea mays
  unsure (1)..(84): unsure at all Xaa locations
  Clone ID: MRT4577_105843C.1.pep
GPRRAPQGPNHQRRRQEQRARGQKEAQRPVKARGDIIKRDLGFGGGXXSTTPPPPKXQPLSPKRNQGFPGVPLIRPKNPTRLGP

SEQ ID NO: 191081 - protein, 253 aa, Zea mays
  unsure (1)..(253): unsure at all Xaa locations
  Clone ID: MRT4577_105844C.1.pep
MEANRGMVAGSRGGVVTIRHDGDGAAAKQLKNVNEQICQICGDTLGLSATGDIFVACNECAFPVCRPCYEYERKEGNQCCPQCKTRYKRHKGSPRVRGDEEEDGVDDLDNEFNYTQGNVQGPQWQLQGQGEDVDISSSSRHEPHHRIPRLTTGQQMSGDIPDASPDRNSIRSPTPSYVDPSIPXAIVLCIFVLVISSLADSLECNHLFHDXVPVRIVDPSKDLNSYGVGSVDWKERVESWKVRQDKNMIQVRR

SEQ ID NO: 191082 - protein, 87 aa, Zea mays
  Clone ID: MRT4577_105845C.1.pep
GIARFLPHSCDLLHYLALTTAYKFGCCGHYSLYKWFLFYQIKSICSMSFHVEESARKKITVVYEDNILPLAVSCLYYQRTVIGTMLA

SEQ ID NO: 191083 - protein, 63 aa, Zea mays
  unsure (1)..(63): unsure at all Xaa locations
  Clone ID: MRT4577_105846C.1.pep
VILFAAKNATQVALQAIQCFGENGSLNKSPTGILLKNAKLFXIGAGTSQVRRIIIVRKLFKKD

SEQ ID NO: 191084 - protein, 108 aa, Zea mays
  Clone ID: MRT4577_105847C.1.pep
RLDYCVTFLSLLFLPPTVEHARGLSAGARALGLACRARRSSLPRPRAPRSLERAPPTPAAEAMVALVATAARCAGRTTAARGAPAGCEGQPPHPLRRRARAQGGHRQV

SEQ ID NO: 191085 - protein, 65 aa, Zea mays
  Clone ID: MRT4577_105848C.1.pep
IPFFKTLIPILLKCFTFFETGCWYYFIKNKIFLNIIPIFSFFLGKAFKKPIFSKKYFFSLCVPEK

SEQ ID NO: 191086 - protein, 96 aa, Zea mays
  Clone ID: MRT4577_105849C.1.pep
SPRRCRRMAGPVVQPRARTWLDRFGEAQRLIQVVDEKEGSPCIIGLPRGSQIFTEECGSTCSPGMLHASQPQSWGDTVTSRGRCGEHCVFTRFQAC

SEQ ID NO: 191087 - protein, 115 aa, Zea mays
  unsure (1)..(115): unsure at all Xaa locations
  Clone ID: MRT4577_10584C.1.pep
IAGGIGAAVXGEVADVDIVRMQADGRLPLTQRRNYKSVVEXITRMANXEGVTSLWRGSSLTVXRAMLVTASQLASYDKFKATILETGMMRGGLGTHVTASFAGGFVAAVASNPVD

SEQ ID NO: 191088 - protein, 707 aa, Zea mays
  Clone ID: MRT4577_105850C.1.pep
MPVAAFGRSLVQPNMLVIDLEKFASESTDNWFSVDEKPPIAYARVEILEGADMKPSDPNGLADPYVKGQLGPYRFRTKIHKKTLDPKWFEEFKIPLVWFTSHFIIFLDQLLSDAETVRWLNYAVEKIWPVCMERVASQQFLLPIFPWFLEKFKPWTARKAVIQSLYLGRNPPMFTDIRVVNQSTDDDHLVLEIGMNFLSADDMDARMAVQLRKRLGFGITTNMHITGMHVEGKVLVGVRFLRQWPFIGRVRVCFVEPPYFQMTVKPLFGHGLDVTELPGISGWLDRMLDVAFGQTLVEPNMLVIDLEKFASESTDNWFSVDEKPPIAYARVEILEGADMKPSDPNGLADPYVKGQLGPYRFRTKIHKKTLDPKWLEEFKIPITSWEALNLLHLQVRDKDPIFDDALGDCSISINKLRGGIRHDIWIALKNIKTGRIHVAVTVLEEENEKVSNDEEEQCGIHKVDKASTPRSSFSSRTNHESECSDEFRKMSDEFEPVDIEGSEKPDVWVHRPGSYVTSTWEPRKGRARCQDSRIHRENDSCSDSPRSSVSGSHRSDSSTEEPTSSKSHRHLQKVKKGLGKLAGAVLHRSPKENDDEASPCVTPHQNIRPVGESRVSVTYVVDQDPAGVDGSGSRRDDHQQSPEREELDSPSKRHLRKKAVHMVKHAGKTAHNLKSMFSKKGLDKSKEEHRSDEECDEEGDVVAARRV

SEQ ID NO: 191089 - protein, 64 aa, Zea mays
  unsure (1)..(64): unsure at all Xaa locations
  Clone ID: MRT4577_105851C.1.pep
RRGLILGRGKHPWTTETHTDQTERMSSAGHLRVWSRGLSSAFILFLTQAFALKKQGCPXLALYL

SEQ ID NO: 191090 - protein, 509 aa, Zea mays
  Clone ID: MRT4577_105852C.1.pep
MRSVVRSLRQLRRFIQHYAEGNSQATRLFGLQNALIMCGSTPRSLSMLRRNGEISRFASPGMELMRSMFSNVAAGSIKDIGRGGPMVEYERRIASGDLVDGDSFQVDTIQQLQGLYEELIENGEDCQLDRYKSSEKSGRSRWLWSRLITQPSSFAPVKGLYLYGGVGTGKTMLMDLFYEQLPSNWRKKRIHFHDFMLNVHSRLQMHKGVSDPLDVVAAEISDEAIILCLDEFMVTDVADAMILNRLFRQLFSKGIILVSTSNRAPDKLYEGGLQRDLFLPFIDTLKERCIVHPIGSAVDYRQLGSAEQGFYFVGKHYSTLLKQKLQSLIGDEEPSPQTVEVIMGRKLQVPLGANGCAYFPFEDLCDKPLGAADYFGLFKKFHTLALDGVPKFGSSNRTAAYRFVTLIDVMYENKARLLCTAEAGPVELFENIMTLAEAQKVSPRSSRSQKSDDPDLCVDNELGFAKDRTISRLTEINSREYLEDFEMRLGQQQLLPLQALDNGGDVVLA

SEQ ID NO: 191091 - protein, 115 aa, Zea mays
  Clone ID: MRT4577_105853C.1.pep
PRPAGPPPTPRRRRSPPPSPSRPRPTTTTPAPPPTTRRLPPRRHAPAGRPPRSPCSAPLFSSAASSDGKRIGSEEDRMNAPSFRPRSHGVCAFGHRLYSFFSLLLGDFLSLSLSR

SEQ ID NO: 191092 - protein, 69 aa, Zea mays
  Clone ID: MRT4577_105854C.1.pep
LLLCPFRFSCRWIDRGYGLSSYSYKESDGVFVRRYRIKPLPICSWVMRKKPCLCPLSSVRIVPVLSKAF

SEQ ID NO: 191093 - protein, 101 aa, Zea mays
  Clone ID: MRT4577_105855C.1.pep
IEHNILVVSKYYSRVTIKRLADLLCLSLQEAEKHLSDMVNSKSLTAKIDRPMGVVSFRVVQDCNGTLNSWATNLEQLLDLVEKSCHQIHKETMIHKAVLKA

SEQ ID NO: 191094 - protein, 443 aa, Zea mays
  Clone ID: MRT4577_105856C.1.pep
MEGDSTNLDAAIESLLNVEKQMRLAGDVAGTRKAVIDIVELCYKAGAWKTLNDQIVLLSKRRGQLKQAITAMVQKAMDYIDLTPDIDTRVELIKTLSSVSAGKIYVEIERARLIKRLANIKEEQGKIDEAADLMQEVAVETFGSMAKTEKIAFILEQVRLCLDRQDYVRAQILSRKISTRVFDADPSKEKKKPKEGDNIVQDAPADIPSLLELKRIYYELMIRYYLHNNDYLEICRCYKSIYDIPAIKEDPTKWIPILRKICWYLVLAPHDPMQSSLLNATLEDKNLSEIPNFRLLLKQLVTMEVIQWTALWEFSKHEFENEKNLLGGALGAKAAEDLKLRIIEHNILVVSKYYSRVTIKRLADLLCLSLQEAEKHLSDMVNSKSLTAKIDRPMGVVSFRVVQDCNGTLNSWATNLEQLLDLVEKSCHQIHKETMIHKAVLKA

SEQ ID NO: 191095 - protein, 83 aa, Zea mays
  Clone ID: MRT4577_105857C.1.pep
FLGYQDCFCNLLRYSVHSVVYVPHPFTRNVVSRKRTYGQEGLTRLEVRERKPVVVLKHPERHARAPALQTCHKIEDTLPAGIG

SEQ ID NO: 191096 - protein, 280 aa, Zea mays
  Clone ID: MRT4577_105858C.1.pep
MDSSSFVPAAGAENGSAAGGANNGRVAQQQAPAIREQDRLMPIANVIRIMRRVLPAHAKISDDAKETIQECVSEYISFITGEANERCQREQRKTITAEDVLWAMSRLGFDDYVEPLGAYLHRYREFEGDARGVGLVPGAAPSRGGDHHPHPHSMSPAAMLKSRGPVSGAAMLPHHHQHHHDMQMHGAMYGGTAVPPPAGPPHHGGFLMPHPQGSSHYLPYAYEPTYGGEHAMAAYYGGAAYAPGNGGSGDGSGSGGGGGSASHTPQGSGGLEHPHPFAYK

SEQ ID NO: 191097 - protein, 58 aa, Zea mays
  Clone ID: MRT4577_105859C.1.pep
MGGSGQGGDYLHHFQGLLLPSGEESAALSIKPIEKGYPTHTRVCHPDKSPDDPNTTAD

SEQ ID NO: 191098 - protein, 550 aa, Zea mays
  Clone ID: MRT4577_10585C.1.pep
MARRRSQKNKKTQENPTRKEVTLEILFDDCSNYDSWSSSVINAFRTIDPRLEQIIDKSIFPSNFNGKINSEEDQRCYRLNYLAFDILTNSLSKEDYHAFISNYDESVHDAHDIWTRIRSKFDESKHDSSFCVSTSFGICDTNPCKEEEENERWRPNDESTSPKGLSSHFDSHMCCVANENDSGSTNEDEEEERSFVHLYARLSQEDKAVMLKLLERAREQSEARQRLEDILSIKMQHFDELTKEHEELKCSHDDLVQRYETISIEQDNASHCIAQLVNRNTLLKDQVEKLKVENLAFQDKYDMLLCSHENLMDNHIILNIAHEVVIENLKSQQPHSCTCIQINTILPCANACCLSTSKSSFELEFAGTNDDSYQKLKEENERLKKSLTQLKGKCIAQPSQDNRDHMVKKLETGTTVACTTSLEENVKDLRIAMRRKQKMKFNTSSKSLNHASTKGNIQEGKVHKPHGLIFTQKKKGKRRIHDSFMQLVIHLIYANNNLKKITSCRTLSCAKYFHILSLSIGLKQLSLWTKHNEESVSMRRYKRVKSLPFI

SEQ ID NO: 191099 - protein, 169 aa, Zea mays
  unsure (1)..(169): unsure at all Xaa locations
  Clone ID: MRT4577_105860C.1.pep
MDSSFLPAGADNGSAGGANNGGAAAXQAPPIREQDRLMPIANVIRIMRRVLPAHAKISDDAKETIQECVSEYISFITGEANERCQREQRKTITAEDVLWPMSRLGFDDYVEPLSVYLHRYREFQGEARGVRLAPAPPCSDHQHHHSAAPPKLNKTREPASGAAMLPHPH

SEQ ID NO: 191100 - protein, 146 aa, Zea mays
  Clone ID: MRT4577_105861C.1.pep
MASRAGGDGKEAINEQVIANTYANMRTEMNQLYTKITELEMEVSEHSLVMGAIEPLDPSRRCYRMIGGVLVERTIREVMPAVKRNKEGLEEVIARMHEALERKKKEITEFELKYKIRIRKADSDAEDEGGKKEGTAQGVLVGPAGQ

SEQ ID NO: 191101 - protein, 75 aa, Zea mays
  Clone ID: MRT4577_105862C.1.pep
IRLEPIQKFLLYYIRSVQLDFSRADRDRYEKVPVHTKPATAYITAGSGVSYLRGADPTIATENLTRLLTVNFEDN

SEQ ID NO: 191102 - protein, 57 aa, Zea mays
  unsure (1)..(57): unsure at all Xaa locations
  Clone ID: MRT4577_105863C.1.pep
PGASKSSYLLSSNLETGVGAIRMKRRRRALACSXXSPXXVSYPPIVPPASQPPHRSG

SEQ ID NO: 191103 - protein, 92 aa, Zea mays
  unsure (1)..(92): unsure at all Xaa locations
  Clone ID: MRT4577_105864C.1.pep
ANSQDSAQSVTVKAKEPSWSMGSSLTLNGSTRSRPNIRIDDDSDLIDEDRLLTEDDLMIRQLPDXGTSEVGGSKIACKHCTYGSCRLMRAFR

SEQ ID NO: 191104 - protein, 113 aa, Zea mays
  unsure (1)..(113): unsure at all Xaa locations
  Clone ID: MRT4577_105865C.1.pep
VMFTNIPETSGIISQLLEHITXILNLTFNLHIHPYHDHETHSYLHALLSSLLQVIIHKLSISYSKIILSYTTYQLTILYLLVSAWHTFTRHEXTILPIRALPYATNTDFVNYI

SEQ ID NO: 191105 - protein, 58 aa, Zea mays
  Clone ID: MRT4577_105866C.1.pep
MATETDTFSFQAEINQLLSLIINTFYSNKEIFLPEHISNSSDALDKTRFQSLTDKSKL

SEQ ID NO: 191106 - protein, 96 aa, Zea mays
  unsure (1)..(96): unsure at all Xaa locations
  Clone ID: MRT4577_105867C.1.pep
MLVHLRTGQITLNNVLNMMLINLYMDHSNALIRDLNRDYKLHXRIDTHSDCDLASILACINHWIIHMCMYSLIDGLIDSTNITTSNTEFNSHYNDD

SEQ ID NO: 191107 - protein, 91 aa, Zea mays
  Clone ID: MRT4577_105868C.1.pep
LFLPYPNMVAFHLPFIDLPPRGHGTRHFVTFIALFCCFALNQMYADLVFLVSDINLSFVLVFELVPCGGHLLFHPIKSSIVLFCPLQIKTV

SEQ ID NO: 191108 - protein, 108 aa, Zea mays
  Clone ID: MRT4577_105869C.1.pep
RKSPGGNRLTGQPGIKPIRGPRKPGGNKLGTKTNFSQHRAGPGGKTRSLHLFHPEKRRGKEGTRATAHNTGTYMHTQALMERGAGGKSKRRRVGIHSSRGETRGGQIN

SEQ ID NO: 191109 - protein, 89 aa, Zea mays
  Clone ID: MRT4577_10586C.1.pep
FSPLFVIPWRTSAGVMKPLWSLSSSRKSSLNNLHDRVFFINVNIQVERTSGNIRKWDHHNCCVLRILCITQYIQSCAHDRNRAVIHPMK

SEQ ID NO: 191110 - protein, 46 aa, Zea mays
  Clone ID: MRT4577_105870C.1.pep
HPHPCPSPRPATRPEAPVASGDRSEADAYGQVSDGAGDAECRPDGP

SEQ ID NO: 191111 - protein, 53 aa, Zea mays
  unsure (1)..(53): unsure at all Xaa locations
  Clone ID: MRT4577_105871C.1.pep
DPLLLMRXRMHCSICAAEARRTTKMAEGXSVASEYLGRRVEIDWSGRGAGGPG

SEQ ID NO: 191112 - protein, 169 aa, Zea mays
  Clone ID: MRT4577_105872C.1.pep
MASLRASLLLVAVLCALAASSASAARDLRLRPTQFVVRGRVWCDTCRAGFETPASTFIAGAKVRVECKSRSTGAQTCSFEGHTDHTGTYNIPVADEHEHELCESVLISSPDTACAKTVAGRERAPVFLNNNNGVASNVRLANALGFEKDTPLAACTQILKMYEEVDDRV

SEQ ID NO: 191113 - protein, 101 aa, Zea mays
  Clone ID: MRT4577_105873C.1.pep
SFVLRQASGRLLSAATLLSEAVRRAAVSYDHRYLLSYLRTAVGSPTMRLTEQPRRMCGSAGTRSGPGWLIAYRNTLLGAASWAVVQSRANMLGSAHPEPWP

SEQ ID NO: 191114 - protein, 55 aa, Zea mays
  unsure (1)..(55): unsure at all Xaa locations
  Clone ID: MRT4577_105874C.1.pep
CKVNPDDSPKVGFTXGIRSIPPVFFLKGGEKKERVFGPVPKSTLPPLIDKYIGGL

SEQ ID NO: 191115 - protein, 187 aa, Zea mays
  unsure (1)..(187): unsure at all Xaa locations
  Clone ID: MRT4577_105875C.1.pep
SAKYGKPRPLQYVVNAAFLASVFSDYLEAADTPGWYCGPHFYSVEVLRSFARSQIDYILXKNPLKMSYVVGFGKRYPRHVHHRGASIPKNGVHYGCKGGWKWRDAKKPNPNTIAGAMVAGPDRHDGFKDARRNYNYTEATLAGNAGLVAALVALSGDGHGGVDKNTMFSAVPPMFPSPPPPPAPWKP

SEQ ID NO: 191116 - protein, 78 aa, Zea mays
  unsure (1)..(78): unsure at all Xaa locations
  Clone ID: MRT4577_105876C.1.pep
VDPASAAAWAQYTHSXFWFLATGLYLLARFEGLADRKVYSVNRYFISGHSLEHLCFALVTVMLTVMLTFRNIKIARDS

SEQ ID NO: 191117 - protein, 91 aa, Zea mays
  Clone ID: MRT4577_105877C.1.pep
GFWAKNPYYWNFPPTNLMPHGSRVIKGYLWVFWDLQTPNLIFLGPPINKKWIVVPLNSSPRGFFFFFSKILKRFFLTNPSQIIFSKKFFFF

SEQ ID NO: 191118 - protein, 89 aa, Zea mays
  Clone ID: MRT4577_105878C.1.pep
DSPKRGSNYYFFQNCSSDVPWCPRPYYYFLQNIYPDLPILWLLIHKLKIIVRTLRNSFTRIIFFYQQDPYIIGQSLILINRILFLISLV

SEQ ID NO: 191119 - protein, 172 aa, Zea mays
  Clone ID: MRT4577_105879C.1.pep
KRIRYGGKCHWCKCTLTAVSTSGTGHLLRHQRDCKVKLSKQGKQSVLKFNPDGSVRNWDYCPDRARTQMCRLIARLDLPLNFAESPAFEEYIRLSHNPVFKKVSHQTTARDFVKFFNDRRKIVVECLQSVSSIAITSDIWSGNAKEDYLSVVAHYVSKDWALEKRRQQRNSS

SEQ ID NO: 191120 - protein, 263 aa, Zea mays
  unsure (1)..(263): unsure at all Xaa locations
  Clone ID: MRT4577_10587C.1.pep
MGNIISQLLRRSTRDGVSEAHTKRLDGSREVVDLTAEPELENIDAVGRMFGDWSVPALGSSKSPEKKATFYEEPHGRRLQESGFKKLKLAELPDPLDNTSKEDLSELFTPLSDKDEREVNALLCSSDDSDKIVVIHTPSNIEITKEKLQCLRPRGWLNDEVINLYIELLKEREKREPNRFLKCHFFNTFFYKRLTCGIAGYDYQSVRRWTTFKRLGYGLVECEKXMTQIFVPVHRNAHWCLALINMKDKTLQYLESLVGWGRD

SEQ ID NO: 191121 - protein, 75 aa, Zea mays
  Clone ID: MRT4577_105880C.1.pep
KGAPLFFISGLKWNGAKKPPFILVATVAIFRLCHMGLLSKVPQVVCFAFHDSKLLMETCPGAQNLWKIVTLFYLG

SEQ ID NO: 191122 - protein, 119 aa, Zea mays
  Clone ID: MRT4577_105881C.1.pep
TPTTLLWPSPGREGGAAHRRDGYASDTLGTATADDAKEKGVAVEEEGPRVPTQWVAFSAEASPLDRVSAWVNSLGNCSFHAVDEDGGATGHGGDGASRPRRSEIVELPTSAAGGRRHPQ

SEQ ID NO: 191123 - protein, 48 aa, Zea mays
  Clone ID: MRT4577_105882C.1.pep
RWQCFSLLWAIYFICVQSVHQVSFITRVVVWSHDPPIDSERDYDPVDC

SEQ ID NO: 191124 - protein, 68 aa, Zea mays
  Clone ID: MRT4577_105883C.1.pep
MDSSKAPVKLVKVTRVLGRTGSRGGVTQVRVEFMDDTTRSIIRNVKGPVREEDILVLLESEREARRLR

SEQ ID NO: 191125 - protein, 136 aa, Zea mays
  Clone ID: MRT4577_105884C.1.pep
MATPAQQQGDQHQPRLQKVMVAVDESECSRHALEWALRNLAPTLAPPLLVLTVQPHFPLGYVSAASFGAPLGTVPPVAPELIRSMQEQQRELTQELLDKARAICAEHGVCADPVPFFLPSASVYLFYRSSKYFLFG

SEQ ID NO: 191126 - protein, 54 aa, Zea mays
  Clone ID: MRT4577_105885C.1.pep
NIIIHYVLLFGVMLISAITYLFVLLRVDEQAIEDLGVRQVETAEQELVEGKLCP

SEQ ID NO: 191127 - protein, 173 aa, Zea mays
  Clone ID: MRT4577_105886C.1.pep
MATPAQQQGDQHQPRLQKVMVAVDESECSRHALEWALRNLAPTLAPPLLVLTVQPHFPLGYVSAASFGAPLGTVPPVAPELIRSMQEQQRELTQELLDKARAICAEHGVAVEAIVEVGDAKEVICEVAEKKNVDLLVLGSHSRGPIQRLFLGSVSNYCVHHSKCPVLVVKNQG

SEQ ID NO: 191128 - protein, 397 aa, Zea mays
  unsure (1)..(397): unsure at all Xaa locations
  Clone ID: MRT4577_105887C.1.pep
MAEAAGGGPLLPEELIIWEILTRLPAKPLLRCRAVCLSWCRRLTSDAKFLLAHHRRQPSLPLLTEGDRSTEERRIDALDYRTGERRPIARTTGXPPPTGTTXVLASCEGLLILLANGGLQICNPATRQRAPLTLLHGAYCISALYPHIPSRSYRVLCCFERAEDGHAVYHVHTVGSRELRCVGEPPAPWASGDMVMAMPMMVYLHPHVVADXDLLAAGKAARRQRQGQXNMLVFDTMTESFQQLLSPVEGPFLELFQMNSGALGLYHCRSGKVDLWVLQDHGSWSWSMNHRIKLDVMFFSLLPVLDPEGDVLVLSKRGETGIXCGNICIXHSGVNGSLLALYQWSAYLKLSRHRLKESLVHHDFFSMEGNEGGVDEKPLFDGLSTVALLRDDNSEPH

SEQ ID NO: 191129 - protein, 143 aa, Zea mays
  Clone ID: MRT4577_105888C.1.pep
VFRELFEREGYQFDYVYDWTLLKCKQSQKAKVQQGCSHDAGVSRGPVATNVDKHQVGVARPINASGLLEAEQRPAIRMQLNSRSNNLHPERLGVSASHNNVLLQSTSLDHADAPMDHATHSKAQGSIDPHTRGSYSPGPSNRT

SEQ ID NO: 191130 - protein, 212 aa, Zea mays
  Clone ID: MRT4577_105889C.1.pep
MDRIVGSKYKLGRKIGSGSFGEIYLATHVDTYEIVAVKIESSKTNHPQLLYEAKLYNALQGGTGIANIKWCGIDGDENILVIDLLGPSLEDLFVYCGRRFSLKTVLMLADQMITRIEFMHSKGYLHRDIKPDNFLMGLGRKANQVYVIDFGLAKRYRDSATNRHIPYRENKNLTGTARYASRNTHLGIEQSRRDDLESIGYVLLYFLRGSLP

SEQ ID NO: 191131 - protein, 139 aa, Zea mays
  Clone ID: MRT4577_10588C.1.pep
YLSLVSSHRQLHLREYAAATSSITFNFRPCCAHMMTRRLPSELPRRGRSAIHRYRRPDIQALSPHEHGRARPALAGARDDNAYHGYEDQCQGPHQQDVQDQQRCIADVEIAHQTRDLTVACSYPPCIIGSALAVYNLNT

SEQ ID NO: 191132 - protein, 415 aa, Zea mays
  unsure (1)..(415): unsure at all Xaa locations
  Clone ID: MRT4577_105890C.1.pep
MDRIVGSKYKLGRKIGSGSFGEIYLATHVDTYEIVAVKIENSKTNHPQLLYEAKLYNAIQGGTGIANIKWCGIDGEENVLVIDLLGPSLEDLFVYCGRRFSLKTVLMLADQMITRIEFLHSKGYLHRDIKPDNFLMGLGRKANQVYIIDFGLAKRYRDSATNRHIPYRENKNLTGTARYASRNTHLGIEQSRRDDLESIGYVLLYFLRGSLPWQGLKAATKKQKYDKIRRVLXLSTPIEALCKSHPVEFASYFHYCHSLTFDQRPDYSFLRHVFRELFEREGYQFDYVYDWTLLKCKQSQKAKVQQGCSHDAGVSSRPVATNVDKHQVGVARPINASGLLEAEQRPAIRMQLNSRSNNLHPERLGVSASHNNVLLQSTSLDNADAPMDHATHSKAQGSIDPHTRGSYSPGPSNRT

SEQ ID NO: 191133 - protein, 69 aa, Zea mays
  Clone ID: MRT4577_105891C.1.pep
LTLRAAVFDISCMYGSTVSYGCSFRCSARTVAADVGVAAGACVATAPSLAWDSIRPVRDEQSQHSRTLS

SEQ ID NO: 191134 - protein, 57 aa, Zea mays
  Clone ID: MRT4577_105892C.1.pep
MNWRSEHIWIELLKGSRKRDNFFWACILFLGSLGFLAVGASSYLGKNMISVPRPRPR

SEQ ID NO: 191135 - protein, 50 aa, Zea mays
  unsure (1)..(50): unsure at all Xaa locations
  Clone ID: MRT4577_105893C.1.pep
DTYRSWSAPPSLAVNERCLSRAKGLLFYGLGLWSVRFSNGPXAGSFVLVL

SEQ ID NO: 191136 - protein, 150 aa, Zea mays
  Clone ID: MRT4577_105894C.1.pep
MATPARIELDKLSVEQLKGLKEQTDLEVNLLQDSLTKIRTAATRLENASAALQDLSLRPQGKKMLVPLTASLYVPGSLDDAEKVLVDVGTGYFIEKTMAQGKEYCERKINLLKSNFDELVEVATKKKAIADDMGLLLQAKLRQASPGPSS

SEQ ID NO: 191137 - protein, 117 aa, Zea mays
  Clone ID: MRT4577_105895C.1.pep
LYFFWVLWVNQRAIGLSYFCINPTVREGIVSNPHKLHAQLPTKRSTQLCAQSPPMYASPILAMNSQNTIPTPIYSLCIHAKTEPYILALLYCLRHPSLSYTNPYCNPAPCLFHVCSP

SEQ ID NO: 191138 - protein, 96 aa, Zea mays
  Clone ID: MRT4577_105896C.1.pep
IQKTLKPSALENPTHKSTYSAAFSTMKHGTIETKDNTAHATTETVKATWPISPIPWLVTKARKLGSDTDDAHNLQLLHAVSGNRTTPLAQVWRAVA

SEQ ID NO: 191139 - protein, 60 aa, Zea mays
  Clone ID: MRT4577_105897C.1.pep
LECFTIPMELSKPQPVVFVGPSALVWSHPTEERAVLYKEALSVERWTKLIYVPKFLNCKV

SEQ ID NO: 191140 - protein, 46 aa, Zea mays
  unsure (1)..(46): unsure at all Xaa locations
  Clone ID: MRT4577_105898C.1.pep
AVRGSSRRACLPIPIPIYYIYXSPRTASVSCGAELYLSEPIECVST

SEQ ID NO: 191141 - protein, 65 aa, Zea mays
  Clone ID: MRT4577_105899C.1.pep
FMGIYMKKGHGLLHYITIAPTRDKGKRFLATSEVHNSEGDGITHNTTSRVAKRRHTTEFICIYGL

SEQ ID NO: 191142 - protein, 52 aa, Zea mays
  unsure (1)..(52): unsure at all Xaa locations
  Clone ID: MRT4577_10589C.1.pep
VLCTXITAGHRDCTENSKAWRMILGDHRARSHATRDPSSCRVDLAAPGEGPV

SEQ ID NO: 191143 - protein, 411 aa, Zea mays
  Clone ID: MRT4577_1058C.1.pep
MSKRKKKTPPPVRHFVAFSSSRDCRLRPREFSIRSPSGLVRVRTRDWVGRLVLPCRKIPFVRCRQLAILGRSWSGPVLMEERYEALKELGAGNFGVARLVRDKRTKELVAVKYIERGKKIDENVQREIINHQSLRHPNIVRFKEVCLTPTHLAIVMEYAAGGELFEKICSAGRFSEDESRYFFQQLISGVSYCHSMEICHRDLKLENTLLDGSPTPRVKICDFGYSKSALLHSKPKSTVGTPAYIAPEVLSRKEYDGKVADVWSCGVTLYVMLVGSYPFEDPEDPRNFRKTISRILGVQYSIPDYVRVSSDCRRLLSQIFVADPSKRITIPEIKHHPWFLKNLPREISEREKANYKDADAAEPAQAVDEIMRIVEEAKTPGDMSKVVDPALLAEMAELESDEEEADADDTY

SEQ ID NO: 191144 - protein, 112 aa, Zea mays
  Clone ID: MRT4577_105900C.1.pep
GQKKYLFKSQKQNDPWGFLTPPQRGVPRKKNPGPSKKKFWGGKRKPGILKKNRKGNFQQSCSAPCLIIKGKFVPRPGGPFYQRILSFFPLFFNFPGGKGGFFKAGLFPPPKP

SEQ ID NO: 191145 - protein, 186 aa, Zea mays
  unsure (1)..(186): unsure at all Xaa locations
  Clone ID: MRT4577_105901C.1.pep
HARNATPATTTKPRHGARRARNGETPPPRRRKKSPTAAQSHTHNRAQSPPRKXQRRGGRRRRTAAPXESRAERRGSGDKRGHRHKRRQEPRRGXRDQRKRGRRHEAAARAAKEPRRGARRNRSTTATRXRRTARTRRRXRERTQTQRGANPEAQHKKRPRRETHTATKKGKRHPRPTPPRKRPKAD

SEQ ID NO: 191146 - protein, 66 aa, Zea mays
  Clone ID: MRT4577_105902C.1.pep
SFLAKQRDIKLSTNYKMSTAPTHHMFMNHTNHDCASQTAVWTSTHFRGVTHFLCVLKKADLFSHFT

SEQ ID NO: 191147 - protein, 113 aa, Zea mays
  unsure (1)..(113): unsure at all Xaa locations
  Clone ID: MRT4577_105903C.1.pep
GKGRGRGKAXXGGGXVDIRRFAGGERGKEESRGQPQQRRKQNRSSERQKRRGPPARHTTGSHRRXRGAQKDAQKRKEQAAKPERRRRRDPAGRRRQXARRTGQKRGPDESGKT

SEQ ID NO: 191148 - protein, 65 aa, Zea mays
  Clone ID: MRT4577_105904C.1.pep
RHLASTGKDVPAVRTLRTWQPADALPGPVSEAPDQPVDAAVEITAVPHATSAVTAALPPHEASGA

SEQ ID NO: 191149 - protein, 136 aa, Zea mays
  Clone ID: MRT4577_105905C.1.pep
MKLRVGSMQARGGSGGVETQRVDLAATGTLADVKTLLASKLSGGQPVPAESGRLFLNRNEELVSPDPAGTLPSLGLAFGDLGFFNLSPLTGLAPAAQALARNPNPSSGAAASFAEAGDRGRGRNNLVLEISLSRHW

SEQ ID NO: 191150 - protein, 56 aa, Zea mays
  Clone ID: MRT4577_105906C.1.pep
MKTFDPWPVFFRREWRRNWPFLTGFAITGFLITKMTANFTEEDLKNSKFVQEHKRH

SEQ ID NO: 191151 - protein, 87 aa, Zea mays
  Clone ID: MRT4577_105907C.1.pep
GPPGFIFYFPGGNFFGNFGGNPFFPGEIFFHFYRQFFITSILGKLVCFQGTGGNFRGDLRCCKKKKNIKKNKNKWKKTIKKKNPNIK

SEQ ID NO: 191152 - protein, 47 aa, Zea mays
  Clone ID: MRT4577_105908C.1.pep
LIIPYIFSPFSFFFFLNFFTLTARMFYKRMHSTSLQNYNNTVPYIKH

SEQ ID NO: 191153 - protein, 52 aa, Zea mays
  Clone ID: MRT4577_105909C.1.pep
GKGGFFLPKKWEIGGPTVFHFLKAMADPPLAQKKGFFFFFLQKHFRGSKEKS

SEQ ID NO: 191154 - protein, 51 aa, Zea mays
  Clone ID: MRT4577_10590C.1.pep
IAFARLKREYIHPCNQSTECKIFFSVLEIQSFTQVSSCNCYMINRRQFLEL

SEQ ID NO: 191155 - protein, 102 aa, Zea mays
  Clone ID: MRT4577_105910C.1.pep
LCVCFLDSSLYVLYICVMSCLINIYAVICQKKKKKKIISFPPRPLRKAKKAPHPTALTIRIQALLPPPRARVKRGSSLLKGDTFTKPHITPTLGAKCINCGA

SEQ ID NO: 191156 - protein, 33 aa, Zea mays
  Clone ID: MRT4577_105911C.1.pep
CPAEFPYAKQINDAGLWLSNYLFILYGPEDGLL

SEQ ID NO: 191157 - protein, 60 aa, Zea mays
  unsure (1)..(60): unsure at all Xaa locations
  Clone ID: MRT4577_105912C.1.pep
GLRLRSGCRALLLSCSALLLVWGWCARARVFGCPGSFLSSWCALRPPPLPRFPXRWVXPG

SEQ ID NO: 191158 - protein, 255 aa, Zea mays
  Clone ID: MRT4577_105913C.1.pep
PKERRVGSWILGPVLLACFLRSKIQEMILRRRSRSMNSSAGAQRSHVPDQSARSSTSPCDGDSGGAGAAGSKIATARALFASPRLLHSSSLPAGTVVFAKSPAPDAEPQTAFSMSPTSVLDAAAAFVPGTDGAGKRRPPWRARDNNGLADALDCSDHHHQQQQQERIVLAATPSSCSLARSCSLDRRVEFGVKNRSSWLPLRGCEATAPAPADPWEIEPSSEDYTCVTRDGDGDRGELATADQSADANGSPSTHA

SEQ ID NO: 191159 - protein, 43 aa, Zea mays
  Clone ID: MRT4577_105914C.1.pep
PTRSGAQDAPCGPDGVKGAPGHFTRARRRVPHHRRDHRDGEHV

SEQ ID NO: 191160 - protein, 182 aa, Zea mays
  unsure (1)..(182): unsure at all Xaa locations
  Clone ID: MRT4577_105915C.1.pep
PDHFKRTSRVDASFVLPSVRAERRVGSWILGPVLLACFLRSKIQEMILRRRSRSMNSSAGAQRSHVPDQSARSSTSPCDGDSGGAGAAGSKNATARALFASPRLLHSSSLPAGTVAFAESPAPDAEPQTGFSMSPTSVLDAAAAFAPGTDGAGKRRPXWRARDNNGLADALDCSDHHHHQQQ

SEQ ID NO: 191161 - protein, 96 aa, Zea mays
  Clone ID: MRT4577_105916C.1.pep
NLGLVDNHSRPWFHNVSAMEWLSFRLNMLSNFVFAFSLTLLVSLPEGFINPSIAGLAVTYALNLNSQLASIIWNICNTENKMISVERIMQYSRIPS

SEQ ID NO: 191162 - protein, 66 aa, Zea mays
  unsure (1)..(66): unsure at all Xaa locations
  Clone ID: MRT4577_105917C.1.pep
TEHKFVLNDRNKPIIFSMAGGERGKNLTGLVERAGRXNKGGKEGGNPGGGRSDHGNPAKDREEQAE

SEQ ID NO: 191163 - protein, 87 aa, Zea mays
  Clone ID: MRT4577_105918C.1.pep
MLVDMCHRVPLAAAALVAVAALALALAPGAAVKWQRTRNGTEVRYDRRSLMFDGHRENLLIRDQSLPVEPVRHEARAQGQGQGGRAN

SEQ ID NO: 191164 - protein, 80 aa, Zea mays
  Clone ID: MRT4577_105919C.1.pep
GSQASSMVQTVTTDRGAVGRGAAHDCRLGRDYFVTNVLGSMLNIVTRSHIWVEDKDLSRVDGEVFQMDGQNGFRMPQFTS

SEQ ID NO: 191165 - protein, 176 aa, Zea mays
  unsure (1)..(176): unsure at all Xaa locations
  Clone ID: MRT4577_10591C.1.pep
AALEAAGSQKCRNNSRSAELRYLDHHGGVAXGVAYDDNPAPKLCRGFGTTTVAAGADAACDTSSANLSKYNGGLSYSSSDFIAAPTLEQXGHKIPASYYHSVSPTXARGRNLSHSFSTNWKTITFGTKHALHRLTTAKARCTNCPMARSLIQHSWTASSLPTISMKAYTKAIENSS

SEQ ID NO: 191166 - protein, 141 aa, Zea mays
  Clone ID: MRT4577_105920C.1.pep
MGQMISGDKSDEQTARDDGIIKNGREILFQCSYAAKFVKEYIEESKPLFAVGEYWDSCEYSPPDYRLNYNQDIHRQRIINWIDNTGGLCAAFDFTTKGILQEAVKGELWRLRDSEGKPPGVMGWWPSRSVTFIENHDTGST

SEQ ID NO: 191167 - protein, 109 aa, Zea mays
  unsure (1)..(109): unsure at all Xaa locations
  Clone ID: MRT4577_105921C.1.pep
GGSDPGYLRTFLNLDGMLRGIDQVRMLHQRVPDDGLWIDMNEDSNFXLGKCTTLNTHKLGIPDGKTACLXMLAXKNLXNTKCDEPXYKNNIGAQXTAPLGLNIITTSAT

SEQ ID NO: 191168 - protein, 36 aa, Zea mays
  unsure (1)..(36): unsure at all Xaa locations
  Clone ID: MRT4577_105923C.1.pep
ISIXIPFFSILCRSILTIYMFLGLSLTSARHTPCSL

SEQ ID NO: 191169 - protein, 85 aa, Zea mays
  Clone ID: MRT4577_105924C.1.pep
APSCPIIADLVTVRNLFDALTSSSGGRLHFLVYDKYLKSLDRELRSVKGIMQLFIASSFHLDAGECILAIDGDKPIQPVLQHIGY

SEQ ID NO: 191170 - protein, 50 aa, Zea mays
  Clone ID: MRT4577_105925C.1.pep
AQKPPPPPPTPCSPQKKKKKKKKKKKKKKKKKEKKKKKKKKKKYSALLPL

SEQ ID NO: 191171 - protein, 127 aa, Zea mays
  unsure (1)..(127): unsure at all Xaa locations
  Clone ID: MRT4577_105926C.1.pep
RFIQKEPVQVALASQSFVQIGFLMALRIMMKSGLEREFRSALRDFVLMQLQLGCVFFTFSIGTKTLXYGSNWIHGGTIYRATGSGFVVFHAKFDENYRLYWNSHFVKXPHPIILVIVYEKLKQSKKE

SEQ ID NO: 191172 - protein, 55 aa, Zea mays
  Clone ID: MRT4577_105927C.1.pep
YILEVKETGLQMFLGDLVVRFRSGIAQIVRCFSAVGWFKIKPSKEEVACSYCETS

SEQ ID NO: 191173 - protein, 504 aa, Zea mays
  Clone ID: MRT4577_105928C.1.pep
MALKFLNKKGWHTGSLRNIERVWKAEQAEEAERRKTEELKKQVAAEREKAEFRAMQERAGLRPAQERLDFLYESGLAVGKSSEGFQALQQSAPGAAAASTSAQASAADSSKAATPGALFEDKPQSANDTWRKLHSDPLLLIRQREQDAISRIKNNPIKMAEIKKSVEAEKKQKEEKKAKKKHKKHHHHKSKSKRHHSDENSDSDEISDGKDERRKRSHSSLHKKEENMSRHKKQHREDSSDSDDEPQRRKQDVSENDEPRRRLHDDNEPRRRWQDDVEPRRRLHDDDEPRRWQDDVEPRRRRQDDGESRRRWQDDDELRGRRQVDEKPRERSYVNRPRYDRSDADDRRRHHSPRDTKPKRVDDGHKTGNSTSEHHSRSEQGSGEQTRQESEHDRNSGPSLNRRRGGVHHMSEEERLARLHQMQADAEVHEEQRWKRLKKAADDDAKEATTVNANQFKGKNFLEDEKKSIFGTDKGGSATIEESIRRRAFYSQGGRDAEGNAFRR

SEQ ID NO: 191174 - protein, 99 aa, Zea mays
  Clone ID: MRT4577_105929C.1.pep
IRLEAGRQHCFYRAVCVLGGSVSVQNGGPVPNAPRQCDHDPGCTEPCSSTAGWTTTCPGMVEKPGQGHRLYIQGFEESVIAPALKPDMKWHRDISSLMI

SEQ ID NO: 191175 - protein, 164 aa, Zea mays
  Clone ID: MRT4577_10592C.1.pep
PTCVGAGAPALVAGASAPARLRRRPGCARGSSMDTQYNHADATYYSCFLALLDRSRWLDAACRRCSRWPIAVPGPGYWFPGLHAPPQIKGRRPHIVVPSRSGLAAPSISLDLMRPLFFVSVLILLLLLLDPKTIQRSKIVSHVCSSLDRGAKTGSSSVPQWPRL

SEQ ID NO: 191176 - protein, 107 aa, Zea mays
  Clone ID: MRT4577_105930C.1.pep
NLGRGANFFCPILLGNLRSPNGNGGYQIPPGFLFNIVTWANYPPEIYQWVGFNIAPQTVAGYVFLVVGGGIMTKWGLGKHNRFKKLFFGKNGRPKYPPRGVIFPPFL

SEQ ID NO: 191177 - protein, 86 aa, Zea mays
  Clone ID: MRT4577_105931C.1.pep
HEPRHGGYAQGPTCHVRQQLICSLTLQLHTCRAECDSTPNTCAERRHVATAIYVQLLCLIRRHAHRDTCLMHAQQHTDELYVLTGA

SEQ ID NO: 191178 - protein, 85 aa, Zea mays
  Clone ID: MRT4577_105932C.1.pep
RANKGADKTNRQLPHCFQPPRTFYSKGIPIYPLSGEKRPPNQNETILGGKTTKNVFDWGTKLTQTPAKGAPNHKAKSFRFCYHPG

SEQ ID NO: 191179 - protein, 72 aa, Zea mays
  Clone ID: MRT4577_105933C.1.pep
HLSVACASRGGSFLTPHTMHLILIAPTSAHRFSWQLRLASGFNKATQCTGTNQKQRHRRPVPTFPESDGDGA

SEQ ID NO: 191180 - protein, 139 aa, Zea mays
  unsure (1)..(139): unsure at all Xaa locations
  Clone ID: MRT4577_105934C.1.pep
LDRTFGCGFHSRHQYLFGKMDMQMGLVRRNFAGNVTGYYLCLQGGAHDEIHFEVLGNVFGKPYTLDNNLVTQGXGHRRSKFSFWFNPTXDLHNYFIIXEPQHVIFIVDDMLIRYFRNLYSKVVTFPKSQPMRLYSSLWN

SEQ ID NO: 191181 - protein, 114 aa, Zea mays
  Clone ID: MRT4577_105935C.1.pep
AGVTTQSTFFFFFFFFFFIFFFFFFFFFFFFFFFFKKVIQSKIYKNQNASPPERERRGGALTLDNTPAQGGSPSYLQRTLYRDLAGLPYGKNPGKQQTTPLWWHRDHREQQKKH

SEQ ID NO: 191182 - protein, 42 aa, Zea mays
  unsure (1)..(42): unsure at all Xaa locations
  Clone ID: MRT4577_105936C.1.pep
VIFSXFEKKKKFPSLIKLDQIVVTLRSSXLPSVPCLPPQWIF

SEQ ID NO: 191183 - protein, 64 aa, Zea mays
  Clone ID: MRT4577_105937C.1.pep
HHTASTQIQTYNLFSLTSSAPRISLNNSASCQLIWYQTLDQLLIMFKAFLIHYFLNLKNNHHYP

SEQ ID NO: 191184 - protein, 115 aa, Zea mays
  unsure (1)..(115): unsure at all Xaa locations
  Clone ID: MRT4577_105938C.1.pep
AIDVPSEFDGXCYQILFLVTPCGNVTCYYRRRTADYIFYLMKMMLETVCXPHHHHHAGATAIQEGSRPQPPHGRAVIIQGEDGCGCVSMGRKPVTNVPPTPSFCGTRRKEREGLS

SEQ ID NO: 191185 - protein, 43 aa, Zea mays
  Clone ID: MRT4577_105939C.1.pep
AAPPFYAGRPSPRRDLLWRRAPHQALSSYEHGASMQANKPDSN

SEQ ID NO: 191186 - protein, 72 aa, Zea mays
  unsure (1)..(72): unsure at all Xaa locations
  Clone ID: MRT4577_10593C.1.pep
XSLQMIHIHTNTYMHTFXHTFXVNLTTKYFDTTQKISQLGKPPNITHHSIAPIVLFSNPQRISRLDYACNGK

SEQ ID NO: 191187 - protein, 128 aa, Zea mays
  Clone ID: MRT4577_105940C.1.pep
PERKRFNGFGSSLRHLKPFCLQSCTEKYRGIAPNKPLISKDHERAYYDSTDWVDLSMINKHNKKTICTNRFIMLVYTNRFYNVAARKNSRLKERTQQFLPLQQLHSMFSNKDTTPRRTMLVCYDRPPL

SEQ ID NO: 191188 - protein, 141 aa, Zea mays
  Clone ID: MRT4577_105941C.1.pep
GAGGFFFFFFFFFFFFFFFFFFLSPKGWPFCFSCSCPIISCHNSQQNTVATRAGGAPFPCPQPGGEKSYQRFFLSFFFSTFGGGGAVRSIAKRPLDGACFYGNAIGRLPPLGGAALHGWAPNPPAGRVHHPAHHVRPPGLF

SEQ ID NO: 191189 - protein, 107 aa, Zea mays
  Clone ID: MRT4577_105942C.1.pep
MGVVRRLLLRYQWRLTAMEDLSIEAKEVSGTHTPSSARRLPPSTHPPRPLSSPSIASSSYYRKYKEDMSMVSMMEGPRRTEKPTGVIFRKVRSVVHVRSSSSWAVGA

SEQ ID NO: 191190 - protein, 74 aa, Zea mays
  Clone ID: MRT4577_105943C.1.pep
PYSSTLMIYTNIESMRSRPERKRSTLTRKDVTVKANLEMNQDLDFSDEVFPIFRVGTFGLRKFLKTGFNSISGV

SEQ ID NO: 191191 - protein, 94 aa, Zea mays
  unsure (1)..(94): unsure at all Xaa locations
  Clone ID: MRT4577_105944C.1.pep
RGLGRGAXLPXCXIEKKNRQPVAPGHLESTAILAWLGQGADHWRRAWQGRKGGAQTTDVVGAGGGGDAGAAAGGPGEICEGEEGEAEGGAXSEA

SEQ ID NO: 191192 - protein, 149 aa, Zea mays
  unsure (1)..(149): unsure at all Xaa locations
  Clone ID: MRT4577_105945C.1.pep
DRFHAVPLDLLKFIDRKVGESVEEIDRRVPPVVKEAPTLARSAAKEVREAGLVGTATGLAKSAIARAEPKARELYTRYEPVAERRAAEAWVALNRLXARYNSAVRDGAKRGNTVATYLPLVPTERLARVFPYPMADVAPAPEMQPIPSQ

SEQ ID NO: 191193 - protein, 401 aa, Zea mays
  Clone ID: MRT4577_105946C.1.pep
MDRRQELCRNFQRGSCKYGSHCRFVHASSQQQQQAKPNPFGFGLGSRQQQQQQSSFRAQFQQQQQQKPNPFGFGVQGSAAAQSRNAPGQAKPFQNKWVRDPSAPTKQQEAAQPPAAAHTSCTDPESCRQQIAEDFKNETPLWKLTCYAHLRSGPCDITGDISFEELRANAYEQGRQGHPLQSIVEGEKKLKNAKLTDFNNFLNMPRLSVSQTPSFPTVASFPEVKNNSAFGVSQNNGPPVFSSFSQIGVTTNMGPGSRTTPGVPTNTLFGQSTQPSHPTFPAPTFGRSDMKFGVSGPFGSQISQQSSGSFQGSNMSSFGNFSKPHASYQQSPSSSSHHRDIDRQSQDLLSGIVVPTSATNEAPVEDNKNENQDDSIWLKEKWSIGEIPLGEPPQRHVSHVF

SEQ ID NO: 191194 - protein, 128 aa, Zea mays
  unsure (1)..(128): unsure at all Xaa locations
  Clone ID: MRT4577_105947C.1.pep
YRSECRGGRTRALTPLLPAPAAPTFTAFVGSGATVGGARXXGXXLKVKTHRRDQRGAGKGYKKRHLGNGGEKPFGGSSHAKGIVLEKIGIGGNQPNSGIRKGGLVQLVKNGKESGGFGPNGGWLNYIE

SEQ ID NO: 191195 - protein, 77 aa, Zea mays
  unsure (1)..(77): unsure at all Xaa locations
  Clone ID: MRT4577_105948C.1.pep
TSGQKRGEXESHGRPGAPSHHLGPYPKNCPESGSGRQAKAGVQQKCLLASKARWSKNQWSNGVASLKKEASLKPSVN

SEQ ID NO: 191196 - protein, 198 aa, Zea mays
  Clone ID: MRT4577_105949C.1.pep
MAMTVIRLAAIRPPSASSSAASPSLWPPARMRLRVRCRAGGDGGKKKEEGEAEAPESLFARELRRRGMAPGAAAPTGASKEAEEGAPEAGAKRGVAATEFERGAAADGQRERSMALNSEGLEGLVPRAKLLLSLGSTFFLAFGPLILVTVSLFAVLYVYFGPSFVHDASKTPVSPPPYIDPYELLEDERLSRPSPDVF

SEQ ID NO: 191197 - protein, 71 aa, Zea mays
  Clone ID: MRT4577_10594C.1.pep
SPTSLPSKLYLSDNHLLMEQNTFHIYLHRLTVNINFTVHKILPRCPFGFYCINHPSPLCQHLLLEPVPFLC

SEQ ID NO: 191198 - protein, 57 aa, Zea mays
  Clone ID: MRT4577_105950C.1.pep
DAWEKRWYIAKGRGGCYMIACLLNHEKRAWTRILDRRCWTKTTWIVRILAQGGENAA

SEQ ID NO: 191199 - protein, 45 aa, Zea mays
  unsure (1)..(45): unsure at all Xaa locations
  Clone ID: MRT4577_105951C.1.pep
GVSSGLIVTTSXWSRSAGASDLLCPESPRKAFGFLPPPAQIRARR

SEQ ID NO: 191200 - protein, 99 aa, Zea mays
  Clone ID: MRT4577_105952C.1.pep
MISRRAAATAALRASVRRACSSSSRAADPDDQLLGLLEAPEPQREPRLSAKDFAFLQVPTPVLRAAALPPPEAVLISKAIRAYASDFDGKAERFLRRHR

SEQ ID NO: 191201 - protein, 86 aa, Zea mays
  Clone ID: MRT4577_105953C.1.pep
SRQSPEKVYTSASASAHRADIDNSCARARTSDSPQAYTENAEACHCSARPVGRHVFCSHATGLKRLVSGEGIQHPLCMTDGSDAWA

SEQ ID NO: 191202 - protein, 68 aa, Zea mays
  unsure (1)..(68): unsure at all Xaa locations
  Clone ID: MRT4577_105954C.1.pep
MEPSQDHTGECARVIDDSSTXNLHARISDAGQTQEHALLAVTLGETHMICCCSKMDETTLKYSKVQYD

SEQ ID NO: 191203 - protein, 92 aa, Zea mays
  Clone ID: MRT4577_105955C.1.pep
MSSSAAKKGVSMVVATSMAAVEALKDQAGLCRWDYALRSLYHRAVVTGRRAVPASLSSSSSSQAAVGRAARPRRSEEEKLHKAYHIVCWGPN

SEQ ID NO: 191204 - protein, 148 aa, Zea mays
  unsure (1)..(148): unsure at all Xaa locations
  Clone ID: MRT4577_105956C.1.pep
LFDIIQEAAGAGSKTTSGGSHEQIKNLLSEGCIAPFTHLLALPDPRIGTVSLQGPNNVRGGGEHDKTIRAPGHINVXAHMIDHTXGLKKIXNLQIHDNNEIHKKAVILLKTYXMEDEDDAMATAYEAATTVFNFNQCGNPSGGSSNLN

SEQ ID NO: 191205 - protein, 260 aa, Zea mays
  unsure (1)..(260): unsure at all Xaa locations
  Clone ID: MRT4577_105957C.1.pep
MEVETVMPPPAAGLDRVDSAAREPTHTESSLPSPAAGGGANGAATKVQKVYRSYRTRHKLADSAVVVEELWWEALDFARLNHSTVSFYDDPEPETAASRWNRVSLNASKVGQGLSKDAKALKLAFQHWIEAIDPRHRYGHNLHFYYDAWCQTQAGQPFFYWLDIGEGKDIELPECSRALLKKQCIRYLGPQEREYYEYIIKEGKSVHKISGEPLDTSQGXSKGTNGIFVMSTAKKLYAGQKERGVFPHSSFXAGGATITA

SEQ ID NO: 191206 - protein, 254 aa, Zea mays
  Clone ID: MRT4577_105958C.1.pep
FGTRETFAQFGVVFLLFALGLEFSLTKLKVVGPVAVLGGLLQIVLFMFLCGLTAALCGAKSSEGVFVGAFLSMSSTAVVSNFLVEKGSTNTLHGQVTIGTLILQDCAVGLLFALLPVLGGASGIFGGVMSMAKLLLVLSIFVAVTYMMTWSIVPRFLKLMIQLSSQTNELYQLASVAYCLLLAWCSEYLGLSLELGSFLAGVMISTTDFAHHTMEQVEAIRNLFAALFLASIGMLIHVKSWWNHVDILLAAVIL

SEQ ID NO: 191207 - protein, 73 aa, Zea mays
  unsure (1)..(73): unsure at all Xaa locations
  Clone ID: MRT4577_105959C.1.pep
MAAKIFCLLMLLGLSASAATATIFPQCSQAPIASLLPXVLITVSSVCMSPFFYPTRXIRQSIAAFILSSPFCP

SEQ ID NO: 191208 - protein, 122 aa, Zea mays
  Clone ID: MRT4577_10595C.1.pep
MPPPHPTDAEAGPEQVAPTEAVPLAAAAPAPVKKKRNLPGTPDPDAEVIALSPGTLLATNRFVCEVCGKGFQRDQNLQLHRRGHNLPWRLRQRGPGAAPPRRRVYVCPEPGCVHHSPTRALG

SEQ ID NO: 191209 - protein, 165 aa, Zea mays
  Clone ID: MRT4577_105960C.1.pep
TPHIARRSPQCRTDDGFTHTPCWRIPPLACLPARQELHSPPPTLPGASPGPRVPDGHQVHPCLLPADSPLPRWLGAPSVLSSCSAGRLPQWRYSMGIRELYDGWGATLARVVHPGGTYSDAYGRLPSCSSRKGRCRSGGASLLHLRPRAIGQFHLRINLLPTPNT

SEQ ID NO: 191210 - protein, 367 aa, Zea mays
  Clone ID: MRT4577_105961C.1.pep
MSQDKKAVAETKLSEKEKTAGFIESIAKTNTEKITKEILECLSEDTDDSDSYDAESGGEGSEDRPWRPSHTVFEKSTIKQSHLDNMRGRYFRDMSILRADNGDRIVPVPEENEVIIYRSFFKAGLRFPLSRFVVEVLKIYEIFLHQITPEAIIRMGIFVWAVRSQGLEPSAKCCSMHELSYDTKPWGKEQYHNNFGCYSFVARSSSSCLVPTFRKRWPGDWMKEWFYVKNDLKAREDITEIIMRPIWSHFDLRKPKVEIDEAAEGCQRAFGTVCSFNGTRDLVQEHVAYRIWPLIDSWEMLEETITNPSEGGLIRLKYTFRFRDQFVEPDDDWLKCVENTSDELLGAYSKSEDNALFAAFGSRKRKD

SEQ ID NO: 191211 - protein, 73 aa, Zea mays
  Clone ID: MRT4577_105962C.1.pep
CIEEQSFEPWSSLEELAAHGKKCKLERFEVPAAVKLCREVWSPDMGLVTAAFKLRRKDIQNRYQHEINRMCAS

SEQ ID NO: 191212 - protein, 128 aa, Zea mays
  unsure (1)..(128): unsure at all Xaa locations
  Clone ID: MRT4577_105963C.1.pep
IVNHYEMRGNILSYNLGGMGCSAGVIAVDLPRDMLQASGAGLAVVVSTEAVSFTWYPGRRRSMLILNAFFRAGCDCAAVLLSNSRRDFHRAKYQLEHVVRXHKAXDDRAFRSVYQEEDEQRIKGLSIS

SEQ ID NO: 191213 - protein, 81 aa, Zea mays
  unsure (1)..(81): unsure at all Xaa locations
  Clone ID: MRT4577_105964C.1.pep
GTASEQDRDPQRVVSTLNVLVTPXELLETGVECTASNDLGKNTSILFLELVNLTSLTPDSNTVPSLXTSTASPHTIANSTS

SEQ ID NO: 191214 - protein, 543 aa, Zea mays
  unsure (1)..(543): unsure at all Xaa locations
  Clone ID: MRT4577_105965C.1.pep
MAREEQALLSTEIVNRGVEPSGPDAGSPAFSVRVRRRLPDFLQSVNLKYVRLGYHYLISHGVYLATIPVIVLVCGAELGSLSRDELWRKVWGEATYDLATVLAFLAVLAFTISVYIMSRPRPVYLIDFACYKPADELKVSKAEFIDLARKSGKFDEDSLXFQSRLLAKSGIGDESYMPRCVFEPNASCATMKEGRAEASTAMFAALDELFDKCRVRPKDVGVLVVNCSLFNPTPSLSAMIVNHYKMRGNILSYNLGGMGCSAGVIAIDLARDMLQASGAGLAVVVSTEAVSFTWYPGKRRSMLIPNAFFRAGCAAVLLSNRRRDFHRAKYQLEHVVRTHKGADDRAFRSVYQEEDEQRIKGLSISRDLLEVGGHALKTNITTLGPLVLPFSEQLLFFAGVLFRHLFPSKASTPAPPTTPGDASAAAPYIPDFKRAFEHFCMHAASRDVLEHLQSNLGLRDADLEASRAALHRFGNTSSSSIWYELAYLEAKGRVRRGDRVWQLAFGSGFKCNSAVWRAVRRVRRPARSPWLDCVDQYPARMDA

SEQ ID NO: 191215 - protein, 188 aa, Zea mays
  unsure (1)..(188): unsure at all Xaa locations
  Clone ID: MRT4577_105966C.1.pep
MAREEQALLSTEIVNRGVEPSGPDAGSPAFSVRVRRRLPDFLQSVNLKYVRLGYHYLISHGVYLATIPVIVLVCGAELGSLSRDELWRKVWGEATYDLATVLAFLAVLAFTISVYIMSRPRPVYLIDFACYKPADELKVSKAEFIDLARKSGKFDEDSLAFQSRLLAKSRIXTNSYMPRCVFEPTPAA

SEQ ID NO: 191216 - protein, 257 aa, Zea mays
  unsure (1)..(257): unsure at all Xaa locations
  Clone ID: MRT4577_105967C.1.pep
MAREEQALLSTEIVNRGVEPSGPDAGSPAFSVRVRRRLPDFLQSVNLKYVRLGYHYLISHGVYLATIPVIVLVCGAELGSLSRDELWRKVWGEATYDLATVLAFLAVLAFTISVYIMSRPRPVYLIDFACYKPADELKVSKAEFIDLARKSGKFDEDSLAFQSRLLAKSGIGDESYMPAAACSXNASCATMKEGRAEASTAMFAALDELFDKCRVRPKDVGVLVVXCSLFXPTPSLSAMIVNHYKMRGNILSYNLGG

SEQ ID NO: 191217 - protein, 35 aa, Zea mays
  Clone ID: MRT4577_105968C.1.pep
INSRSAKTFSLFVYAHLKNRPNSLNKTTLSLTIHE

SEQ ID NO: 191218 - protein, 543 aa, Zea mays
  unsure (1)..(543): unsure at all Xaa locations
  Clone ID: MRT4577_105969C.1.pep
MAREEQALLSTEIVNRGVEPSGPDAGSPAFSVRVRRRLPDFLQSVNLKYVRLGYHYLISHGVYLATIPVIVLVCGAELGSLSRDELWRKVWGEATYDLATVLAFLAVLAFTISVYIMSRPRPVYLIDFACYKPADELKVSKAEFIDLARKSGKFDEDSLAFQSRLLAKSGIGDESYMPRCVFEPNASCATMKEGRAEASTAMFAALDELFDKCRVRPKDVGVLVVNCSLFNPTPSLSAMIVNHYKMRGNILSYNLGGMGCSAGVIAIDLARDMLQASGAXWAVVVSTEAVSFTWYPGKRRSMLIPNAFFRAGCAAVLLSNRRRDFHRAKYQLEHVVRTHKGADDRAFRSVYQEEDEQRIKGLSISRDLLEVGGHALKTNITTLGPLVLPFSEQLLFFAGVLFRHLFPSKASTPAPPTTPGDASAAAPYIPDFKRAFEHFCMHAASRDVLEHLQSNLGLRDADLEASRAALHRFGNTSSSSIWYELAYLEAKGRVRRGDRVWQLAFGSGFKCNSAVWRAVRRVRRPARSPWLDCIDQYPARMDA

SEQ ID NO: 191219 - protein, 103 aa, Zea mays
  Clone ID: MRT4577_10596C.1.pep
FGFFGYFRPVMVPSLWAGLVSAGSGSSFVAWRAVGFWLPVGAPLVFCRGFVSWWCLLVAPCFVFVVVVVRLSLVFVPLVLCCIVGFFLTFLWRLTSPCQKTQT

SEQ ID NO: 191220 - protein, 47 aa, Zea mays
  Clone ID: MRT4577_105970C.1.pep
SRPFFHELLAVQVDDWSNTDLCVYCTTQDVILPYTLIDLTPPLIQNC

SEQ ID NO: 191221 - protein, 78 aa, Zea mays
  unsure (1)..(78): unsure at all Xaa locations
  Clone ID: MRT4577_105971C.1.pep
RRAALVLLAGVADVGGKASPFGVPYREAAXNKFGKTKKNTDYIYYISDQFKLLIHIKWNPSKEREIPGQVPRXYEDNL

SEQ ID NO: 191222 - protein, 61 aa, Zea mays
  unsure (1)..(61): unsure at all Xaa locations
  Clone ID: MRT4577_105972C.1.pep
QNRGRAPAPVVPAFTSHLQGPEAITMTLFGAVPPVPSXILAKAFRISRGEVGPIKANFGPK

SEQ ID NO: 191223 - protein, 202 aa, Zea mays
  Clone ID: MRT4577_105973C.1.pep
SIFTIIWFVYRWMNGEHLRSLPSDLLIKDFEDRWRSTGILLESESDFAKEAAELLKEGIDLITDADAALSKLLSYPLHDTLSSDEAKSVVEDKLSEVASGLISAYDSGELGQALAEGHDGWKKWVKSFGKTHKRKGKSLFMPLRVLLTGKLHGPAMDSTVILVHKAGTSGAVAPQSGFVSLDEGFKILKEVDWESLQKQQES

SEQ ID NO: 191224 - protein, 112 aa, Zea mays
  Clone ID: MRT4577_105974C.1.pep
MSTEEYIVILQDVDAANKWIAGDRTIPLVDIVDSFDVFTTGQGAQGILERPSKQTLDTVFSTTNINDIVEICLEKGRILSGTTPHRFGSKNDQRSGNYQVSGGSGASGHGGR

SEQ ID NO: 191225 - protein, 164 aa, Zea mays
  unsure (1)..(164): unsure at all Xaa locations
  Clone ID: MRT4577_105975C.1.pep
LGTSRPAGKKIKKGYRGILFTESYRRNYNCLPPPXYLXCLTILGFXNECMTLLRNPLYLXAIFVIYLVGKALWVQSEIGREFQHGFLPAILSLSTKFVPTVMNILKRLADAGQEPAAAPERQREMELQPKSTRNGSLYSNVTSAGSSSVTTSEIGPEYSSPVVQ

SEQ ID NO: 191226 - protein, 687 aa, Zea mays
  Clone ID: MRT4577_105976C.1.pep
MDAADPLCAITSPARLLPRTLGPTPSKVRGALLEAIALARSRKGSEELVKQAAMVLKEHGDIQTLYHDDAMKAMPPTNVSKGQQGRRAALDRKRARFTMKDTGSKAVPVVDRSKLLNISDPVAFFMALDRLEEAEDEIKRLNGEAEKRILIFDPLDEPIRQPGLRGRKSFRSFKVTEDATTQDPIEVLASQTATMTGSQFSQDVMHAVADKNEQSVPSRSGEAISDVSGKEDSLAEKDGRDDLAYLLTSIQDLDESEEEAFIRKTLGLKEIRKGRVSLCNSIPGVRSLRSDTEQKGSMKVRPPESHLPQTRQDRISELEKHLFPGGAANAKCTDDESEGSPDIVMGEPSLVHDSSEVLMTNENSTGSEIDRRTPNLCARAADHALDPEPNLPDHAYERQTRGSSLGLCKNTEVANEHEEDDVHIEYPTTGGSTYQTEVSSHDLEGSLTEELVSEPGRHAAPDDIYRTSHAAEDSIQHLEVVKQGGVLQDKSSQSLEMPLEDIDPLYRPQMHGGSTKKSTPVLCNALSPIEQKQQAAQEGKRKQQAKRVKKVSDESSHALEISQANFEPENEPHNVDVNMEQPTVMSSAKGQKGAQRRNKTKKLNQRKILGDVDLARQSGVRRSSRIRSRPLEYWLGERLLYGPIQDTLPAVIGIKAYSPGQDGKKTLKVKSFVSEQYSDLVAQFAKY

SEQ ID NO: 191227 - protein, 106 aa, Zea mays
  unsure (1)..(106): unsure at all Xaa locations
  Clone ID: MRT4577_105977C.1.pep
CPGPYGGLSFAAPALASPLAAVDPDRRLLDLGGSFTSLIAPGADVGVHFSAEFLVGGLAPAALPRAPASVPALARPPPQQHQQPTTXSQALPEGLFWSMGWPDLSI

SEQ ID NO: 191228 - protein, 205 aa, Zea mays
  Clone ID: MRT4577_105978C.1.pep
HIFFSTDKSSQSLEMPLEDIDPLYRPQMHGGSTKKSTPVLCNALSPIEQKQQAAQEGKGKQQAKGVKKVSDESSHALEISQANFEPENEPHNVDVNMEQPTVMSSAKGQKGAQRRNKTKKLNQRKILGDADPACQSGVRKSSRTRSRPLEYWLGERLLYGPIHDNLHGAIGIKAYSPGQDGKRSLKVKSFVPEQYSDLVAKSARY

SEQ ID NO: 191229 - protein, 56 aa, Zea mays
  Clone ID: MRT4577_105979C.1.pep
EYWLGERLLYGPIQDTLPAVIGIKAYSPGQDGKKTLKVKSFVSEQYSDLVAQFAKY

SEQ ID NO: 191230 - protein, 82 aa, Zea mays
  Clone ID: MRT4577_10597C.1.pep
SKAVVHGILMGVPVPFPIPDPDGCKSVINCPIQKDKTYSYLNKLPVQSEYPSIKLVVELQLQDDKNQSLFCWEIPVQIVSHL

SEQ ID NO: 191231 - protein, 245 aa, Zea mays
  unsure (1)..(245): unsure at all Xaa locations
  Clone ID: MRT4577_105980C.1.pep
MSQRRKRSGPRWTRSTVAQARAHHVDGHVAATVDRRQRRPQAGGSRLADRPAGKRRRAARWSPAASTGTAAXERAAGKGRGSXHTAEGGGRRRDGNGRRRRXLGADEDDDAPVTGGAREEADEQQLHPRMGGEVLGRTGRXWPAGAERKGGRXTGTRENGRPVSFRRWEEVAEVLLVLVEQREVTAWVGMDRSGVATRLEVAMATERGGARGGGVPEVEWENGVGVRVEIDTAMPMVVSTRLGGG

SEQ ID NO: 191232 - protein, 95 aa, Zea mays
  Clone ID: MRT4577_105981C.1.pep
VTCGPGHAGDVHLGGPGADGDTFFGVTCGPGHGISMGRLGRYKDYKDVTDINGKDCTLKKTMIGVRIKAYKDCASALTDSKMHYRNIKMVDSTNP

SEQ ID NO: 191233 - protein, 701 aa, Zea mays
  Clone ID: MRT4577_105982C.1.pep
MDAADPLCAISSTARLLPRTLGPAIGPSPSNPRDALLEAIALARSLKGSEELVKQATMVPKEHGDIQALYHDDGVKGWPPANGSKEQQGRRPALDRKRARFAMKDTGSKPVPVVDQSKLSNISDPITFFMTLDRLEEAEEEIKRLNGEAEKRTLNFDPVDEPIRQPGLRGRKSVRSFKVIEDVGTQDPNEAPASQTATMTGSQLSQDVMHAVAGKNGRSVSSRSSEAISEKEVSLAEKDGRDDLTYILTSIQDLDESEEEEFIRKTLGIKETRKERVSLRNSILGVRSLRSNTEQKGSMKVHPPESHLPQTRQDRISELEKHLFPGGAANAKCTDDESEGSPDIVMGEPSLVHYSSDVLMTDENFTASDVDRETPNLGARAADPVLDPEPNLPDHAYERQPGGSSLGLYRDTEVGVAKENETCNRSNISVEEDDVPIDYITIGRSTNETEVSSSHPLEGSSTEELVTKPGRHAAPDGICRTSHAAEDSIQHLEAVKEGGVLQDKSSQLLEMPQEDINPLNQAQMHGGSTKKSAPDLSPTKQKKQQAVQERKRKQQSKRGKKVAGESLEIPQTNFESENQPHNDDVNIEKQTITSSTLSPNGAKGQKGAQRRNQTKKRNQRKILGDADLACQPGVRKSSRTRSRPLEYWLGERLLYGPIHDNLHGAIGIKAYSPGQDGKRSLKVKSFVPEQYSDLVAKSARY

SEQ ID NO: 191234 - protein, 103 aa, Zea mays
  Clone ID: MRT4577_105983C.1.pep
QRVVPWTVDVTSGRSYSLRGCASTMSAGVSVGRDRRFFCIRCPLFGLRGAGLCAGFISQALSNKVANFRVCQFIPNHCRLVRGYRRPKHINKHINKHINQPKG

SEQ ID NO: 191235 - protein, 67 aa, Zea mays
  unsure (1)..(67): unsure at all Xaa locations
  Clone ID: MRT4577_105984C.1.pep
MFYRNPNTDMLLTEAELDLGLVRLASVFHYXTYSLIYEPCRSDHMDGMRANKAAGVILYYNPNKLLP

SEQ ID NO: 191236 - protein, 700 aa, Zea mays
  Clone ID: MRT4577_105985C.1.pep
MASEKKTVDPTLSEFYEAMERTNAEKIAHETLAGISEDSSDSEDFDAETDEVVVHRSFMKAGLRFPLDSMVVEVLKTFKVYLHQLTPEAIIKIGVYIWAMRSQGQEPNVKSFCNMHELSYETKATEKEQYHNNFSCYGFVTRSEVSNPVPTFRKRWSRAWMQEWFYVKNDLVEREDIKGIIQRPIWSHFGIRRPSLALGNDIQACQAAYNTLCTYIGTRDLVQEHIAFEVWPLGSGWEMPKEAATGSSQGGLVYLKYTFKYMSQFDEPNDDWLDAIDATNDELLGVYSRAEDDAMTAQGKKRRVVASAISTTPKPKKVKVLTHHPKRIETAEEPRPAEGSSAVESSHLATAKARVESTEEPKLKIAAEQSKALSSLQETELPKVQKIASVSTPASVPAVEGKIVKGSFNVGTAQAAVEAGSSTPAEARPSGAAKEGAEARPLEAAEGPSLLRKEVATEESEFPAPRTSTEELEFIEMADNIRYPKLELGLSAMTKDQLADSLAYNSLKKLKDSFAKVGAYSSEQRFIRGDPEGVIQWIGEEVEAFEEILSDHGDFCAFAGARGVAAVLEKTGCEHVNAAAQAEAIFSADDTKEPSTEATLVGGKFYVDIWMKGDREMADEAIKKSEKESHDARVEAKEAEEAAERALIIADLSPPPEPYNPEADPIMKEALDVMKIANEVVDEVIDKLLHEVTERILKED

SEQ ID NO: 191237 - protein, 129 aa, Zea mays
  unsure (1)..(129): unsure at all Xaa locations
  Clone ID: MRT4577_105986C.1.pep
ASRPPHYGEWETKKHPDIPPPPPRIQDRPNKKTHNPNSHMGPPASQNRENVEPAIPEELRSQAPGSRIGIIRPPPNPNSHMNKKASRTRXNVELEFPEEFRSHFPGXRIGLIRNQIIPIHISTPPPPYS

SEQ ID NO: 191238 - protein, 51 aa, Zea mays
  Clone ID: MRT4577_105987C.1.pep
IRKAKSKWSKVPYIRRGCCALEILFFSRARRRTAPPLYIKQIEKRSLEDQI

SEQ ID NO: 191239 - protein, 48 aa, Zea mays
  Clone ID: MRT4577_105988C.1.pep
PHLRSLFRFNYITITTGTSAESLLIKHGSSLSTELLFFSFPFLTTSFL

SEQ ID NO: 191240 - protein, 55 aa, Zea mays
  Clone ID: MRT4577_105989C.1.pep
RVTMNMRMMQDLVHLMNTVIFCFCMLRWCASSSSDKLRPSVYKRNQECNVSMLHT

SEQ ID NO: 191241 - protein, 96 aa, Zea mays
  unsure (1)..(96): unsure at all Xaa locations
  Clone ID: MRT4577_10598C.1.pep
AVVFVFSLLDCCALIFLSVYFIITLSDLECDYINARSCCSKLNKWVIPELIGHTIVTVLLLMSLQRXIFLLNLPVATWNIYRYIMVPSGNMGVFDP

SEQ ID NO: 191242 - protein, 37 aa, Zea mays
  unsure (1)..(37): unsure at all Xaa locations
  Clone ID: MRT4577_105990C.1.pep
MXGPTDACVRHSLLNRRPSNCSHYSSLLRAGIVIARN

SEQ ID NO: 191243 - protein, 181 aa, Zea mays
  Clone ID: MRT4577_105991C.1.pep
MDPASEELERRSHYLSSLIRRTKLNAPPAPPPPTSHPEPETKLELERERSPIRRTKLKLNAAPALPPSTTHPETGKLEREPGPKSQNLVEAKVVVEDREVKEGDGKGKEERKVSVRVRAADMPVVLQRRAIRLAYDAVSATPRADGKRLALALKKEFDTSYGPAWHCIVGASFGSYVTHTL

SEQ ID NO: 191244 - protein, 56 aa, Zea mays
  Clone ID: MRT4577_105992C.1.pep
EKKTASASTQLTIHGVWAHTLGALGPPGLKGYICFLIYHPTLGGRALIFFRASSGE

SEQ ID NO: 191245 - protein, 168 aa, Zea mays
  Clone ID: MRT4577_105993C.1.pep
GNVTTYALGDAPAEEIVRKPLAEVAAMVRDAITSVDYDEYLQEMVDWVEVHKTEGLMEAAVIGVGAPTLNQSVMTTFPLDTDFGFGQATLATTVSDYGRLCSAFLSVGARPGGDGSWLVTAYIWPQLAAALESDGIFKLLTAEYLGLAIFCTCTPADETLVFGILYIC

SEQ ID NO: 191246 - protein, 256 aa, Zea mays
  Clone ID: MRT4577_105994C.1.pep
MNQPPPHMSRPTIIIKLILWLLWTITHLAISILNLWSHLIYSLDCYLISSGLLRKYQNLHLGRLKYLAIVVDSKEAKSTVKVKRLVCWLSSMGVKYVCLYDIEGVLKKSFEPAVNVSRDRTAGEHFGIGANIKDLHCSQREMMIDCLSGSDGKEGIAKAASLLCSTYLNGDTHGDDKRKPAFTEADMAGALKAVGCGGPEPDLLLMYGPARCHLGFPTWRLRYTEIMYMGPLKSMKYGAIVKALYNFSKKHQNYGK

SEQ ID NO: 191247 - protein, 462 aa, Zea mays
  Clone ID: MRT4577_105995C.1.pep
MATTMAANDPTSIRVVSRRLVKASDASIQPHVMSLSNLDLYVCDSQLGTLCVYPNAGGGFSARIPSLFESLLPSLLNYLYPFAGRLVTNPSSGLPELHCHNQGAELVVGEVGVALGSLNYGATKDSFKKMVLPFPRDVLLSVQLLSFACGGFSVMWWINHLVGDGHVGATIVRTWSQLARTGDIGGAPPLNYDRSVFRPRSPPSYSDSVAATFTTFDEKRLPNALTAEASFVDRVYYVEASDIAALRDTAAAATTAQRPTRVEALSAYLWKALADVVAACPRSNKERCRMGWWVSARRRVTAPKLVALMPGYLGNVTTYALGDAPAEEIVRKPLAEVAAMVRDAITSVDYDEYLQEMVDWVEVHKTEGLMEAAVIGVGAPTLNQSVMTTFPLDTDFGFGQATLATTVSDYGRLCSAFLSVGARPGGDGSWLVTAYIWPQLAAALESDGIFKLLTAEYLGLAM

SEQ ID NO: 191248 - protein, 103 aa, Zea mays
  unsure (1)..(103): unsure at all Xaa locations
  Clone ID: MRT4577_105996C.1.pep
METTIYTMIMLLAMPTCVANATVNAKCSHARIAALIAPYLPSIIASVXENPSVQPYMLQQAIAAGNIPXSTLLWQQSPALSLVQSLVQTMRAQQLAQLVLPVI

SEQ ID NO: 191249 - protein, 40 aa, Zea mays
  Clone ID: MRT4577_105997C.1.pep
YGLVRYYNLVASLDMPDRYTLAMRSSGRWVLRFLLVHSCV

SEQ ID NO: 191250 - protein, 83 aa, Zea mays
  unsure (1)..(83): unsure at all Xaa locations
  Clone ID: MRT4577_105998C.1.pep
YRQRAPFFFFLDSGKCDEDPSYTGSIXSALAASNGAFTYPLPRLLCDMCVQIFERXSVAVPADARMMFRIQTRKLRGCTLALD

SEQ ID NO: 191251 - protein, 137 aa, Zea mays
  Clone ID: MRT4577_105999C.1.pep
MASAELSREENVYMAKLAEQAERYEEMVEFMEKVAKTVDSEELTVEERNLLSVAYKNVIGARRASWRIISSIEQKEEGRGNEDRVTLIKDYRGKIETELTKICDGILKLLETHLVPSSTAPESKVFYLKMKGDYYRY

SEQ ID NO: 191252 - protein, 62 aa, Zea mays
  Clone ID: MRT4577_10599C.1.pep
GVVLEHSLGQSHPVHVVPYSPDFLDESVPWMEIRDIGRGIRCDCKLELFVVSVQSVKLNVVA

SEQ ID NO: 191253 - protein, 77 aa, Zea mays
  unsure (1)..(77): unsure at all Xaa locations
  Clone ID: MRT4577_1059C.1.pep
CNPLDPLKYQPGXPCXPVIFLHFSXVXHSKVFAXPKFXXHFSMRLWRCPXCSIXLATDMTPFXPKRTSLKNXWXRPG

SEQ ID NO: 191254 - protein, 51 aa, Zea mays
  Clone ID: MRT4577_105C.1.pep
PTRWRVVLLTEGSRYGLRGFRVWPMSYSIGTARPDCTRSRAQTLTIPFFSR

SEQ ID NO: 191255 - protein, 96 aa, Zea mays
  Clone ID: MRT4577_106000C.1.pep
MVGATDPSVAAALEDQARSLKVQAKALDSTQKLLQQICDRFTEQDARWNSIEKAVATNTNEIASLRAKCADEEIQALRSDLQRAVLEHIDTHLSIT

SEQ ID NO: 191256 - protein, 195 aa, Zea mays
  Clone ID: MRT4577_106001C.1.pep
MASAELSREENVYMAKLAEQAERYEEMVEFMEKVAKTVDSEKLLESHLVPSSTAPESKVFYLKMKGDYYRYLAEFKTGAERKDAAENTMVAYKAAQDIALAELAPTHPIRLGLALNFSVFYYEILNSPDRACSLAKQAFDEAISELDTLSEESYKDSTLIMQLLRDNLTLWTSDISEDPAEEIREAPKHDSSEGQ

SEQ ID NO: 191257 - protein, 124 aa, Zea mays
  Clone ID: MRT4577_106004C.1.pep
RDPVYGWVGAISYLQQQVSQLQVQLALPKAEILWVQMQPDESTAAFSAPAPAKQQQFFPPPQQQQTMECEAFGSLLVQNGLIINPLGSAGAAFQQQQILGGFGFSGNPAMALQEACLKKKTLWA

SEQ ID NO: 191258 - protein, 102 aa, Zea mays
  Clone ID: MRT4577_106006C.1.pep
LLKNQTNQKLLLASHHFLRHPRSAPEAAPHRRSRRHGTHPRSLARSLPSLPPRAIHGPRPPRSCLISLSALVTPSFEGAACLLLARYAWNGRRREASLAFGY

SEQ ID NO: 191259 - protein, 88 aa, Zea mays
  unsure (1)..(88): unsure at all Xaa locations
  Clone ID: MRT4577_106007C.1.pep
MASAELSREENVYIAKLAEQAERYQEMVEFMEKVAKTGDSEELTVEERNLLSVAFKNLIXARRALWGIIFFIEQKEEGRGNXDRVTLI

SEQ ID NO: 191260 - protein, 88 aa, Zea mays
  Clone ID: MRT4577_106008C.1.pep
PCYDYCRENLGAPHMRCCRARPRCPTLFQAGALEPGLVGLGSPLNCCHLHFTFSSLFIVSGPKSMAGLSGLKKKKKKKKKKKKKKTPA

SEQ ID NO: 191261 - protein, 45 aa, Zea mays
  Clone ID: MRT4577_106009C.1.pep
DAAGQDLGIPPRFRRGTLERGPVVLGSPLNCCRLHFNLFIAVQWS

SEQ ID NO: 191262 - protein, 54 aa, Zea mays
  unsure (1)..(54): unsure at all Xaa locations
  Clone ID: MRT4577_10600C.1.pep
PSDDTPQHLLLYLHHKQRFGXYSFCWLXHTQDLSNKQPLKKVRRHIRDRTESIL

SEQ ID NO: 191263 - protein, 141 aa, Zea mays
  Clone ID: MRT4577_106011C.1.pep
PRPGTASPSHPKQREREKHVAKKTSSIRRATEQNTKACRSEEDAAATISMMHVLSQGAAHPPRSHLPDVEPDPARGKLLGGEGRLPRLPPLPAARHHPQEALTLAHLPSGAVCRYMVPADLNDPPLPLLHVLIGPHACLLR

SEQ ID NO: 191264 - protein, 70 aa, Zea mays
  Clone ID: MRT4577_106012C.1.pep
LVVWYISFTRFYLAASLLRKSFSCDGIVTSLFINLQGLSQVLAQLYSCASGRLLRWWSTSHHVFCTTIYE

SEQ ID NO: 191265 - protein, 160 aa, Zea mays
  Clone ID: MRT4577_106013C.1.pep
KGGAKRPRKFLGVTIRGFAKSSIRRLARRGGVKGFWGFFFGEPRGVFRFFLGGVIRAPVPFPGRARRKPVLSLAVVFGLWRRGRPLFGFGGLADGLLALFSPFAGFAFFGRAPHFLGPGSFGTSCLFFFGCGGFPWLMKRCWIFLSLGCWNRACNSICYS

SEQ ID NO: 191266 - protein, 101 aa, Zea mays
  Clone ID: MRT4577_106014C.1.pep
PFSRVFFFLGANSEFDPGWELSIFAGKGAKSQHYFGKKGGFQLNQQFPQNFHSKGVRGGLGGTPHLGGASTPQFWLAGGVKQNPFPLRGGGKKNPDQVGGA

SEQ ID NO: 191267 - protein, 44 aa, Zea mays
  Clone ID: MRT4577_106015C.1.pep
FVRGHAPLRYCPFKLGKTRKGIVFQKARATPKKKKRFLWARFLF

SEQ ID NO: 191268 - protein, 81 aa, Zea mays
  Clone ID: MRT4577_106016C.1.pep
QFVVRLCLQRAVMDVVNSIMEGGLRVGVLLQGKDIQDDNKTLCQAGICHDKKLNNIDFTLECEREREPPSGVIVQEQMDFL

SEQ ID NO: 191269 - protein, 329 aa, Zea mays
  Clone ID: MRT4577_106017C.1.pep
MDGGGDAAKTRMKTVCVTGAGGFVASWLVQLLLSRGDYLVRGTVRDPGDPKNAHLAALGGASERLRLFKADLLDPASVAAAVAGCDGVFHVASPVPAVEPTNPDEVLVPAVTGTQNVLEASHAASVRRVVVVSSVGAVIANPSIPDGAVVDEDCWSDEDYCRTTKNWYCVSKTVAEREALAYGERTGTMDVVTVCPPWVLGPLLQPTVNATSMRFVTYLKGENTEEKTRNMVDVRDVAAALVLTYETPQASGRRYICSAHPMRVSETVGLVPSLRPDLKLLQYPRKFVQVEDHQRVSSRRLQALGWKCRTVEETLRDTVDSSKAAGIMN

SEQ ID NO: 191270 - protein, 95 aa, Zea mays
  Clone ID: MRT4577_106018C.1.pep
MSSEESAACAHKGDMTLVLTFFFLAQRTDVPIGTYKELPMSRNKSICLHYRNNAMFKDGLGCGSCFEIKCDNPVECSGRPAMSHFTYLNYEPIAP

SEQ ID NO: 191271 - protein, 84 aa, Zea mays
  Clone ID: MRT4577_106019C.1.pep
EGGFFFFPPFFFSIFGSYPGGAFKKKQAQGFFCLKTHGAIFLNPPVGHTPPFFFFCEYYPPKGGGDGAPQNKGRFFFPWEKIFL

SEQ ID NO: 191272 - protein, 55 aa, Zea mays
  Clone ID: MRT4577_10601C.1.pep
IVLVVCLALSSASASSMQMPYPFSGRHCLYNSNDFFTFIIEIGSQFYIILKLIFY

SEQ ID NO: 191273 - protein, 114 aa, Zea mays
  unsure (1)..(114): unsure at all Xaa locations
  Clone ID: MRT4577_106020C.1.pep
YDEREQLGSDIPKNRNGVTVRNISTLILIGMAPGLKLNLEDCFXVKMTXINYAGGNERPLEXSFRGDMRLRPHVSEEESCIACSISPYICPVYATTIEAEERRYVDLRXTRYDI

SEQ ID NO: 191274 - protein, 34 aa, Zea mays
  Clone ID: MRT4577_106021C.1.pep
WLPMTPAFLNPAALSITLRCSPFRCFGGLARKSF

SEQ ID NO: 191275 - protein, 84 aa, Zea mays
  unsure (1)..(84): unsure at all Xaa locations
  Clone ID: MRT4577_106022C.1.pep
GKLIIFGKLWWFRGKPLPLHTPFFFSHFHAPKPLFVLVPTKGEIFSQWIPARRFYLITRFFVSKKKKKKKKKKNKKKKKKKXXK

SEQ ID NO: 191276 - protein, 173 aa, Zea mays
  Clone ID: MRT4577_106023C.1.pep
AVVNLGPAKNHPVQAFDLNPLTTPSGSPHFEASMGRHYNGNHLAHSHGIHLEKNFDASFCNPMPRFTGVMNHDSRACRPNFSNKTFQDTLSNASNTELKLGQSSYHQSMTTLSPLGPPPMIEFQKPQTHRPPINQNPSPKQATKISKSLSEHNEPSISTGNKKQPLKLSRLKV

SEQ ID NO: 191277 - protein, 62 aa, Zea mays
  Clone ID: MRT4577_106024C.1.pep
LGRHFVHVPIYLQLYQERRTPHIQSPWATSTVLNTRFRIYHPSSVKHIVAFNATWVSCLCLY

SEQ ID NO: 191278 - protein, 376 aa, Zea mays
  Clone ID: MRT4577_106025C.1.pep
MVRTSCSISEILAQKITSKEQPSQKSIEVGDECFRPSQDMDYVMMFDSSKDENGPNPERLTAEGDCGDPHERLDLVTVGDIGKMVVDNAIIEDVKSNNTTANNVNHGELHVSLQLPEGNTDNGMTGVSTASSLDIKEGNNDKVVADASAHEGDINDNGSSELKIGNTNSGITGVIAASSDLKEENIDKVVAGDCAHESDINAKDCTELNIGNTDNSIAGDSTVSPEVSAENTDQIIAGDCGNETDLKADGEGADKFLATDSALPCEDDATCMDGANVIVSLDVPRSTKNDTFSKNTSSDAEMPLPVGTCELVDRPSSENDMSEHTSFDGKRPADDRTLEENEMVMPGDEKTEVHYKRRKVLASEKQSSFSGATSTD

SEQ ID NO: 191279 - protein, 55 aa, Zea mays
  Clone ID: MRT4577_106026C.1.pep
AVSFVISVSCSASQHAVLVYDGRTLCYWACCAVSTRVSNVEVAMVGISIPSLVDH

SEQ ID NO: 191280 - protein, 66 aa, Zea mays
  Clone ID: MRT4577_106027C.1.pep
VKNWRLICEEHWFWHIGTHKNQCLIYKSIMNRRNTRTGNAMTTWFLLGLKVPSTSNVKKTHDSVNA

SEQ ID NO: 191281 - protein, 49 aa, Zea mays
  Clone ID: MRT4577_106028C.1.pep
QVYEGLTLVTVRGAGHEVPLHRPPQGLKLFEHFLRGEPMPKPVESVQSF

SEQ ID NO: 191282 - protein, 56 aa, Zea mays
  unsure (1)..(56): unsure at all Xaa locations
  Clone ID: MRT4577_106029C.1.pep
SSLAPXQICSLPLGVLDIMGRRRADGFXQRXPXWFPLACPAXLVXXAALTLSHXVM

SEQ ID NO: 191283 - protein, 107 aa, Zea mays
  Clone ID: MRT4577_10602C.1.pep
PALCRGASRIALLSWPPWFGFRACKPSSFPVEGVSLGPVALPFCGVAWIEFLCLRGSACPCCVFVRLQLQAYGVCTQFSRGCFRRSMVCAFGFRLFFLEGAFEILAP

SEQ ID NO: 191284 - protein, 69 aa, Zea mays
  unsure (1)..(69): unsure at all Xaa locations
  Clone ID: MRT4577_106030C.1.pep
DAPSLRCMPSYDIARPSXDXNMMTYPNAEHMASATHFRLKAPTSICAKPNRKHLAFLNLEPCMASPLCT

SEQ ID NO: 191285 - protein, 71 aa, Zea mays
  Clone ID: MRT4577_106031C.1.pep
HASAHASDAESTESCQRLGPAGLALHYANIIIQIYSIVSRSGYVPSNSRDALYQGLPPRIKSALPNKLRTT

SEQ ID NO: 191286 - protein, 88 aa, Zea mays
  unsure (1)..(88): unsure at all Xaa locations
  Clone ID: MRT4577_106032C.1.pep
LFXTEGGSQQFLILNNKFYPPFIXXLNXXXXXXTPXXTXTLSXXLXPXPFXFFPXFLXXFXXFPPQPLNXXLPLKFPFNXLXHLXPKN

SEQ ID NO: 191287 - protein, 95 aa, Zea mays
  Clone ID: MRT4577_106033C.1.pep
PPRKAKQRHRRGAGPQTSRERERIKGPGTTEPKERTSPEPKKRGAEPRRGPPPPPGQRGRQPCQTRQMRNKGGKAKEDRGRGTGCQRSPAARRGE

SEQ ID NO: 191288 - protein, 82 aa, Zea mays
  Clone ID: MRT4577_106034C.1.pep
CLSPPPPDPTCWLENASTTRSILASCRGGARPMTARAWPGVCISLPPSPCYTRWLWLHVASLLVVRQEVSSLLVLASHNPTA

SEQ ID NO: 191289 - protein, 79 aa, Zea mays
  unsure (1)..(79): unsure at all Xaa locations
  Clone ID: MRT4577_106035C.1.pep
VFVFILIRSYFLHTCATPITPTYFETNHXSRIIFLSPISDSIRLSPTADDIFXASIYDPSYYSSLFXDVLNNACNHYGD

SEQ ID NO: 191290 - protein, 53 aa, Zea mays
  Clone ID: MRT4577_106036C.1.pep
HYLAYSKATFLRRCCSAGYHKTSDDAASFYVVYSSCCRPRLCLRKISLLSFLC

SEQ ID NO: 191291 - protein, 167 aa, Zea mays
  Clone ID: MRT4577_106037C.1.pep
HRGCRSGWAGARACQPCARDGPAVPEDRPRPRKVLVQAPEVGVVAPVATTGLGRHGRLLDGGAGAGAGAGAAFQQEGAVEELRVQGEPPVRGPPAAARRRPFGQGDAAGTSCSSSFAVPPKPVRHEGPPSDADIVREKFSKLVLGEDMSGTGKGVPSALALSNAITN

SEQ ID NO: 191292 - protein, 44 aa, Zea mays
  Clone ID: MRT4577_106038C.1.pep
LVGTVSRSRLGCQVIAKPELDGIRLALPVATRNFAVDGYVPKPH

SEQ ID NO: 191293 - protein, 133 aa, Zea mays
  Clone ID: MRT4577_106039C.1.pep
WPSLTFYQAHQGMRFFHLGYYGPGPFNSQLTLHIPHSWRGVHLSRGVKLVKEGKPTGGGPAGGRWEAFVCLRYRTGLQAAAPLWPSRRPCPSDGYHSGARWDVRRGTLGGTSFRASAHSADEAARGTSLPRAE

SEQ ID NO: 191294 - protein, 150 aa, Zea mays
  unsure (1)..(150): unsure at all Xaa locations
  Clone ID: MRT4577_10603C.1.pep
FVLSTRIXXVXGGXTTTTMGXGGMCGXASXGGXXLLFFFFCAXLVVAAHGAXAGETEXGRTXTAKGGTLLCGAXSRRCRSGXXTEKXXTPRXEGDMRVASCXXGGTQQALTRAEGTANRGVGRLTFXRFPGGGEXSGASGLRRSRGSRXW

SEQ ID NO: 191295 - protein, 80 aa, Zea mays
  Clone ID: MRT4577_106040C.1.pep
IKNLTVGYAAVIRRQVRRPPENLKFPFRCNSPIHDFINSYSPQLEASCSVWAHELALWMPIHIMKNSHCDQADLHGDWSG

SEQ ID NO: 191296 - protein, 114 aa, Zea mays
  unsure (1)..(114): unsure at all Xaa locations
  Clone ID: MRT4577_106041C.1.pep
EAAAFRCRRPYVTPRRSFASQYVCKSTASSTDHYNAPANSKGDSNNVDIYAPSKDAIMYVSGVHKQEYKXSDINIASXASCTTNCLVNVANVMNHKLGIIDGMMTTEHAMTTTH

SEQ ID NO: 191297 - protein, 83 aa, Zea mays
  unsure (1)..(83): unsure at all Xaa locations
  Clone ID: MRT4577_106042C.1.pep
MLGASPKGRKAAAPPVKLGSAKEAPAAGGGGSGCKVPAEEVWEVRPGGMLVHKRGGGGGGDXAAPXNVKPVPTIRVKAKHAGV

SEQ ID NO: 191298 - protein, 147 aa, Zea mays
  Clone ID: MRT4577_106043C.1.pep
KERESSHTHTDTKAPRPPPAGREAAAGAPDAASAKCARRDRRFTTDGTGRTGYDDTGQQGAKPRLDQHSGAAGFNSKEQDLDGESSAETKLKRGNTAGTDSSPYHTNRATGDGTRRRPDTGRSMGHPERAAGGAEHQREGQRRRQEG

SEQ ID NO: 191299 - protein, 57 aa, Zea mays
  Clone ID: MRT4577_106044C.1.pep
PQESLIQKMYWITNLIKNKLIHSYFLSHYIALRFQFCYYALQLIKSPPTHLRSPHAL

SEQ ID NO: 191300 - protein, 62 aa, Zea mays
  Clone ID: MRT4577_106045C.1.pep
NQNSITLQIFPSAIVKSNPNLHRPDASYSRSRHPVHLESEGGQNLTSLALLPPPPPPQRTRG

SEQ ID NO: 191301 - protein, 161 aa, Zea mays
  unsure (1)..(161): unsure at all Xaa locations
  Clone ID: MRT4577_106046C.1.pep
HSVPAMIFSLGGYSMNNFHDVTXDIVIPLYTTARRFNGEVQFLVTNKSPSWINKFKELVRKLSNYEVIYIDEEDETHCFSSVTVGLTRHREYFKELTIDPSNSEYSMSDFRSFLRDTYSLRNDAVATRQIRRRRPRILILARGRSRAFVNTGEIARAARQI

SEQ ID NO: 191302 - protein, 36 aa, Zea mays
  Clone ID: MRT4577_106047C.1.pep
WSAAKASTGCHVSALCSRCTSSYLMLKHDFSVHLCL

SEQ ID NO: 191303 - protein, 93 aa, Zea mays
  Clone ID: MRT4577_106048C.1.pep
LSCASCLVGHAMMLVLYRPVYMFRFGFRAGSSAFFWWSHWFSWFLSMVNSVPHSLALEAATVLIALHTLLNMLYVEVGVFPFPGQRVSLFLFM

SEQ ID NO: 191304 - protein, 228 aa, Zea mays
  Clone ID: MRT4577_106049C.1.pep
MGSSEADEDQLLKSFLAEVSEAERDNEVLRILGCFKLNPFEHLKLSFDSSPDEVKKQYRKLSLLVHPDKCKHPQAQEAFAALAKAQQLLLDPQERGYILDQVTAAKEELRAKRKKELKKDSASKIKSLVDEGKYEEQFERSDGFQQQLIIKISEEEGRLKKDEEETKEMWKRKREHEEKWEETRDKRVSSWRDFMKTGKKGRKGEIKPPKLKTEDLNKSYVQRPVKRN

SEQ ID NO: 191305 - protein, 94 aa, Zea mays
  unsure (1)..(94): unsure at all Xaa locations
  Clone ID: MRT4577_10604C.1.pep
MAKIKIGINGFGRIGRLVARVALQSDDVXLXSVNDPFISTDYMTYMFKYYTLHGQWXHHEVKVXDSNTLXLFVRIEFFFFFFRNPLKRSLWVII

SEQ ID NO: 191306 - protein, 168 aa, Zea mays
  unsure (1)..(168): unsure at all Xaa locations
  Clone ID: MRT4577_106050C.1.pep
AKEELRAKRKKELKKDSASKIKSLVDEGKYEEQFERSDXFQQQLIIKVREILTDKEWRRRKMQMRISEEEGRLKKDEEETKEMWKRKREHEEKWEETRDKRVSSWRDFMKTGKKVRMCIWQVVSSYAXIFFFKLKLLPLQGRKGEIKPPKLKTEDPNKSYVQRPVKRN

SEQ ID NO: 191307 - protein, 63 aa, Zea mays
  Clone ID: MRT4577_106051C.1.pep
GWRFPCDFQVFPELPPPKHGPHPTHCYQAGRAASFLTSWIPCALCSRKRFCVRQCLSREKKLR

SEQ ID NO: 191308 - protein, 246 aa, Zea mays
  Clone ID: MRT4577_106052C.1.pep
MGSSEADEDQLLKSFLAEVSEAERDNEVLRILGCFKLNPFEHLKLSFDSSPDEVKKQYRKLSLLVHPDKCKHPQAQEAFAALAKAQQLLLDPQERGYILDQVTAAKEELRAKRKKELKKDSASKIKSLVDEGKYEEQFERSDGFQQQLIIKVREILTDKEWRRRKMQMRISEEEGRLKKDEEETKEMWKRKREHEEKWEETRDKRVSSWRDFMKTGKKGRKGEIKPPKLKTEDPNKSYVQRPVKRN

SEQ ID NO: 191309 - protein, 55 aa, Zea mays
  Clone ID: MRT4577_106053C.1.pep
IWLPRYRIYNHLNASERMFGTKQMGSYGICTNQHYKEFVLFVGNKQFFRQTPNIH

SEQ ID NO: 191310 - protein, 88 aa, Zea mays
  Clone ID: MRT4577_106054C.1.pep
PSLCCSLCSVFARAPFCCVSRPPPGVVFGPPLPSSRLLCSPALPRVPRGRGLTLPLCCTCCCLACCLAGRPPPPFLCVPWPRSCSGAT

SEQ ID NO: 191311 - protein, 116 aa, Zea mays
  unsure (1)..(116): unsure at all Xaa locations
  Clone ID: MRT4577_106055C.1.pep
MSPGRDKEESSTETSGFIESSNNVADMLPDLNLNHFTSTASTHXNHSVSIESLEDSVADAKTIKNDLLPSIKLVPKMIKDVELLKKKAKVAKHELSVAGTGILAKVEELREMITYA

SEQ ID NO: 191312 - protein, 72 aa, Zea mays
  Clone ID: MRT4577_106056C.1.pep
NALFAKRQNELQNITFGIKRSLPFYSHTNLSSIFYKTPCPKGGTELRTQETKPCFSSYSTVLDSPLFLLPFL

SEQ ID NO: 191313 - protein, 82 aa, Zea mays
  Clone ID: MRT4577_106057C.1.pep
CCFPCPLVFVPRVCPLSPNPRLFGFGSSSLSAFSFFRSSCGLSLRLLFFSVARFSSACALCAPLPVSPFEPELALSSIPRLS

SEQ ID NO: 191314 - protein, 90 aa, Zea mays
  Clone ID: MRT4577_106058C.1.pep
RRGATTKPSGGDASTRIRGVGCSGAATKLRGGDALARIRGGGCGGAATKPSSGSARIRGGGCVARRCGAPAMPGGGEARPNGYSSLEELV

SEQ ID NO: 191315 - protein, 43 aa, Zea mays
  Clone ID: MRT4577_106059C.1.pep
LKHYHKLQHIPSLVFDVLLSLFNKHTPVHYSHSIKYPSTSCTM

SEQ ID NO: 191316 - protein, 109 aa, Zea mays
  Clone ID: MRT4577_10605C.1.pep
GNEGDNRNNLYGFNSVANGKFSCISLPAPNTAVTLRKVEGGIAAVKKFSGRPKEEIVLQKEKDLRSQLLNDGLKPHPGCLLARYNDPRTKSFLMRNEVLIRLIDFTLEL

SEQ ID NO: 191317 - protein, 156 aa, Zea mays
  unsure (1)..(156): unsure at all Xaa locations
  Clone ID: MRT4577_106060C.1.pep
GFLVLVAPPRHASTLWSLASPQLWSLGVALVFVRDHAWYAPWVGWGGPFCGAACGSHLPPGDRHSHPVHAPVVLFRGRAWPLLSDARASSCAVVVSAPAWFVARFLLVVSSGVVVSDARLCSPRLELCVCRSRAVHGSSFVPSWGRFVXFHILKXX

SEQ ID NO: 191318 - protein, 43 aa, Zea mays
  Clone ID: MRT4577_106061C.1.pep
SARVGPMIFFAGDAHDTCVETTPGPGRSIRWPNSSTFTPTAGS

SEQ ID NO: 191319 - protein, 104 aa, Zea mays
  unsure (1)..(104): unsure at all Xaa locations
  Clone ID: MRT4577_106062C.1.pep
LKHNKAHLMEVQVNGGTMADKADYAYKFXEKEVPVAAVLQKDEMIDIIGVTTGKGYDGAVTLWGVTXRLPAQTHRGLRKETWIGSWHSTRRSYTAARXGHNGYH

SEQ ID NO: 191320 - protein, 61 aa, Zea mays
  Clone ID: MRT4577_106063C.1.pep
FFFFISTKPNIYIIMLILCQQNLHLIIILYYATKLFNDPSLFLLYTTSPFLEKINNYFFFS

SEQ ID NO: 191321 - protein, 172 aa, Zea mays
  Clone ID: MRT4577_106064C.1.pep
IGTSSRPGSPHNRFRDQILASIRPPSPPLPVSTREAPPQHRSITMAPTPKLAMGISCAIRAHAYHRRGLWAILGQQRWRLPHRRVYTRRRRGTQCSTLDEQQRASRSSRTRKPIPTKVGSSIHAWHAADPPRDQLHEDESAVPQEAQHSACVLVTVPFISEQYRSVVLTRPM

SEQ ID NO: 191322 - protein, 75 aa, Zea mays
  Clone ID: MRT4577_106065C.1.pep
IDLRTSSISLIPFSDSSGYVFRSLLQQYGGFTKFPDDRIPDIYHSYYGLAALSLLEEEGLEPLCVELGILSAAAL

SEQ ID NO: 191323 - protein, 166 aa, Zea mays
  unsure (1)..(166): unsure at all Xaa locations
  Clone ID: MRT4577_106066C.1.pep
VWASLKTXFVGANRVKTTRLTTLKGEFXAVXMEDGEALDDYADKISGMAARYAGLGVTLDDAAMVKKLLDIVPDRXLPAVAGIEQFCDVETMAFEEALGRLKAFDERSRRRTRTGGERRDNQLLLTEAEWKARQKKKSSIRKCFNCGNHGHFARAHASAHASADAW

SEQ ID NO: 191324 - protein, 360 aa, Zea mays
  Clone ID: MRT4577_106067C.1.pep
MTIVVVASKLMIKIRIMLREQSLKETPGVKGKTKARLKKGITIISASPCRVATHLAPPAFRTVAVARPQALPFVLSVEQRVGPSARARAPFAAKRGGGGEVSAEAADGTRALLQAALWGAEAAYILWLFLLPYAPGDPVWAISQATISDLIGLSLNFFFVLPLLNSVGVHLLESPLLHPMAEGLFNLVLAWTLLFAPLLFTDCRRDRYKGSLDVLWGFQMFLTNTFLIPYMAIRLNGPEADRSPPRRSQLGSVMVNGAPAVGAVGGLVCVLSIVWAFSGRGDSGFGGIAERWQYLQSYLFSERLAYAFLWDMFLYSVFQPWLIGDNLRNVKADAAGLVSVVRFVPVVGLVAYLLCLEEED

SEQ ID NO: 191325 - protein, 174 aa, Zea mays
  unsure (1)..(174): unsure at all Xaa locations
  Clone ID: MRT4577_106068C.1.pep
MATKILYLLVLLVLFASASNALIIPQCXLAASSIITQLLPPVTLMGLXHSAVQAYRLLQAIAASVLQQPIYQLQQQFLAHVTIQTIASHQQRQFLPSLNQLAMENPADYLQQQLFASNPLALANVVANQPQQQLQQFVAXLNQLHMVNPADYLQQQQLCLSNQLXAVVNAPTYL

SEQ ID NO: 191326 - protein, 85 aa, Zea mays
  Clone ID: MRT4577_106069C.1.pep
LCIALNAAAYPGGAFFEGAEEYEQHKPREATAYPAADQTWVITMLAAMTHRKMRALLSGTGWLMCERPVTPTHHGSRLETPVVYA

SEQ ID NO: 191327 - protein, 152 aa, Zea mays
  Clone ID: MRT4577_10606C.1.pep
MAAAMMISGGRAAALVMAAVVLCSVAAMAAAQQASNVRATYHYYNPQQNNWNLNAVSAYCSTWDAGKPLAWRQKYGWTAFCGPAGQKGQAACGKCIRVTNRATGAAITARIVDQCSNGGLDLDYETVFKKIDTNGQGYQMGHLNVNYQFVAC

SEQ ID NO: 191328 - protein, 46 aa, Zea mays
  Clone ID: MRT4577_106070C.1.pep
GLCQWQVHEVRSDGVRLRRHMAGRCPHRRTLLRLGCAGLARVPDLA

SEQ ID NO: 191329 - protein, 90 aa, Zea mays
  Clone ID: MRT4577_106071C.1.pep
PAGSISPPLSPQSSPYSTLSSLLGYLCERETTRSIDQEDRRGSSSRPTMPYAATRTSPQQHSRVASNGRAVAACAGHAGVPDEVARNHEH

SEQ ID NO: 191330 - protein, 114 aa, Zea mays
  Clone ID: MRT4577_106072C.1.pep
GLLINAINSIPAGELESGRIALAMWGRKVSSRISSLAIGLLGVAALFNDVAFYWVVLIFFLQRGPIAPLSEEITDPENSYIGIGAAILLFGLLVCLPYPFPFDPSQLTDMDFNF

SEQ ID NO: 191331 - protein, 103 aa, Zea mays
  unsure (1)..(103): unsure at all Xaa locations
  Clone ID: MRT4577_106073C.1.pep
EMLIEPEAHVRKLAKFMGCGFSAEEXEGRLACAIVELCSLGKLRDMXVNRNGSTLLGIKNESFFRKGVVGDWSKHMTQEMAQRLDKVVEDALQGTGFTFASTA

SEQ ID NO: 191332 - protein, 74 aa, Zea mays
  Clone ID: MRT4577_106074C.1.pep
IRFGSRSLIGASLKYKPGTCVNGSYNTGRSNESPKMRLSAHEAYQPTCPNKCFLGGARWDDELGNVFPDMLCIT

SEQ ID NO: 191333 - protein, 144 aa, Zea mays
  Clone ID: MRT4577_106075C.1.pep
YGKLVAAMAVDVEFNQATPLHVSPANPSIKFQATMDPNDTEDNVFEALEHQILLTWRELIFDWSLDRVSTEEEGDGESPDVGDGLGRGISGSGCVSQGRGTAADGCGLIGLGHGVWRGSTGSRRGGASGVGRGVASLEFSTPAG

SEQ ID NO: 191334 - protein, 49 aa, Zea mays
  Clone ID: MRT4577_106076C.1.pep
GPHLFPFVPYACGHVAYVGTRLERGPCPVRAKAEPASLSSALCIRIGHL

SEQ ID NO: 191335 - protein, 55 aa, Zea mays
  Clone ID: MRT4577_106077C.1.pep
LERGNGMGGLRHWRKLREAKVAPGSARRGERPAPWLMSDAAAGAALGLSVCSISP

SEQ ID NO: 191336 - protein, 78 aa, Zea mays
  Clone ID: MRT4577_106078C.1.pep
KTRGPKFFRPNFSLAIQHWQNKKGENRDFFNKNYFPPPCPPCKSPGKCHCHPWAIPGLSGKGVRGAIITNVFKNRSKP

SEQ ID NO: 191337 - protein, 50 aa, Zea mays
  Clone ID: MRT4577_106079C.1.pep
LLSLLSLILYGIVSASIFCIRLIFTSIHTYSVGANAYMIQWLSQHSRCAN

SEQ ID NO: 191338 - protein, 200 aa, Zea mays
  Clone ID: MRT4577_10607C.1.pep
MPFAPHSHHSAAECREIIKLAKRVSERREQTSKDGSPPRHRPGKERVDDGDVTAGERDLAYQSPEQVLKDILTRDSDSGDDTDRRKKLYVMYSGSWELTSCRNVKSLRREVLSATLGVPKAAPHQRWRSTTISFGASDCPENMARVGILPLITAPVIANIKLHHVLIDGGAGLNVISHAAFKQLQIPPVGLTDSRVAQLV

SEQ ID NO: 191339 - protein, 104 aa, Zea mays
  unsure (1)..(104): unsure at all Xaa locations
  Clone ID: MRT4577_106080C.1.pep
CSSEVAATRXXXAYQVSXLLINGLYPCMVDIHEEQGRVVEXRIGFSWHDYYCKKDEILWLQMCSFGXVAVLVSAVEMEXXXXXXXXLRKEPTDAQCTAAFPRCS

SEQ ID NO: 191340 - protein, 150 aa, Zea mays
  Clone ID: MRT4577_106081C.1.pep
GDDASGENGDALPAVAKTPKRRTTLQSQLSKFEDEDSEKARAAADAMSPVQDGLLIRKPPDMRFPSRRNVPMSADPVGHLHNGSSFDAVSVSGSDGSSGRYTPKISASTHNSFLQDSSNALSPFANNRTVRNPLTSSGDWSSSAPDASTD

SEQ ID NO: 191341 - protein, 106 aa, Zea mays
  Clone ID: MRT4577_106082C.1.pep
LFAQLQEDLSACAYYPELVVLALILDHAHGAPLLSYPIVGVALPTFQPVVPRLVHRIARHYNPRHRDRYDRAPEVNHRSRSVDLFARMNSSCHGVDSRHGMNKAQS

SEQ ID NO: 191342 - protein, 224 aa, Zea mays
  Clone ID: MRT4577_106083C.1.pep
LPRSSLPPDPNSDKLVHSTQYAPYGFRQHFRGPQQHRSSCAPASGSSSSQNNPNPPSRSGLHLPPINIKRKLRPASPTREELTSSNQLLTGVTGQPHSTMPGRMRGHQRSEAADESDIRVYRGKGVTRLLWLQGDRDQLTHVVEKATVHPELKGQTRTVYHITTEQPRYDGRPEGGLVRGRALDRSHGRAAVGVRRRAGGVGRGTADRGGGWWGGGVAGRPGAP

SEQ ID NO: 191343 - protein, 100 aa, Zea mays
  unsure (1)..(100): unsure at all Xaa locations
  Clone ID: MRT4577_106084C.1.pep
PQLRGRAQWLYVRQRRAAAGSLPSRWTTSLLRVPPQPQPTAAPFTFTFDARLSDYGGGGGVFFCNXGTVFKGRFRRSAQPVALPLFGGGGTLGGRGARIL

SEQ ID NO: 191344 - protein, 79 aa, Zea mays
  Clone ID: MRT4577_106085C.1.pep
TESPQTHPSPPKPQHINHYLKLSRQPKLYGSLLNNTHPLKGPNPPPPPVFKEKPPPRPLKCGFFLKTPPPGQSGPVLNP

SEQ ID NO: 191345 - protein, 81 aa, Zea mays
  Clone ID: MRT4577_106086C.1.pep
IKFFFFFFFFCCFFFFFFVFFLFFFFFFKEKGSQGHSHYYKGGNTPSRKQRGPQTRWKTPPPHQCSLLTVSTKTINSPSNY

SEQ ID NO: 191346 - protein, 69 aa, Zea mays
  Clone ID: MRT4577_106087C.1.pep
GLKGIDHLPVHCVKNKNTLYPICLYSFLVCLIIFLFINAFGFSDLKIGNLPLIFNLLLFVNLGLRGLSF

SEQ ID NO: 191347 - protein, 83 aa, Zea mays
  Clone ID: MRT4577_106088C.1.pep
SSILQILSNGSGPHYGLRFVPYLTGVSSMSTIKATLGSVTLHLRVTILNTGISINNRRRLCILLLLKRDARHTSTYYHHRNYR

SEQ ID NO: 191348 - protein, 109 aa, Zea mays
  Clone ID: MRT4577_106089C.1.pep
PRSFYLKSGNQRKFPPGHKTVFHFVVGMGTGGFGLIKIFFYPPQKLPEFNANLFSFGLPKNGPVGDKSPFSPRFLGPPGFFPPGSFFPGFFFLPVPPGFLTQIPWVFFL

SEQ ID NO: 191349 - protein, 471 aa, Zea mays
  unsure (1)..(471): unsure at all Xaa locations
  Clone ID: MRT4577_10608C.1.pep
MVNYDTGDHSIHILLLPYPSQGHINPLFQFARRLADHIGVRCTLAVTRFVASSTRPATGSVHVAVFSDGCDDGGPDGVGGHRGPYFERLNSAGPGSVDQLLRSESELGRPVHVVVYDSFLPWAQGVARRRGAACAAFLTQTCAVDVLYTHLLAGRIPSPPVVEELPDQLAGLPVQLQLDDLPTFFVDKDRPPGLLELLTSQFLGLGTADHVLVNSFYDLEPQEADYLASTWGAKTVGPNMPSTVCLDNHLSDDDGNADVVSYGVHLHTPMTAECKAWLDAQPPVSVVYVSFGSIASLGARQMEEVAEGLCGSGMPFLXWVVRATETHKLPKNFSLEAKAAGLIVPWCPQLDVLAHPSVGCFMTHGGWNSTLEAISSGVPVVAMPHWSDQPTNAKYVQDVWRVGVRVRPESDGVVARKEVERCVREVMEGESCKEFRLKALGWSKKAKKAINNGGTSDINISDFLSKVKSHK

SEQ ID NO: 191350 - protein, 94 aa, Zea mays
  unsure (1)..(94): unsure at all Xaa locations
  Clone ID: MRT4577_106090C.1.pep
MAIEDVSPLEQRTQDHPSSSPTMHPPTQEDEQVHQEQACDQXGAQDDHXMEEEAQPTPPIQVGVTVQRNHLVDQILGDISKGVTTRPRLVNFCA

SEQ ID NO: 191351 - protein, 125 aa, Zea mays
  unsure (1)..(125): unsure at all Xaa locations
  Clone ID: MRT4577_106091C.1.pep
PQNGVAXGPNGPQDRAGRPAHPGQGPEVRLLGRYRSRPCRRRQGFLVTKSSMHGWMPGCVSVSTTRVVSESCVPCTCGGPSFGRLSPPSVCYVCPGVRRVCSSPPPLNPGVCSPPPQGGLVEILC

SEQ ID NO: 191352 - protein, 107 aa, Zea mays
  unsure (1)..(107): unsure at all Xaa locations
  Clone ID: MRT4577_106092C.1.pep
KIHNLLPLQNPPITQLNPLTTHTPFPAFLQLFNLKTPFIPQLNHLPPLPLFPPLQKNKKPPPFLLSKQFPPLNFNKPPPLPFHXPPPFYGSPHLYPFIFHPPNPPFF

SEQ ID NO: 191353 - protein, 64 aa, Zea mays
  Clone ID: MRT4577_106093C.1.pep
YTAHPNKLIHINTKPQKSSHTNPSQEYFTPPKLLVTQHKNPTNYINLIITHPTENIPQLHPTQT

SEQ ID NO: 191354 - protein, 100 aa, Zea mays
  Clone ID: MRT4577_106094C.1.pep
DRVVHLGMYRHASVHWSASSAHHVSGSGSSPTNKPCLVSLVARTQTVSIGLVWRRPPQPEEDEQGRPVAPGRSLSRWTPPARRVGPASGSAGCGFFMVPA

SEQ ID NO: 191355 - protein, 85 aa, Zea mays
  Clone ID: MRT4577_106095C.1.pep
CEYSIVRSIYMALATIITEIHAKSARMSCAQTRLRTSSRKKMYVWNLAKNWSPRKPLHPEQTNLWNPASLLSRLMNDNLMSIFCA

SEQ ID NO: 191356 - protein, 141 aa, Zea mays
  unsure (1)..(141): unsure at all Xaa locations
  Clone ID: MRT4577_106096C.1.pep
GATFSYSLTPPFRFYFKALGFLRMQLPPARDFSFSWFFNYCLVIHLVHRDYTRRAPDLRPEEADLDPMDNHFSFQCDDICSMDRLLLXMLVLYMKLTINYEEGSPIYQLFFMDPDGFMIEICNCKILELVLFGAFGRLRLV

SEQ ID NO: 191357 - protein, 304 aa, Zea mays
  Clone ID: MRT4577_106097C.1.pep
MAPPLALLLLAAIVLSRAVSHAHGGGGGFYDPASVTQLSSRPRAFLYSGFLSDTECDHLVSLAKGSMEKSMVADNDSGKSVASQARTSSGTFLAKREDEIVSAIEKRVAAWTFLPEENAESLQVLRYETGQKYDAHFDYFHDRNNLKLGGQRVATVLMYLTDVNKGGETVFPNAEERIAYFQGSHLQYKDETWSECSRSGLAVKPKKGDALLFFNLHVNATADTGSLHGSCPVIEGEKWSATKWIHVRSFDNPPDVRTDAPCSDDKELCPRWAAIGECHRNPTYMVGTKDTLGFCRKSCGICDA

SEQ ID NO: 191358 - protein, 53 aa, Zea mays
  unsure (1)..(53): unsure at all Xaa locations
  Clone ID: MRT4577_106099C.1.pep
TTSSTSFTSISLSLFLAACAERYHQQGSNHPIRTCLSGXEYYCPEQWRWGEGP

SEQ ID NO: 191359 - protein, 87 aa, Zea mays
  Clone ID: MRT4577_10609C.1.pep
SITPPTRRSRDPLHVSGMRDYLPTRTTITNEAHYSGLKIFATKKGKTSFSSGKTQVPKPPPKGTDTNAERSVQLNAEGKLRGFHRCR

SEQ ID NO: 191360 - protein, 242 aa, Zea mays
  unsure (1)..(242): unsure at all Xaa locations
  Clone ID: MRT4577_1060C.1.pep
DVWSCGVTLYVMLVGSYPFEDPEDPRNFRKTISXSSPFPFCWLSQLASDACLVILKAISMSRAWQRILGVQYSIPDYVRVSSDCRRLLSQIFVADPXGTSSLSSVNPNPSWPNHQSSDANISXLIILRCGSCNPGQTIFSVMTDSEFLVKRPLPEXKRATIPEIKHHPWFLKNLPREISEREKANYKVADAAEPTQAVDEIMRIVEEAKTPGDMSKVVDPALLAEMAELESDEEEADTDDTY

SEQ ID NO: 191361 - protein, 169 aa, Zea mays
  unsure (1)..(169): unsure at all Xaa locations
  Clone ID: MRT4577_106100C.1.pep
HRRDYEYASLTVRIDLLDYLAVRLGHDKTKPLQWLSGNFATVHQETPPRPILIVSVHHPDCLNEXVRKLADNXRLLLMRSIIWFDVDEMIHDVRYXDVIATYVXRYVKNGRLQREEYFGVPKXMKIXDLSALXGLPIAPMCECQEEFRVLHMTYEYGTANTGLIYIHDQ

SEQ ID NO: 191362 - protein, 63 aa, Zea mays
  Clone ID: MRT4577_106101C.1.pep
GPGKGCPATLVVKLGVCDNTNPYQQQLIPLEGPNSANSDLGAPKPLPDGKGSTPLKSRAQRRV

SEQ ID NO: 191363 - protein, 76 aa, Zea mays
  Clone ID: MRT4577_106102C.1.pep
VSYSIRLVLPSILFTVAPRGSLAWICSETHSLSSIGKSSVLACSELDFISSAVVLIRGAFFRVCVVTCYIVDYGSF

SEQ ID NO: 191364 - protein, 395 aa, Zea mays
  unsure (1)..(395): unsure at all Xaa locations
  Clone ID: MRT4577_106103C.1.pep
MATACPPLSLPSTSLFRGRSARAGPXAGSSRPSAAAPSERRXWRRPRPXDGGRAAAGERNQREEXVERPPVWLMRQAGRYMKSYQLLCERYPSFRERSENVDLVVEISLQPWKVFKPDGVILFSDILTPLPGMNIPFDIVKGKGPVIYDPLRTAAAVNEVREFVPEEWVPYVGQALNILRQEVKNEAAVLGFVGAPFTLASYCVEGGSSKNFTLIKKMAFSEPAILHNLLQKFTTSMANYIKYQADNGAQAVQIFDSWATELSPADFEEFSLPYLKQIVDSVRETHPNLPLILYASGSGGLLERLPLTGVDVVSLDWTVDMAEGRKRLGSNTAVQGNVDPGVLFGSKEFISRRIYDTVQKAGNVGHVLNLGHGIKVGTPEENVAHFFEVAKGIRY

SEQ ID NO: 191365 - protein, 221 aa, Zea mays
  Clone ID: MRT4577_106104C.1.pep
HPVEMLLPMYHIDAAGFDIDVATLSGDPVKLEMWAFPQEDEAVKSIYDKYKQKLRSPLNLSEVWNGKDGKGFDQETPYLAVFIPGGHGVLNGIPFSKTVGDVLRWAHANDRFFITLCHGPASILAADVGKPEGSKFIYDGYSIDVFPDSLDQGANIDIGYIPGKMEWLVGERLKKLGVTPINKTISGECHRDRLLLTGDSPLASNNLGKLAAKTLLEEVNK

SEQ ID NO: 191366 - protein, 134 aa, Zea mays
  Clone ID: MRT4577_106105C.1.pep
MYAAFDSGNYFVIPGPPSEAFQVDSFIAKRYHEDGKISLCLNPKDFLIAIVGNSFSYGDNLMEEALALQALSPLVQRYRSENSAQSELKVKIFTGNITEKHRMALEVYLCLHALSDQVNCYLQSECFKLYLTVY

SEQ ID NO: 191367 - protein, 88 aa, Zea mays
  Clone ID: MRT4577_106106C.1.pep
TQGPGQEAKGHPQGSRGARWLVAAQFGRLCRRAQAKAQARQVSWPQNTRCDVGLVSLTTACIGSHKLVLIQGCMQCPVAQYCYAGLLK

SEQ ID NO: 191368 - protein, 21 aa, Zea mays
  Clone ID: MRT4577_106107C.1.pep
MAFAARQATARTVSTRGGAGA

SEQ ID NO: 191369 - protein, 40 aa, Zea mays
  Clone ID: MRT4577_106108C.1.pep
FHHRPVNVRLFLAGLCSYRELGLSLLSYFRVIVSCCIVCY

SEQ ID NO: 191370 - protein, 66 aa, Zea mays
  Clone ID: MRT4577_106109C.1.pep
EHAKVLNKIIIRRPDCYVTIRLYSDIDEVVIMSSRKRQKDLTLGYDLMRGVNQCILFGGDMYYWNV

SEQ ID NO: 191371 - protein, 75 aa, Zea mays
  Clone ID: MRT4577_10610C.1.pep
RSSTIQAPVGLILKESVLVFLPSSCAVAQILTQTNPTRPRSYPLLSIGVGPIHSTPRGVRVVLCTGNRHTGGRAA

SEQ ID NO: 191372 - protein, 46 aa, Zea mays
  unsure (1)..(46): unsure at all Xaa locations
  Clone ID: MRT4577_106110C.1.pep
PKCNRCSRIQIATGLKGGILLHIHRHQLMEAPPRLDHXYLTPSQLS

SEQ ID NO: 191373 - protein, 97 aa, Zea mays
  Clone ID: MRT4577_106111C.1.pep
ALRAKCATPIFKQVCSDVTRFKYGDEQPLDEAPHKIFLYGLGGGISKHNVPLKKKNRKEVTCDGKFSLVIVFQAQAFGLFGFEKGQAKFASFFGPGV

SEQ ID NO: 191374 - protein, 260 aa, Zea mays
  unsure (1)..(260): unsure at all Xaa locations
  Clone ID: MRT4577_106112C.1.pep
MATGTAAASASGVGADSLESGAMLLRRRHAGGLVGAGDDDGVGNAEEVAASVEQAFADEPVPSWREQLTVRAFVVGFILAVLFSVIVMKLNLTTGVIPSLNVSASLLGYFLVRLWTKAIESVGLLKHPFTRQENTVIQTCVVSAYGLAFSGGFGSYLFGMSRTIAIQATEANDAQNIKDPQLGWMIGFMFLVSFVGLFVLVPLRKVMIVDYKLTYPSGTATAYLINGFHTPQGCRXAKKQVRTLGKYFSLSFLWAFFQWF

SEQ ID NO: 191375 - protein, 37 aa, Zea mays
  Clone ID: MRT4577_106113C.1.pep
VGFERFKKKKKKKKKKKKKKKKKKKKKKKKKKKKNPQ

SEQ ID NO: 191376 - protein, 101 aa, Zea mays
  Clone ID: MRT4577_106114C.1.pep
MAVCKEAVGKSIGLAKNLACVSTNCTNMRYIVHIITLGNLSLYDVLSGHHRVYNALVWNFVLLGIITEPADVIIIGQTPHNLGPHSSCRCISVIPVQNVKC

SEQ ID NO: 191377 - protein, 77 aa, Zea mays
  Clone ID: MRT4577_106115C.1.pep
WRGWLTSCSRANCPVFMPSQCYQELLKVLVPQWVADTVFVERGATAGVVDAMGVHRLWCLCAHPAERPYGSAPVCGG

SEQ ID NO: 191378 - protein, 64 aa, Zea mays
  Clone ID: MRT4577_106116C.1.pep
RHPGAVETQHRLFSNQQPQTCNPPVIHVLLRLAFDLSSATHSVLSSGKTVNIHDLFPCLGSKYR

SEQ ID NO: 191379 - protein, 143 aa, Zea mays
  Clone ID: MRT4577_106117C.1.pep
RPLAPPTSRWSRCPACHRRYSWWRMQHLRSSTERICSKTCKPTPSCLDYTMRNQQCDRSISRCTVVRSIYPRTTPGYSTNSTCKCLHTMTLRITGALTMANLHLIPNHRGKLDSHASAAHRRLQHQLPTDDTIHHLFRCCCSR

SEQ ID NO: 191380 - protein, 45 aa, Zea mays
  Clone ID: MRT4577_106118C.1.pep
CIPTLKRDRIAQQQSLRAGLYYYQAVCMLVPLRLDLHRCQRLFFF

SEQ ID NO: 191381 - protein, 63 aa, Zea mays
  Clone ID: MRT4577_106119C.1.pep
SWGHLWYSFFASCLHWSSLASTTLLALEPNAKAKAINVNVILAANSNTPRALIAYRIQRKGSS

SEQ ID NO: 191382 - protein, 90 aa, Zea mays
  Clone ID: MRT4577_10611C.1.pep
VRDAESLAELAVHVHPLFATLKSRCHRPSSSSSLTVAWSSHVRLTSEAVSSVASPSYAAPRQVRSRRDLLPCRHDAVVEAPMCSSAHASA

SEQ ID NO: 191383 - protein, 108 aa, Zea mays
  Clone ID: MRT4577_106120C.1.pep
LSSACFSSTVPRRLPLPPRARWRLKHLPAPASPSRSLRPACCMSPWEARLADLVFLPLGEVVLGRRRRYLVVDTPPRPSDLLRPHHRHRHTGPGSGLLLMDALGRFGW

SEQ ID NO: 191384 - protein, 43 aa, Zea mays
  Clone ID: MRT4577_106121C.1.pep
KHRQPMTDKVKWIIGYPCRTHNASGSLDEQPLAPDEMTTWPTL

SEQ ID NO: 191385 - protein, 71 aa, Zea mays
  Clone ID: MRT4577_106122C.1.pep
AWCTGQPGSYDLPARADKEDRRAGAPPPTPLQDTARPRPLNGLIDVNQPHQLVGVGSNLQDRKLCAPKIPF

SEQ ID NO: 191386 - protein, 47 aa, Zea mays
  Clone ID: MRT4577_106123C.1.pep
NYAVDNSLTTGIHSRSNPKLVLNRSLVVERTMSSLTLLYARVGGRVG

SEQ ID NO: 191387 - protein, 149 aa, Zea mays
  unsure (1)..(149): unsure at all Xaa locations
  Clone ID: MRT4577_106124C.1.pep
EEKSYGCSSSPLLYKRQICFLEIFYRGVSGLSGGNAIYXKDLACDIYVWTSTRNLTGPHISVPEVMSHTHSSVCCGPDLTXKPRSRLFHSRIIVECVXPRTGMYDPQXFDVGTKXQRDYTMENILTQLKREMAASQNRKLVQPPETDSY

SEQ ID NO: 191388 - protein, 148 aa, Zea mays
  unsure (1)..(148): unsure at all Xaa locations
  Clone ID: MRT4577_106125C.1.pep
LGPVRGPVTPGGXGGGGGPLGPRGQLGPVGGPGRPGGFSGVPGLGHQEGPPPRCFPGPGFSRGPPSRPKVPLSPFRPPRVAPPPARPGPTPPTLPPPRGAGALAFLGGGPVPQGLGLCPPGAVPGFFKKGAWAHRLSPNNKTPESERT

SEQ ID NO: 191389 - protein, 161 aa, Zea mays
  Clone ID: MRT4577_106126C.1.pep
MDSEHWISRLAAAKRYYAAQLGHVDDVPGIGTEEVEMEIEDDGGLEMEMEMALGLGDATWPDVACPYCYEDHDVASLCVHLEEDHPYEPHSAPCPICSQRVTRDMLNHMTMQHGYLFKNGHRSRRYIIPESHAISALSRDLRGTHLRALLGGGHGHRSSNA

SEQ ID NO: 191390 - protein, 71 aa, Zea mays
  unsure (1)..(71): unsure at all Xaa locations
  Clone ID: MRT4577_106127C.1.pep
PHPCCTHTLPCQDQVPQDEPHEGSCDKSMSGXARRLPANFGLLDRCLHXGNILTILSRPPVIYQTPDNRLC

SEQ ID NO: 191391 - protein, 187 aa, Zea mays
  Clone ID: MRT4577_106128C.1.pep
MWAPTSPAIPTARPTAPLPTMEDIMASSRAQSMRVCLRTAGPFFRVTATRGEGGEAVELGRAQGGIRPWPGGAVLHLDSMRMTRATLSVPDRPLFGLGMFLGAVAVRHGFDAGCKRAELLAINDTPLYHDKLVRFYMRMGFKAVHEVDGSSISDLGHMLVWGGRGTRMDADIEELLIKWGNRFRLQD

SEQ ID NO: 191392 - protein, 85 aa, Zea mays
  unsure (1)..(85): unsure at all Xaa locations
  Clone ID: MRT4577_106129C.1.pep
MAAAIPTARPTAPLPTMEDIMASSRAQGMRVCLRTAGPFFRVTATRGEGGEAVELGRAQGGIRPWXGGAVLHLDSMRMTRATLSV

SEQ ID NO: 191393 - protein, 106 aa, Zea mays
  unsure (1)..(106): unsure at all Xaa locations
  Clone ID: MRT4577_10612C.1.pep
TGCCXRQRHAQAASSSAAGAPRTARPSSSSLLQHCANVDWVVPTGIGARTGHRSQARRDSAGICVSGQPSASARQGQVAFKRAVQSQAPQTCHLQCCRVLTHPLAV

SEQ ID NO: 191394 - protein, 63 aa, Zea mays
  Clone ID: MRT4577_106130C.1.pep
NFFRCCQLVRFYMRMGFKAVHEVDGSSISDLGHMLVWGGRGTRMDADIEELLIKWGNRFRLQD

SEQ ID NO: 191395 - protein, 134 aa, Zea mays
  unsure (1)..(134): unsure at all Xaa locations
  Clone ID: MRT4577_106132C.1.pep
ENVCYLAKVSIDHKRLYYDVALLVFYGVCDCDERGCDMAGYLCKEKDCEECCNLACILTVVRXQRSGYGTVVIXFXYEVWKKEGKVGRXESRVSDVGLVSYRGYWTRVVVEIVEKHKGNICINDTSAMEVIQGV

SEQ ID NO: 191396 - protein, 51 aa, Zea mays
  Clone ID: MRT4577_106133C.1.pep
KGNHLSNSQNGGNKGRCKRHCSSKVPKLRFYFYHCYWIMTWETWHTLKLER

SEQ ID NO: 191397 - protein, 397 aa, Zea mays
  unsure (1)..(397): unsure at all Xaa locations
  Clone ID: MRT4577_106134C.1.pep
MDGAPVAEFRPTMTHGGRFLLYNIFGNQFEITAKYQPPIMPIGRGAYGIVCSVMNFETREMVAIKKIANAFDNNMDAKRTLREIKLLRHLDHENIVGLRDVIPPAIPQSFNDVYIATELMDTDLHHIIRSNQELSEEHCQYFLYQLLRGLKYIHSANVIHRDLKPSNLLLNANCDLKICDFGLARPSSDSDMMTEYVVTRWYRAPELLLNSTDYSAAIDVWSVGCIFMELIDRRPLFPGRDHMHQMRLITEVIGTPTDDELGFTRNEDARKYMRHLPQFPRRPFASXFPRVQPLVLDLIERMLTFNPLQRITXTVTVRVHEWHHGRFRPRTSHRDLFCHAVAEALAHPYLERLHDVDDEPVCTEPFSFDFERQALTEDQMKQLIFNEAIELNPSFRY

SEQ ID NO: 191398 - protein, 125 aa, Zea mays
  Clone ID: MRT4577_106135C.1.pep
PTTLIKLVWGTNTKGGSRTRVVNLIRQMSKTKKKKIFLPPYEGPPPRALGRNPFWLLANAEIKGNRGPGPLIPCWFGQRWPFGVKLIGGRPEPNPLGLSPLGLGKNINHGGSILVGPKKKKKKGP

SEQ ID NO: 191399 - protein, 37 aa, Zea mays
  Clone ID: MRT4577_106136C.1.pep
GSCTFGHARAPLCLELGFFDALRPINSFKSPELCFRA

SEQ ID NO: 191400 - protein, 107 aa, Zea mays
  Clone ID: MRT4577_106137C.1.pep
MPTTTSARCTRLSLPQTTPVSTPGLKAEEFENNTRRPTVLSTEFPKPNEDVDVEAMLDRQPGRWTIKGQMEANQRRQQKTLSDEEAKAQRQRDFEKAKEELRASLRI

SEQ ID NO: 191401 - protein, 86 aa, Zea mays
  Clone ID: MRT4577_106138C.1.pep
NTIFYKPPLGASSPFTSAESAFIFRCKPPLGASSPFTFSGIRVDFSRFAFYLGGISVDFSLFALHSLWNDFGAENLHCAPFGTTFL

SEQ ID NO: 191402 - protein, 110 aa, Zea mays
  Clone ID: MRT4577_106139C.1.pep
MAARERDGEGRRAHLTMAGVQLVYAGYHVIAKQALNVGVNRVVFCVFRDLLALSVLAPLAFFQHRISSVQARPPPLTRRLVGSFFLLGLTGVFGNQLLFLLGLSYTNPTY

SEQ ID NO: 191403 - protein, 84 aa, Zea mays
  Clone ID: MRT4577_10613C.1.pep
TQHKMATVVMLMDFERDMGYRKNMKALCMAHDKVSMRTICYDEMNNTETVNGPLISQEGDDWLTVDTSWVMTDIHVACGSCYGS

SEQ ID NO: 191404 - protein, 108 aa, Zea mays
  Clone ID: MRT4577_106140C.1.pep
SISQASSIRAVNLDGVVVEDHPRVHLVDGGSRVYARAPPHHHAGSCSHLPAPAQVDAGHAARRVPSKEEREDRPAPPRGPGYFICRRPAHAESRQGYPRPPRACQCHS

SEQ ID NO: 191405 - protein, 48 aa, Zea mays
  Clone ID: MRT4577_106141C.1.pep
MGGMVIQRNVDQKLFRFNLKKKRIKNCFPFFFNFGNKGLILGLNWPYC

SEQ ID NO: 191406 - protein, 122 aa, Zea mays
  Clone ID: MRT4577_106142C.1.pep
QTLGFLFVVVTAIRGFTAISSHQKKVHILGLCFLHVGTVHSKRTQLTVFHIMLIGKMLRLRNADSCSLIVTPVLSTYTISVIHRHVHSTRRIKTRGSIRAQHLTSLPTVHPCACATFLLNCA

SEQ ID NO: 191407 - protein, 177 aa, Zea mays
  unsure (1)..(177): unsure at all Xaa locations
  Clone ID: MRT4577_106143C.1.pep
MAPSXPLLTVRGSEGLYMVNGPPHFTESTVLPRESGRNCKVYTFSKDGTLFAWSNGEKVNIINVANKGLLHSFDLPKAVCLEFSPNNTVLATWQPYTTSKDGTAGTPNLQLYDMKTGACLKSFIQKKMQNWCPSWSDDEIICARNVNNEVHFFENNNFNTIANKLHLQKVNDFNLSP

SEQ ID NO: 191408 - protein, 81 aa, Zea mays
  Clone ID: MRT4577_106144C.1.pep
IRPFPELRTNNGTCLLKVEDGHELHFFTNQPLFLLDRGQFPLGTKPIGGQGLRPLCSSQIEEKMPKKPWPGLGLSQLVKTL

SEQ ID NO: 191409 - protein, 109 aa, Zea mays
  Clone ID: MRT4577_106145C.1.pep
TNGGAGGCRKLVEEKAWRAYCNGKGCGYAVRRECGAADLRVLRALEPVSMGAGVIPAACGGGEGDVMYMRARFERVVGSRDSEAFYMMNPDSSTGGNGGPELSIYLLRV

SEQ ID NO: 191410 - protein, 882 aa, Zea mays
  unsure (1)..(882): unsure at all Xaa locations
  Clone ID: MRT4577_106146C.1.pep
MRAGGCTVQQALSPEAAVVVKQAVSLARRRGNAQVTPLHVASAMLQQQAPTGLLRAACLQSHSHPLQCKALELCFNVALNRLPASASPLLGGHGHVYYPPSLSNALVAAFKRAQAHQRRGSVDTQQQQQPPVLAVKIELEQLVISILDDPSVSRVMREAGFSSTHVKANVEQAVSSIXQTTTRPPPPQXNPNPSASPPEETTKPGKLLVLPLDQARDEDVAVVLDCLASRSKKRVMVVAECAASAEAPVRAAVERIKRGEALRGAQVVSVSVSRFRDLPRDEAERVLVELRCAVKAGGRAGGVVLVVEDLGWAAEFWAGRGESGRARWPSACCYYCAVEHAVAEVRALACRGGDGVWLVGYGTYQSYMRCRAGQPSLETLWGLQTLAVPAGSLAFSLNFVGDSATAMTINHQSISCKMAKCDDDRSGNGSAAPRCLSLLDAGGSGRLTGAVSSFCAADCSATKCDATVKSSIPPWLQHCRDHQEPSRCKKSSTCGGSPSHHHRTALNFSTVVSPSSSTVSSYEQHYHLRHQSYQPXFSWLTAPXEAEHPCNKARCSAAVQLHVVDDEDGKPLSAIKVKSHDSSASNGSVECRSRFKELSAENLKVLCSALEKEVPWQAEIVPEIASTVLQCRSGMARRREAAVSSSRPSSTQACAKEDTWMLFHGGDAEGKARVARELARLVFGSRKSFVSIGGSRTTASSPACWSDGSSEQQRKRPRLTEASNHGCRHESLYEAVRDNPHRVILVQDVEQGGCWRCQRDILEAIQSGLVRSRAGDDDAALGDAIVVLSCQSLDAWSTTTSPLTTKKAKAESKEEPEEEESAGDHRRKEAITAAAASPSSSLCFDLNMDVENHDTESCFTDASLLKAVDRTFFFRRPDESSD

SEQ ID NO: 191411 - protein, 238 aa, Zea mays
  Clone ID: MRT4577_106147C.1.pep
MEEGSKAQLPPPFHTEAMDQLPPVLMDQDEGREAAETMEEEEAAAADISDAADPMDDGEAAGDSAAAAEPMEDDAPTSSPTPSAPSATAAVDDSTIARKRRRRKKQFPGMIPTAGVRVLRGSSSSSSHTAAHLSGVPRRRGRPPTSSSLRLARELDSEALIALAAGFPADSLSEDEIVAAVLPRIGGAEQSNYLVVRNHIVALWRSNPLSPVAANAALASIRAEHAPLVAAAHSFLSE

SEQ ID NO: 191412 - protein, 55 aa, Zea mays
  unsure (1)..(55): unsure at all Xaa locations
  Clone ID: MRT4577_106148C.1.pep
NLLXSCTLFXXLVSLXISXRSSXKFGCHVLSRLALCKQEKHVFFGQPQVYLCTPE

SEQ ID NO: 191413 - protein, 53 aa, Zea mays
  Clone ID: MRT4577_106149C.1.pep
KQVVEALERGNRALAQQLEAHRSWWDADREQRAALLRAMDRVADAVCRIADKL

SEQ ID NO: 191414 - protein, 123 aa, Zea mays
  unsure (1)..(123): unsure at all Xaa locations
  Clone ID: MRT4577_10614C.1.pep
FSNGPWPGFWPXPPGPFIFGGPPPKLVXARPGSPPKPKXGGLXGFPPRPGPFLGGGGPPFGGPIPPXPKGLPGTPPFKXKREVGFQGPPGLGSPPPFLWGPGPFLPGFPFFPQKKWGIFGFGG

SEQ ID NO: 191415 - protein, 41 aa, Zea mays
  Clone ID: MRT4577_106150C.1.pep
VLESVLSKVLKYFPSYDLGKLAHGILYVITSKRNPSSRSCS

SEQ ID NO: 191416 - protein, 44 aa, Zea mays
  Clone ID: MRT4577_106151C.1.pep
YGYDIINLLETYSNFGGGLYRKTVVHNWLGRGDAHNVVGAALRC

SEQ ID NO: 191417 - protein, 131 aa, Zea mays
  unsure (1)..(131): unsure at all Xaa locations
  Clone ID: MRT4577_106152C.1.pep
PHRAVTPRLLEKLGFRVPSVASGVQSTRSFAPEPSFQVVVLGLPLQRTDGLKMARPIRKFSNKNWLPLIVALTARIDSKVPNGCPRSGINGLIQKPAPLTALGNXLYRVLQNRLKGPPMVFLAFKIFKKPL

SEQ ID NO: 191418 - protein, 35 aa, Zea mays
  Clone ID: MRT4577_106153C.1.pep
KKKKKKKKKKKKKKKKKKKKNKKKKKKKKEKKKKN

SEQ ID NO: 191419 - protein, 142 aa, Zea mays
  unsure (1)..(142): unsure at all Xaa locations
  Clone ID: MRT4577_106154C.1.pep
MAATALXSMSILRAPPPCFSSPLRLRAPVDKPVAAPMGRQVLGAQATYNAKLITPQEDEELQRPDHVYILDLLEDEXIHLPFSCRAMTCSSXCLGKVXSGSVDHSYQSFLNDNQXVHRWELTCDAYHTSDDTIYTHKEDDLL

SEQ ID NO: 191420 - protein, 72 aa, Zea mays
  Clone ID: MRT4577_106155C.1.pep
FVCCQGQGEKNMKRMRSFGSMQTPLGKKKKDGRKWPRVLLHMPMTQCPPRGGLGINHAGAVNARHRTAQPAP

SEQ ID NO: 191421 - protein, 123 aa, Zea mays
  unsure (1)..(123): unsure at all Xaa locations
  Clone ID: MRT4577_106156C.1.pep
GGAFFGWGLPHRGGGRSLSLERPPALQNFRRRVVLRLKMRFXGDDAPERRSSVTVIGIVRLPAMSNSLWADSEWRSLXLXWDEPSSILLPDRISPWEVEPLHASNPQSSQPALRAEASSDPQL

SEQ ID NO: 191422 - protein, 47 aa, Zea mays
  Clone ID: MRT4577_106157C.1.pep
IKKKNFLEKKKKKKKKKKKKKKKKKKKKKKKKKKKKKKKKKKKKKKK

SEQ ID NO: 191423 - protein, 86 aa, Zea mays
  Clone ID: MRT4577_106158C.1.pep
MAVAGLPCFPLSAAAAAPAVRLAARPNRQRPPRRWTGAAPSADRGEMGNDDGGGEALPPGRSVVVTTTKPAAAELSVKEDVRLSVF

SEQ ID NO: 191424 - protein, 64 aa, Zea mays
  unsure (1)..(64): unsure at all Xaa locations
  Clone ID: MRT4577_106159C.1.pep
LLVCFFPFHPQDPFFWYLSQTISVNIFSLTTVXFVYLVFILCYLWWTGGKVNXEQFDLNIPVWF

SEQ ID NO: 191425 - protein, 109 aa, Zea mays
  Clone ID: MRT4577_10615C.1.pep
VRRSSLAPSPPLELAPVELTCARRLRLQFPHGRLLSNLCAGVSFPWSPSTPWSTSPSPSPISSPSSARHGGWPQDAAHQPHQPYPLLFPTVRSPGVVVVIRHVWRKERF

SEQ ID NO: 191426 - protein, 97 aa, Zea mays
  Clone ID: MRT4577_106160C.1.pep
SSCRDLGGGGGGRPVLPSKDPSAARLQYRRTTSLHLPGKRIATTLMYQRNPCPALTTPRSTPTQSPPHVVESRVPRYACRTPSPPTLTQLKMNEITT

SEQ ID NO: 191427 - protein, 353 aa, Zea mays
  Clone ID: MRT4577_106161C.1.pep
MRSRVPLICSLSCPSVPFHSNSIPGKRKPRESGRRTYHEDRQPRAMAAGLSGAAMTGFVAKNPLLAAAARRRALPPLAGRALPFSPLTTARAPRRRGLGTVTCFVPQDTEHPAAAPAPVAPVPETALDEEARAAAARRVAERKARKRSERRTYLVAAVMSSLGVTSMAVAAVYYRFSWQMEGGAVPVSEMFGTFALSVGAAVGMEFWARWAHRALWHASLWHMHESHHRPREGPFELNDVFAIVNAVPAISLLAYGFFHRGLVPGLCFGAGLGITLFGMAYMFVHDGLVHRRFPVGPIANVPYFRRVAAAHKIHHMDKFEGVPYGLFLGPKELEEVGGLDELEKELARIGRTI

SEQ ID NO: 191428 - protein, 47 aa, Zea mays
  Clone ID: MRT4577_106162C.1.pep
LAPIINSVLLEFCIFHSGRSPQVILFYIRCGTSCINAIHLVVASSLL

SEQ ID NO: 191429 - protein, 49 aa, Zea mays
  Clone ID: MRT4577_106163C.1.pep
LGPSRPAEIHLMDKFEGVPYGLFLGPKELEEVGGLDELEKELARIGRTI

SEQ ID NO: 191430 - protein, 124 aa, Zea mays
  unsure (1)..(124): unsure at all Xaa locations
  Clone ID: MRT4577_106164C.1.pep
MLQRRSALLKLRLFHLQKGREGGRIHSTRVTVLRCPTLVGVATDPRTHPLAPLLLSPRGSGRFLVAHTEERERFGSMAAPRGLLALFAVAAAATAATGVGVDALGVNWGTMSARRLPXKVMARL

SEQ ID NO: 191431 - protein, 162 aa, Zea mays
  unsure (1)..(162): unsure at all Xaa locations
  Clone ID: MRT4577_106165C.1.pep
VHVSHHRPREGPGELNDVFAIVNAAPAISLLAYGFFHRGIVPGLCFGAXLASXHGLCLVSLVSWLVGXPPLSGPHVRPQGLGITLFGMAYMFVHDGLVHLRFPVGPIANVPYFRRVAAAHKIHHMDKFEGVPYGLFLGPKELEEVGGLDELEKELARIGRTI

SEQ ID NO: 191432 - protein, 198 aa, Zea mays
  unsure (1)..(198): unsure at all Xaa locations
  Clone ID: MRT4577_106166C.1.pep
VSGIPVEDCLVWDSRFLAPVPETALDDEARAAAARRIAERKARKRSERRTYLVAAVMSSLGVTSMAVAAVYYRFSWQMEGGAVPMSEMFGTFALSVGAAVGMEFWAXWAHQALCHASLWHMHESHHRPREGPFELNDVFAIVNVVPAISLLGDVAXQIHHMDKFEGVPYGLFLGPKELQEVGGLDELEKELARIGQTI

SEQ ID NO: 191433 - protein, 53 aa, Zea mays
  Clone ID: MRT4577_106167C.1.pep
SARRASSPHRSGRRTTRTWRGDRAQTRMGGRAPRTADGLYTWTGRVESTHIQE

SEQ ID NO: 191434 - protein, 141 aa, Zea mays
  unsure (1)..(141): unsure at all Xaa locations
  Clone ID: MRT4577_106168C.1.pep
MPASVASAPVNRTSAKSAASRPRKAASTAGAKNAANGASNGAVQHASPYTIMASRIANRVAEMAENMTFVERERASSQPQPQQQPVQRKPPRKLEMRLPNNGQSPTNITFSAPFLDNTLSKLLXLQNRMLTVSHDIAASED

SEQ ID NO: 191435 - protein, 54 aa, Zea mays
  Clone ID: MRT4577_106169C.1.pep
CTASCDMSSPACFSLKTGSSTLSRSAPMSLLASSTVSSGSPSSSPWRSLLDVDG

SEQ ID NO: 191436 - protein, 132 aa, Zea mays
  Clone ID: MRT4577_10616C.1.pep
QVLLSGDADSSNWLLGCKGYSVKSFYKMLKNSRIVVPVNFMWKTRLPQKIKVFLWLVRNNKILTKDNLVKRHWHGNTDCNFCGLLESIDHLFFHCPVARFIWRIIQVAFKLSSTPKNTADLFGPWIDKFHNS

SEQ ID NO: 191437 - protein, 263 aa, Zea mays
  Clone ID: MRT4577_106170C.1.pep
QVLVLAPPAATAARRAVPVRAAPEDEAVVAGDGGGGDAEAVAARAARKQSERRTYLVAAVMSSLGITSMAAAAVYYRFAWQMEGGGEIPVTEMVGTFALSVGAAVGMEFWARWAHRALWHASLWHMHQSHHRPRDGPFELNDVFAIVNAVPAMSLLAYGFFNRGLVPGLCFGAGLGITLFGMAYMFVHDGLVHRRFPVGPIENVPYFRRVAAAHQIHHMDKFQGVPYGLFLGPKELKEVGGTEELEKEIKKRIRRREALDAIQ

SEQ ID NO: 191438 - protein, 78 aa, Zea mays
  Clone ID: MRT4577_106171C.1.pep
AFLPFGGGPCKCVGDQFPLLEWTVALALFFGKFHVELKGSPPQVEMVTGAPIPPKNGLWSRLRKRTFRPHISFAVCPE

SEQ ID NO: 191439 - protein, 84 aa, Zea mays
  Clone ID: MRT4577_106172C.1.pep
RDHLISRLMIKETRATWLLQRYLLSYVFKVATSTEIEMASSARLGVHTGVTGGAYPTKVLPLVVQESMKNETVGWGEVLAEGNR

SEQ ID NO: 191440 - protein, 121 aa, Zea mays
  Clone ID: MRT4577_106173C.1.pep
PPLLFFSLDAPISILFIIPHYSFAFSPPQFSVYVFWFQWLTPPITCSILTRFAPILAVVTCLTRAQRSGSRRSERYGDVSLARELEAPRQEIHAWRLKSTRRPARARKEPHGTPRGLAEVS

SEQ ID NO: 191441 - protein, 54 aa, Zea mays
  Clone ID: MRT4577_106174C.1.pep
VNDSSSYLPVGYNTLHSLFSGGPSGNSVGACSRLLQTAHCSQWSTICAAASPTS

SEQ ID NO: 191442 - protein, 59 aa, Zea mays
  Clone ID: MRT4577_106175C.1.pep
RPRVRSNRTCNSIKTNKGPRIRLTSQIIRMEGTGFCSIVYCLKLYRAMFLNCFADCNFC

SEQ ID NO: 191443 - protein, 57 aa, Zea mays
  Clone ID: MRT4577_106176C.1.pep
TYATQAGGGKELIRSNKICLGNISKDLLFLGTNVIKNLGGGRKIKPALGRAVTVGEH

SEQ ID NO: 191444 - protein, 101 aa, Zea mays
  unsure (1)..(101): unsure at all Xaa locations
  Clone ID: MRT4577_106177C.1.pep
PPKGQGPWPVXSTRFILDFLKNSXSNPYVKGLDVDNLYVSPLPVNQAPKQRGRPFRGPGGINPYMSSPCPIXLILSKKEKPVKKKAVNLFPARKQLSFSAC

SEQ ID NO: 191445 - protein, 35 aa, Zea mays
  unsure (1)..(35): unsure at all Xaa locations
  Clone ID: MRT4577_106178C.1.pep
TFLLTSETKNEGHPDKLCDQVSDAXLDACLAHDPD

SEQ ID NO: 191446 - protein, 62 aa, Zea mays
  Clone ID: MRT4577_106179C.1.pep
GVDVGSGGVLVVSISTPGVLGSGHPSIHATMSLMKTREHMEEIVILGPTVREGVIVYGVAHF

SEQ ID NO: 191447 - protein, 89 aa, Zea mays
  unsure (1)..(89): unsure at all Xaa locations
  Clone ID: MRT4577_10617C.1.pep
RWKGISFSDLMNDTKRNRAKPVSSMPKRLEKGAKLTRCCXRHSTPRIEKLDDKLDQQKALSEQIVNDVTDARLKLENIGSGIKNITVLV

SEQ ID NO: 191448 - protein, 109 aa, Zea mays
  unsure (1)..(109): unsure at all Xaa locations
  Clone ID: MRT4577_106180C.1.pep
MSGRGKGGKGLGKGGAKRHRKVLRDNIQGITKPAIPKLAKKGRLKRLXSGLINKRTPGGLKIFLKTLFRNAVTXTKPPRRRTVTALNFVYLLKRQGRTFYGFGGKVALF

SEQ ID NO: 191449 - protein, 77 aa, Zea mays
  Clone ID: MRT4577_106181C.1.pep
ANGNFESAYHSKFDALTTNTTRILVQLLSLAFAEYHAASYVFIRFLGFLDDARNDDHLPSKSSTEHSISDAHGPRLF

SEQ ID NO: 191450 - protein, 73 aa, Zea mays
  Clone ID: MRT4577_106182C.1.pep
DGPLLYNHVRLMARDALSMIPLAINLCGHEHSQGLPWMDFLRERARLLSNEDLSPKNSISKEELTSPPQKKRL

SEQ ID NO: 191451 - protein, 57 aa, Zea mays
  Clone ID: MRT4577_106183C.1.pep
LLQATFWAAISEKERPSRCVKGTPLVSSPSDMSGSFPVNGQVFQVIYESHEHRSTRM

SEQ ID NO: 191452 - protein, 100 aa, Zea mays
  unsure (1)..(100): unsure at all Xaa locations
  Clone ID: MRT4577_106184C.1.pep
WGATGPLGESTPLNWAPAAAXLAGSHLNKVNRLVAQARQPVVKIEGSTLRVGQVAAVASAKDASGVSVKFDKEARPRFKASSEWILDCIAHGGYIYGVTT

SEQ ID NO: 191453 - protein, 93 aa, Zea mays
  Clone ID: MRT4577_106185C.1.pep
VAGAAPAVGDGAGTQGRCCGARIMLHSRRDADHGARAGNWHLLHAALLRILLAEAKAHCLRAHSCLYSTDGGRSELQTLPVMDLAYFLFATDN

SEQ ID NO: 191454 - protein, 150 aa, Zea mays
  Clone ID: MRT4577_106186C.1.pep
AKPSTRRRPAFRFRPAHRWLHGVAVARRPPTNVEDTTQRRAKRKGGGDQKQIQRTLLSDRPEHTHTLTHRTPVSLTQSITPARTQFTQAGRRTLSPWTTAPQRPAGGAATGTHLLDQRRGTRPARAPGPLFCTFTGVWAGDTLYRLASLE

SEQ ID NO: 191455 - protein, 86 aa, Zea mays
  Clone ID: MRT4577_106187C.1.pep
QGSCMERFLVVSFRQSFLVGFYPKFFMWGPLFFLIVFWGGLKGSKKKCAFLGSVKSFVIPLHKTALFFPPFFFWWNFVGNGELAVF

SEQ ID NO: 191456 - protein, 218 aa, Zea mays
  Clone ID: MRT4577_106188C.1.pep
MAIRRLFLFISMLLAMACSCAIASDPSLLQDFCVADKTSQVRVNGFACKDAKDVVAEDFFLSGLHKAGNTSNRQGSAVTAANVAQIPGLNTMGISMVRIDYAPKGLNPPHTHPRATEMLAVLEGSLYVGFVTSNPNNTLVSKVLSKGDVFVFPKGLVHFQYNYGTDSAAALAALSSQNPGVITVANTVFGSGPLISDDVLAKAFQVDQKAVNWIQAQF

SEQ ID NO: 191457 - protein, 56 aa, Zea mays
  Clone ID: MRT4577_106189C.1.pep
MPLRNPLLPLFLLPISALVLALPASCTADPVPVLFPVANVPATSLYTIPVRYRAST

SEQ ID NO: 191458 - protein, 135 aa, Zea mays
  unsure (1)..(135): unsure at all Xaa locations
  Clone ID: MRT4577_10618C.1.pep
RTLADRGILCLDDPSNDVGVLVVTXRDQYHVXEXTSCKYGRHLCKPVDLTSLYYINGADEANYXLNITGVHDYPWGDLPMLEVLXRSASAKGFVPLTAGGWIHDFTDANGRYYCSVDVASKYYTYRADKIINGRY

SEQ ID NO: 191459 - protein, 72 aa, Zea mays
  unsure (1)..(72): unsure at all Xaa locations
  Clone ID: MRT4577_106190C.1.pep
SKFYLXNIIQGKAVQSTGGQTPQSTGWSMYTLFLSFGGTEQTCLNDHSRNDKQYSFVNCHRLTRTCMYWYSR

SEQ ID NO: 191460 - protein, 548 aa, Zea mays
  Clone ID: MRT4577_106191C.1.pep
LALPEAPATLEYGAKAKCIIRAAHAATPRDKMSSEESSAMLNSRIVAMNQFIHKLQKENKLREKERNEARNVLELREEELAQLRAKLNLIERQGKATENEINSKVMEKTQTLRGELMKMEEAMYKQQQELCVLRQRLQEVEREKADSCQPGQQDVIGGRLLARLSEMPAGLDQSMAIDMSMDLDMGDQTSMQDVKVIKEDTCQQGQIWNHTTTAASACTGSLVQEDDVRLSGYPEKTVLSTVFEEGDEDYAEKKCGLQEEVRKEVVDENFKVDIAQHTLSEPDDPATRKHQIENMFRLCGNHREIAKKPKVQSPAKEMFCSENKSPAKQVFGDQNKSSSNQIFGDENKEPSAWGAIETPMCDVRVTDSPVSSQLSPIVCQVVDAPLSAQLNTCSAVEGSDPSKEKNSLAGQKDGGLLEVYIKWESGNLIKGLKLLHNSCLSDLRKFIEAHFEEAGSKQKHQFTFLLLGDPSGAPVSRDTEASVQISRLPHWNNQRESYLACRRAAKKPSADHVPFSPLDSNLNTVHLAGAVSPKVNQMSPSYIRELRA

SEQ ID NO: 191461 - protein, 100 aa, Zea mays
  Clone ID: MRT4577_106192C.1.pep
GTSPWWVYSLFVSCGRWVVLVILGSGAMCAVCGSSGNLLSLWVWVRLGFSWWVVLVHAVGNSLCSVGFPGRTSLISPPKKKKGRRPPVSWSTRQLIPARL

SEQ ID NO: 191462 - protein, 56 aa, Zea mays
  Clone ID: MRT4577_106193C.1.pep
CLLPTPYAQNVLFCAVGCCIMSSQAMFFTSSQRSSHLAKQGLGLIHASSSDYWIKI

SEQ ID NO: 191463 - protein, 79 aa, Zea mays
  Clone ID: MRT4577_106194C.1.pep
TGGLALKKTFLGCALFFHNSSEKIKHFVKPQTARVMGGLKKKKPLVGPHWEPTPPRKIHHPFFLHWFFGDLGFNPISSP

SEQ ID NO: 191464 - protein, 54 aa, Zea mays
  Clone ID: MRT4577_106195C.1.pep
VTNLVLRWREKFVWFKKKNLFFFIKKTERMGRYNFSFPFPHIFFLKKHWAPFPN

SEQ ID NO: 191465 - protein, 291 aa, Zea mays
  Clone ID: MRT4577_106196C.1.pep
DSELVERLQEVLRSSDLNTTTTAALRRRLEEDFGADLSHKKALIREQVDLFLAEVAAKAEPQEPKEEEEECEDENSSGARKKQRGNDGKKRGGGFTKLCSLSPALQEFVGASELARTEVVKKLWAYIRENNLQDQNNRRKILPDERLKKIFNVNSIDMFQMNKALTKHIWPLNSEGPVSPDRSTPKEKPQKRDRSEGKKQKGGSSGAGSGFLVPLQLSDDLVKFIGTGESMLSRSDVVKKMWDYIKGNNLQDPSDRRKIICDEKLKDLFGVETFTGFTVSKLLAPHFTKTK

SEQ ID NO: 191466 - protein, 328 aa, Zea mays
  unsure (1)..(328): unsure at all Xaa locations
  Clone ID: MRT4577_106197C.1.pep
MVSDLELVERLQEVLRSSDLNTTTTAALRRRLEEDFGADLSHKKAFIREQVDLFLAEVAAKAEPQEPKEEEPEEAPVXGGGARGARGGGXEGEGEDEEXEEEEEEEECEDENSSSARKKQRGNDGKKRGGGFTKLCSLSPALQEFVGASELARTEVVKKLWAYIRENNLQDQNNRRKILPDERLKKIFNVNSIDMFQMNKALTKHIWPLNSEGPVSPDRSTPKEKPQKRDRSEGKKQKGGSSGAGSGLLVPLQLSDDLVKFIGTGESMLSRSDVVKKMWDYIKENNLQDPSDRRKIICDEKLKDLFGVETFTGFTVSKLLAPHFTKTK

SEQ ID NO: 191467 - protein, 70 aa, Zea mays
  Clone ID: MRT4577_106198C.1.pep
TVHIVSTSWATVQCSVCLTARAPLVKSERRHGVSPFRVMQRCCFLLRTLYTACATVFSHPSHIMRPFSIV

SEQ ID NO: 191468 - protein, 94 aa, Zea mays
  unsure (1)..(94): unsure at all Xaa locations
  Clone ID: MRT4577_106199C.1.pep
TRRHTQARRSTTRRSSPRNRGHRRTRTAPTTTATRATRPPPPPPRAASRRQGRRXRRXRSRPXPPLPQLPRRPPRCRSRGRRSWARRCSWRPRP

SEQ ID NO: 191469 - protein, 65 aa, Zea mays
  Clone ID: MRT4577_10619C.1.pep
DFPAAQTLYNLCLWLLKSSNVQPSQCRLYHILCPWLEVVFIMNQATGMKVRLDRIIHQPSQADML

SEQ ID NO: 191470 - protein, 66 aa, Zea mays
  Clone ID: MRT4577_1061C.1.pep
FSGQACPLTFDSWSRRMAGVTPGNSRRRVLLILRQSQHIVKCSCPFNWRKPCLFGLFPASGHQKLL

SEQ ID NO: 191471 - protein, 174 aa, Zea mays
  unsure (1)..(174): unsure at all Xaa locations
  Clone ID: MRT4577_106200C.1.pep
RFVLGKVSLRYIPVSFMQTFKXFTPATQIFCSXLLWSKHXKWRIXTGLEHIVGGILLTSATELSLQHFNYXCAAMVGXLTTFTKTILVXSLLHGYKFDRINTVYYMXPFATIILPLPETVLERGGLMNWFYTHDSIVTALTIILXGGXLASRLNYCMYYVIHSTTPVTFNVARN

SEQ ID NO: 191472 - protein, 241 aa, Zea mays
  unsure (1)..(241): unsure at all Xaa locations
  Clone ID: MRT4577_106201C.1.pep
MAVTFSDLHTADGLKALEAHLAGKTYISGDGITKDDVKVFAAVPVKPSAEFPNAARWYDTVAAAVASRFPGQSSGVSASSAPAAAAPAASKDEDDDDDMDLFGDETEEDKKAAAEREAAKPAKKKESGKSSVLMDIKPWDDETDMKKLEEAVRSVQMEGLTWGASKLMPVGYGIKKLQIMLTIIDDLVSVDTPXIEEVLCEAPINEYVQSCDIVAFNRSRIFRPPVAAGFLVLGLVDLEKL

SEQ ID NO: 191473 - protein, 92 aa, Zea mays
  unsure (1)..(92): unsure at all Xaa locations
  Clone ID: MRT4577_106202C.1.pep
VLLXXXXDEALAXLLGGATAAQRRCAPTADPDPLPPMTAHNAYSAFSKEAPFLLRGXVGGGGXPGSLLLPXASPLPPARCLLRLAPCSGAPA

SEQ ID NO: 191474 - protein, 69 aa, Zea mays
  Clone ID: MRT4577_106203C.1.pep
NSWRIGSSCSFARGYGCAARMDGNLYFIGGVNDAGETLGTVEVYNERQGWSISGCKSVGKRAFACAITV

SEQ ID NO: 191475 - protein, 96 aa, Zea mays
  unsure (1)..(96): unsure at all Xaa locations
  Clone ID: MRT4577_106204C.1.pep
MTTTILALLALLALAANATNAPIISQGSLATIAHILQPLTPVTSMHSEHPAXQVYILLVAIAVSRPQEPMAQLXQQHLSHLNLQTIETQQLLHSLT

SEQ ID NO: 191476 - protein, 289 aa, Zea mays
  Clone ID: MRT4577_106205C.1.pep
WPCSRNVLAVCTIVCTGRTYVQAECNNTVLCVLLNGSLSDPAVATGISDLMYESKEVHKETNTVQSGIDPDLAMAWAAGLEDDVWANNAPAVDKVKDFLAGAGTDAPDVDDEEYMNSRPSVGYDDMWAKTILETYDAEEDDGRYSGGSSPESTGSVETSISSHFGGMNYPSLFSSKPSSHGASQQTIREEPPSYSTSVLQRKESFENPLGGGGGRSFGSHEDEDKSSGNPQSGKALYDFTAGGDDELSLNSGEEVEIEYEVDGWYYVKKRRPGRDGKMAGLVPVLYVSS

SEQ ID NO: 191477 - protein, 136 aa, Zea mays
  Clone ID: MRT4577_106206C.1.pep
MGGGHDMHGQHYGHNGGVKGFVSNLVHGGGGHGHGSGYGHGHGNGYGHGNGGYGGGHGYPPPAAGAYPHPHGGHGYPPPATYPAHSAHYGHTGSYHTSHNSYGGGGGHHGIYGGGKHGAFGGGKHKSGGGKFNKWK

SEQ ID NO: 191478 - protein, 144 aa, Zea mays
  Clone ID: MRT4577_106207C.1.pep
MGGGHDMHGQHYGHNGGVKGFVSNLVHGGGGHGHGSGYGHGHGNGYGHGNGGYGGGHGYPPPAAAGAYPHPHGAYPHPHGGHGYPPPATYPAHSAHYGHTGSYHTSHNSYGGGGGHHSIYGGGKHGAFGGGKRKSGGGKFSKWK

SEQ ID NO: 191479 - protein, 139 aa, Zea mays
  Clone ID: MRT4577_106208C.1.pep
MGGGHDMHGQHYGHNGGVKGFVSNLVHGGGGHGHGSGYGHGHGNGYGHGNGGYGGGHGYPPPAAGGAYPHPHGAYPPATYPAHSAHYGHTGSYHTSHNSYGGGGGHHGIYGGGGKHKRGGGMFGGGNRKSGGGKFNKWK

SEQ ID NO: 191480 - protein, 85 aa, Zea mays
  Clone ID: MRT4577_106209C.1.pep
RAGSLVAPPGSTAQRVVEDSLFPRDKRSMGGAGGYGGFKAKLGGQGAPELQAQPGADHTLIQGRPGIGETLCRIRKGTPGPAPEG

SEQ ID NO: 191481 - protein, 189 aa, Zea mays
  Clone ID: MRT4577_10620C.1.pep
VSSEFGSAKTVAVALAGSLLGHDEAAAFPAGCGETTCYLRLNRYPACPFAANTFGLVPHTDSDFLTVLSQDQVGGLQLMTDAGWVAVKPRPDALIVNIGDLFQAWSNNLYKSVEHKVVANATAERFSAAYFLCPSYDSLVGTCGEPSPYRDFTFGEYRRKVQEDVKRTGRKIGLPNFLKHRPPPQSRPA

SEQ ID NO: 191482 - protein, 68 aa, Zea mays
  Clone ID: MRT4577_106210C.1.pep
MASHPMGLLSTRFPVKVVHVPAPTDFHDLREMMSKRPFFADTLELLEMLCYRRDRVLDLVPVAVQAPK

SEQ ID NO: 191483 - protein, 134 aa, Zea mays
  unsure (1)..(134): unsure at all Xaa locations
  Clone ID: MRT4577_106211C.1.pep
FSFPQNKRAPGEIFPPNPPQGGEKRTFTTNFTGHPPRGDEKNKKRFLGQEQQAGDGNPGGNGXNHTGGPPWGXKPGGPIWAGRAPPSPGGGAPFGRKKAHPGGRPPGKSPPGSSKNFGATGGGGQPGSAPGGGF

SEQ ID NO: 191484 - protein, 592 aa, Zea mays
  Clone ID: MRT4577_106212C.1.pep
MGPPFLAVAVIVAFLAAAAQAADPFAFFDWDVSYITASPLGVPQQVIAVNKQFPGPIMNVTTNYNVVVNVLNSLDEPLLITWDGIQQRKNCWQDGVLGTTCPIPPGWNWTYNFQVKDQIGSFFYFPPLGMQRAAGGFGGITVNNRAVISVPFDTPDGDITLFIGDWYKMNHTHLRKMLDDGKELGMPDGVLMNGKGPYRYNDSLVPDGIEHETIKVEPGKTYRFRAHNVGVSTSLNLRIQNHNMALVETEGSYTMKQNFTNLDIHVGQSYSFLVTMDQNASSDYYIVASARFVNESLWTRVTGVAILQYSNSKGKASGPLPDPPNDEYDKTFSMNQARSIRMNVSTGAARPNPQGSFHYGSINVSQVYKLRNEPPVIINGKKRTTLSGISYSPPDTPLRLADLYDKKDVYTLDFPTMPIDGPPVIRTSVINSTYKNFLEIVFQNNDSTVQTYHIDGYAFWVVGMDYGEWTENSRGTYNKWDGVSRCTTQVFPGAWTAVMLSLDSPGFWNVRTENLDTWYLGQETYIRVVDPNGGYNVTEMVAPDNMLYCGLLKDKQKAQKPHGSRSSASAAKLNYHVLAALVSLVVALVLGH

SEQ ID NO: 191485 - protein, 47 aa, Zea mays
  Clone ID: MRT4577_106213C.1.pep
LRVLNIYILHHKHPAHHPTRGLVPFLCSSAAYTTTRLQWFRVPTLPR

SEQ ID NO: 191486 - protein, 98 aa, Zea mays
  Clone ID: MRT4577_106214C.1.pep
LNFLGPLSLPRGAPGKTLGVTPFNHLANPPPFATPCLTEQAPFPPPSQSLVTLVAHLDPPLERPLTRGVGGVCRGGTPKPYRSLAPLPCPLFLSFFPR

SEQ ID NO: 191487 - protein, 149 aa, Zea mays
  unsure (1)..(149): unsure at all Xaa locations
  Clone ID: MRT4577_106215C.1.pep
HINIVVIGHVDSGKSTTTGHLIYKCGGIDKRTIEKFEKEAAEMGKGSFKYAWVLDKLKAERERGITIDISLWKFETSKYYVTIIDAPRHRDFIKNMITGTSXADCAVLIVAAGVGEFEAGISKNGQTREHALLXYTLGVKQLIVGVNKM

SEQ ID NO: 191488 - protein, 295 aa, Zea mays
  Clone ID: MRT4577_106216C.1.pep
MVCCAEPRSISDPSSLLQRVLNPPDPDAIEEALESLVQIHALEKTASGRYEPTFYGCLLNSLPLSFDSSVLALKFCELGAIHEGILISIMLDIQPLPILHTFGYRELCQKYIDNYFKGNGSVQIGKKEATTIGNLCAFQFWERVFKDKHRLEYLKYVAKTQEPEESHTFLTKPEEEWCAVHNLLPAAFKNISEIYDVVVMQLHRFRPSFLVKINPPKFLQPSEFNHTCLHREILDLEEDVDSLSLETENAHSDSQKRCAATPYVSPTDFETSTIVEMLKTLVKMKTQHAENKISY

SEQ ID NO: 191489 - protein, 141 aa, Zea mays
  Clone ID: MRT4577_106217C.1.pep
RGRPGAGVDLTFAIESNMMAFVDDLLMEHFSDLLRFVRSHVSEDLVSYTENTNIADVEPVVKNFAMKWRIALELMHNEVITSCTNLLSGMAILKAAMTQLLNDYNRLSECVKKITGGSTLNRHMVSITSISYEIRKYSRTL

SEQ ID NO: 191490 - protein, 60 aa, Zea mays
  Clone ID: MRT4577_106218C.1.pep
KEQHMLAATTEPLTARGQAWPRSPGPGAPPACPCAGMPPATTRWAAFILGARPAARTGGS

SEQ ID NO: 191491 - protein, 46 aa, Zea mays
  unsure (1)..(46): unsure at all Xaa locations
  Clone ID: MRT4577_106219C.1.pep
SCGYAXXTXXKVVPQXYXSXSVGVETLVAXCNTASINQLXXXNXXR

SEQ ID NO: 191492 - protein, 82 aa, Zea mays
  Clone ID: MRT4577_10621C.1.pep
SVCLLCAGADIVVDNCAICRNHIMDLCIECQANQASATSEECTVAWGVCNHAFHFHCISRWLKTRQVCPLDNSEWEFQKYGH

SEQ ID NO: 191493 - protein, 88 aa, Zea mays
  Clone ID: MRT4577_106220C.1.pep
DGLFTPALLYDRAVWLSGNASARQDSAVMQRTNSDRSSESRSDPSTNGLYNLSSERQASNSDLLERRSVFLERRRRIRSQVRALQRLG

SEQ ID NO: 191494 - protein, 27 aa, Zea mays
  Clone ID: MRT4577_106221C.1.pep
NLRCLLCCMAINLNYPQLMRSFVPTIG

SEQ ID NO: 191495 - protein, 99 aa, Zea mays
  Clone ID: MRT4577_106222C.1.pep
RTERRRLEGRSLRAAIQGSRLLLSHTLRLIFRLFIYPFTIHSFFSFSFVFFSFFILFNYVLLVFYLFYSSFFFFIFFFFFFYLSFFLFLFSLYFLFVIF

SEQ ID NO: 191496 - protein, 147 aa, Zea mays
  unsure (1)..(147): unsure at all Xaa locations
  Clone ID: MRT4577_106223C.1.pep
PGSPPPGCVSPGLPFLPVCGPPSGAFLPGPSVAPRVAVPPVSGWPXXPLPPLPAXPCCRGPPCPSFRCSPPPSCXPFFAAPPXFPPPCGXASSRRPPPSXPGPSRASSRSXPRRXSAXCRSPGPLXXSPAAALRRSVAAXPPPSLGS

SEQ ID NO: 191497 - protein, 107 aa, Zea mays
  Clone ID: MRT4577_106224C.1.pep
GVGRFVFSPKTPKNIFLFYNNPRGAQKDNPNATTDAHKKGGHPPPGLGPGANHTNDRRRKAFSRGRLKKTTGDTLSWRICLLGLGGGFCDGPGESLCFWAQMIFFPV

SEQ ID NO: 191498 - protein, 122 aa, Zea mays
  Clone ID: MRT4577_106225C.1.pep
MKHSHCLFLLFLVSILVASSAVTVSPNKAAAREKAWKARAPVQLADEAFLARLCDDREQQRRRGRPPRILPLCTQLHARRQAGAHQYQHLPMPPPSRNDEQIDPRYGVFKRLVPSGPNRLHN

SEQ ID NO: 191499 - protein, 65 aa, Zea mays
  Clone ID: MRT4577_106226C.1.pep
LRRKLKEGAPTGAKQRTRGSYRKFRTGSRRRASNSYSETNNTQNCKTIRLLSILVSHYYYYKQSL

SEQ ID NO: 191500 - protein, 54 aa, Zea mays
  Clone ID: MRT4577_106227C.1.pep
SSHFLFPVALIPRGVKQCFGLNIYFGVCPPDVFSLGVVSPVDRPVSVLDPRMAS

SEQ ID NO: 191501 - protein, 60 aa, Zea mays
  Clone ID: MRT4577_106228C.1.pep
RVRNKCDHPFNLRCKAHEKRSLALNKKFIPKLCMTRCQLPSNVDLYHQLISRSRYEDYLN

SEQ ID NO: 191502 - protein, 89 aa, Zea mays
  Clone ID: MRT4577_106229C.1.pep
DEFTNQTPLSPTFHRVATPALHDDQGFQKFFWVATGNARSGEDVKNIAPLLTNRGSSVDFVRWRMFHFLLSAQSKDCCGWTSPDDRKHD

SEQ ID NO: 191503 - protein, 122 aa, Zea mays
  Clone ID: MRT4577_10622C.1.pep
MSQGKGGASRKEEVVTREYTINLHKRLHGCTFKKKAPNAIKEIRKFAQKAMGTTDVRIDVKLNKHIWSSGIRSVPRRVRVRIARKRNDEEDAKEELYSLVTVAEIPAEGLKGLGTKVVDETD

SEQ ID NO: 191504 - protein, 119 aa, Zea mays
  unsure (1)..(119): unsure at all Xaa locations
  Clone ID: MRT4577_106230C.1.pep
PDGKGFIVGTIAGTCRFYDQSGESIQLEKELFVQGKKKSAACRINSLKLCAIGSNRVIITSGDSKIRVANGDTIQKFEGPWKSKALSLPSLTSXDKRYLILAGLDSNVYIWDLAISRDV

SEQ ID NO: 191505 - protein, 204 aa, Zea mays
  Clone ID: MRT4577_106231C.1.pep
SSIPIQQLQLTTSSILPSTTRFHPSTHSTSTFHSRLLPRTHPLFPHLTLPTMQVYALFAVLSYLSTSYAAPLLIGIPGIAQIDVKLSTLPKGVQPQDITLPSISIPNIDLAALPTGTAGVAAAQSAISAALADGKAAVASLAGQLGVAIPSDVVSVSINTDLLTGTATGALPVPTGLPVDPAALLQKVGELVGGLQRPAKASDA

SEQ ID NO: 191506 - protein, 70 aa, Zea mays
  unsure (1)..(70): unsure at all Xaa locations
  Clone ID: MRT4577_106232C.1.pep
GPLIMNELEQLXNQIEVWGGHIRGGRNHMLLYQLFYLKSKEQELHDLNTDLRVMLHETSPHIVIHDDSWE

SEQ ID NO: 191507 - protein, 113 aa, Zea mays
  unsure (1)..(113): unsure at all Xaa locations
  Clone ID: MRT4577_106233C.1.pep
STRRSRRPDRRTTGKEGGKNGNNKXXXKQKKKKKKKKNKKKEKKKKRKKRGAADKGERNRKQTKDRATGKRGAQQRGATRTAETRAKAGPGGKRQPPHKPTQQTTQKQKEKTP

SEQ ID NO: 191508 - protein, 74 aa, Zea mays
  Clone ID: MRT4577_106234C.1.pep
MHRAGLAAGVHSGLTYGLAGVRGTHDWRNSAVAGAITGAAVALTSEHASHEQVVQCAITGAALSTAANVLSGIF

SEQ ID NO: 191509 - protein, 83 aa, Zea mays
  Clone ID: MRT4577_106235C.1.pep
HYFYSGNAMAWIIAIHKVVIYVHSLGNFFMNYLGFQKAFEATILEQVFIFKLHVIGFHISIGKTGLLSPRGYKTMAFSDVLAS

SEQ ID NO: 191510 - protein, 538 aa, Zea mays
  Clone ID: MRT4577_106236C.1.pep
MALAIVAPGNENKMPTSQDLFALDKTGWELALVTAPSNHTNQQVDNQLAGGFDKLLLDSLYEDEARRQQIASVTYTGSTAANPFDHSDPSCKTPRRLGRPGPSKLLATTVSTLLPRATMRAPLLSSLLVLAVVATVPLLVPAVCISRHDKSESKADEEAAATTVAADEHGSVKTMSLDAYGPLEMAAKKPKEQVLNAQATPATTAGADTYDQKPVGEKQAETATASAADEQPDKYVEALVPDEKAEEFPDKYVEALVPDDKVEVKKKKVKKEKKDESDDSDVATSYKKKEKSDDSEVSTSYKKKKKSDDSDEDASLDKKEKKAKFAASDKKEKRTSLTTHLPRKKRRRDPPIPMHLRISTRKSRNPAILTPPRLLRSKRSRRRRNPVIISTRKRRRTPRRTLRPSTSPRTACMCLPRRRNPAKTPRRSTSPPPPANTYLLLPRQTASPREVSPQRAPPPPPPPRMRTRLQSRKSSAASPWPAPLLTSFRWRPRAPPPPTRTHLQGSSRSPAASPCLVALPTSFHRWPRPLPRPNRTHL

SEQ ID NO: 191511 - protein, 84 aa, Zea mays
  Clone ID: MRT4577_106237C.1.pep
PAAALTTAPYPGQAPASSSYSPSPCFALSGYHHGVSSVSRQRLPKPTADSGTKTRTSPARTLRTGRPILIPSSRGVSDPGRARP

SEQ ID NO: 191512 - protein, 77 aa, Zea mays
  Clone ID: MRT4577_106238C.1.pep
GQPLPPYSWCPGILCRRRAPGRGMGMEVVGAESTPAEVKISNGELNLLQEKESTATAKEREEASVYGSETTANATDL

SEQ ID NO: 191513 - protein, 76 aa, Zea mays
  Clone ID: MRT4577_106239C.1.pep
PGWWFSNKPGVLLTMCYSTWMPRGPSQQRLMLTTTKSYAPWRANHLAQLSRRRRPLRQRNKNFRIPICFIYHRITT

SEQ ID NO: 191514 - protein, 152 aa, Zea mays
  unsure (1)..(152): unsure at all Xaa locations
  Clone ID: MRT4577_10623C.1.pep
PAADRARQPKAGALGGQASPPRPETXKKQGANTXGGPQAREXPSTDPAQAXKKPGGTXXAKGXRAQXGRKKERRGKXDPEEKRKRAEXKXPXKKTTAKRSXRXPEGDEEXKXGGTEPESQXREGKGXDGEQXGKXEKKGRNRXPRKDXPPEE

SEQ ID NO: 191515 - protein, 86 aa, Zea mays
  Clone ID: MRT4577_106240C.1.pep
PKKGSLGPFAPIAMGFLVGANFLVGGAFGGGSMNPPVSLGPPLVSWGWGSQWVFWVGPLMGGGLPGVFYELFFFSPPPGRLPPPVF

SEQ ID NO: 191516 - protein, 99 aa, Zea mays
  unsure (1)..(99): unsure at all Xaa locations
  Clone ID: MRT4577_106241C.1.pep
SLAVXGHPAXXRFLAXSKPWQXVPCTDXXASITWVSRXVAAVVPGRVARXPDDTTPSAPALXTVVVKEDXXTGVXXPDPPYRDARXRRGVDPEEFPEPV

SEQ ID NO: 191517 - protein, 141 aa, Zea mays
  Clone ID: MRT4577_106242C.1.pep
DQEMNRGLGHGEEENMEEGTDVHLCDINGKEVDETLLENSVCTDTEEGCAHCNQEDQNSSDSTNRGKSDVDNMCYTSCDEVRSESFSGDEVVIKTTIDSTARTFVNLKDEQVLSSEMYTRMQHSMQKDGTAAFQTSGGVPG

SEQ ID NO: 191518 - protein, 67 aa, Zea mays
  Clone ID: MRT4577_106243C.1.pep
PARLYKIFTILPIRLLTDSRRDSSEISLEEGGQPHHRRREEELRSLSAFLGAVRGRGRGETLAAYEL

SEQ ID NO: 191519 - protein, 57 aa, Zea mays
  Clone ID: MRT4577_106244C.1.pep
FSDMQMVSSKVKGPNTRRIAGFVNRNNKGEVVSIVCVGHASFVTPAEFVKHAVGGDV

SEQ ID NO: 191520 - protein, 137 aa, Zea mays
  unsure (1)..(137): unsure at all Xaa locations
  Clone ID: MRT4577_106245C.1.pep
FLLLRPSALLSGVARGSHPRSAAGRCGAXAMSPEMRATLDKVVGSSKVVLFMKGTKDFPQWGFSHTVVQILRSLDVPFKTLDVLANEALRQGLKEYSSWPTFPQLYIDGEFFGGCDITVEAYKSGELQETLEKAMCS

SEQ ID NO: 191521 - protein, 137 aa, Zea mays
  unsure (1)..(137): unsure at all Xaa locations
  Clone ID: MRT4577_106246C.1.pep
FLLLRPSALLSGVARGFHPRSAAGRCGAXAMSPEMRATLDKVVGSSKVVLFMKGTKDFPQCGFSHTVVQILRSLDVPFETLDVLANEALRQGLKEYSSWPTFPQLYIDGEFFGGCDITVEAYKSGELQETLEKAMCS

SEQ ID NO: 191522 - protein, 82 aa, Zea mays
  Clone ID: MRT4577_106247C.1.pep
CPGRHYDRCGDRPHGGLCSTPMGSCRARFSCVISAWARCAMSRWVRSSAAVLELFVRWNAMAALVVRAQLMGHTAPCYMCSQ

SEQ ID NO: 191523 - protein, 100 aa, Zea mays
  Clone ID: MRT4577_106248C.1.pep
GHTWRTRLSLLTYHDSTTCATHSLESTTRASAEHMAALDLLAVLYTVVFLLCSLDGTTSYVGANADYYWYIFNIIGWAIYTIIFKAIDYVLIKKKGYDRR

SEQ ID NO: 191524 - protein, 62 aa, Zea mays
  Clone ID: MRT4577_106249C.1.pep
KTIMDIVFAQWSMRRVLKNLLKKKKGPISDLKKPPHSYIFKGSSSGCYKKSDPTAFKNFFNG

SEQ ID NO: 191525 - protein, 84 aa, Zea mays
  unsure (1)..(84): unsure at all Xaa locations
  Clone ID: MRT4577_10624C.1.pep
QKKKKKTAXTAQPGGKHHTTNPTHPPHNVSPKLTLPDIAVVFLSXXHRPPQVASIQRQHHSHTTDNSTDHGSSVTSFPPPFFHL

SEQ ID NO: 191526 - protein, 160 aa, Zea mays
  Clone ID: MRT4577_106250C.1.pep
VRIFSFFFGKKKKKKKRAAPLFFFFFFFFETKTFFLAPTTPNKTLKTTPSATLTGPPKITLVRLYKQWHLQPTRILFSSKKQEKGPPSHNSQVKIMMSAQQGIHVHFILPMGAGGFSLLPGLLYGPCLGHPGNISFPMEKLADPNSFVNAPQCSILDKEK

SEQ ID NO: 191527 - protein, 541 aa, Zea mays
  unsure (1)..(541): unsure at all Xaa locations
  Clone ID: MRT4577_106251C.1.pep
EQAVNCKDDLAQFYLMDCIIQVLPDEYHLQTLETLLNAFPQLQPXVVIVGLSNYAASSPELLPEFLQVEAFAKFSNAIGKVIEAQPDMPVVGAITLYVSLLTFTLRVHPDRLDYVDQVLGACVKKLSGKAKLEDSRATKQIVALLSAPLEKYSNIVTALELSNYPRVMDYLDNATTKVMAVVIIQSIMKNTTCISTSDKIEALFDLIKGLIKDMDGAQDDELDEEDFKEEQNSVARLIHMLHNDEPEEMLKILCTVQKHILQGGPKRLTFTVPSLVFSALKLVRRLQGQDGDVTGEDVPATPKKIFQILHQTIDALSCVPSPELALRLYLHCAEAANDCDLEPVAYEFFTQAFILYEEEITDSKAQITAIHLIIGTLQRMNIFGVENRDTLTHKTTGYSAKLLKKPDQCRAVYACSHLFWTDDQDGIMDGERVLLCLKRALRIANAAQQMASATRGSSGSVTLFIEILNKYLYFFEKGIPQITNTVIQDLIELIRTEKQSDNSVADPSTEAFFSSTLRYIEFQKQKGGSIGEKYEQIKTSS

SEQ ID NO: 191528 - protein, 317 aa, Zea mays
  Clone ID: MRT4577_106252C.1.pep
MASASAAVRMLPDGGADDEERWLAEGIAGVQQNAFYMHRALDSNNLKDALKYSAQMLSELRTSRLSPHKYYELYMRAFDEMKKLEMFFREETRRGSCSVVDMYELVQHAETINDAVEFVLQNFIEMNKLWVRMQHLGPAREKEKRGKERNELRDLVGKNLHVLSQIEGVDLDMYKETVLPRILEQVVNCKDDLAQFYLMDCIIQVFPDEYHLQTLETLLNAFPQLQPSVDIKTVLSQLMDRLSNYAASSPEVLPEFLQVEAFAKFSNAIGKVIEAQPDMPVVGAVTLYVSLLTFTLRVHTDRLDYDDQVLCACVKKL

SEQ ID NO: 191529 - protein, 66 aa, Zea mays
  Clone ID: MRT4577_106253C.1.pep
MPPHGPEEDAADAHLFAGVRFALHGFDQISASQFRLEIERCGGVHAGGWDADCTHVIVSNTLYDDP

SEQ ID NO: 191530 - protein, 86 aa, Zea mays
  unsure (1)..(86): unsure at all Xaa locations
  Clone ID: MRT4577_106254C.1.pep
PGLNRAQRLPWRARRXALLQSTYLIICRRRCAVSVTCTRRIGGVTYHHVMTQGWRSRSHERGEDEKRRQTHQGHKQARQLALPLPE

SEQ ID NO: 191531 - protein, 219 aa, Zea mays
  Clone ID: MRT4577_106255C.1.pep
KKKKKKKKKKKKKKKKKKKKKGFLQVEAFAKFSNAIGKVIEAQPDMPVVGAITLYVSLLTFTLRVHPDRLDYVDQVLGACVKKLSGKAKLEDSRATKQIVALLRAPLEKYSNIVTALELSNYPRVMDYLDNATTKVMAVVIIQSIMKNTTCISTSDKIEALFDLIKGLIKDMDGAQDDELDEEDFKEEQNSVARLIHMLHNDDPEEMLKILCTVQKHIL

SEQ ID NO: 191532 - protein, 518 aa, Zea mays
  unsure (1)..(518): unsure at all Xaa locations
  Clone ID: MRT4577_106256C.1.pep
MAAASTSVRVLPDGGADDEERWLAEGIAGVQQNAFYMHRALDSNNLKDALKYSAQMLSELRTSRLSPHKYYELYMRAFDEMKKLEMFFREETRRGSCSVVDLYELVQHAGNVLPRLYLLCTVGSVYIKSKEAPAKDVLKDLVEMCRGIQHPLRGLFLRSYLSQISRDKLPDIGSEYEGDVENINDAVEFVLQNFIEMNKLWVRMQHQGPAREKEKRGKERNELRDLVGKNLHVLSQIDGVDLDMYKETVLPRILEQVVNCKDDLAQFYLMDCIIQVFPDEYHLQTLETLLSAFPQLQPSVDIKTXVLSQLMDRLSNYAASSPEVLPEFLQVEAFAKFSNAIGKVIEAQPDMPVVGAVTLYVSLLTFTLRVHPDRLDYVDQVLGACVKKLSGKAKLEDSRATKQIVALLSAPLEKYSNIVTALELSNYPRVMDYLDNATTKVMAVVIIQSIMKNTTCISTSDKIEALFDLIKGLIKDMDXAQDDELDEEDXKEEQNSVARLIHMLHNDEPEEMLKILCT

SEQ ID NO: 191533 - protein, 138 aa, Zea mays
  Clone ID: MRT4577_106257C.1.pep
MRMLFRCLVGWSEPAAPAESGDEQQQQQARRLGKKKAVRRMRSATARLRSLLLGELSRTLASSGLHAFTQAELRAATRGVSGSQLIGEGGFGPVYRGFLDERLRPGELEPQHVAVKFLDADAQQGHRECLAAVLYLQM

SEQ ID NO: 191534 - protein, 113 aa, Zea mays
  Clone ID: MRT4577_106258C.1.pep
HASADAWVLTLIVYSTALLLMTGVTLTGAGAALVFPGPITLLTTTIWLPYATPISAIRASTLLTCASCGRATACSHLYRPLLYGPSPRAPGPVETTHAGGSADTARALKDYAR

SEQ ID NO: 191535 - protein, 127 aa, Zea mays
  Clone ID: MRT4577_106259C.1.pep
PRLFLGRGGVYGVPPRFNEKPPVRGGPFPCGAPGAPLCVPMGFPFPIPPGGGVLTPFFWVGGPCLVPKIFPPPQNICLPVGKPGSPPLFSSYPLGPFFNSPGTGVGQELLAPGRKKPPRAGAFFFFF

SEQ ID NO: 191536 - protein, 122 aa, Zea mays
  Clone ID: MRT4577_10625C.1.pep
MSQGKGGASRKEEVVTREYTINLHKRLHGCTFKKKAPNAIKEIRKFAQKAMGTTDIRIDVKLNKHIWSSGIRSVPRRVRVRIARKRNDEEDAKEELYSLVTVAEIPAEGLKGLGTKVVDETD

SEQ ID NO: 191537 - protein, 112 aa, Zea mays
  Clone ID: MRT4577_106260C.1.pep
RTLLVFVGTGTADNRIQEVPALKVTALTFTETSQAKIVNAGGECLTFDQLALHAPLGKNTDLLTGPKNAREAAMHFGNATGVPHSHTKPYVRSKGRKFHKARGRMNSTGFNV

SEQ ID NO: 191538 - protein, 147 aa, Zea mays
  unsure (1)..(147): unsure at all Xaa locations
  Clone ID: MRT4577_106261C.1.pep
RARGRXRGRLPLRDVLDDAGVGGKASRSLRLKRPSGRPHGRLDVRVAVKEPSRYYDPIFLPAPQDYNNTGGGTRDRSQVVRCYCRPILRVRKLVLFLGGRLRCIWSTLSVGVLAFVCVSFFFFFSCXARFFFFVFFFFSPPFVFFFF

SEQ ID NO: 191539 - protein, 54 aa, Zea mays
  Clone ID: MRT4577_106262C.1.pep
SLISSRFAPSAQLQSGVATGVRIMYKQNLSCHGSCIKNKLTKRGQEKKRGAPPI

SEQ ID NO: 191540 - protein, 205 aa, Zea mays
  unsure (1)..(205): unsure at all Xaa locations
  Clone ID: MRT4577_106263C.1.pep
LSRYHAWCARRTNKTGQKVFYSWNFDDVHTNDFSLNDYLPADPTKHAMYLTHTAGRYSKKRVRKSAXPIVQGLTNSVMMHAXNNGNNVMAVRIIKHTXQIIHLLTXHNPLHVXATAIINSAPREDATRIASAGVVKRHAVDISPLRRVNHAIXLLTTGGRESAFRNIKTIAECLADELINAAKGSSNSYAIKKKDEIERVAKANR

SEQ ID NO: 191541 - protein, 85 aa, Zea mays
  Clone ID: MRT4577_106264C.1.pep
TASSTQPPAAASKSPSPAEARIEELTDERKALLKGSFRDRQFHEGSLLVGLGVLESIGGALNAWFRTCKLLPGPHLLDGAAITVL

SEQ ID NO: 191542 - protein, 27 aa, Zea mays
  Clone ID: MRT4577_106265C.1.pep
LSQFTETFCPNLRIDSRLGEDMNRTCP

SEQ ID NO: 191543 - protein, 56 aa, Zea mays
  Clone ID: MRT4577_106266C.1.pep
IKPRMPGGGVLRGLQAHSYPGRATDVGRRCRGLPGDGAEREPAGWSRVSSPSSLLS

SEQ ID NO: 191544 - protein, 78 aa, Zea mays
  Clone ID: MRT4577_106267C.1.pep
STTNSPKMPAYIVTLHDDASDAQVAAAKKKATDAGGKITQEYSLIKGFAVEYPEGTVSTLDQDPSVKAVDEDSVMRTQ

SEQ ID NO: 191545 - protein, 168 aa, Zea mays
  unsure (1)..(168): unsure at all Xaa locations
  Clone ID: MRT4577_106268C.1.pep
TRGASESARASSAAELKPVSPLFCSKPKCSCSSRLSKKPADASTEGGSLSAAMDLAIAMRSDGNRWFLNYIDKFLDDIEGDYATCDSQVASFLQQLKKVDDWLNGVARHERMLSIDRSSKXCVLSEEEESDACERVRRKPHGALLRHVQYAAMALEGINSVTDEEKEL

SEQ ID NO: 191546 - protein, 104 aa, Zea mays
  Clone ID: MRT4577_106269C.1.pep
RLFPKIMGQKKNQFGKNVTKGGGGRQKAWKRGAPNKQISKAAYPNPEKPFVPFFWKNPDGEKKSSILRKNFTTGGEKKNCWCLPNRVSKKVLFFNGGGAKVVEV

SEQ ID NO: 191547 - protein, 62 aa, Zea mays
  Clone ID: MRT4577_10626C.1.pep
KNSMTPNVEVPSLVDHINMDSSVHDDSDLNIDQDLLDVMVLRKGRKIKHRKKTIKKKASPKS

SEQ ID NO: 191548 - protein, 188 aa, Zea mays
  unsure (1)..(188): unsure at all Xaa locations
  Clone ID: MRT4577_106270C.1.pep
RFSPALRREERGGAGGGAASACVTGGARAASGWEGCKMTNEEPLPKKVRLSETDFKVMARDELILRWKQYEAYVQALEGKYTDLNSNDVTGLRESEEKLKQQQQESARRENILVMRLATKEQEMQECTTQIQYLKQVQQPSVAQLRSTMVDPAINLFFLKMKGELEQTKDXLEQAQNELSAWKFTPDR

SEQ ID NO: 191549 - protein, 91 aa, Zea mays
  Clone ID: MRT4577_106271C.1.pep
FDCTPRFDRCHHHSALLLLLSTLVTRKSYRLTSARPYPTSVSWGDARRKQKLDDAAHAQQERQHPSTYAASSACPSWRSRTISRTSTWRLV

SEQ ID NO: 191550 - protein, 76 aa, Zea mays
  Clone ID: MRT4577_106272C.1.pep
KTNPITPYLNTAPSPGKKPWGRRAPLQARGGGPPKKLDFQKNPRAAPRIFPPVYIPNPIWAQNIGSGAVPNKTFFC

SEQ ID NO: 191551 - protein, 73 aa, Zea mays
  Clone ID: MRT4577_106273C.1.pep
CIFFSFNAFNFIPFYFFGWVHLDDTLSPLCFLLQRSHTSQRSLVQQIGPTPAAVASAPSARKQRSIRCWSDLT

SEQ ID NO: 191552 - protein, 78 aa, Zea mays
  Clone ID: MRT4577_106274C.1.pep
EKVIGIASIIFKKVLQASKHVGSDACMIHNYHYGMCYVLCLWATRSCYLRPFRVTSACNKNPWWPIGPTITMMALLFV

SEQ ID NO: 191553 - protein, 47 aa, Zea mays
  Clone ID: MRT4577_106275C.1.pep
ILHSSKLQGASFLREIPNVKHSTSTHVHTRFKQQSLHILKARETVNV

SEQ ID NO: 191554 - protein, 93 aa, Zea mays
  unsure (1)..(93): unsure at all Xaa locations
  Clone ID: MRT4577_106276C.1.pep
QTCNNDNIFGDLHTHIXKNKYTAAVVANXYNQIXLTTFTVYDFGTPKLIPIINLVLPDHTTCNLEYHLLHEYTXVNAIYYLNSTPIFNLSDSF

SEQ ID NO: 191555 - protein, 177 aa, Zea mays
  unsure (1)..(177): unsure at all Xaa locations
  Clone ID: MRT4577_106277C.1.pep
MSIVPKETIEVIAQSVGIPSLGADVAVALAPDVEYRLREIMQESIKCMRHAKRTVLTADDVDSALGLRNVEPVYGFASGDPLRFKRAVGHKDLFYLDDREVDFKEIIDCPLPKAPLDTSVVAHWLAIEGVQPAIPENPAIDAIVPPTENKRLEHGKDDGLPAGCQLPCXHVLSKELP

SEQ ID NO: 191556 - protein, 118 aa, Zea mays
  unsure (1)..(118): unsure at all Xaa locations
  Clone ID: MRT4577_106278C.1.pep
MADSGSLRKREEKEEEDDIVCLDPSFFVDRSYEMTTFTFGSHELRLLCLRAASNYXKKNIELQSCSENAHAVLTAEKLEWGNSDHLSGIIEKHPGGFDLVLGADICFQQSSISCLFDT

SEQ ID NO: 191557 - protein, 98 aa, Zea mays
  Clone ID: MRT4577_106279C.1.pep
VYQDRRADPGSTSVCIYRWTNLRSLGRRGACRQASSRAPWCPEGRSERTLMNIPFAVNTPYVRAGRGEGWGSSRGSGVSGSRTRGGEAPMTGTASRSE

SEQ ID NO: 191558 - protein, 245 aa, Zea mays
  Clone ID: MRT4577_106280C.1.pep
MADSGSLRKREEKEEEDDIVCLDPSFFVDRSYEMTTFTFGSHELRLLCLRAASTDFDLTGQLVWPGAVIMNNYLSQYPEIVNGYSVIELGSGIGITGILCSHFCKEVVLTDHNDEVLEIINKNIELQSCSENAHAVLTSEKLEWGNSDHLSSIIEKHPGGFDLVLGADICFQQSSISCLFDTVERIVRIKAGKCRFILAYVSRTKVMDALVLKEAEKHGMRVEEVNGTRTTIANLEGVIFDITLK

SEQ ID NO: 191559 - protein, 42 aa, Zea mays
  Clone ID: MRT4577_106281C.1.pep
MGGPPKKKKKKKKPKKKKKKKKKKKKKKKKKKKKKKKKNSRE

SEQ ID NO: 191560 - protein, 86 aa, Zea mays
  unsure (1)..(86): unsure at all Xaa locations
  Clone ID: MRT4577_106282C.1.pep
YAYGWRIDVLMNNAANHYXRXSVLYITGAVLYPFLHTNIFTYILLYKHAVPHMEPGTXIINTFINNSYKDNNTLLNYTVNYTAIMG

SEQ ID NO: 191561 - protein, 178 aa, Zea mays
  unsure (1)..(178): unsure at all Xaa locations
  Clone ID: MRT4577_106283C.1.pep
IPGLDPRVRPCNGGINXPMMSSSPIFANAPAEKGGKNFMIDFLMGGVSAAVSKTAAAPIERVKLLIQNQDEMIKAGRLSEPYKGIGDCFGRTIKDEGFASLWRGNTANVIRYFPTQALNFAFKDYFKRLFNFKKDKDGYWKWFGGNLASGGAAXASSLFFXVYSLDYARTRLANDAKA

SEQ ID NO: 191562 - protein, 105 aa, Zea mays
  unsure (1)..(105): unsure at all Xaa locations
  Clone ID: MRT4577_106284C.1.pep
LRSHHIWPTLTDXEWIKVXAQVTDLILADYGKKNNVIVILLTQSEILYIILGMETLAPSHESQQICXIEKXTTEHFVAVGSPNXTVNKHGYKIITFTTSYLLDPN

SEQ ID NO: 191563 - protein, 59 aa, Zea mays
  Clone ID: MRT4577_106285C.1.pep
LLIPYLPSIITSLCENPALQPYMLQQAISSSNIPLSPLLFQQSPALSLVQSLFQTIMSQ

SEQ ID NO: 191564 - protein, 104 aa, Zea mays
  Clone ID: MRT4577_106287C.1.pep
SRASSRCPRWTCAGPRAPARPPPRRVSCICGGEQRRACSFGAWWAGVMGIHWRSSTAPSRSSPSSQAALVQRLCRYVSRATMVVSTATLAVAMTSYALNHVMHG

SEQ ID NO: 191565 - protein, 173 aa, Zea mays
  unsure (1)..(173): unsure at all Xaa locations
  Clone ID: MRT4577_106288C.1.pep
PGDGELLSSLSSIPVVVMSSENEPQRISRCLTAGAEDFILKPLKTKDVQRLRNCSSAARPRDDAAHQCESLRRSSRKLRSDQVAAPGHRSQPTTGLTMVLXSSFLAVPPSEDQPELIISMDAPHPQVLHASSIELSHYFQFLLKFVLLAYAVLCLTELLHRWSNGSVLSLWSA

SEQ ID NO: 191566 - protein, 94 aa, Zea mays
  Clone ID: MRT4577_106289C.1.pep
LSRGVFPLPLVNQLVSAIPTPSGVGPPAPHTYMKASRGSRARNGPAPPPPLLLFFRPPRFVIYKPWPPGARAPFNPYAEGLWPAVGRKKKKNRQ

SEQ ID NO: 191567 - protein, 52 aa, Zea mays
  Clone ID: MRT4577_10628C.1.pep
SVSRVDSVASSWSMSIAGIMLFSVMRLFVLAVTGVPCGYSTSAARHRTRRRP

SEQ ID NO: 191568 - protein, 114 aa, Zea mays
  Clone ID: MRT4577_106291C.1.pep
LICTLLIQVQLLIYFMLKYAMEILLSESSVITNHYFSWNTSAVAIFLAILGLTVLPVNAVVGTYISNMFEDRFVDFSCLSTSIGQALITISLFVLLGIISIGQWLMDNSLSTGI

SEQ ID NO: 191569 - protein, 72 aa, Zea mays
  Clone ID: MRT4577_106292C.1.pep
VVSSSPHNYIFKKKKKKKKKKKKKKKKKKKKKKKKKTKEKKKKGALGPQLWSPEGGENGALGETRAKAAPGG

SEQ ID NO: 191570 - protein, 74 aa, Zea mays
  Clone ID: MRT4577_106293C.1.pep
SRSRTSVDYEFAARTRPSGEFVSKYKGYYTFTGGKAVGYRNLFAIPWPSFMADDSLFFIDGVLHLRAELTIKQP

SEQ ID NO: 191571 - protein, 91 aa, Zea mays
  Clone ID: MRT4577_106294C.1.pep
TNNPTSAFFFFSRALHPISTHCLSWRGLSTCTTLQLPFSPAARPTLTLPSAPTTLMLPPTPRASTSWTTTTDSLLYAFPFRNSCLRSTIYE

SEQ ID NO: 191572 - protein, 118 aa, Zea mays
  Clone ID: MRT4577_106295C.1.pep
MATRAAARFLQRRFLSSGGKVLSEEEKAAENVYIKKVEQEKLEKLARKGPSSGEQPSSTTGSAASDVKADAGPTESASASVSTDKNRNYAVLAGAVAALGGLGWYLLSKPKKSEEVVD

SEQ ID NO: 191573 - protein, 118 aa, Zea mays
  Clone ID: MRT4577_106296C.1.pep
MATRAASRFLQRRLLSSGGKVLSEEEKAAEKVYIKKMEQEKLEKLARKGPSSGEQPSSTTVSAASDVKTGAGPTESASANVSTDKNRNYAVLAGTIAALSGLGWYLLSKPKKSEEVVD

SEQ ID NO: 191574 - protein, 51 aa, Zea mays
  unsure (1)..(51): unsure at all Xaa locations
  Clone ID: MRT4577_106297C.1.pep
FRPGMIIINLGLKKGGNGGFLKKGAFGPFXRGAPPFPWGGGEPPQWGKPFA

SEQ ID NO: 191575 - protein, 68 aa, Zea mays
  Clone ID: MRT4577_106298C.1.pep
SVKSGPFFGPRRLAHVSLHIRVEFSPNNSYYDRRHSRRRRCRRHHRRRGILMIPHIHHHHLLRGRVDV

SEQ ID NO: 191576 - protein, 65 aa, Zea mays
  Clone ID: MRT4577_106299C.1.pep
YFFFFFFFFGYFINYRGELTIKLPHQAKKPTQITRPKTCIDQNHIDPILCKPKPYQSIIKPNITI

SEQ ID NO: 191577 - protein, 205 aa, Zea mays
  unsure (1)..(205): unsure at all Xaa locations
  Clone ID: MRT4577_1062C.1.pep
MEERYEALKELGAGNFGVARLVRDKRTKELVAVKYIERGKKIDENVQREIINHQSLRHPNIVRFKEVCLTPTHLAIVMEYAAGGELFEKICSAGRFSEDEXFWPYIRHIVSLFSRPEPRQTNVVCSLCCKRKQSRYFFQQLISGVSYCHSMXVLLPKVNKSMNSGVXFNELTNETQEICHRDLKLENTLLYGSPTPRVKICDFGY

SEQ ID NO: 191578 - protein, 111 aa, Zea mays
  unsure (1)..(111): unsure at all Xaa locations
  Clone ID: MRT4577_106300C.1.pep
GYLLGRKRIVEQNRLKMVIVHVESMAMTDXEASAMXMPCPCEELQSFFXAGAXLTTMKGAGSLHPYTEYLRQSQSSPLAAAPYYTGCGKTSGMDSAVWQQRCLTQMTMMDL

SEQ ID NO: 191579 - protein, 56 aa, Zea mays
  Clone ID: MRT4577_106301C.1.pep
STMYGAGASQHAALQLLDLCSSSVRIPSRVHAVVHKSRPPTVRFICVPKHLWDICL

SEQ ID NO: 191580 - protein, 227 aa, Zea mays
  Clone ID: MRT4577_106302C.1.pep
YLEAGRDGTHHIDRRHGYSLEMTEPSKRASRPQGQRHDGRTAPALRLVSTNSRSRRVVLKPARCVAATYEERGTSRTDFDLLLRQRSQQRATNGGPLRDHRDLPIPHLKGAAPLTRPVSSTTANAKQGDSCPTCGSPLQDTNQTRCLGRRPEEQALLPDTLQAQRDQQLPGSHVDIGRLAFQGHAGAGLTGGGVGSGDSGGGGGNKMLERGIDTGIALGARNYALTK

SEQ ID NO: 191581 - protein, 70 aa, Zea mays
  unsure (1)..(70): unsure at all Xaa locations
  Clone ID: MRT4577_106303C.1.pep
ARDCVSSCKCGKKYPNLDDTSTXTQATGLFGTCPKKNAAPRIVKCSSESXGSAXHSCRCGGNCKCYPCNC

SEQ ID NO: 191582 - protein, 153 aa, Zea mays
  unsure (1)..(153): unsure at all Xaa locations
  Clone ID: MRT4577_106304C.1.pep
EKHHREXILLRWWGSIAACILTLAACVDLIALVIFLVLHPSKTAFYLYDVWLRSMDFIDPALSLDLHVRIAASDSKEXLGVYYKTLDWFTTYRYEAETVPVSMAQIYQGHKDVSVWTPVMSGDAAPVAHDVADAMKQDVEAGYVLIHVRVDGR

SEQ ID NO: 191583 - protein, 94 aa, Zea mays
  Clone ID: MRT4577_106305C.1.pep
IRLEQAHTCFRWPRRKHCPPYLVASRRVACSASAVDTDMDDLFDARNANCGQVSDQRHGGGARLRPCVRPGHPEPSDARPVELCLGHQRNDLLA

SEQ ID NO: 191584 - protein, 287 aa, Zea mays
  unsure (1)..(287): unsure at all Xaa locations
  Clone ID: MRT4577_106306C.1.pep
MTRDEIVAVRDILHAFGCTSGLVTNLEKSSIHPIRCEDIDLDHVLQPFHGTRGIFPCRYLGLQLYTRPLRKIHIQPLIDXGEKIGNRLAGWKGNLLSRAGRLTLVSSVLSSMPTYHLSVFPLAAWARKRIDRIRRSFLWKGKAESNGGHCLVAWPLVCKPKALGGLGVLNLDKFGRALRLRWLWKEWTRDDHPWKGFEAPCNRVDRLLFSASTTVTIGDDQGRSQPLFWGQLTPVIFRCTHWLRFWRLLQKEKSQQQFLDASQDLEVVAMEVFANHGCRSNARIEYG

SEQ ID NO: 191585 - protein, 321 aa, Zea mays
  unsure (1)..(321): unsure at all Xaa locations
  Clone ID: MRT4577_106307C.1.pep
MSADAGATTLVVYGKSAQEQELLASAAGSVALDEGDPGSIALAYESAGFDAAAYMSALRARRFGRWMLWTPRIGSTQDLIARNFAKLPVGVVCVADVQFKGRGRXKNVWESPAGCLMFSFTSRLQDARKLPLMQYVVCLSITEAIKELCRAKGLPELDVRIKWPNDLYLKGLKVGGILCTSSYEPKVYNICTGVGLNVDNEKPTTCLNAALQEANHTSPILKREDILAYFFNKFENLFEIFMNHGFQVLEEQYYNSWLHSGQRVVVHDAHENKSGSVVTIQGLTPTGYLHAIGEDNKSYELHPDGNSFDFFTGLVRRKMEA

SEQ ID NO: 191586 - protein, 56 aa, Zea mays
  Clone ID: MRT4577_106308C.1.pep
HFKQTLERILYSSLILFYNSCFKLTPIKVKKGCASSSVSSKKRVKQGSLHINNSTN

SEQ ID NO: 191587 - protein, 36 aa, Zea mays
  Clone ID: MRT4577_106309C.1.pep
KILNSCFRFTSKNNFFFLRLFKNRDIYIDQLLVIDK

SEQ ID NO: 191588 - protein, 53 aa, Zea mays
  Clone ID: MRT4577_10630C.1.pep
GVRDGRESPQKQLNTSIKKKRLDGPQWLALYFCDQTSLCLCSTKTRVSASLCE

SEQ ID NO: 191589 - protein, 121 aa, Zea mays
  Clone ID: MRT4577_106310C.1.pep
VPAAMEVDDMLIQRMRLWRLVPSLYGHPSCDALSYRFQCCRAVPGRKRNHVGLPLSRSSMSSSPRTHPPFRITQISLYNHGHQELVLPFGLFRMEVCRMLLQILFLGLLNILDPNASFAQM

SEQ ID NO: 191590 - protein, 41 aa, Zea mays
  Clone ID: MRT4577_106311C.1.pep
GRVGPGLALLDRGAISGFLALEVLRPSPFFPLNATVIQEAV

SEQ ID NO: 191591 - protein, 71 aa, Zea mays
  Clone ID: MRT4577_106312C.1.pep
IGGNYGGGGGVSHLPYRKPSGRKGRFLGGYSVVYQGGYGGCAVRKKGWVTTGFPQKKRLSAGGICFILRAP

SEQ ID NO: 191592 - protein, 117 aa, Zea mays
  Clone ID: MRT4577_106313C.1.pep
RPSCFSHTQVTVQHRPSTVYLFTTKSTATSSSASTNTSTFLVEYRRPPTPERAAEWTRRHDLTCMSMARNLLLITPHRAWQLASVSLGSTMAVLCPAPVQSLIEDVCEHIIWSDELS

SEQ ID NO: 191593 - protein, 41 aa, Zea mays
  Clone ID: MRT4577_106314C.1.pep
FILRLRISLNISAARVNYKGPILLTHTRENAINKSSPITGH

SEQ ID NO: 191594 - protein, 53 aa, Zea mays
  unsure (1)..(53): unsure at all Xaa locations
  Clone ID: MRT4577_106315C.1.pep
GLSGGRGTXQIKTGAPSRFGGLAKNNPLFRIKEKFGDSPVFPGEKFRAPVGPF

SEQ ID NO: 191595 - protein, 65 aa, Zea mays
  unsure (1)..(65): unsure at all Xaa locations
  Clone ID: MRT4577_106316C.1.pep
LHATAPEAAACSRPWRTAQLTRPRRVRRVQLSPASPSLAAASASTLSPHEVGFDVXFIVDTSVAV

SEQ ID NO: 191596 - protein, 81 aa, Zea mays
  unsure (1)..(81): unsure at all Xaa locations
  Clone ID: MRT4577_106317C.1.pep
FEVKGANVLKCTVAGHKNQGVKLVTRPRLDRINGGFLRRFLIPQNAKVEXFTAPIENGVLPVFVQKEDPQNPVLKSLQISG

SEQ ID NO: 191597 - protein, 147 aa, Zea mays
  unsure (1)..(147): unsure at all Xaa locations
  Clone ID: MRT4577_106318C.1.pep
MEAGAGRRGIPSLLKPPAARADESGGATSPQQEHIASDITQLVGWTPLVELKRIAQKDNVDARVVGKLECYQPLCSVKDRSALRMIEDAEERGLISPGATTLVEPTSGNMGIALAXQALEREYRHVSVMRAEYSLGQQIFLHQIKNI

SEQ ID NO: 191598 - protein, 95 aa, Zea mays
  Clone ID: MRT4577_106319C.1.pep
KGNGVFGKEQGFHSNSDGINYPLSLFLHTLNWYNPSLVFPLPMGERILKGLSKSLFLAINAKGGGNIKPKAKDRTTIISKNLEIKALNDILQFFN

SEQ ID NO: 191599 - protein, 43 aa, Zea mays
  Clone ID: MRT4577_10631C.1.pep
DKHPNTDAIACARALELVSTTPFYMTVAAELSRHWQHLGSTTG

SEQ ID NO: 191600 - protein, 95 aa, Zea mays
  unsure (1)..(95): unsure at all Xaa locations
  Clone ID: MRT4577_106320C.1.pep
TIHNGDEPYACKDCGRXFIRGSVLMQHQRIQAGDKAYKCEECGNAFIRGSQLTQHQRIHTNEKPYECKECGKMFSHGSQLTQHQRIHTGEKPYQC

SEQ ID NO: 191601 - protein, 502 aa, Zea mays
  unsure (1)..(502): unsure at all Xaa locations
  Clone ID: MRT4577_106321C.1.pep
MEAGAGRRGIPSLLKPPAARADESGGATSPQQEHIASDITQLVGWTPLVELKRIAQKDNVDARVVGKLECYQPLCSVKDRSALRMIEDAEERGLISPGATTLVEPTSGNMGIALAYIALARGYRFVAVMPAEYSLDKQILLRYLGADLVLTDPALGFQGQLDKLEQLRKEIPNAHVLDQFANAANPEAHFRWTGPEIWKDTAADVDIFVAGSGTGGTVSGVGRLTGSRSPRGRRLDNDQSAAGQQRVDGRRLDNDESAAGGWTTCESASRRLDFGRRWGEGPATYGSAPAVRRSGLRAPGERRCELQRCSGVWAWAAPPPRLAAAGAGGYRIEEGCSRGWARLEWAVARRWTYSFXGRDRAAAQAAPVGDPPLYLKTKNPAVKVVCVEPAESPPTRAGKPSRHKIQGVGPGFVPKNLDTSVTDEIVTVTAEDAMANARRLAREEGLLVGISSGANLAACLKVASRQENRGKMIVTVFPSGGERYMSSDLFADAREECVAMTF

SEQ ID NO: 191602 - protein, 49 aa, Zea mays
  Clone ID: MRT4577_106322C.1.pep
PIHAWLGIPAIAVLLRVHSHPCILHAADEARSATALCYDIRPSSIIISF

SEQ ID NO: 191603 - protein, 608 aa, Zea mays
  unsure (1)..(608): unsure at all Xaa locations
  Clone ID: MRT4577_106323C.1.pep
MADVDDDAVLSDVDEDXPAPLHLXASSHKSLPQAQPQSQSDAQAQQQRLLDLAAELEEERRLRRAAEASLAEAEPRVARFKAFAQEALRKRDDLTAQAAASARSLAALQAEAATASSMLSSGFERISAKASPSSPPAPLPTSQKYSSGLPALAYGVLKRANDIVDELLAQIDAANRDRDRAREQMEHRNYQIAIEVSELEASLASRSAEGESLSKSLSQREAEISELRDKITSLEGKLAAQRPVLAEQIGCTSKLYHEMREVVKLVDAEAVSALSDSVFVWKETDVEESLKVSLEGTKLAYELAAIALEKVGACIDDKESKLRRLENMVDGLIKEKEHISVLLRNALQATTSEVLKVAEDGLREAGIEIGLNERKEHMLGSVEKDEVYTLAGALENTMKESQVKIIELQHLVEALRAESGLLRTRLEGQEKEIGQLRKQIKNLEEKEKVANESVEGLMMDVTAAEEEIKRWKMAAEEEAEAGRSIEQEFQIQISSLRKELDEANRAMVELENKLKFKEETAAAAMAARDAAEKSLKLADTRSSRLRERLEELNKQLEESDTRTESVNRNGHRYMCWPWQWLGLNYVQLPLAETDQTSNEMELSEPLII

SEQ ID NO: 191604 - protein, 98 aa, Zea mays
  Clone ID: MRT4577_106324C.1.pep
SHSSSHASAHSSDSPSGTPHVSLFKTNLCIIRPIIQYIYYNSYHFQSNSYFINPIHLYPYYTIHHMLHDLFTYPIYQVIAFHTTDLYHVHHLNTILQF

SEQ ID NO: 191605 - protein, 78 aa, Zea mays
  Clone ID: MRT4577_106325C.1.pep
SGGASFTTTPTREGREHRHSPTRPRRAREKEKRGGSLEREKYCRRREGERGGSEKDAHRQENKGKKIGTEGPTGGQRY

SEQ ID NO: 191606 - protein, 82 aa, Zea mays
  Clone ID: MRT4577_106326C.1.pep
LVENSTMCGSEIFNSSVYISPSFPYEVVIFQHHLTLTTGFLWANKLFSFGQKAQINSGITCALEYQSIVAAPKKTSALMPCV

SEQ ID NO: 191607 - protein, 108 aa, Zea mays
  unsure (1)..(108): unsure at all Xaa locations
  Clone ID: MRT4577_106328C.1.pep
LXISTFYLGLCCGLGIAYQDIEDGIFTNCYSPIIFFPSTLLHTRSYVIMVFAAGGTSRFVDRAECICLIHKINDAPTPSSVFYLLEHINNLACITCGWQAWSAVEFLP

SEQ ID NO: 191608 - protein, 41 aa, Zea mays
  Clone ID: MRT4577_106329C.1.pep
NKLGISAISKGIVNKSRGYPGLHRLKILCKPSVTREGTVTH

SEQ ID NO: 191609 - protein, 102 aa, Zea mays
  Clone ID: MRT4577_10632C.1.pep
FPSTPAYTSGFSPKFGESRDDSSSYSFGKFDSFRSQDTGFFPQESGFSRFDSISSSKGEDVSGFDTGNSSRNFGRFDSFDDTDPFGSSGPFKASGSRSPPKF

SEQ ID NO: 191610 - protein, 92 aa, Zea mays
  unsure (1)..(92): unsure at all Xaa locations
  Clone ID: MRT4577_106330C.1.pep
TWATRFKGEKIGFQLPAHSKKKIEGALYPALNWVGAHQLSQGGEFXGKIKELESLFNPIFSKMFQGAGXKIGGPGGMEKEAPSGKGGPGPKI

SEQ ID NO: 191611 - protein, 67 aa, Zea mays
  unsure (1)..(67): unsure at all Xaa locations
  Clone ID: MRT4577_106331C.1.pep
TRSPVHYSCLYNNNKIEGRGAGMKNFICSAHVYGFQDSRLFRMSVMCNYIACVPVASKIMISRIAXA

SEQ ID NO: 191612 - protein, 115 aa, Zea mays
  Clone ID: MRT4577_106332C.1.pep
GIPGSTHAFALRLLSGATRGPFLIRSGQWTTTFPNSIELIGRQGQKEMITPKSLDCQEFEVEKAVAMESQTIRHMIQDDWSDNGIPLSNVNFKILSKVIEYLNKHVHAVVGVVVV

SEQ ID NO: 191613 - protein, 121 aa, Zea mays
  Clone ID: MRT4577_106333C.1.pep
FLHTLLSPSSYREAALVQVLPGEVEPNRIPWRTTLQWIQDVRHQINGGSFLRLATTATTPLTSFSPSSVVFVSLLCCWEREVAQPRRWYQRGGARSHPMEDNLPIDPGREAPIQWREKQES

SEQ ID NO: 191614 - protein, 85 aa, Zea mays
  Clone ID: MRT4577_106334C.1.pep
GVALGLPRRALPVVAVARRVRLVRRCVWLRRRGGVCRLGGLGALLGCHRLGGRLVLSGSRGFPLVLVGGGGPVCSLKVPLRVVFA

SEQ ID NO: 191615 - protein, 148 aa, Zea mays
  Clone ID: MRT4577_106335C.1.pep
VIRHEGLLPPDREAALVQVLPGEVEPNRIPWRTTLQWIQDVRHQINGGKWRRIWQFPCRPPISWLAAVDPPNFPGSFLRLATTATTPLTSFSPSSVVFVSLLCCWEREVAQPRRWYQRGGARSHPMEDNLPIDPGREAPIQWREKQES

SEQ ID NO: 191616 - protein, 111 aa, Zea mays
  Clone ID: MRT4577_106336C.1.pep
CLTMWGNCAYVPSCSCVLSLYIAGVGAHIAAVSPPCLRCRHRGLSRPDSWVLPPVRTCRSSRLGPTGDTAPLTGLTNSLTRLSLVHMFPAGPSSRQRTRLPTGLAEPAWET

SEQ ID NO: 191617 - protein, 74 aa, Zea mays
  Clone ID: MRT4577_106337C.1.pep
RAASCWVCSVAQKSCARLVCSATLNHECGEHSLIMAEEDTRRLALFRRKCLRVLCECILGGNHELNIQHECGRL

SEQ ID NO: 191618 - protein, 103 aa, Zea mays
  Clone ID: MRT4577_106338C.1.pep
FCFFLMGTALTIIYHVFYNHMLEALRMPITRLKRRKTLVNQTTTLGRQWLFSIPMVLHIYDTLGDISIHERYSVVHAVPTYMDWHGLHGSSDAHRCSGTIPVG

SEQ ID NO: 191619 - protein, 143 aa, Zea mays
  Clone ID: MRT4577_106339C.1.pep
MATVSDSLVWELVRKNNCFLIKQFGNSNAKVQFSKEPNNLYNVHSYKYSGLANKKTVTVQPAADKEMTVVLSTTKSKKQNKPAAFTHKTVMRKEFRKMAKAVKNQVSDNYYRPDLTKPALARLSAVYRSLQVAKSGVKKKNRQ

SEQ ID NO: 191620 - protein, 399 aa, Zea mays
  Clone ID: MRT4577_10633C.1.pep
RDVASVFQKDEEKYQPEAERASKLAVEEAAYRDVQERKVELNDALIKMVQGGSVDGLLQVRADRIQYQLEEMEKALSERCKHFGLQFKSSASVELPSGWEPGPQEGLIEWDEDWDKFEDEGFSIVKDNGTIQENPISAENGKVPSLWDDGDDMSPVASSNGHIKEERRYSVGDQVAESEIAYDFGDESVRSPGSAGRSASGSPFKSSRFGMHDSSPSKRESYSDHGGSESVFGDKFGDETSWNFDDQDTDSVWGSTVLNTEADQRGGTHNSFFGSEAGSPSGASVFGKKRNSFFDDSVPSSPAYTSGFSPKFGESRDDSSSYNFGRFDSFRSQDTGSFPQESRFSRFDSISSSKGENVSGFDTGNSSRNFGRFDSFDDADPFGSSGPFKASGSRSPPKF

SEQ ID NO: 191621 - protein, 58 aa, Zea mays
  Clone ID: MRT4577_106340C.1.pep
VGLWVRSSAFAAPVRFGVCCAVGSSCVSVFPLPAALVFRPLLFFIPPLVCVASCRSIS

SEQ ID NO: 191622 - protein, 149 aa, Zea mays
  unsure (1)..(149): unsure at all Xaa locations
  Clone ID: MRT4577_106341C.1.pep
GRAGXYFHGSQNRTHSQSRGELRAGSTASADLVHDPRMRICSKFGSLVVLLVKRSWPIGEGSAAAGTGIHRRTSCSVEHPRRIWALSESRRCLPIGLCACCRRFCSLPGAACMDKASQGGMDDLKANNLIYFAIACTAGCSLNRPCLPW

SEQ ID NO: 191623 - protein, 87 aa, Zea mays
  Clone ID: MRT4577_106342C.1.pep
TIFLLASGAKKSAFRNFKTITKCLTDDLINAAKGSSTSYAIKNKADIERVLKTFSFIETCILVHFELDTFMLLSVVTVLVLPMFKVF

SEQ ID NO: 191624 - protein, 253 aa, Zea mays
  unsure (1)..(253): unsure at all Xaa locations
  Clone ID: MRT4577_106343C.1.pep
MVTRRLALSSLFHGKARDTSSLPPPPPPPPAPAWPWPSSKNPRTTQPQAAAAGAXRTVASIVLDSADSSFTASSALQEDCCCSDSLSTASEASASAACDDAAADDAVVVRGVRSDRLLFDPGASATNSILEEKSATKREQAFGGAVAVAFESADPYVDFRASMEEMVAAHGIGRHWGWLEEMLGWYLRANDGDTHCAIVAAFIDVVVVAAVAADPARSSQQASSRTSFATGELEVADKGKPDGAGALAVSCLD

SEQ ID NO: 191625 - protein, 241 aa, Zea mays
  unsure (1)..(241): unsure at all Xaa locations
  Clone ID: MRT4577_106344C.1.pep
HASADAWDSERGKEEDDLEAYQIQLVLEMSARDNPEEMEMEVAKQLSLGFCPPQRSPAEVLAVRYRNFNALGYDDKILDGFYDLFYVGNGPAAVTMPSFAELRVQPFSHKVDWEAVLVHRGEDPELMKLQQEALIMNHELHSRTSESVGNALVKGLANLVARHMGGVFDPERMSAKYQNMLSYLRSDIGSVIVPLGQLKIGLARHRALLFKVLADGLDVPCRLLKGKRXTGSDDGALNIVK

SEQ ID NO: 191626 - protein, 132 aa, Zea mays
  unsure (1)..(132): unsure at all Xaa locations
  Clone ID: MRT4577_106345C.1.pep
FPQEPPMPMIPPSFKTPPKRENWDPPRTRPGIPGVEPLMAKGLPPKPPPKKKKGPEPEPEPEPPPXELLPRXSPRIWPPPRXKPKKPPWXKGKPKTETPPRREVPPFGVPRPACTRVWDGLPQKKTQPPGGV

SEQ ID NO: 191627 - protein, 156 aa, Zea mays
  Clone ID: MRT4577_106346C.1.pep
MAEEEHQTFETADAGASLTFPMQCSALRKNGHVVIKGRPCKIIDMSTSKTGKHGHAKVNLVAIDIFTGKKYEDLSPSTHNMDVPNINRQEYQLINIDDGYLNLMTQDGSTKDDVKLPEGDLGEKIQEEFDEGKDLLVTVVTAMGEEHALTYKEAPK

SEQ ID NO: 191628 - protein, 54 aa, Zea mays
  Clone ID: MRT4577_106347C.1.pep
NLSEICSGQDVNVTTDNGKSLTCIVRFDTEVEQEYLNYGGILLYVISKLGGAHN

SEQ ID NO: 191629 - protein, 64 aa, Zea mays
  Clone ID: MRT4577_106348C.1.pep
IATGRHVKYDQRSDVFSSSTRGSLGRGQAFDALNQGPDQGVASPKICGEEMQLKGFSDSDMVGC

SEQ ID NO: 191630 - protein, 52 aa, Zea mays
  Clone ID: MRT4577_106349C.1.pep
GTALTTVRLDTYSPSNLLTDTVIVPSWSKRTPAPAVQKSGHGHLHRYYDIET

SEQ ID NO: 191631 - protein, 115 aa, Zea mays
  Clone ID: MRT4577_10634C.1.pep
VFGKKRSSFFDDSVPSTPAYTSGFSPKFGESRDDSSSYSFGKFDSFRSQDTGFFPQESGFSRFDSISSSKGEDVSGFDTGNSSRNFGRFDSFDDTDPFGSSGPFKASGSRSPPKF

SEQ ID NO: 191632 - protein, 57 aa, Zea mays
  Clone ID: MRT4577_106350C.1.pep
MSKSVKKISKCNKNSNRQIILAVSIPERQSDQAHRVAHITRSHANRSEESGCSIGRG

SEQ ID NO: 191633 - protein, 92 aa, Zea mays
  Clone ID: MRT4577_106351C.1.pep
HQPAPWSLILPHPTYCPSRFLTNLSLAPTPQSHMKFLTAHTRPTETTHADIRTSHTINLNTGITNLLCQKFFYNFKQENLSKHVHKQNINTQ

SEQ ID NO: 191634 - protein, 53 aa, Zea mays
  Clone ID: MRT4577_106352C.1.pep
MPKLMTPVIQDNPSGWGPCAGPEQFRDMPYQPFSKGDRLGKAADWTGATYDDK

SEQ ID NO: 191635 - protein, 226 aa, Zea mays
  unsure (1)..(226): unsure at all Xaa locations
  Clone ID: MRT4577_106353C.1.pep
MERVALLRTSGRRLLHRCRRGRPVVVPAAAASSLARRASSFSLPARGYSALPRGGARFLVAAAPLHCSGRYWPAAAPQLARRLSASAVSTSPSPVPYDTDDVHEYATKLGFEKVSEQTIDECKSIAVLYKHKKTGAEVMSVSNDDENKVFGIVFRTPPKNSTGIPHILEHSVLCGSRKYPLKEPFVEXLKGSLHTFLNAFXYPDRTCYPVASXNTKDFYNLVDVYL

SEQ ID NO: 191636 - protein, 66 aa, Zea mays
  Clone ID: MRT4577_106354C.1.pep
ALLCLMSSLHSLLTIKRLRTVLPKWIPLEVDHLFEGGHHLYGQTQRRNGVVCQYPMQASGSPLGSV

SEQ ID NO: 191637 - protein, 55 aa, Zea mays
  unsure (1)..(55): unsure at all Xaa locations
  Clone ID: MRT4577_106355C.1.pep
YGGDXGAYYEWSAADLPMLGVASIGAAKLSLAAGGLSLASYSDSSNVAYALERTG

SEQ ID NO: 191638 - protein, 276 aa, Zea mays
  unsure (1)..(276): unsure at all Xaa locations
  Clone ID: MRT4577_106356C.1.pep
MRKRERENPCGICGHYHKYEEGEVCGVCGHRPPAASPVGARQQDSAFPSEILKEFLFLGSYDNASRSELLKTIGVSHILNTVPLCQNLYRNSFTYHCLQEDKTLQFDDANQFLEQCEREKARVLVHCMSGKSRSAAFVIAFLMKSRGWRLAQSFQWVKERRPQVQLSDAAQQQLIEYENKLFGSXMMAAYQLNXAPVDSLPSLGFGFPKPPGDIQAPTFNQQAPASIFERVTPNSFPSNFIFGAERTSDSDAKLPDSNNFGVVNSSTGSDSMMDSS

SEQ ID NO: 191639 - protein, 215 aa, Zea mays
  unsure (1)..(215): unsure at all Xaa locations
  Clone ID: MRT4577_106357C.1.pep
LQTVPLCQNLYRNSFTYHCLQEDKTLQFDDANQFLEQCEREKARVLVHCMSGKSXVYGTYVYFFIWGSYNISYFCTDLTNVIATLXRSAAFVIAFLMKSRGWRLAQSFQWVKERRPQVQLSDAAQQQLIEYEKKLFGSXMMAAXAQPFAPVDSLPSLGFGFPKPPGDIQAPTFNQQAPASIFERVTPNSFPSNFIFGAERTSDAKLPDSNNFRCG

SEQ ID NO: 191640 - protein, 87 aa, Zea mays
  Clone ID: MRT4577_106358C.1.pep
FLKKVHSKRTPFIKYPPKIFHLRLIPAAPLVFSIFNLNTTLVNRIAPRSKQFFARSLNGLMFPKTKGICCFLSKKYKVKIHPKKNPP

SEQ ID NO: 191641 - protein, 78 aa, Zea mays
  unsure (1)..(78): unsure at all Xaa locations
  Clone ID: MRT4577_106359C.1.pep
EFHKIXSHNTKALLALNAHYRKHEVDKDXHSLQPLSNNKXNXELLIKLTSYNDHMNENPXLHYHANKSHSINYSLKPT

SEQ ID NO: 191642 - protein, 562 aa, Zea mays
  Clone ID: MRT4577_10635C.1.pep
MRPFHTPRPNQHHRARPGGDPGPPHLPGTPMHPAFPPPVPNLAAAANPMAAAAAANPFLALQLLGQAQQLQNLGFLAAAALQKQQQQAPFFPGGFPSNPNQFAPFAGGPPPVGFNGGGAFRPGGAWICGPRPPSPMMSPAGNGSNNNNIAGSGGASRPIFNVGRKDHNNIAGSGGMPRPILDAGRKDRDSSAGGNGEPYHFENRADGISNFVSENGNKITDQKSGFSVGRDGRGGRQFGAFRGRGRGRHPNQNRGRGSNNWGEIKSNFMGHKSSASKHCSDIAAPASGGRRKPPPIIYDANEVKQWVEARKKNYPTSVNVNKKLSEMKSDNENKDKDAQLRRQELKEVIAKQQELGFDPPELPPGYLSEIGDQCIENKNNRKTQFRDSHFGNRFNNNKRSRYERGGFQSKRSKVWNRTPHADHGMVKSREPTLLQKLLSSDIKRDKRRLIHVFRFMTLNNFFKDWPDRPLQFPSVKMNQIEIGSNISTDELENAGMSKDSILGVNENGDWKELSSIDEEDTDSANHNDEDVDDDSVDSSIEDGAEEDGYEEQFNEPEDDTAV

SEQ ID NO: 191643 - protein, 106 aa, Zea mays
  unsure (1)..(106): unsure at all Xaa locations
  Clone ID: MRT4577_106360C.1.pep
PPSKVQLPPHINSCATTLPEFLPHSSTRCREPPSSTRRPAMAHVTQVYFMFELLHGRRDLPRFREFYGRRLLLCHHGSNSEGKRRERGGRWSRMSLPRXTRRDPEE

SEQ ID NO: 191644 - protein, 127 aa, Zea mays
  Clone ID: MRT4577_106361C.1.pep
MVGLVGGSTARAEHVVANAGGEAEYVRRMHRHAPTEHQCTSTLVKHIKAPVHLVWELVRRFDQPQRYKPFVRNCVVRGDQLEVGSLRDVNVKTGLPATTSTERLEQLDDDLHILGVKFVGGDHRLQS

SEQ ID NO: 191645 - protein, 53 aa, Zea mays
  Clone ID: MRT4577_106362C.1.pep
TICLISDLKLPKFYLLSNAKPALVDFPNPVTQHTTATSVKVLSSILSTYTKFK

SEQ ID NO: 191646 - protein, 136 aa, Zea mays
  unsure (1)..(136): unsure at all Xaa locations
  Clone ID: MRT4577_106363C.1.pep
FDQPQRYKPFVRNCVVRGDQLEVGSCGRHVKXGLPATTSXERLEQLDDDLHILGVKFVGGDHRLQNYSSIITVHPESIDGRPGTLVIESFVVDVPDGNTKDETCYFVEAVIKCNLNSLAEVSEQLAVESPTSLIDQ

SEQ ID NO: 191647 - protein, 128 aa, Zea mays
  Clone ID: MRT4577_106364C.1.pep
VKHIKAPVHVVWELVRRFDQPQRYKPFVRNCVVRGDQLEVGSLRDVNVKTGLPATTSTERLEQLDDDLHILGVKFVGGDHRLQVRAAAARLLRPCKNALFHAPSLLVSVLQIIFGGMLALLPFLFFLN

SEQ ID NO: 191648 - protein, 184 aa, Zea mays
  Clone ID: MRT4577_106365C.1.pep
ATSRSGTRETEYVRRLHRHAPAEHQCTSTLVKHIKAPVHLVWELVRSFDQPQRYKPFVRNCVVRGDQLEVGSLRDVNVKTGLPATTSTERLEQLDDDLHILGVKFVGGDHRLQNYSSIITVHPESIDGRPGTLVIESFVVDVPDGNTKDETCYFVEAVIKCNLKSLAEVSEQLAVESPTSPIDQ

SEQ ID NO: 191649 - protein, 130 aa, Zea mays
  Clone ID: MRT4577_106366C.1.pep
RPGGGLLLGAVALEFAWASPFLLGGPFGFLLPRGFLGALAAPALPLFLVPLPFVVFFGSFLVWEVSATGVGFGFHLVFVWVPPRVQFLSGVLSLFFFWAGCVPYLFKGFWGFSVVVGPLVFYFRVGSFTP

SEQ ID NO: 191650 - protein, 51 aa, Zea mays
  Clone ID: MRT4577_106367C.1.pep
VIIPWLITITQTYGYTQNLGMRRGLLLSHCYYPNQHIKYTRATLSPPFSHL

SEQ ID NO: 191651 - protein, 69 aa, Zea mays
  Clone ID: MRT4577_106368C.1.pep
TRDLEKGAMTPMEVCEGLGLYDLKNRTWHIQGSCALKGDGLYEGLDWMASTLKELQASGRLPSGGTSLF

SEQ ID NO: 191652 - protein, 115 aa, Zea mays
  Clone ID: MRT4577_106369C.1.pep
ISFSPETIGVRRVGLWEPIEQPRICSRATTTASLNGANAARAPSRRGTNEQPRHELFTPTAPMTRAGGERLHLSHPMEDHGDRLAAFKLASETRARRSRPQPSIDARPQVQHILG

SEQ ID NO: 191653 - protein, 98 aa, Zea mays
  unsure (1)..(98): unsure at all Xaa locations
  Clone ID: MRT4577_10636C.1.pep
GDGRITMRKTVGXPKPAXASGRHWYGDYRVLYLGPMFEQPPSYLTSEFPGNYGWDTGGLTADPETYPKNRQLEVIHCRWAMLGALDCVFPELLTRNGV

SEQ ID NO: 191654 - protein, 100 aa, Zea mays
  Clone ID: MRT4577_106370C.1.pep
LRATARGRRRHDAGLPHGDAAGSTGPCCSTCRRLGAEERQSRIGSFRLIVIFFGRRRGRRGGNRGAMIRACRCVPRLQMWKAGHADECGFMHLFCKELNM

SEQ ID NO: 191655 - protein, 39 aa, Zea mays
  Clone ID: MRT4577_106371C.1.pep
RQETWVLQYLRQQDFFHSRVIIRDPAPQHDQKYSKGLCG

SEQ ID NO: 191656 - protein, 259 aa, Zea mays
  Clone ID: MRT4577_106372C.1.pep
MAAADGRGAPLSSSRVAVARGLVHAAQVAAGLAVLLCAFADLPWAAAAAPACILRVAASFLAPPRLCFLAAHVILIALATLFRRDAASSSPPSADPPGSSGDAQAQHPFLALLGPPLPPVAEVAEPSGEEEAPPDEALDGKEAAHHARTVRAQPPRRAMSEKTGGAAGGTARAASAELRRAKSESGRRRQRRSAAAAAAAPVELGMDDAEAFRLAVEAFIAKQQTWFHREESLIARTGTADNAGGEDGTAIAGAAVAVK

SEQ ID NO: 191657 - protein, 64 aa, Zea mays
  Clone ID: MRT4577_106373C.1.pep
LPPTTFHYRFSIFQNESLIALNNNVLLVVSTQDAALYSKWGSSESDMAIPGLTGSTRRRRSREM

SEQ ID NO: 191658 - protein, 79 aa, Zea mays
  unsure (1)..(79): unsure at all Xaa locations
  Clone ID: MRT4577_106374C.1.pep
DTLSEVRYYNDLHVFDLDHFKREEFKPXGGCLLPSPRSVFQLAVYLDHIYLYGVYFKEVFPDKENGTVHSYMWTFDPIT

SEQ ID NO: 191659 - protein, 48 aa, Zea mays
  Clone ID: MRT4577_106375C.1.pep
SILYTPGRVYIFEILPPQTKGLIKNTPDFAVIHVSKWLSIDNILNLGD

SEQ ID NO: 191660 - protein, 79 aa, Zea mays
  unsure (1)..(79): unsure at all Xaa locations
  Clone ID: MRT4577_106376C.1.pep
MACVSGGFAISQTVAERLERMQDACIRLNPSLYGSDYRMQACMGXLGVPLTRQPVLHQYDVYGDLLGLLAAHRDVPLVS

SEQ ID NO: 191661 - protein, 65 aa, Zea mays
  Clone ID: MRT4577_106377C.1.pep
MATMSLRSLAMAMADTALPPAHKLLPTVSLPLLSSSTRAAPFLLFARRHLPIAPLVTFCDTCEAK

SEQ ID NO: 191662 - protein, 88 aa, Zea mays
  unsure (1)..(88): unsure at all Xaa locations
  Clone ID: MRT4577_106378C.1.pep
PTLPIYNTHNRMYLDKQASLKALFTDFRETTQPSPCXSEXIQTNYRLHNNTDYXQDKANHITVFKDTYQXRVLEXTIVKRVKFVHDGY

SEQ ID NO: 191663 - protein, 105 aa, Zea mays
  Clone ID: MRT4577_106379C.1.pep
NSVSATGSCTCPGSSGSPRRCTRTCDLHDMDFAEAVVPSNTSLDLYYAKPAVIEGSPVNKHLLHLAHKPLELTIKDMLHDVHEHLGLRQIFHIDLEVHICHKQLG

SEQ ID NO: 191664 - protein, 106 aa, Zea mays
  Clone ID: MRT4577_10637C.1.pep
MKQGDLQGAFALKAKMIESGLQLDLYCYTCFISGFCNMNMMQEARGVLSEMIGTGITPDKTAYNCLIRKYQKMGNMEEASSLQNEMESVLSSCTEEDTASGSGCET

SEQ ID NO: 191665 - protein, 87 aa, Zea mays
  unsure (1)..(87): unsure at all Xaa locations
  Clone ID: MRT4577_106380C.1.pep
NLWHHGRINMQARGLIVLLISKAAGQGPGMPEKEHDXSARVEHGQRASAEVCEXIRSXHLVHQGWTSSQGVPHAEARFMIAPATRHL

SEQ ID NO: 191666 - protein, 89 aa, Zea mays
  Clone ID: MRT4577_106381C.1.pep
FILLPLSLVLAGSFRRGGVLLWWCLLLLLASAAFAGIERCVLQGKAAYSPSLSPAPHGSSGACGYCAMAAEINGGFLAVGGPRQHRGGP

SEQ ID NO: 191667 - protein, 82 aa, Zea mays
  Clone ID: MRT4577_106382C.1.pep
APDRVFFSFMKETDFPDSRIGDTEYLTVASRASHPQTCEVLPAYLLSMTCHAICHTKDYLAASTLRLNYPTAPLTRDHRLPT

SEQ ID NO: 191668 - protein, 43 aa, Zea mays
  Clone ID: MRT4577_106383C.1.pep
ELCEWFLIGFRRARVVAIDGCRRRMWVELGIKERYLQAWRISL

SEQ ID NO: 191669 - protein, 114 aa, Zea mays
  unsure (1)..(114): unsure at all Xaa locations
  Clone ID: MRT4577_106384C.1.pep
ARGSWLMSGYCRAGILQEAVKVFRTTPKIGVPRTALSYNAVLKAILCRRREAMARRICITVIWDREAPDVFTYNTLRGQAXLLLKMETAXMGFGDTKGHRVTPDATTYYTLMNA

SEQ ID NO: 191670 - protein, 70 aa, Zea mays
  Clone ID: MRT4577_106385C.1.pep
PGREILTIRNEGNTSSSRKGKKQGQKWGVHGQAKPSRFFPREEPGFYITEGGTKTSNILTLPTWGTKLLN

SEQ ID NO: 191671 - protein, 50 aa, Zea mays
  Clone ID: MRT4577_106386C.1.pep
SIQSISAKRQFFFSIDEHIRMRSVIVLHVCLALEACHFLRNAYASPLCVA

SEQ ID NO: 191672 - protein, 135 aa, Zea mays
  Clone ID: MRT4577_106387C.1.pep
FPLPGHTSTGAYLRPGLPGLQPRSQSSNSRDLSHKVQQKIGHPQLHRGIVRSLSPPAATTKVSIAATTRLSITGARCGDAPSRARSCAPSRPRGRDTTVLEVQHRINSSLAPASASRRWLRQSSSSAPHRPPISS

SEQ ID NO: 191673 - protein, 70 aa, Zea mays
  Clone ID: MRT4577_106388C.1.pep
RYNVWFPRTAALTNTGASFFSYEYCTFTEQACKHDAACHLPGTILVAQAHTLLLTGSAKWSLRFSSGPLP

SEQ ID NO: 191674 - protein, 91 aa, Zea mays
  Clone ID: MRT4577_106389C.1.pep
KYPESKKPGALNIDKASLNHLSALSLVFMLLYDIVAEAVYHAMAIHTVKHITLPPFVSLEAKEPLCGQGKGAKLYAMPFEGLRQETQTWQG

SEQ ID NO: 191675 - protein, 108 aa, Zea mays
  Clone ID: MRT4577_10638C.1.pep
FSDVDAVVFDKTGTLTIGRPVITKVIPSRGMGDANTKDLGANQWAEADILSFAAGVESNTNHPLGKAIMEAAGAANCVIMKANDGSFMEEPGSGAVATIGEKQFSVGT

SEQ ID NO: 191676 - protein, 108 aa, Zea mays
  unsure (1)..(108): unsure at all Xaa locations
  Clone ID: MRT4577_106390C.1.pep
RHLLVRFEIQTYIQKVLFLETPXGSSSALRPYWTKAIDVRTTVVQAQPDVLELVPPGTSTGIGLKVLMNHLYIHTDDAMALGDRYKDSGMAQLASAGAVLDNGADNTK

SEQ ID NO: 191677 - protein, 80 aa, Zea mays
  Clone ID: MRT4577_106391C.1.pep
NSGSHPFVLTFVLIIYFFLIHDPQYYTDRSFKFLVCQIYNSSYYTHYFFFIYYYNNLNFKAKCLSYYLQWKRTFNHKTLL

SEQ ID NO: 191678 - protein, 75 aa, Zea mays
  Clone ID: MRT4577_106392C.1.pep
GQPYLRAAVFYYPFKTFGPVQGGFTTEPKFKVFTRTQGPGGDSFTPCLLPGKNRRGLLKKVPRALGCLSKGKRLG

SEQ ID NO: 191679 - protein, 32 aa, Zea mays
  Clone ID: MRT4577_106393C.1.pep
MGHNGCNTPAETKPADDDAAGPNGSAGNKTKA

SEQ ID NO: 191680 - protein, 86 aa, Zea mays
  Clone ID: MRT4577_106394C.1.pep
GGAPAQKKGGGEQGQPDHPQKEPAPGCPQGSPRRHGRARPGWKRWPGPHDRGRAAKRFESVVVCPIQWLAGPLSARLIVVVPVYPR

SEQ ID NO: 191681 - protein, 238 aa, Zea mays
  Clone ID: MRT4577_106395C.1.pep
VRLQVPVRNSRVDPRVRTGEHTVWSVPMLRDLTQNTAVSINFKDPQFAEDYVFKAAMLPGARKPATVLKPGDWEKSSNGRQWKPQLGFNRDRRPVHLDQAAFRTLGHVTPRGSGTSVYTNTALPPANYQGNNYRPLLRGQAQIPKLMSNMRPQDSWRGPPPLFQQHRFERSVGAEPLLPWNRMIQNQNAAFQPNQYQMLGGPGGYPPRRDDHRGGRQGYPREGRKYPLPPPSGRYSWN

SEQ ID NO: 191682 - protein, 75 aa, Zea mays
  unsure (1)..(75): unsure at all Xaa locations
  Clone ID: MRT4577_106396C.1.pep
ARMPTVTCNASNAGFDDEEQQRIHYRADRHRYNLKRQAVVASAVTEAKFKNSQXCLXEEASKPASTAMLYGCGLC

SEQ ID NO: 191683 - protein, 333 aa, Zea mays
  Clone ID: MRT4577_106397C.1.pep
MPVCFLPASMAGQVQRTAPSSSSPSPRQLPVINLGRLGKDPATRALAIQDITRACREQGCFQVVNHGVSKPVMAGAFEAASEFFQLSPEHKELFASTDIGRPVRYDTSSRDGISRARSFLKHYANPLEDWVQYWPLHPPSYRKKMGEYAVEIQRVSMQLMDAILQGLGLKPLYMQEKLDKGVQFLALNSYPQFSHRGDKVGLAPHSDYGFLTILMQSSPGLEVMPHDRDTWTPVPAIPGALHVHVGDHLEVLSNGRLKSLVHRAILNPDEARISIASIHGLSKDEKVCCAEELVDEVNPAMYRESSFQDFLDFLPSNINNYKRFVESLKIDRA

SEQ ID NO: 191684 - protein, 283 aa, Zea mays
  Clone ID: MRT4577_106398C.1.pep
MAALAPSKILGTQLNFAGSSRYATAAPTAGAQKIVSLFSKKPAQKPKPAAVSSSSPDISDELAKWYGPDRRIYLPDGLLDRSEVPEYLTGEVPGDYGYDPFGLGKKPEDFAKYQAYELIHARWAMLGAAGAVIPEACNKFGANCGPEAVWFKTGALLLDGNTLNYFGNSIPINLVVAVIAEVILVGGAEYYRITNGLDLEDKLHPGGPFDPLGLASDPDQAAILKVKEIKNGRLAMFSMFAFFIQAYVTGEGPVENLAKHLSDPFGNNLLTVISGAAERTPSL

SEQ ID NO: 191685 - protein, 106 aa, Zea mays
  Clone ID: MRT4577_106399C.1.pep
MHTTAPSFSISRATLTASMAGQVQRTAPSSSSPSPRQLPVINLGRLGKDPATRALAIQDITRACREQGCFQVSACCLSVALSVSSQHLFAVIKSTNSMLCKPRILV

SEQ ID NO: 191686 - protein, 158 aa, Zea mays
  Clone ID: MRT4577_10639C.1.pep
NGRWTMDDIAWERGRNADDSSRAVLTPPRGPGLLSPSSPSGSGPIPSAAVLALPASATSQSAGLLASSRLAGDMDGGGETLLVRRSKGKKRPQPAAPAEEGSGSGGRFRAIWRDYHDLLQETEAKRKRLASTKRRSLALLAEVKFLRRKYQSFLRGGS

SEQ ID NO: 191687 - protein, 66 aa, Zea mays
  Clone ID: MRT4577_1063C.1.pep
KKKIFFLCQWEWEEKRWLQNKEVLIMVGVQWFRAPNDEQMGWLDWVRCMYMSHAHFVHAFAAPYNE

SEQ ID NO: 191688 - protein, 81 aa, Zea mays
  Clone ID: MRT4577_106400C.1.pep
QVVNHGVSKPVMAGAFEAASEFFQLSPEHKELFASTDIGRPVRYDTSSRDGISRARSFLKHYANPLEDWVQYWPLHPPSYR

SEQ ID NO: 191689 - protein, 174 aa, Zea mays
  Clone ID: MRT4577_106401C.1.pep
MDHHHPQQQQQQYGDPYRGLMTSPQPDHHLHALQYHQPQPQQQPALMSPPQPQPALMSPQPQQTLMSPPQPQQHHHASLASHFHLLHLVTRLADAIGTGTRDQNFDALVEELTSQFARCQQLLNSISGTISSKSTTVEGQRQSLDETRQLLDQRKELITKYRGSVEELLKGDQR

SEQ ID NO: 191690 - protein, 82 aa, Zea mays
  Clone ID: MRT4577_106402C.1.pep
LDLKRRLGSSLFIVCVSKGGSHRSGANDPCFYFLKNTNFYPVGEIPCQASPFKMYGGGCLKKDPLFGEQGVLFAMGPTFPPP

SEQ ID NO: 191691 - protein, 115 aa, Zea mays
  unsure (1)..(115): unsure at all Xaa locations
  Clone ID: MRT4577_106403C.1.pep
RGQGRKXXSNXIGSNXTPSSFLXSFPLSVSSPPPSSTSLLPIAPSTIPPPSTSXTSNXSSLXPXTPPFTLYFTSKPTFXISSTIPPSFPITSXHFTIHHTIXNSQXPQSXFPLHF

SEQ ID NO: 191692 - protein, 84 aa, Zea mays
  Clone ID: MRT4577_106404C.1.pep
APAQQLLPTVAAEVMLPTMSHVPRGGPPPPMSNCRWLSRFNALFGHSQASTTSNDTLGPLPKALAASTALGADGGSPSPAMLIV

SEQ ID NO: 191693 - protein, 76 aa, Zea mays
  Clone ID: MRT4577_106405C.1.pep
IADLPLVALIGGEGQIHTGLGEFYLFLVTCAGGQLGGLFSWGACSALVHLGEQVPTELLFKHSGPFLLPSGNWGLF

SEQ ID NO: 191694 - protein, 52 aa, Zea mays
  unsure (1)..(52): unsure at all Xaa locations
  Clone ID: MRT4577_106406C.1.pep
RLYAANTVVVLELAKRPGREGXLIETDLPSLGQRYLSFALFDELLKEAQAME

SEQ ID NO: 191695 - protein, 150 aa, Zea mays
  Clone ID: MRT4577_106407C.1.pep
MAGSRNSSDVSPSNIIKPTWETLPAVEQLQFEEHKEQLIQEAKAKFLANFKVDRNNKVVRQRATDPASLRPTPDIPNRWYPLPTSHVTRLPRDLDFPYTSTEEARHGNTTRPLQSSTSFRKPATVYRKLQCRDPSPDRHRSKINPRTSLH

SEQ ID NO: 191696 - protein, 87 aa, Zea mays
  Clone ID: MRT4577_106408C.1.pep
GCVDGRVSKLAYSLSLTNPRVSVRCCYWTDGLCVSIRRVSAKAVNSLPARNSLHQASYTNSSPSTHPIPNSYLNPPPDLLYLPNRTS

SEQ ID NO: 191697 - protein, 75 aa, Zea mays
  unsure (1)..(75): unsure at all Xaa locations
  Clone ID: MRT4577_106409C.1.pep
VHIVIHADPLHTYWVTLVEPDRSELISWASIQGLXHMMILYISASFEAQXELLLCLDNAGHPAPVEKVEMPDDLS

SEQ ID NO: 191698 - protein, 146 aa, Zea mays
  unsure (1)..(146): unsure at all Xaa locations
  Clone ID: MRT4577_10640C.1.pep
MMATATYAPLGSYAMKSMTGXSRPRGLLGTGLTRTRSRFSVXADILPEKATYHVAKAMIGDPFIMSLETLVTSSQLIVCYLSNLPTYRTAXAPLLRRIQVSLTHGYLINRTFAVTATLRKSPMNSTLEARIGDVVLDPILGGCLTM

SEQ ID NO: 191699 - protein, 94 aa, Zea mays
  Clone ID: MRT4577_106410C.1.pep
HASGHAQYMWLSRFSATPSVSEKSALTEVATIGNDPPLKCCAPHCVHASRKRSGHYSASPCPMAVVLSTSPHPRRASHGTNSLGSAWAFLEVLT

SEQ ID NO: 191700 - protein, 75 aa, Zea mays
  Clone ID: MRT4577_106411C.1.pep
MSPSMAASAPKRYGTGDCPAAGIVLDDLGDGAAGPWLMPAVPATPTPIGSSAPAGHMWFRWSFSACHCQRRRQAR

SEQ ID NO: 191701 - protein, 65 aa, Zea mays
  Clone ID: MRT4577_106412C.1.pep
MVRPRLLLTFLLAAAVVLTTVPGVTFDKSKLDKNSDYVLNGPLLTEKIQAKKTLIVGPDEDFKTV

SEQ ID NO: 191702 - protein, 76 aa, Zea mays
  Clone ID: MRT4577_106413C.1.pep
YPEFEKSCANVLSTVEPSHQVCAPLGNGSSLSKEALMHPCKLSSEALPSAMSNHISRLHQRRNDNTTVLNHSSLPR

SEQ ID NO: 191703 - protein, 93 aa, Zea mays
  Clone ID: MRT4577_106414C.1.pep
GGGGLPKRVRGSMFENQNLPQKDNGVKGEDLMGRVERTCMGCPEPRSLQTIVYYDFKLSPRADKARVDQARAPGGGPLSVLPHAWLHILVQGG

SEQ ID NO: 191704 - protein, 78 aa, Zea mays
  Clone ID: MRT4577_106415C.1.pep
PPGFIASIQNFVYLYTGGFFSLQEGALINPFCFRTVKNKSIKKKKKKKKKKKKKKKKKKKKKKKKKKKKKKKKKKKRR

SEQ ID NO: 191705 - protein, 240 aa, Zea mays
  unsure (1)..(240): unsure at all Xaa locations
  Clone ID: MRT4577_106416C.1.pep
SLLDSTLFFLERDCSVSLSLSPGGSSAARQPASSPARRPASSTTRRPAADATRQPTGRTDPRTRGGPAPDRSSARGLPGXDGSPVPGGQXAAACRSSPGXGGSSPGWRPASSPARRPASSPARRPTSSTTRRPAADATRRPTGRSDPRTNGSPAPVRSSNAARWPTGRTDPRMNRSPASRLASSPAPRPDSSTAQRPAGLLQAGGRGSLPVFSRRADAAACWYSLELGFQIGDYLSVAIM

SEQ ID NO: 191706 - protein, 36 aa, Zea mays
  unsure (1)..(36): unsure at all Xaa locations
  Clone ID: MRT4577_106417C.1.pep
FGRSSXPADGLDXLTXVSSTSCXGLSFRNAFXDDAS

SEQ ID NO: 191707 - protein, 71 aa, Zea mays
  Clone ID: MRT4577_106418C.1.pep
FFLEGIYRGWGHIKCRLAILICKHDQAKRPTTSSTGPEMVPEPRAAGRKQTSCFRNTSRQSGTATAHSRYG

SEQ ID NO: 191708 - protein, 242 aa, Zea mays
  unsure (1)..(242): unsure at all Xaa locations
  Clone ID: MRT4577_106419C.1.pep
ALSVISANSVISASDFSYFSKPSASVISANSAKLQRETTRAQAARGKDIARRLELRPPSSRGTEPLETRSNRGSGAAGGRRGSVRPELRPRSXQRHGAAEDRPRIRPPGRSPRRVRRRPPRRXEEAAVPVKKXRRRAGEEAGLHAGEDPPAWRRPTGCRXSPAWRRPAGRRAVKESGRGAGEXKPRRRGYTRHRRSVHXGRPRAEDLSXRRSVRPRIRSPGRLPRRVRRRPPRRRRSRPPRR

SEQ ID NO: 191709 - protein, 83 aa, Zea mays
  unsure (1)..(83): unsure at all Xaa locations
  Clone ID: MRT4577_10641C.1.pep
FGKGGQLTDDETTIIGGALVLTEKTAGEVMTPIDXNYSLDVVSRLXGKLVGKILARGHSPVREYSGNHRNMIELVLVNSILTV

SEQ ID NO: 191710 - protein, 92 aa, Zea mays
  unsure (1)..(92): unsure at all Xaa locations
  Clone ID: MRT4577_106420C.1.pep
XFFIYFFFCFFVGFLLKYIMQPGTRGKQGTRSPERTRKPMPTQKHDIMIPKAGKKTKKKPGERQPKALGSPESTKRRLGTETQLDLERTKKM

SEQ ID NO: 191711 - protein, 145 aa, Zea mays
  Clone ID: MRT4577_106421C.1.pep
KKKKNSPSLLRLDILGGAAACFFTGVAASSPARRPASSPAWRPTSSTTRRLAADATRRPRRSDPRTNGSPALSDLRTRRGGLPGGRIHGRMDLRRHGLLLHRRRGLILRRHSGLPVFSRRADAAACRSSPELGFQIGDYLSVAIM

SEQ ID NO: 191712 - protein, 182 aa, Zea mays
  Clone ID: MRT4577_106422C.1.pep
KKKKKKKKKKKKTKLSLFFCAAGLFFPDPDSNSPSLLRLGGTAACFFTGVAASSPARRPASSPARRPTSSTTRRPAADATRRPSGRSDPRTNGSPAPVRSSNAARWPTGRTDPRMNGSPASRLASSPAPRPDSSTAQRPAGLLQAGGRGSLPVFSRRADAAACRSSPELGFQIGDYLSVAIM

SEQ ID NO: 191713 - protein, 93 aa, Zea mays
  Clone ID: MRT4577_106423C.1.pep
IRLEVLSPFHSSTGLIPQLRGALPSEGGGADRRGAAGDGDRVRHDPLKARPPRREASPLPRPLGWHGVEGTAGDPADSAWIASFSRRGYEQCT

SEQ ID NO: 191714 - protein, 120 aa, Zea mays
  Clone ID: MRT4577_106425C.1.pep
SRTHRTQLQPTSSRSQISQTIRQPGLSHQSPEWWRSHLFQATLIVAPRSPMTRYSMHTCPAQQFSVGGTASGTTGCYPRLAHSAGAGTGAGTRPSRSGRRRSPRRCRRPRPRPRVLGRVG

SEQ ID NO: 191715 - protein, 85 aa, Zea mays
  Clone ID: MRT4577_106426C.1.pep
FPSRIKSSRGGLWAILRKAKPAISCLSTWGSANEGHTDRRCNQATNATLDACISHDPDSAVACSTCSKTNMMMAFSEITTKATVD

SEQ ID NO: 191716 - protein, 270 aa, Zea mays
  unsure (1)..(270): unsure at all Xaa locations
  Clone ID: MRT4577_106427C.1.pep
MEEDDEFGDLYTDILIPTHTPASTSALSNPVLVETLHRPPPHPNPTPVAAAAEEVDDDWLLGGSEPIPGVDPTGDWADEDDDGGEPAPPAKRSTSADDIDPLMGGGAGDSGPVIPGLSSSSAAGAAGSDEWDSDSEDDIQIVLNETDGRPGLVEDEGDDEDGEDLVIVADXTNAMEEQDWGEDPAAAGAEGERKDGGEPGKTAAAPGGRIGYSGGGQGFHQQHHSMFKVSYLGQEAVRCALATPAEGDGINLAATRYPLCCTVLVCGNFL

SEQ ID NO: 191717 - protein, 71 aa, Zea mays
  Clone ID: MRT4577_106428C.1.pep
PGPPIIDVRINNIVMTHQIPYRYMPLRRRMILGILHGRRKHHVRPSLPLHFDHTYNLCNTRLDTGGASSDT

SEQ ID NO: 191718 - protein, 154 aa, Zea mays
  Clone ID: MRT4577_106429C.1.pep
VHLTRSHTSSLPLFLSFLLLIPSSLHTMLASIHEKVSSLVNRHRDTIGKVVDPALVQGAVDKANPSKNWDYTITFKGAKDVPRGDILSSDPFLEAYVGAPEDPQTLAFVTGIHWNTLNPVWDAVWELLNVADDTVLDLHIKDKDKMKEDTPLGK

SEQ ID NO: 191719 - protein, 61 aa, Zea mays
  Clone ID: MRT4577_10642C.1.pep
SEASEREWDDPTSCLFRPEALTQEIPPLPHHSCHHFFWVMQQELNCSHSRMCRSFWLQLSN

SEQ ID NO: 191720 - protein, 115 aa, Zea mays
  Clone ID: MRT4577_106430C.1.pep
EPRGGQRVEALLVVNVEDDVQRPPRGVVDTDHGEPTSLLRHGVLQRPGAVNGAGRRRGGRGAFVAPSNRHRLGCQDMLLTVQRARVVGEGERPEAGVAGEGREVERLEERPCRWP

SEQ ID NO: 191721 - protein, 109 aa, Zea mays
  Clone ID: MRT4577_106431C.1.pep
IRDLTATPPPTDPCRPFAAKPHGSPRWSPSLIYQRPYASWQPQGMPLFIRLWCRDMHGGPRKQAPMPWWLPLHLICITPSPLGHTALPDDRSCRSIGIPPHRHDQAAPP

SEQ ID NO: 191722 - protein, 83 aa, Zea mays
  Clone ID: MRT4577_106432C.1.pep
CTLIHCTYLCTLNQPPNNFNVKQDGTQMNTGYTTEAHINLHSAKRTVQRLKHRRETDIRNSKGAHTSGPKSKPIESLPKRTRT

SEQ ID NO: 191723 - protein, 101 aa, Zea mays
  Clone ID: MRT4577_106433C.1.pep
SIAYYPPRACQRAALAYIVLCSLRARRRRTWHCPDTNAPQQNKCSSRCSGLNDFWMQHFLLLCSGIQKMPLWAQEDNVREACMQLLKEIDSSEAEQLAPFN

SEQ ID NO: 191724 - protein, 97 aa, Zea mays
  Clone ID: MRT4577_106434C.1.pep
VCFYMFWLVSWIYGFFPFFLLVFFEYLEFNTFTLLIIFFFFFFVACVFILLYYVLLFQFLCFFTFFSNRVVHLYVGVFGLQSVSHSFLRPDIRLGTV

SEQ ID NO: 191725 - protein, 43 aa, Zea mays
  Clone ID: MRT4577_106435C.1.pep
RRGCALDLAMNGWLCNALRASCRGQWLAITATYEGSSIAGRPT

SEQ ID NO: 191726 - protein, 47 aa, Zea mays
  Clone ID: MRT4577_106436C.1.pep
RPNSSQSLVRLPYIWMAWPTVIIGLCCGKYYRHSLEYVSSSDTFLIP

SEQ ID NO: 191727 - protein, 138 aa, Zea mays
  unsure (1)..(138): unsure at all Xaa locations
  Clone ID: MRT4577_106437C.1.pep
DHHFXSKGDVGANNTYPKHDGTVRKKGFFAIRKRPCTAAEASSAXTAKYGHAXWHFVVVDVYXNGKKLENIVASTHNCDVSLLTSDGNSKDDLRLPTDETLVRQIKEGVESGKXDLVVTVQSAMXEEQICALKDDDLK

SEQ ID NO: 191728 - protein, 442 aa, Zea mays
  unsure (1)..(442): unsure at all Xaa locations
  Clone ID: MRT4577_106438C.1.pep
MATRLASIFSAVRSPTSAPPHTLRRALPSFSYRRAHPSQPRMSSSSAASSAPPAAEKPTVAPFGSWRSPITADVVSGADRRLGGIALAGDGRLLWIEGRPEEKGRMVIVKEEDNPVDVIPQEFAARTLAQEYGGGAFAVDKSVVVFSNYKDQRLYKQTIGTGGPPVPLTPDYGAPNVSYADGVFDPHFDRYVTVMEDRRKDSLNPTTTIAAINLSGXCSCLHMLYIEEPKVLISGNDFYAFPRIDQNKKRIAWIEWSHPNMPWDKSELWVGYFAESGDLTKRVCIAGGNRLLIESPSEPKWSPKGELFFVTDRGSGFWNIYKWVEQTNEIVPVYSLDAEFTRPLWVFGISSYDFLGNSDHIVFSYRQQGKSHLGVLDCDSGSISLLDIHFSDLSDEVAADDYFYIEGASASIPRSIAKVTLNESKTKVVNFSIAWSSSPDLV

SEQ ID NO: 191729 - protein, 76 aa, Zea mays
  Clone ID: MRT4577_106439C.1.pep
TALEEEVFQAPDILGPSALEEIDTLSESKNKGSDKAETRGDKKRKSSEKPSEKKEANKPPDSWFDLKVNTHVYITG

SEQ ID NO: 191730 - protein, 83 aa, Zea mays
  Clone ID: MRT4577_10643C.1.pep
GFCGGPRQNVVFRLKQLQCNLHGMMSLFSEVLNAHSHHRKCNFFLHRHFKCREESGISPSDDIKTLMCRFRPGDASLVPVWSE

SEQ ID NO: 191731 - protein, 156 aa, Zea mays
  unsure (1)..(156): unsure at all Xaa locations
  Clone ID: MRT4577_106440C.1.pep
GPXSRGRALLLIIPRAASSSCRPLRLLVTSPMACGWLHPVPAGAATVAALWPCFLSPVRQSFTKELNQFQRWKLPLNAAKSQRESWNLADRSSSGSSEGVAAASRPADAPTAQSALPMTRSVDAVPGAPIVISGYWTGPGVDDGCGSVEAVLQRIA

SEQ ID NO: 191732 - protein, 53 aa, Zea mays
  Clone ID: MRT4577_106441C.1.pep
PRVRPRVRPLVRPRVRPRVRPRVRFFFFFSGNVTFYNWLATYIIQKTLLLNYI

SEQ ID NO: 191733 - protein, 97 aa, Zea mays
  Clone ID: MRT4577_106442C.1.pep
TNTSRTSLLALYCIDPSSVSTAPLSSAGNRYHPPVARRPWRMIDTSSIGRSVVGAARAGERPHQAPPQSTQRGAPPRAHRHRPTRHPLLPPPRRQRH

SEQ ID NO: 191734 - protein, 109 aa, Zea mays
  Clone ID: MRT4577_106443C.1.pep
PHAPGNLGFRVFFPCHGAGSLVPVPLENPGAGVCSFFRQRPPPWPVNFGGFFFDGFPLVPQGEVLGGLFPPPVLGFLAGLVPVGAFYPVNAFGFFHFSPRPPPFFPLWG

SEQ ID NO: 191735 - protein, 352 aa, Zea mays
  unsure (1)..(352): unsure at all Xaa locations
  Clone ID: MRT4577_106444C.1.pep
MAGAGCATXAAAGGGGGAGXAVARTGVGAGGAVADPRAEALRCPRCDSANTKFCYYNNYSLSQPRHFCKACKRYWTRGGTLRNVPVGGGCRKNKRSSRGSGGGRNGSSSSFSSSSADSTALPLPPPPTTTGSLPSSLGLPGGASLLLGSALPGGAGDHHHLGLFQAAMQSVVSSDATAYDEMQQQQQTQLDHLLGLGYGGAGAQIQLKPWMQEAAGAGGAAGIMDSFYAPLLSSSLVPGLEELHVKAEAAGAGDHQQKPSSRDQQSASWDWELPTPSSSNVDANVTASDALMAAAAAAAAASMNPAVSVSSTPSAAPTAPSSFLYWGNGGIGGAAAAWPDLANCGSSIATLF

SEQ ID NO: 191736 - protein, 92 aa, Zea mays
  Clone ID: MRT4577_106445C.1.pep
NQFVSYFLRGVLTLFRDNKIFLVVFPLKKNKFLGGNFHLLAGYSPGGFFMIRMGGPPQRRGCCKIGDPGFFSFKVLFWEYILYKGRGLCKKS

SEQ ID NO: 191737 - protein, 117 aa, Zea mays
  Clone ID: MRT4577_106446C.1.pep
SFESMIFELYEEGRFDQADRLFQDMAKKGFRPTICMYEAKIGALCRERNVDDAVEVLEEELPKNDLVPTVTTYNLLMKGLCDTMQSMRALEYLKKMDKQLGCVAQKDTFSILVHGLC

SEQ ID NO: 191738 - protein, 93 aa, Zea mays
  Clone ID: MRT4577_106447C.1.pep
QRGSSIITMQFSTLYYIKASVSTIVMRHIFTNNLSHLFQINPLHAHRADNLHVPNHTFACRWPNGRPSTALLDPTPTVPAQSRHAGLLIMPAR

SEQ ID NO: 191739 - protein, 44 aa, Zea mays
  unsure (1)..(44): unsure at all Xaa locations
  Clone ID: MRT4577_106448C.1.pep
AGFTITYSNNMTFGTIKGAGHTALEYEPXRCFAMFSRWILNRPL

SEQ ID NO: 191740 - protein, 101 aa, Zea mays
  Clone ID: MRT4577_106449C.1.pep
GGFPLQFGGVPFPLSISSQPPRPFRVEKLPWALPGPLGGFFFCSVLGVDICSFTCCAPPLFLCCSCRRGFPFLGMGGWALPPSGFGFCLASFLVNFAIGVL

SEQ ID NO: 191741 - protein, 155 aa, Zea mays
  Clone ID: MRT4577_10644C.1.pep
HWVPRGRPATPSLRFCVVRRLLYCVVSMLMICERWLWRILSRPLPQVQAVAGGPRADEVHLRCGREDLGPRSAPLLRGPRRQLDDNVFSDVHHGVLINRTKDVTEAAGGIDYHRISSSVMHLYTISITHKLNLVRLIRFCSEMRDALVKYQVICN

SEQ ID NO: 191742 - protein, 165 aa, Zea mays
  unsure (1)..(165): unsure at all Xaa locations
  Clone ID: MRT4577_106450C.1.pep
MVTGLKNLERRXSAPRHWMLDKLGAPFAPKPTXGTQKSRESLTVVIIITNRIKDALTYPEAISILTRHHGLVDSKIWTDKTYPAGSKDAISIPQTNDNYRVLSHTKGRCRLHPIKHEDAKCTLRKVMTVQFEHKDIPYLNTYDGRTIRYPDTLIRVIDIIKIGLE

SEQ ID NO: 191743 - protein, 76 aa, Zea mays
  unsure (1)..(76): unsure at all Xaa locations
  Clone ID: MRT4577_106451C.1.pep
FLLLLCSCQEQKRTTRCSFFYGGGSSNLKNCHEXFLRQQRSPMGRPPLRSRGMQPGAAXVLPRPCWPDLRQSEPQY

SEQ ID NO: 191744 - protein, 276 aa, Zea mays
  Clone ID: MRT4577_106452C.1.pep
MCGGAILANLREPAPRRLTERDIWQQKKKLKRGGGGGRRSFAAEDDEDFEADFEVFEADSSDSDLELRERTDDDVVEIKPFTAKRTFSSDGLSTMTSAVARSAKRKRKNLYRGIRQRPWGKWAAEIRDPQKGVRVWLGTFNSPEEAARAYDAEARRIRGKKAKGSNSFGCSDLGWENDTKTPDITSIAPISTIAEGDESAFVDSNSNSSFVLPALENSAVDLTDGLTDLESYMRFLLDGGPSDSVDSLLNLDGSQDVGSNMDLWSFDDMPIAGDFF

SEQ ID NO: 191745 - protein, 37 aa, Zea mays
  Clone ID: MRT4577_106453C.1.pep
FKLGDPTKEIWRRKLGDVKLEPKEGPAFNYNFIGYVI

SEQ ID NO: 191746 - protein, 257 aa, Zea mays
  Clone ID: MRT4577_106454C.1.pep
MCGGAILAELREPAPRRLTERDIWQQKKKPKSTFSSPRVRTMTSAVARSAKRKRKNLYRGIRQRPWGKWAAEIRDPQKGVRVWLGTFNSPEEAARAYDAEARRIRGKKAKVNFPDAPAVGQKHRSGSASAKASKSSFGQKPIVKGSNSFGCSDLGWENDTKTPDITSIAPISTIAEGDESAFVDSNSNSSFVLPALENSAVDLTDGLTDLESYMRFLLDGGPSDSVDSLLNLDGSQDVGSDMDLWSFDDMPIVGDFF

SEQ ID NO: 191747 - protein, 153 aa, Zea mays
  Clone ID: MRT4577_106456C.1.pep
QSSPELQQSRPDWGRKFRFAEARGAGSKSTQLWLEAAPRCTAGGRRRETGGRAGKRAQPRARGSGPQFRLSCWLHAGPCPSRWRDLGLPISKTEPPRSRSRSESIPEVRFETALTEGSPVWSGTSSPGTRPPAPWIGDWPNPPLVPVGNRFGG

SEQ ID NO: 191748 - protein, 62 aa, Zea mays
  Clone ID: MRT4577_106457C.1.pep
NRHYDMQCKLYDHALLVSSTETLLGKRSTALSSLHMHVNNRRVLNGMQALLLHALLLPNQGH

SEQ ID NO: 191749 - protein, 58 aa, Zea mays
  Clone ID: MRT4577_106458C.1.pep
KGRCGVVVRVVSLSHKSGFQSSLSVSNLECLPRFILSQTARPHSCGSLWQWVCLTSPR

SEQ ID NO: 191750 - protein, 363 aa, Zea mays
  Clone ID: MRT4577_106459C.1.pep
MCGGAILANLREPAPRRLTERDIWQQKKKLKRGGGGGRRSFAAEDDEDFEADFEVFEADSSDSDLELREGTDDDVVEIKPFTAKRTFSSDGLSTMTSAVARSAKRKRKNLYRGIRQRPWGKWAAEIRDPQKGVRVWLGTFNSPEEAARAYDAEARRIRGKKAKVNFPDAPAVGQKRRSGSASAKASKSSFGQKPIVKVAMNNLANTNASFFQSASYPSNSFVQHGNIPFVPAMNSTASVDDPIMNLHSDQGSNSFGCSDLGWENDTKTPDITSIAPISTIAEGDESAFVDSNSNNSFVLPALENSAVDLTDGLTDLESYMRFVLDGGPSDSVDSLLNLDGSQDVGSDMDLWSFDDMPIVGDFF

SEQ ID NO: 191751 - protein, 220 aa, Zea mays
  Clone ID: MRT4577_10645C.1.pep
MLKLRQSEEKVISLSKEKEQLMKERDAAFQEAHMWRVELGKAREQAVIQEATIARTEEKARVSEADAAARIKEAAEKLRTVEKEKEELLALVGVLQSQVQREQSSTKQVCGERSESCSGADSPPPLTKHVDASDDDVDKACVSDSRPVLVSSDSTEVQLAVDGVDIRPVGDAEWGGFQQSDALIADVREVSPEADGGSLDIPVVNPPPISDHVQGGATHP

SEQ ID NO: 191752 - protein, 115 aa, Zea mays
  Clone ID: MRT4577_106461C.1.pep
MARTAATKLVLVALVAAMILAASDAAISCGQVSSALTPCVAYAKGSGTSPSGACCSGVRKLAGLARSTADKQATCRCLKSVAGGLNPNKAAGIPSKCGVSVPYTISASVDCSKIH

SEQ ID NO: 191753 - protein, 65 aa, Zea mays
  Clone ID: MRT4577_106462C.1.pep
SGLLVLVRQIRMLHVLSFILKHWCQAIRMVRCNVSCVIGFIMSLSPTLVASAAITKSLSARFNPE

SEQ ID NO: 191754 - protein, 65 aa, Zea mays
  Clone ID: MRT4577_106463C.1.pep
AQAFCLDGSSSYTIYTDATAEDFDDAQRAMITDTHRWKQMTNIYDQGSNVEQRQPLILWPWCGPT

SEQ ID NO: 191755 - protein, 78 aa, Zea mays
  Clone ID: MRT4577_106464C.1.pep
NFPPRWGGLWLSLRAFPEKGALPPLVSPLGTPEALFRSGLKKKVKNPPTTGNPLGNGGPPRHWIQNKQKGGYCFSKII

SEQ ID NO: 191756 - protein, 64 aa, Zea mays
  Clone ID: MRT4577_106465C.1.pep
HDQEFTIFCMIRLVYDPRAVSSMATLRVTIFMLIIVGANWNSRLSGDRHIKEGVSYAPCSLTNF

SEQ ID NO: 191757 - protein, 103 aa, Zea mays
  Clone ID: MRT4577_106466C.1.pep
ALSLVLQLAPPLCSPSPPWFPWRPPLFGGRRPPSLSSWRRLGGMCLGLLGTLRRRQALPASRHACCLYVRALSVTRRGWIGSEPIECGEHHARGASDGSKVQS

SEQ ID NO: 191758 - protein, 76 aa, Zea mays
  Clone ID: MRT4577_106467C.1.pep
GRVGSYWSNLGGYYLNNRHHIESYNPSVYGNISKLEDCRMDVVSVVEIVSYWSNPGGYFSEGNDISHFGSRYEMHA

SEQ ID NO: 191759 - protein, 183 aa, Zea mays
  Clone ID: MRT4577_106468C.1.pep
AEHRALLRPSSFISAISDDNEGCKERAFEPSEKVIVSVSGDPEGDASEERAFYASGGCMPPFSWRKLWAFSGPGFLMSIAFVDPGNIEGDLQAGATAGGTLLWVLVWATAMGLLVQLHAARLGVATGRHLAELCRDEYPDWARRALWLMAEVALVSADIQEVIGSAIAFKILSHGLLPFWGGV

SEQ ID NO: 191760 - protein, 69 aa, Zea mays
  Clone ID: MRT4577_106469C.1.pep
IFFFFFFFIFGFFLFFFVGAQKSFFHVFFWVHLPVHYLPRIKIKSPYARNHPSILNQIPSTFTQKITFC

SEQ ID NO: 191761 - protein, 94 aa, Zea mays
  unsure (1)..(94): unsure at all Xaa locations
  Clone ID: MRT4577_10646C.1.pep
AWVAISCLPLVPSVPSAVLPTAEHLSGRYSSRVGNGTVCRFAVPTYLRLVPIERXSRCSGAPCAGDAPAPIMGTIPSPLYVCWNVDCIHQYQEV

SEQ ID NO: 191762 - protein, 47 aa, Zea mays
  Clone ID: MRT4577_106470C.1.pep
PREGRGLCLGKGLLGKDESRLRARWEVRGDRSVQGCLGLPRSCGLSS

SEQ ID NO: 191763 - protein, 49 aa, Zea mays
  Clone ID: MRT4577_106471C.1.pep
LNYYAYNVSTNTLIICSFILTFMKYYSFDTSRTSENNSREMIYILMVND

SEQ ID NO: 191764 - protein, 67 aa, Zea mays
  Clone ID: MRT4577_106472C.1.pep
MSSPREQYGNTVHLFIGTGRSPCKITLMPFTFIDNSILILRGLVWLFIFKSVSPFRRDAEALLHIAS

SEQ ID NO: 191765 - protein, 58 aa, Zea mays
  Clone ID: MRT4577_106473C.1.pep
FGSRGDCLLTGLNRLGSIMDPGDVWILLKAMLAARLITLWSTTLLHCYDRSVLTGGSF

SEQ ID NO: 191766 - protein, 73 aa, Zea mays
  Clone ID: MRT4577_106474C.1.pep
LERRGPRSCGAAPSCPDCVIAYHIILTQIVSMSYRAPTIQNGSLEDEGEASCMLWLRPNHHIRRPALFSLDPK

SEQ ID NO: 191767 - protein, 113 aa, Zea mays
  Clone ID: MRT4577_106475C.1.pep
STVHKVPRDHQSGFNSLVILGAWSLRRHRSDYVFNGRSSSLASTLSPAGYELRMWCSAGTKGLNMLSTHVFMLDPGDSLVSCSEWLCVVAVLRLVCLVVSCVLCCTFLYLLME

SEQ ID NO: 191768 - protein, 64 aa, Zea mays
  Clone ID: MRT4577_106476C.1.pep
VSVGDPALADARYRRSRFGKTLSRCNIMIEGESYDSIDNVMARTQDKEASPHGHLARYVLRQAA

SEQ ID NO: 191769 - protein, 56 aa, Zea mays
  Clone ID: MRT4577_106477C.1.pep
KHYKINESLGQGGNKINSRYYIWDGKVNPLLLKQAKPRGGISKARGKGPGGQNKGN

SEQ ID NO: 191770 - protein, 130 aa, Zea mays
  unsure (1)..(130): unsure at all Xaa locations
  Clone ID: MRT4577_106478C.1.pep
MKLVRFLMKLNNETVTIELKNGTVVHGTITGXRSIMVYIYGQLSSDSVDISMNTHLKTVKLTLKGKNPVTLDHLSVRGNNIRYYILPDSLNLETLLVEETPRVKPKKPTSGKPLGRGRGRGRGRGRGRGR

SEQ ID NO: 191771 - protein, 93 aa, Zea mays
  Clone ID: MRT4577_106479C.1.pep
FHTWSQAPLSAGRVLLCLKQFAPGGGCYFALSRLAPGSPSGPCSTAPAPSSCPLLRPGCQAWAPGFSSPRIPSCGLAAGGFLGPESRPGCPRV

SEQ ID NO: 191772 - protein, 99 aa, Zea mays
  Clone ID: MRT4577_10647C.1.pep
SHDETGKAPMMDMDAPDVRDLVIREPSTHEDPPPVVFFKMRAVHLAQYFKIPFIRRFVCLVVVVVVWPRSEHRLHYYHLPHHDYISHDNPGLSAKAINS

SEQ ID NO: 191773 - protein, 114 aa, Zea mays
  Clone ID: MRT4577_106480C.1.pep
MKLVRFLMKLNNETVTIELKNGTVVHGTITGVDISMNTHLKTVKLTLKGKNPVTLDHLSVRGNNIRYYILPDSLNLETLLVEETPRVKPKKPTSGKPLGRGRGRGRGRGRGRGR

SEQ ID NO: 191774 - protein, 149 aa, Zea mays
  Clone ID: MRT4577_106481C.1.pep
LIMVVFVGFSNILGFTLRWGPDGALRVAHEQDPGGENCGGLGCRQAFLRCRRARSRLHREAQPNPAGEGLLRALGHPDGGCYGRELSCGCNRTRAAGKQGRGRCFCLTTQSGRSRGINSLSSGCWGHACARHTGSCFYLLGGRAGGREH

SEQ ID NO: 191775 - protein, 67 aa, Zea mays
  Clone ID: MRT4577_106482C.1.pep
KRGQQELNTERLPPGANFARAYTGSGSCSPLQLTGARTCSKKSPLSATPQIECRGGEVKALNVSGRG

SEQ ID NO: 191776 - protein, 72 aa, Zea mays
  Clone ID: MRT4577_106483C.1.pep
GDGEANASIGTTRCYCKPRPWLTPCGCGENLASIVLMMVYMAWYDLGVEYLMPQLVDSDDALLLLLPVSSVR

SEQ ID NO: 191777 - protein, 143 aa, Zea mays
  unsure (1)..(143): unsure at all Xaa locations
  Clone ID: MRT4577_106484C.1.pep
DSKADKGDYGVHSGDIDLXELTDGHGYYGMKTIPCAXKSPNFRDGLSTXTTAGSDAHAAWVAKGKRXNEYRGILQRAWGKWALMIRDSHQGARVRLGTFNRPNVDERSYDAEMRXIGRKNVKVHYTDAPSSGQTRPSRSTAPQ

SEQ ID NO: 191778 - protein, 583 aa, Zea mays
  unsure (1)..(583): unsure at all Xaa locations
  Clone ID: MRT4577_106485C.1.pep
LAGSRTAPQLHALAAPVSPTPQQQLPASCAAPPLHAFPAPVSAPPPLSSIPLLTGPMQPAPISSAAPAPAPVDLTRAHAATQQEGFSFSSMSDSESDDEPGDDDMTAETGGNQDRLGKRKRXTAAAAAATRXXLSSRGSCSRSSTGRRKCSGRSWRPWRSGRRSXHAREEAWRRQEVARLNREQEQLAQERAAAASRDAAIIAFLQRISGQSVQPPATAVVVPMPAPVSVHTTPPKQPSRQQQQPPPPSPQATPQSKPISAAPLQQQPPQQQPKDTSQQDAGTPRSLPPASSQSLELVPFAATEHHVDSGLGGGDGGAASSSRWPKTEVHALIQLRMDLDMRYQETGPKGPLWEDISSGMRRLGYNRSSKRCKEKWENINKYYKKVKESNKKRPEDSKTCPYFHQLEAIYNRKHLSSLTTAATSSTAAAAAAPRPAYPDQLNPSRQEIEGKNINDDKRNNGGSGGGTQVPTSNGETATTTTTTPVAFDADTGMKKPEDIVRELNEHPRREFTTEDETDSDDMGDEYTDDGEEGEDDGKMQYRIQFQRPNPGGTNTAPAPAAATTAAPAVPTSAPTSTFLAMVQ

SEQ ID NO: 191779 - protein, 523 aa, Zea mays
  Clone ID: MRT4577_106486C.1.pep
MDAFMGSVLGALLAVLASTLLIGALFFLVWKPYVVTRWFRGQGIGGPSYRFLVGSLPEIKRMKAAGSKITLDVGSHDFVPIVQPQYRRWVSDYGKTFLYWFGAVPTICVAEVGLVKQVLAERTGLFPKDYMNDSMEVLLGKGLVLANGEDWKRHREVVHPAFKPDKLKTMSVVMADLVQRMMQQWRSQIQRASNHEAEIELSSEFSELTSDVIAHTAFGTSYKEGKEVFVAQKELQELTFSTWLDIPAPACLRKLKLPTSKSSRRVEELDKKVRSMLMAIIEGRLAARGTSGYGNDLLGLMLQARALEQEGHQMLTTEEIVDECKTFIFAGQDTTSHLLTWTMFLLSRYSEWQHRLREEVLRECGDAVPNPDTVTKLKLVNMVLLESLRLYSPVVFIRRAVGSDILLRSTRVPKGTMLSIPIALLHRDKDVWGQDADEFNPDRFEHGVSNAAAKHPNALLSFSQGPRACIGQNFAMLEARIGIAMILQRFSFELSPNYVHAPKEAVTLMPRFGLPIILRNLHD

SEQ ID NO: 191780 - protein, 210 aa, Zea mays
  Clone ID: MRT4577_106487C.1.pep
HWVPRGRPGRLSEGEGEQQEAARGLQDLPILPPARGHLQQKAPPQSHNRGGSSGASSNRWPREETQALIRIRSEMDATFRDATLKGPLWEDVSRKLADLGYKRSAKKCKEKFENVHKYYKRTKEGRAGRQDGKSYRFFEELEALHAAAPQPPPQHLPAASTAPQLHALAAPVSPPPQQQLPASSAAPPLHAFPAPVSAPPPLLVPPTQIS

SEQ ID NO: 191781 - protein, 59 aa, Zea mays
  Clone ID: MRT4577_106488C.1.pep
EGVFAVPPPHFFVDPFLLTVDIIKSCYLLQCTLIVLLFPVLCPLWQIYMSSFTVAKKKT

SEQ ID NO: 191782 - protein, 50 aa, Zea mays
  Clone ID: MRT4577_106489C.1.pep
SNPFSLHPFPLILPFLLNCILKDNTVLLFIPTSTLYHYFTSPSYPLILSL

SEQ ID NO: 191783 - protein, 104 aa, Zea mays
  Clone ID: MRT4577_10648C.1.pep
KGGALWLSGWKRVGKGHPFRPFWLFPKRPKGYFFPSRLVWLRQGFSHSNFGKEPPIPLFPPPLWADWAPKKPPPPARNFAVICDIRPWGGFFLGSEKTFIFSFF

SEQ ID NO: 191784 - protein, 81 aa, Zea mays
  unsure (1)..(81): unsure at all Xaa locations
  Clone ID: MRT4577_106490C.1.pep
RRLSLFPRTETKRTGPCSRAHKFQRSLQDYTMSDWTELNVEGKHRGIHPCITEGKCCLMINMILYGAAPSEGXIMQYISFS

SEQ ID NO: 191785 - protein, 55 aa, Zea mays
  Clone ID: MRT4577_106491C.1.pep
IFTQMNYGKTTCAITGSNAPSGIDPLLALSSPFSPFLICLPQQLVVIINLVLCIN

SEQ ID NO: 191786 - protein, 494 aa, Zea mays
  unsure (1)..(494): unsure at all Xaa locations
  Clone ID: MRT4577_106492C.1.pep
MGDYYYRRRSPHLLPAAVLALLAVVVVVSSSLPSAAAAGAGRNVITHIKGFEGPLPFHLETGYVEVDEEHGARLFYYFIESERNPAEDPLILWITGGPGCSALSGLLFEIGPLKFDVAGYTEGFPRLVYFEDSWTKVSNVIFLDAPVGTGFSYSREEAGLNVSLTESGRQHHVFLRKWVAEHPEFASNPLYIGGDSYSGYTVPVTAMDIATSSDDEEPPRLNLVGYLVGNAATDDRYDTGGKVPFMHGMGLISDELYEAAKQGCGGDFYVAPDPTNARCASAMMAINMVTFAVNPVHILEPFCGAAVRXAAAASSRATAAARGGRCWCGTTSATRAXAKQRLGLPVECRDNGYRLSYIWADDPEVREALGILEGSIGSWSRCTMLSHYRHDVTTVIPYHVNLTKAGYRALVYNGDHDLDMTFVGTQEWIRSIGYPIVSDWRPWFANRQVAGFTRTYAHNLTFATVKGGGHTAPEYRPKECQAMLDRWTSAAGQL

SEQ ID NO: 191787 - protein, 104 aa, Zea mays
  unsure (1)..(104): unsure at all Xaa locations
  Clone ID: MRT4577_106493C.1.pep
LDRWWWXSRLRRPTLSIRRLMRWSLQRRXASDLDHKXEEAVEKTVVXEEKPAVAANVEEKVATARRRQPTYRWEGERKTGRSKEAQDRRSSAQAKALTDWSRGM

SEQ ID NO: 191788 - protein, 137 aa, Zea mays
  unsure (1)..(137): unsure at all Xaa locations
  Clone ID: MRT4577_106494C.1.pep
CKHYTEQGHCKHSDTTLKNSKTLLFRDXPSTDPAHLNPEEXPRGEAVAENGNQSTEAETDKDKAAAQRKAGANKMAISAPSKDAPMLDDRDNEDADTPNVNMDLNDRRTTNCRAAPANGIHDNSQIMEDLGATDHAI

SEQ ID NO: 191789 - protein, 195 aa, Zea mays
  unsure (1)..(195): unsure at all Xaa locations
  Clone ID: MRT4577_106495C.1.pep
DHPISSHSRRSASPTAISVPXAPSPLPPAAPLEPRRPQRQNPSPEPPTRIARERERETASSRSVYAPRQLARPACFARRPPPLHAAAASGAPTRPLAAGARAAAITGRGQWPAPLPRGCRRPPREYKTSASHKRRRRRRLRWQPRLRRADLPDSALSLAAASTPLVGAAAQPCCCCCWLISTLYGLLCCLYLLES

SEQ ID NO: 191790 - protein, 105 aa, Zea mays
  unsure (1)..(105): unsure at all Xaa locations
  Clone ID: MRT4577_106496C.1.pep
MVCMWMAGFSLALLKPNLWTYSILSCLLLLSFPMLTXVFLCLSSYYYHILGSHYALVPLEVSIDMXKPSQSVLDKLLFLIMYKLKKYAMTNRQMHWHTNIHGLDV

SEQ ID NO: 191791 - protein, 94 aa, Zea mays
  Clone ID: MRT4577_106497C.1.pep
PRSPRPEKIPGWWKPKLGGPPFFFFFFFFFFFFFAHAFLYSLFSHKSAAKTRYNTRVSKKISSVCHRFSTLTSTDCLITLETSNAKTHNMKVVG

SEQ ID NO: 191792 - protein, 123 aa, Zea mays
  Clone ID: MRT4577_106498C.1.pep
MATEVNRDANADDPPLPQPAPSPSSEGKDANNIRDRVSFSSSSSRARPSCWGSIRIIHRFGRIRSRSRMGSDEHDTRASLGGRGRRCGCGCVCGGGKAGAAVGPTRSLLQRNDFYCDDCNTHA

SEQ ID NO: 191793 - protein, 62 aa, Zea mays
  Clone ID: MRT4577_106499C.1.pep
TLPKPSVDPSSSIYTGCRRRAMEWATRFLSAVCFFAAGVLFVPKALLGSHSVGAPAFTSAYL

SEQ ID NO: 191794 - protein, 77 aa, Zea mays
  unsure (1)..(77): unsure at all Xaa locations
  Clone ID: MRT4577_10649C.1.pep
IACXTGGCVSCFSPMGADRSAPASDILLMLCDQRSAMPAFEDTLERLDHEPTSRHPLYTGPQLTGCTAMLLRTWRLS

SEQ ID NO: 191795 - protein, 88 aa, Zea mays
  Clone ID: MRT4577_1064C.1.pep
LGSVHENMSEGGSRRNSFFPVFNSFSFPEHEHMNEHRDGNSDQQTRETYYAGEANNGDGLRASLLSQAASVEVNDTNTSFTSEGSSSY

SEQ ID NO: 191796 - protein, 71 aa, Zea mays
  Clone ID: MRT4577_106500C.1.pep
KNKAKPPGFQVGFWPPLKGFFSPLVRWGPPTWSRQALVLAQPRGKKKKKKKKKKKKKKKKKKKKKKKKKKS

SEQ ID NO: 191797 - protein, 214 aa, Zea mays
  unsure (1)..(214): unsure at all Xaa locations
  Clone ID: MRT4577_106501C.1.pep
PSVRTGLIYLHKHSRLRXIIHRDXLKASNILLDTDMNPKISDFGMARIFDPKGTQANTKRVVGTYGYMAPEYAMAGNFSTKSDVFSYGVLLLEIISGMRNAGPRRHGNSVSLLGYAWELWNEGRCHELIDKPLRGRCPENVALRCIHVSLLCVQEQAADRPSMTEVISMITNGSATLPDPKQPGFLSMLVPNETDVAEETCSLNGLSVTILDGR

SEQ ID NO: 191798 - protein, 89 aa, Zea mays
  Clone ID: MRT4577_106502C.1.pep
LDHSCFSRHRSCKWSPPLSQGQNGSQGWLHPPESGGIPGVRLIQGVALWWRKRRLKPSNILLLLSCSSAAAVGGATLGCAMTFSIYLPR

SEQ ID NO: 191799 - protein, 93 aa, Zea mays
  Clone ID: MRT4577_106503C.1.pep
RAQQNAQNHSMPLLAPSLLGLSCMPPSPPLLLFLSAACSYCSCLSYSRSSLNFDVSICYKLNKVKKKFLNQTNHRFSSGRCCRLYSFKSENNA

SEQ ID NO: 191800 - protein, 145 aa, Zea mays
  unsure (1)..(145): unsure at all Xaa locations
  Clone ID: MRT4577_106504C.1.pep
FRGLATGGAWLMAPPKASGLDHFLMAEEVKFKLAGGWKNWDEPVKDLPTLGVGHXWGSVFHMWMGSRFAGQRRGNVLMSFTTREAGFAIPLIXPVMVPMAQSLGPIFSQWASYPTIRFGAEAAFKQLGNLSPLVVKQFLPLLKQL

SEQ ID NO: 191801 - protein, 54 aa, Zea mays
  unsure (1)..(54): unsure at all Xaa locations
  Clone ID: MRT4577_106505C.1.pep
VRKKMDMKEEETADIKKVLKAANKRVESRGEEIFLMEKQSETLEMKYEXMNKYL

SEQ ID NO: 191802 - protein, 92 aa, Zea mays
  unsure (1)..(92): unsure at all Xaa locations
  Clone ID: MRT4577_106506C.1.pep
IHXHFSDRKPFHRSTSTTELLFIARLPKDHSPSGDALTARFLPWTARTQIERTPFPWRLGGDPGRLILLPWPARKWIERDSDMIADGESGRE

SEQ ID NO: 191803 - protein, 96 aa, Zea mays
  unsure (1)..(96): unsure at all Xaa locations
  Clone ID: MRT4577_106507C.1.pep
HPDVAACPGSLDCALKRRAMCPPGAHACGPCLQPFQEDQQGLCVPRMRRPPGGGRPQPRLXDEIDFLAQELARKESGHSTPPLPKDRQRLPEPATL

SEQ ID NO: 191804 - protein, 68 aa, Zea mays
  Clone ID: MRT4577_106508C.1.pep
ESTKQHQFVFQHILHPNAGGFHYMCRPHATCPSNAHKLSIAFFLHPSLPSIIAPVCQNHSFLPYPILH

SEQ ID NO: 191805 - protein, 51 aa, Zea mays
  Clone ID: MRT4577_106509C.1.pep
KLFYPAVCKGGKKQYKYPSFSWGTRKTPSFPILINFQGLSFINKGLGSLFF

SEQ ID NO: 191806 - protein, 87 aa, Zea mays
  Clone ID: MRT4577_10650C.1.pep
RPEHRSVLCSITRIQPVASAYVASIDTDVVSTIPLRLAMNGHVRTISLITLATPQTTSMGATEPTSSTKSERNDRRRSSTRPYSISS

SEQ ID NO: 191807 - protein, 63 aa, Zea mays
  Clone ID: MRT4577_106510C.1.pep
RSPTDPAASRLQFLRGCFSFPFSLVRITLGGIAVVGQSPLGNPFEAGNPPKPALEQLESAHTC

SEQ ID NO: 191808 - protein, 375 aa, Zea mays
  unsure (1)..(375): unsure at all Xaa locations
  Clone ID: MRT4577_106511C.1.pep
RGRRDVDADRAEHEEEAAPPPQGERFPQGRHDVRLFVNNRALADTRKLLLEGVVAGGGAHGRLQDESGKDRNGGDSSRFGAXSTLTSESTSKSSVEWQSSTLTKDSETEYPFSSSSRRSSARWESYTLFRKYDEDMVYFHRVCAQKLTETESFRSIKYQPRSMSERIVHRLTTPKPSTPSAAIGLRDPYPELERAYVAQVCLTWEALNWSYTSFRRRNGGDGNLAARCCPARVAQEFQQFQVLLHRFVESEPYECGRRPEVYARMKNSTPKLLLVPEFRDEDDEKDDLISAVQFLLILEESIRTFMAFLRADKRSRYEMFREMVKKRRASAAVDQTLVVTLKKANKKKKRRLKDLTGMWWPAGDCSEEEAAQGPD

SEQ ID NO: 191809 - protein, 142 aa, Zea mays
  Clone ID: MRT4577_106512C.1.pep
KYPVPIFDQLIDELAHSKWFSKLDLRAGYHQILLKPGEEYKTAFQTHIGHYEFRVMAFGLTGAPNTFLSAMNETLKPVLRKCALVFFDDILIYSKTFEDHVLHLQTVLQLLLTDNWKVKLSKCEFAQNKIAYLGHIISEHGV

SEQ ID NO: 191810 - protein, 123 aa, Zea mays
  Clone ID: MRT4577_106513C.1.pep
RPVRAESRKVLARQCRPSASCPRHHVLVNVAHLRRAPDITCWDPRLQRQGDHHAARARCRSSSSGAVTASEPSWSSTTDLLRTRPCPPGVGVRDPVPVLELLQRRHDRLRSPVVWLKADSQRH

SEQ ID NO: 191811 - protein, 157 aa, Zea mays
  Clone ID: MRT4577_106514C.1.pep
MAAAPAPARSPPEASPPPLDASASASDDEWDADGFVIPDVTIQDDDDDDVTTHSVPKARDPEPQQAKEEKIYLGPHGAPPSGAKQQQLNTVGRKQSFRNKLKEADRKSSGNAQENKVESLRELMGAVTTDSRGMAKSSRRDWLDPHCRESEFDRKPR

SEQ ID NO: 191812 - protein, 239 aa, Zea mays
  unsure (1)..(239): unsure at all Xaa locations
  Clone ID: MRT4577_106515C.1.pep
MSSSIISTVATELLVAEKSRGIEPLPFINDKHGGVIIEMTTPMDPGAFSASLKAALVKWREQGIRGVWIKLPITLSNLIPPVVEVLAVQEKSGVLRGLGVWKFPTGVVEPGEDINVGAVREVKEETGMXEFVEVLAFRQSHKSFFDKSDLFFVCLLRPLSYDITKQDSEIEACQWMPVEEFAAQPFVQKHELVKYILEVGLAKVDKEYAGFSPISIKSAFTDKLSLFYMNREDLDRASG

SEQ ID NO: 191813 - protein, 286 aa, Zea mays
  Clone ID: MRT4577_106516C.1.pep
MSSSTNSTVATELSVSENSREIEPLPFVNDKHGGVIIEMKTPMDPGVFSAYLKAALAKWREQGIRGVWIKLPITLSNLIPTVVEEGFWYHHAEETYLMLAYWLPNTTHTLPVNATHRVSVGAFIMNDKREVLAVQEKSGVLRGLGVWKFPTGVVEPGEDINVGAVREVKEETGIDAEFVEVLAFRQSHKSFFDKSDLFFVCLLRPLSYDITKQDSEIEACQWMPVEEFAAQPFVQKHELVKYILEVGLAKVDKKYAGFSPISIKSAFTDKLSLFYMNRRDLDKASG

SEQ ID NO: 191814 - protein, 84 aa, Zea mays
  Clone ID: MRT4577_106517C.1.pep
EACCCFIETSSLSHTKQLHKGVLPGSSCRAFSLCTPRQSPETLPPWPPPQRQLPGGPRHTGKQAQEGCWGQTSPAATTAMTPVA

SEQ ID NO: 191815 - protein, 224 aa, Zea mays
  Clone ID: MRT4577_106518C.1.pep
GIRGVRLKLPITLSNLIPTVVEEGFWYHHAEETYLMLAYWLPNTTHTLPVNATHRVGVGAFIMNDKREVLVVQEKSGVLRGLGVWKFPTGVVEPGEDINVGAIREVKEETGIDAEFVEVLAFRQSHKAFFDKSDLFFVCLLRPLSYDITKQDSEIEACQWMPVEEFAAQPFVQKHELVKYILEVGLAKVDKKYAGFSPISIKSAFTDKLSLFYMNRRDLDKASG

SEQ ID NO: 191816 - protein, 63 aa, Zea mays
  unsure (1)..(63): unsure at all Xaa locations
  Clone ID: MRT4577_106519C.1.pep
GAGPVFPFLFPRALFFTTRKQGHXKWCFLKSIEASSTLTPDALYAKIITQGTPPCPYILLDDK

SEQ ID NO: 191817 - protein, 47 aa, Zea mays
  Clone ID: MRT4577_10651C.1.pep
FFKTPKKFCFPNKFLTKGGHFSIFKWGPLLSFFSRGLFVKLWAFRGP

SEQ ID NO: 191818 - protein, 275 aa, Zea mays
  unsure (1)..(275): unsure at all Xaa locations
  Clone ID: MRT4577_106520C.1.pep
MSSSIISTVATELSVAEKSRGIEPLPFINDKXGGVIIEMTTPMDPGAFSASLKAALVKWREQGIRGVWIKLPITLSNLIPPVVXKEGFWYHHAEETYLMLAYWLPNTTHTLPVNATHRVSVGAFIMNDKREVLAVQEKSGVLRGLGVWKFPTGVVEPGEDINVGAVREVKEETGIDAEFVEVLAFRQSHKSFFDKSDLFFVCLLRPLSYDITKQDSEIEACQWMPVEEFAAQPFVQKHELVQYILRVGLAKVTSXYAGFSAISINRHLQTNVLIL

SEQ ID NO: 191819 - protein, 115 aa, Zea mays
  unsure (1)..(115): unsure at all Xaa locations
  Clone ID: MRT4577_106521C.1.pep
KGLGGVFVFPLVWCFCLGGGFFFFISSGPFFWVLGGFRCPLALFLPVFFSFVFLKVFPPKKKKKKKKKKKKKKKKKKKKKKKKKKKRKKKKRKEKKERKXXRAGPSRGIPYGTAV

SEQ ID NO: 191820 - protein, 87 aa, Zea mays
  Clone ID: MRT4577_106522C.1.pep
KTTWISSAFFNYFSMFDYLGHEFQKFCILLDWIWSIIRRITSKTLYNHIFRQELPWIIFWIFSVDPKLMTNRLGIRFRLSRSEKERR

SEQ ID NO: 191821 - protein, 186 aa, Zea mays
  Clone ID: MRT4577_106523C.1.pep
SRPAGVVVDCCRSTTRRAHLIPPASHARRSRFDTLIPSYAKSQPRRPSSPPCHAPLPSSLTSSRREWRPLSAFHYLSTRHAPSCPRLPPPAMLCLAFAPVRLPSQPRLSCNAPSFRDYRRVALRGDPDLNLPLVVFDASSAYTTAPLPQVNPLLSPDSFFFVRITALFLGVLSSSSAPTAAGGLGR

SEQ ID NO: 191822 - protein, 112 aa, Zea mays
  Clone ID: MRT4577_106524C.1.pep
MDCSSGDVKAETTRPAAVAAAAAAAAGGGTPSLLRGWREFRRSAVPARFLCFEDGKWVDVAGEAAAQLRRAFQERRVMADASCGGKAYLFDFLRMVRIDEATGEETGLAWID

SEQ ID NO: 191823 - protein, 90 aa, Zea mays
  unsure (1)..(90): unsure at all Xaa locations
  Clone ID: MRT4577_106525C.1.pep
MMKFVAGYLLAVLAGKSXLSGDDLTSILESVGCEVDNEXMELLLSQLSGKDITELIAAGKEKFASVACGGGGVAVAAAALLVKRRSTAAE

SEQ ID NO: 191824 - protein, 55 aa, Zea mays
  Clone ID: MRT4577_106526C.1.pep
TAHRGSFINSERGNQGLLLIKFHPALLLFFFFFLKFKFFFFLVFLFFFFFSEAWV

SEQ ID NO: 191825 - protein, 36 aa, Zea mays
  Clone ID: MRT4577_106527C.1.pep
HKLVEEHSVEAHNCSHALLSNQQQHHTSIIITTCSP

SEQ ID NO: 191826 - protein, 76 aa, Zea mays
  Clone ID: MRT4577_106528C.1.pep
KKNGVGRCKLNYVLTAWNRLGVPSANGGDRYLRSRLGNSGPNDRSLMGWVGFRELVVAHPGSVVGDPGEVGRARER

SEQ ID NO: 191827 - protein, 89 aa, Zea mays
  Clone ID: MRT4577_106529C.1.pep
MSWSQSENARFERALATYDRDTPRRWELVAAAVGGGKTAEDARRHYADLVDDVGDIESGGYGANDPNANGGANGRNGNNRGGRANRPQT

SEQ ID NO: 191828 - protein, 112 aa, Zea mays
  Clone ID: MRT4577_10652C.1.pep
LRHADYRNSACSMGGMQTTTTLQGPSSPTHHGDARRHAVCDVAEELHRYRRPKLRGNQKAYSEPSSPHKASNSSAHVRKCETTCHHMIYSACSANAEKRLALLLRRDPIHHG

SEQ ID NO: 191829 - protein, 77 aa, Zea mays
  Clone ID: MRT4577_106530C.1.pep
LFYRATKNSFHGPSINNSRTGKPLGSPNLKRIEKDPLLTRWVNIKKAPPNPPSQRLPPPGWTLATPHKRRLLNREWG

SEQ ID NO: 191830 - protein, 69 aa, Zea mays
  Clone ID: MRT4577_106531C.1.pep
LSIWSWELRTLKLHEHASTIVGHNVRSSAAKLSCKGLSSRGMRPKLQMTIICLKVSGEMNVNGREQLTG

SEQ ID NO: 191831 - protein, 51 aa, Zea mays
  Clone ID: MRT4577_106532C.1.pep
LYDHVTCSLLACMISVANSEKYIENRTCLSLFSALSDVVCQCHQRQPTGIS

SEQ ID NO: 191832 - protein, 67 aa, Zea mays
  Clone ID: MRT4577_106533C.1.pep
ILFQQHDVYAHTFGVSGLMGLMSQTHTQIYPKCFLKDQSICLNNHFHYKCSGNNLQHMLVNEGFTTS

SEQ ID NO: 191833 - protein, 86 aa, Zea mays
  unsure (1)..(86): unsure at all Xaa locations
  Clone ID: MRT4577_106534C.1.pep
ILFFFYFFFLQSKSLLWFEVNYFCTSRSMQPFLSKLFLCTHTLERDRAIGGRHQXXRSSLHGGLVRDSRRSSSRPTAKIEIRPRVR

SEQ ID NO: 191834 - protein, 90 aa, Zea mays
  Clone ID: MRT4577_106535C.1.pep
MATALGFRCLYRTRPATLGRYVDRLWRSPSRGHRLSPADDELYQRTRISLLQNEFPQAVYIDSYNSRGFTINGNRVFGPCALLPQTVVQW

SEQ ID NO: 191835 - protein, 86 aa, Zea mays
  Clone ID: MRT4577_106536C.1.pep
SYRLDEPSSRQPCVSLHDLSIAGKLSRFKMLLLLARAYKAAVTISHGAKNIRKAFSPVRKQNLSIDSKLKNNTMCDNQANCTKKMQ

SEQ ID NO: 191836 - protein, 131 aa, Zea mays
  Clone ID: MRT4577_106537C.1.pep
KTTLSSTMSSSILVLRFSSSSSLHCPSSHSSAPHPAAPCPLSPLPWPLLPFSPRHDAVAARPLLSPPVSIVGPATRPNEIEEVEDAAFGNKRDNSLKKLKVREGEDRHLLGRGVKGDPNPTQSIPAVTRCN

SEQ ID NO: 191837 - protein, 251 aa, Zea mays
  unsure (1)..(251): unsure at all Xaa locations
  Clone ID: MRT4577_106538C.1.pep
MARMPGAHQAESWALPSIGRCGGGVSGDLLPAFGELSPTGGNSNTINPYDCRYRWWQGFLIGPVLYSAWSSPFELALDRAATTPVVVASLVMDAFFAADIAVSFFVAYFDRSADLFVDDRRKIATRYLKRPSFAMDVASAIPFNVIYQLVSGRSTGWFRYLNLLRLWRLQRVSKLFARLEKDIRFDYFYTRLIKLCGVTLLALHSSACIFLWMAFHHGDREHTWLGSQVRDFADGSVWVXYTYAVYWXITR

SEQ ID NO: 191838 - protein, 179 aa, Zea mays
  Clone ID: MRT4577_106539C.1.pep
DHGIGTERRGAAAYPNVNDAIDHKVQHTSRPCATAGNRDELMICVVSAFDDGLYSISRKHVFPSPDLSDGSDYEMSAAAAYVDTLERSYRSVTTPRTRSSSRSRRTTSCSTSPTWTWASTTSRGASPARRAPTTATRSASGRTGTTMYPLMDYHDVPIDRTVLFFSLHHLSLESMDDLD

SEQ ID NO: 191839 - protein, 102 aa, Zea mays
  Clone ID: MRT4577_10653C.1.pep
PTRPHKSKSANNLQKSRVVAMGRMRRESPEKSTLKASQYTELPQPVLLRLPPLPQPPPPPQPLPPAVPPPLPPSPEPEPPGVLAEDMIEDMDICDTPPHTSA

SEQ ID NO: 191840 - protein, 131 aa, Zea mays
  Clone ID: MRT4577_106540C.1.pep
QKRFFPLNQRGALNFAVFLHPHLPFGRVGAAPPQHFFPFTQRGALNFAVFFHQQQLPPFSQLVVVGPVPFLTQQRWLRFSRPGGPNGGPLLQRQQLGPFTPLVLTNPPGFSPHPLMGGAPLLDGFWVKVPK

SEQ ID NO: 191841 - protein, 81 aa, Zea mays
  unsure (1)..(81): unsure at all Xaa locations
  Clone ID: MRT4577_106541C.1.pep
YSAAARYFVFFFFFFFXVSTSQKQTRNRGKLFHRFLIHQIHKFCLTTKGYLLYKHLQFYQGASFFLTPGLDFGNHNRGFTN

SEQ ID NO: 191842 - protein, 191 aa, Zea mays
  unsure (1)..(191): unsure at all Xaa locations
  Clone ID: MRT4577_106542C.1.pep
MAEMVGSVVVGEVVNRTFSFLISKHSRERLSTREGVERLEMAHIKMEAALELSGRWXTTPPTXDASLLRWRRKLRRAADECDAALHRWKLRELQEEDARERLARAPLPRRVAHAVLCFLSALLLLARARARGGDDDACSHACAAVRRFERLASGAADFLRCVEFGSAPRRCGGLFGGRPPRWEARELREAA

SEQ ID NO: 191843 - protein, 64 aa, Zea mays
  Clone ID: MRT4577_106543C.1.pep
GGGGPFLISFSGLANRNCYTKSHITIRKNISSVSPLNYINSQESKNFDYTLTGEALVSIPGEDN

SEQ ID NO: 191844 - protein, 79 aa, Zea mays
  Clone ID: MRT4577_106544C.1.pep
DKPYPILYFWHLRQIPPSGCRGLNITIPVYGFWEGNHIPLFELCPIHFRGEFLRQPKAPIPRQLLGPGKDNVDLNLRPL

SEQ ID NO: 191845 - protein, 117 aa, Zea mays
  unsure (1)..(117): unsure at all Xaa locations
  Clone ID: MRT4577_106545C.1.pep
MVTHYLFMILEYDSKLRLMEHLKHLSSIHLTILSSQITQSTDYAYLVSHQPFLSTMNLVLNPDMLIXKRLNSILLSLNFHFNQFNVFVKDQLSLYVDYYYCNAPITTFIIYPFYPHY

SEQ ID NO: 191846 - protein, 79 aa, Zea mays
  Clone ID: MRT4577_106546C.1.pep
MKHLRTSDQHWRPPPVNSNDHLRQAFTFVMPPKKTTMPGAALQPLDTNQETLPLREARTHKRKVKGKCALGPFLSVLVI

SEQ ID NO: 191847 - protein, 124 aa, Zea mays
  Clone ID: MRT4577_106547C.1.pep
MQKMVMSLSCDKAVWDAVMNNEAVQDFRRPLHDGKESDRKPNTGPPASAPRPVQVILESAQAKIVEFLENVQKIINMLIHTPEDDDNPDGYSDAVKVSFMLTVFVFIVVAIARINYEHWDYKVW

SEQ ID NO: 191848 - protein, 58 aa, Zea mays
  Clone ID: MRT4577_106548C.1.pep
VSERETDRSSSVRRPWLGNENWVPCWRVLCSLHTTFAYIPTTVHSIVVCYMHAGQQPA

SEQ ID NO: 191849 - protein, 101 aa, Zea mays
  unsure (1)..(101): unsure at all Xaa locations
  Clone ID: MRT4577_106549C.1.pep
FFIFLFFLYSFXXSFLRRSVISFPSXLTTFLRPIRRHLTFNHILLFLSPPFQILPIQRILREFLVYPLPFLFSLFPLIIQLQLSPNLFSIFPFCQNPLSFP

SEQ ID NO: 191850 - protein, 62 aa, Zea mays
  Clone ID: MRT4577_10654C.1.pep
FCMVILEDFFVYHLSLEHTDFVMLIYFLKVNLFNSEVLLLSLLTHVHRDCFRMSTSLHQLYT

SEQ ID NO: 191851 - protein, 72 aa, Zea mays
  Clone ID: MRT4577_106550C.1.pep
LWFFFYKCTLLYLGSHTHQTKTLLLSSISYEIYKRAPPLMGCWENAVGCVKQGGERDNCCTCKRGPPLGPPR

SEQ ID NO: 191852 - protein, 168 aa, Zea mays
  unsure (1)..(168): unsure at all Xaa locations
  Clone ID: MRT4577_106551C.1.pep
MAVFAGARARPLLGALLLSALLLTVTAADSQNNPADQLVALINSNRTASKSASVSDNQGLGCIALQYIKAYEGHCDQVDDKKPMESSFTDTFAPTCGVQAATLSRITGRLVACQSKYATPAEALGILVXRQEGPSNVARQEPHAEVGAAVSGTRRXGPYFWCVLFSDG

SEQ ID NO: 191853 - protein, 54 aa, Zea mays
  Clone ID: MRT4577_106552C.1.pep
GDPFNTRVFKNLTREQRGCPSISALKLFQTNRFLINKSGNLYSFFPPVPLNIFF

SEQ ID NO: 191854 - protein, 121 aa, Zea mays
  unsure (1)..(121): unsure at all Xaa locations
  Clone ID: MRT4577_106553C.1.pep
APPSVFLAVFCAPPVLLPSASLVLLAFGPLXRCCCACXAPFCSCPCWCSACASSVSWVXRAXSAGPSAFAGXXVLLGSAGLAVGSXGVVRVLVVCGPGGAAVSLSVLSFRRRLLVPLSLVP

SEQ ID NO: 191855 - protein, 47 aa, Zea mays
  unsure (1)..(47): unsure at all Xaa locations
  Clone ID: MRT4577_106554C.1.pep
SSELQAKKKKKIKKNKKKKKKKIKKKKKKKKKXKKKKKKNKKRGRPF

SEQ ID NO: 191856 - protein, 98 aa, Zea mays
  unsure (1)..(98): unsure at all Xaa locations
  Clone ID: MRT4577_106555C.1.pep
GPGSDQRQEGKRPRTRRDNPPRTKKARAARRTPPTQTASRKTNRRRSGEDEGRKHERRHRHEEPRTPRRRPARAHRLAQXGRHTTEKRERDERQGRGV

SEQ ID NO: 191857 - protein, 67 aa, Zea mays
  Clone ID: MRT4577_106557C.1.pep
SSLIDTQKAIIERVCSKWAINRSVYADVIQALDTCVQSTDAINLSVDKLYDQDVRCLAPPKEQPHRA

SEQ ID NO: 191858 - protein, 45 aa, Zea mays
  Clone ID: MRT4577_106558C.1.pep
TCAVKNISRLTSHPNAQVHEKNQVRILYKSVHNAQLARKRVFRPR

SEQ ID NO: 191859 - protein, 75 aa, Zea mays
  unsure (1)..(75): unsure at all Xaa locations
  Clone ID: MRT4577_106559C.1.pep
TLATLRKAELGFLGLIVEKXTDKSSSLSLYRPGHEIVTTYASSATSFKRSRGRDLQSTTHALHQQPPIPFQIQLS

SEQ ID NO: 191860 - protein, 78 aa, Zea mays
  unsure (1)..(78): unsure at all Xaa locations
  Clone ID: MRT4577_10655C.1.pep
LXAGVTTQSTFFFFFFFFFFGGVSWVRTEEENPTNRGESIRLGFGISYRRREEGRNQNDRVRNKLEERSPLSLRCYHC

SEQ ID NO: 191861 - protein, 150 aa, Zea mays
  unsure (1)..(150): unsure at all Xaa locations
  Clone ID: MRT4577_106560C.1.pep
MPRRQALEEEQCTEEKGISTIPKHKYASKACSPXKEPLSAALSALTLVVQFNGWLSFFLLLYYKLPLRPETHKTYYEYTGLWHIYGLLAMNSWFWSAIYHSCDTIWTEKXLYFSSDAAFLGYSLILTIVGEHVVASFMGSGRLTDLCVFH

SEQ ID NO: 191862 - protein, 182 aa, Zea mays
  Clone ID: MRT4577_106561C.1.pep
GTLEAGRGKVSSPPGPGLPSSLSPPLKHPRADGSPPRPLGLRRDRGWAGGWGSSGGGRCCGSSPSLPRPSPSPSPWKPTRATLIRSTGLNMKVCTVIIIAQCLLWALWAVMTRHPSRLKIIFVAIGGAAAVLLEASDIPPRWGCVDGRAICLAVAIPLSYLWWSFAKEDAEMRTSAILKKAR

SEQ ID NO: 191863 - protein, 215 aa, Zea mays
  Clone ID: MRT4577_106562C.1.pep
MGLLGRRTLLRLLALASAAVAVAVAVEAYEGDADPLYSDTIWTEKLYFSSDAAFLGYSLILAILRTLNLRDEASRVMVAAPILAFVTTHILYLNFYELDKGLNMKVCTVIIIAQCLLWALWAVMTRHPSRLKIIFVAIGGAAAVLLEASDIPPRWGYVDGRVICLAVAIPLSYLWWSFAKEDAEMRTSAILVTARSMLISPFWFLVQLTFNQSKG

SEQ ID NO: 191864 - protein, 129 aa, Zea mays
  unsure (1)..(129): unsure at all Xaa locations
  Clone ID: MRT4577_106563C.1.pep
MPRRKALEEEQCTEEKGISTIPKHKYASKTCSPXKEPLSAALSALTLVVQFNGWLSFFLLLYYKLPLWPETHKTYYEYTGLWHIYGLLAMNSWFWSAIYHSCDTICTXKLYFSSDAAFLGYSLILTIVD

SEQ ID NO: 191865 - protein, 276 aa, Zea mays
  unsure (1)..(276): unsure at all Xaa locations
  Clone ID: MRT4577_106564C.1.pep
MAPRQAVLAVVVLAALLPFALSRGLRLGHHRAQPHPRPHGHAPLGGGAWSSAHATFYGGGDASGTMGGACGYGNLYSQGYGTNTAALSTALFNNGLSCGACFEVRCDAAGGGGRSCLPGSVVVTATNFCPPNNALXSDDGGWCNPPRAHFDMSQPVFQRIALYRAGIVPVSYRRVACNKKGGIRFTINGHSYFNLVLVTNVGGAGDVHAVAVKAERSPGWQALSRNWGQNWQSNTLLDGQALSFRVTTSDGRSVLSNNAAPRGWSFGQTFSGAQFN

SEQ ID NO: 191866 - protein, 116 aa, Zea mays
  Clone ID: MRT4577_106565C.1.pep
DSAQSHPHDSGGDGDGDGDAAGPTQNLMSFAKKLQTDHPQSWSALPSELAGQVLRRLPSHADRVRFAAVCHHWRFSRQEHCLTPPLPWLAFPDGTFFVFPHGKGAKESFKLPSSAN

SEQ ID NO: 191867 - protein, 100 aa, Zea mays
  Clone ID: MRT4577_106566C.1.pep
MFRGIQFQCVLQYLGPPVLVTLRQLIAAWFSRRYTRFKKHSADFHGRAADLVHGLRGTAMPMRQALKEEQCREEKGISTVPKHKYASKACSPKGSKGAPT

SEQ ID NO: 191868 - protein, 276 aa, Zea mays
  Clone ID: MRT4577_106567C.1.pep
MAPRQAVLAVVVLAALLPLALSRGLRLGHHRAQPHPRPHGHAPLGGGAWSSAHATFYGGGDASGTMGGACGYGNLYSQGYGTNTAALSTALFNNGLSCGACFEVRCDAAGGGGRSCLPGSVVVTATNFCPPNNALPSDDGGWCNPPRAHFDMSQPVFQRIALYRAGIVPVSYRRVACNKKGGIRFTINGHSYFNLVLVTNVGGAGDVHAVAVKGDRSAGWQALSRNWGQNWQSNTLLDGQALSFRVTTSDGRSVVSSNAAPRGWGFGQTFSGAQFN

SEQ ID NO: 191869 - protein, 92 aa, Zea mays
  Clone ID: MRT4577_106568C.1.pep
SQIYPLLKSSDHSPPMSNRNTKSSISNLLNKLTLKCFSLIHLLSTDIQSCSTDTIGAMPPLVSIVSTSSRMINLNRFSSARSHLLWGLIVTS

SEQ ID NO: 191870 - protein, 290 aa, Zea mays
  Clone ID: MRT4577_106569C.1.pep
MALRQAVLLAVVLAALLPLALSRGLGLVHGHVRPHTHGLGLGHHHAQPHPHPHGHAPLVGGAWSSAHATFYGGGDASGTMGGACGYGNLYSQGYGTNTAALSTALFNNGLSCGACFEVRCDAAGGGSHSCLPGSVVVTATNFCPPNNALPSDDGGWCNPPRAHFDMSQPVFQRIALYRAGIVPVSYRRVACNKKGGIRFTINGHSYFNLVLVTNVGGAGDVHAVAVKAERSPGWQALSRNWGQNWQSNTLLDGQALSFRVTTSDGRSVLSNNAAPRGWSFGQTFSGAQFN

SEQ ID NO: 191871 - protein, 142 aa, Zea mays
  Clone ID: MRT4577_10656C.1.pep
MAGIGPIRQDWEPVVVRKKAPTAAAKKDEKAVNAARRAGAEIDTMKKYNAGTNKAASSGTSLNTKRLDDDTENLAHERVPSDLKKNLMQARLDKKLTQAQLAQMINEKPQVIQEYESGKAIPNQQIISKLERALGTKLRGKK

SEQ ID NO: 191872 - protein, 193 aa, Zea mays
  unsure (1)..(193): unsure at all Xaa locations
  Clone ID: MRT4577_106570C.1.pep
HNYHSHQIFNLQWKDWNCKSECRYHCMMEREGERAKLGLQPVKYHGKWPLKRASVFQEPLSAALSALTLVVQFNGWLSFFLLLYYKLPLRPETHKTYYEYTGLWHIYGLLAMNSWFWSAIYHSCDTIWTEKLYFSSAAAFLGYSLILAILRTSSLRDEASLNMVXMKIFTFVTNTPLYLNSWAANRLIEKDEA

SEQ ID NO: 191873 - protein, 85 aa, Zea mays
  Clone ID: MRT4577_106571C.1.pep
KKKKKKKKKKKKKKKKKKKKHKPSAPYRPMGCFFSIILHTGCRLNLAVSRAHFFLIGIPFYISLGFPFYNVVEMENPCRHPTYWP

SEQ ID NO: 191874 - protein, 238 aa, Zea mays
  Clone ID: MRT4577_106572C.1.pep
MGTNPHLQELAASAVAASEPPPRARVVRILVHDADATDSSSSEDEAPPLLPRRRSRGGSSSLSVRRRVMEPAGASSAVRFRGVRRRPWGRWAAEIRDPHNRRRLWLGTFDTAEEAANAYDAANIRSRGRSGTTNFPAARYSPPPKPAKPIISLTPEPGKVITLPPVPVKPTFPVQVKEVGGSWGGLVKGARSEVKAFAPKPVWKMIPRVHQKFPGCADGSGLRAVHAASIYVEEVGGG

SEQ ID NO: 191875 - protein, 207 aa, Zea mays
  unsure (1)..(207): unsure at all Xaa locations
  Clone ID: MRT4577_106573C.1.pep
MVQAAAVMKRNPRVTISRCNCRRAHFTVPASEHRAIMSAGMITELRHXYNALSIPXIRKDDQVQAQRLTYNGRESNSMHWYRRRWGIYVXHAPLEEXNGSTVHVGIQLASNVICPWLXLDKALYTALSRXARCGAAQSTRLRYXTADDTTTDAAGGCDTGASLQDIDYTLHGHLIVVVPPFPHLFNFCYQLLCDRGLMRFEYCSVSE

SEQ ID NO: 191876 - protein, 73 aa, Zea mays
  unsure (1)..(73): unsure at all Xaa locations
  Clone ID: MRT4577_106574C.1.pep
KRGPPWFVGGVPPQLRRTIKRALGGGIILGKKHLLLLLKKRGGGIIXGAGAPAYQMKPPVFIHNQKGGGFFWG

SEQ ID NO: 191877 - protein, 239 aa, Zea mays
  Clone ID: MRT4577_106575C.1.pep
MARPRVSIFLTAVAIAVSMHAAPSTLHAAPLEPAMEFFQEWYTTFKNTLEEDPAEVIGKIKDAVDIGQNLHEALESRSSDGGARGTATAPSTQQPYIAAGNLRFHVVAVDITNKVTWTNMCDRSVSAAATCTTQAPSMYATAARLPNCGAASAGSTTAPICCRYSTSAALVQGPVTLSAEPNGRPLYGGCALYTCRIADGGGATSASAGAAPSRPYSADSPISSIATFGQTFGWAATPT

SEQ ID NO: 191878 - protein, 77 aa, Zea mays
  Clone ID: MRT4577_106576C.1.pep
TACPFNCDPVSSCQSVCHRLNTSHRASSDAHVPLVELDRGSHYHSSRRHGHQNRKEMCLRDQLHLASVFCLVIDEDR

SEQ ID NO: 191879 - protein, 78 aa, Zea mays
  Clone ID: MRT4577_106577C.1.pep
GLPRFQISLTVRDLLDCLVEPHRGGLGVATLDTLAGFCGVRLALSCVASLPCQVPTLRGCELRWAPPRDKKRWWFLAV

SEQ ID NO: 191880 - protein, 76 aa, Zea mays
  Clone ID: MRT4577_106578C.1.pep
QREITPFRDWVGICILYPRCRWRKTSPGSTTSSTHHENDPPPGPRTMVWPVPGTSRHHSYAPVGADPIPGIRSQWL

SEQ ID NO: 191881 - protein, 82 aa, Zea mays
  Clone ID: MRT4577_10657C.1.pep
GTLRAGMPLDVMGRTRATLMGPTSIYSWATCPLNGGKIKLTGPGFYLGREETTGEFRKYPSHWQPPLHACRGPNKGLSESPF

SEQ ID NO: 191882 - protein, 80 aa, Zea mays
  Clone ID: MRT4577_106580C.1.pep
DKNPSPAPRRPMCLVCVLRREKEHGEAGPCPFALFGLFLSSSGLYLFPCTLLPSYPHFKFVPCTHVPYVPVCPICARVSH

SEQ ID NO: 191883 - protein, 39 aa, Zea mays
  unsure (1)..(39): unsure at all Xaa locations
  Clone ID: MRT4577_106581C.1.pep
PCLVIPCXKKKKKKKKKKKKKKKKKKKKKKNKKKNKVFI

SEQ ID NO: 191884 - protein, 234 aa, Zea mays
  Clone ID: MRT4577_106582C.1.pep
MLFSNPAVVNANWTRDTEGHGTHTLSTAAGGFVPRASLFGYATGTAKGGAPRARVAAYKVCWSGECAAADVLAGFESAIHDGADVISVSFGQDAPLADDVKSLFHEPAMLGSLHAAIHGVSVICSAGNSGPYDDTVVNAAPWVTTVAATTVDRDFPNVLTLGNSVRLRGTSLESTTLHSSMLYPMIDAARAARTTSNPYDAASCGLGTLDPAAIRGKIVVCRRGGGGGGDVSRV

SEQ ID NO: 191885 - protein, 101 aa, Zea mays
  Clone ID: MRT4577_106583C.1.pep
LRFLLVFSFSLFLGAFMSLSFSSWFLLSRAALVSFSSARWPPSFLVLFVVSLHCCCLPVFACDCLVFLWGLCFFLSLPLLHLLAPSPWSVCRRVRKDPQSC

SEQ ID NO: 191886 - protein, 269 aa, Zea mays
  unsure (1)..(269): unsure at all Xaa locations
  Clone ID: MRT4577_106584C.1.pep
MGDPPTLKRPKLEKADDDSTYCPRPASNGAAPVRTPGATAATGAAPGDDVEEDDIAEEAVIALIAHRERDVERCKLKLLHYQSLLDTAEMKLEEAHSRLARFRDRKPPPTRSEPKPPTPPIQREHKPSPPPIQRDLKPSPQPLIQKAPSPAPQPSARPXLSSLGPATDRPRAXAHAWVEEGRRPVIXSSSPAPPERSRKEEKKPKIKMEQKGHQNLIPSVGKSSATVLRFQGGNLVSSQHRRKLRCLELCPANDQLVXTVRWTDWYFMA

SEQ ID NO: 191887 - protein, 135 aa, Zea mays
  Clone ID: MRT4577_106586C.1.pep
RLRGRSISPTSTSTTISLATGPSPTAGAGSSSGERDRDSDANISDPEKLAVEAPPPPPPPALVYSAVGTKLVGAAMECAICLAEFADGDTVRVMPVCGHGFHARCIELWLAGGRRSSCPTCRAPDGAAAATPSSS

SEQ ID NO: 191888 - protein, 205 aa, Zea mays
  Clone ID: MRT4577_106588C.1.pep
MAMAPQGQAEHGQVHVHDHQLGHRPEPNSRHPDPGAAATSSIATNRWGPYSGAGDFASNMAVILAALLTALALALALNAAVRYLLSRSRRARRGRAGSSSGERDRDSDANISDPEKLAVEAPPPPPPPPPALVYSAAGTKLAGAAAECAICLAEFADGDTVRVMPVCGPGFHARCIELWLAGGRRSSCPTCRAPAGAAAATPSSS

SEQ ID NO: 191889 - protein, 82 aa, Zea mays
  unsure (1)..(82): unsure at all Xaa locations
  Clone ID: MRT4577_106589C.1.pep
YVKVADCERVHXTHXFPSGYXSTLPSLXPXGKFCAXXSTCRSGXRXRRIXIAYQEGLVSRRWXXREVIGXKXYMXHIVXCXI

SEQ ID NO: 191890 - protein, 66 aa, Zea mays
  unsure (1)..(66): unsure at all Xaa locations
  Clone ID: MRT4577_10658C.1.pep
IFLLLFKYIFLYFFIILFFXFFYYFIFLYFFFFFQFLFYFFFFLYFFFFPKSKKKSQRKSEIDQRN

SEQ ID NO: 191891 - protein, 43 aa, Zea mays
  Clone ID: MRT4577_106590C.1.pep
HFFVCVGVPVVCSGAVMVYTDHHQTERLACSSVRPLFMVLVYS

SEQ ID NO: 191892 - protein, 99 aa, Zea mays
  Clone ID: MRT4577_106591C.1.pep
MASSSAPPPRAPTPVFAYSRNPGVGLCAAPRGFIGLSSLNLGGRCSGSATRDFNGEFSIARWGTKFVVPFEYSVQFFLLESNSKQILVKNNNFSYSNSS

SEQ ID NO: 191893 - protein, 103 aa, Zea mays
  Clone ID: MRT4577_106592C.1.pep
RRPRESPPFRLSDNFPLNPPRGSPKLGKSGVSSGHAELQNLVAIGFFQVGRAKFELGRPGHFYLPNFPQKMALPFSVKPGESIIQPENIGPKLWAPLLILKIF

SEQ ID NO: 191894 - protein, 96 aa, Zea mays
  unsure (1)..(96): unsure at all Xaa locations
  Clone ID: MRT4577_106593C.1.pep
RNTRTPKPPPAATHEGSRAAAPRRTPGLAHHHRPHSHXRRRHXHHRHPHHHPPHHQHPHPAHRPHSPHPHPHTAHHPHPHSAHHLQHPDPCTAVIQ

SEQ ID NO: 191895 - protein, 88 aa, Zea mays
  Clone ID: MRT4577_106594C.1.pep
PIASHQPPGTPPRFRLATMIGERIDPGGGSLTGNHRMEPPGHGEWRPCSVGGESPTVPQIPSIDPMPPRDCACSGKASVLPPGTGTSV

SEQ ID NO: 191896 - protein, 57 aa, Zea mays
  Clone ID: MRT4577_106595C.1.pep
TGNQSTNNPCCNPIVEFTWKNDTNTTYFHLLPYISTCCNSIGAPSPVVVVQLWFKEC

SEQ ID NO: 191897 - protein, 72 aa, Zea mays
  unsure (1)..(72): unsure at all Xaa locations
  Clone ID: MRT4577_106596C.1.pep
TYSTHILCIITLGSNPPLTRFAKLGPLNPICKIWAPLKGVYFSSSLXRLPPSPGPGRWSCFVAFLSGLFGGG

SEQ ID NO: 191898 - protein, 50 aa, Zea mays
  Clone ID: MRT4577_106597C.1.pep
ECILFFFFNPCFRKFFIPGLLFFLNWVRFVFYFCELNFCKLKARVMFFVR

SEQ ID NO: 191899 - protein, 156 aa, Zea mays
  Clone ID: MRT4577_106598C.1.pep
WTHLHIHRSGAPRATPSAPPLLPSEQLSFHWCQRTMHIWKKLTAEDHLDAAAVLRRPQSSTLLSPSSFIFEGELHHPQMHAHVVSSFVRVSPTAYISATSLAVTHNTRRGSGFLESHFLRTIWRRIDSSVLAHTMDQKCKIDADFLDSTALLDDTH

SEQ ID NO: 191900 - protein, 98 aa, Zea mays
  unsure (1)..(98): unsure at all Xaa locations
  Clone ID: MRT4577_106599C.1.pep
TAALRSPAVVGSALGRAAARATAYRHLCTSETADEAAAVERRLWRGGMGGILDYGIEDAEDGHTXDRNAVRFASAVDSSGLLTTGLASVSIKITCALY

SEQ ID NO: 191901 - protein, 142 aa, Zea mays; identical to SEQ ID NO: 191871
  Clone ID: MRT4577_10659C.1.pep

SEQ ID NO: 191902 - protein, 51 aa, Zea mays
  Clone ID: MRT4577_1065C.1.pep
SKPRNRGHPYVRETAGELGPRCTPTLHARSIRPGSGECPAGHATARLRVPD

SEQ ID NO: 191903 - protein, 117 aa, Zea mays
  unsure (1)..(117): unsure at all Xaa locations
  Clone ID: MRT4577_106600C.1.pep
EDVIFVVVAXGLCTALPXRXXAMGRCPXXPCAXGCRCLYRXAGAGPDRPMMGXAGGLYPLXAEYXLGQPQCSPAXAGAPTTPGCGQTXSAMYXPLRQQCCQQQMRMMDVQSVAQQLQ

SEQ ID NO: 191904 - protein, 60 aa, Zea mays
  Clone ID: MRT4577_106601C.1.pep
PLLLPLFLPLFLIYISFCHSLSILVPFKSNATYPFNSNSLTYFTTYHYYNLIYTTFNSNL

SEQ ID NO: 191905 - protein, 92 aa, Zea mays
  Clone ID: MRT4577_106602C.1.pep
AETNTPSAQHHLSSPRSPRSFFSKDCKGIHQQDKVGIFSCPKSSSSPIFPLNEIRKPEAISVLQLDVAIHAFFLLFLDLLSTFVLIPFCIPL

SEQ ID NO: 191906 - protein, 65 aa, Zea mays
  Clone ID: MRT4577_106603C.1.pep
IPCENCHSDTSGVLICTIGGHNSYRLYHSGASFFPILEMRKKGLWVWADPWSQNGLKRLKDLMLG

SEQ ID NO: 191907 - protein, 192 aa, Zea mays
  Clone ID: MRT4577_106604C.1.pep
RPGSLLQVIFFHLCRSPVATGRAILVLPLPPWPPPPPPPRPPASSLGGTMRSMTNEGLSYLKKRIKEIVEGQAAVHHCSASVDFMEETMKPYPAVVNDEGMYAHAKEVAEGLLGEKNVRVGPQVMGAEDFGFYAQRMAGAFFTIGVGNESTMATIHSTHSPHFVVDEDVLPVGAAFHAAVAIEYVRKKRAST

SEQ ID NO: 191908 - protein, 83 aa, Zea mays
  Clone ID: MRT4577_106605C.1.pep
VFGSAVTEEEEICVKFDLSYSEYKNSKCNPFTWKLETLKSINDIDAINIIYFISFRCANLFYYLRKLTYNDFVLDSIRLALFS

SEQ ID NO: 191909 - protein, 198 aa, Zea mays
  unsure (1)..(198): unsure at all Xaa locations
  Clone ID: MRT4577_106606C.1.pep
SPSTFADRPLPPAGRSSYFHFHHGLLLLFLLLLLLLLLLLLPLPPPAATALFAPLPRLGRGGGVGGXDLLSEARAPGFAAWLRGVRRRIHQRPELAFQEFRTSELVRAELDAIGVPYRWPVAQTGVVATIAGAAAGPVVALRADMDALPVQELVDWEHKSQESGKMHACGHDVHTTMLLGAARILQDRQSDLMGTETQ

SEQ ID NO: 191910 - protein, 135 aa, Zea mays
  Clone ID: MRT4577_106607C.1.pep
PCQTPGQATTGARMTQPWSVAIAALTETFLTSYIDRPSDIAELVLRTTPFLCTEILLTQTIGECIVTRVCSKCYLLNIIKRGILTHTYCLTLSHLLYNCVDCRSTRSRAIGYSSTVVAGTTYSGLLRHAQGTSPC

SEQ ID NO: 191911 - protein, 436 aa, Zea mays
  Clone ID: MRT4577_106608C.1.pep
MASSSSSSSSSSFLLPLLLLCSHLSLASAEEAASAAADLLSEARAPGFAAWLRGVRRRIHQRPELAFQEFRTSELVRAELDAIGVPYRWPVAQTGVVATIAGAAAGPVVALRADMDALPVQELVDWEHKSQESGKMHACGHDVHTTMLLGAARILQDRKSDLMGTVKLVFQPAEEGQGGAYYVLQEGVLDDASAIFGLHVDPALPVGVVSSRPGPFAATSGRFLATVTGKGGHAAMPHESIDPVVAAATTVVSLQKIISREIDPLQGAVVSVTFLKGGEAYNVIPENVAFGGTMRSMTNEGLSYLKKRIKEIVEGQAAVHHCSASVDFMEDTMKPYPAVVNDEGMYAHAKEVAEGLLGEKNVRVGPQVMGAEDFGFYAQRMAGAFFTIGVGNASTMATIHSTHSPHFVVDEDVLPVGAAFHAAVAIEYVRKNRAST

SEQ ID NO: 191912 - protein, 235 aa, Zea mays
  Clone ID: MRT4577_106609C.1.pep
MTPSSIRLSAAAMAARRPRGPSILHPSSIFSEEANLPFPQAQIRLSAAAMAARRLLLLLAVVAASLLAADARPCHGFLVAIPSDPNPDPSRGDGAVNRHLGAPHVATVITVFRVRRLGPHVPHGHRNHHHLHSIPANVQIHRPDLLHPATAAAAGPQERVRDILVVVVGLLFGLACGALTAASVYLVWSMVAGAAAASPYDELYEDEDESSDTESPKKVGYVIIQELEVHEGGKK

SEQ ID NO: 191913 - protein, 142 aa, Zea mays; identical to SEQ ID NO: 191871
  Clone ID: MRT4577_10660C.1.pep

SEQ ID NO: 191914 - protein, 219 aa, Zea mays
  Clone ID: MRT4577_106610C.1.pep
MESLAATSVFAPSRVAVPAARALVRAGTVVPTRRTSSRSGTSGVKCSAAVTPQASPVISRSAAAAKAAEEDKRRFFEAAARGSGKGNLVPMWECIVSDHLTPVLAYRCLVPEDNVDAPSFLFESVEQGPQGTTNVGRYSMVGAHPVMEIVAKDHKVTIMDHEKSQVTEQVVDDPMQIPRTMMEGWHPQQIDELPESFSGEQPRLLRRREDLMLPMMLCE

SEQ ID NO: 191915 - protein, 46 aa, Zea mays
  Clone ID: MRT4577_106611C.1.pep
SLRYHYQVVKYASTNDSVASWFSPDHVGYTVVHNFIVRSPMAYLPF

SEQ ID NO: 191916 - protein, 67 aa, Zea mays
  Clone ID: MRT4577_106612C.1.pep
FPKTGPGNPVPKSTEDFICHGPTFLKTPEQQKLFEVLAFWARAKKTGEWVLVGGLNFCCLWGGLGRL

SEQ ID NO: 191917 - protein, 213 aa, Zea mays
  Clone ID: MRT4577_106613C.1.pep
MAHHRRRLLHSPSIHLPPHPAAALLFSPLSLTETFPREDTKAPGSRKPIHSIPHKARHKRTKAAMIRTKGEAGTGNVVEAVRHVRSVMGDVRALRSMDDDEVFAYAKRIAAPYDLVMQTKQLGRLPVVQFAAGGVATPADAALMMQLGCDGVFVGSGIFKSGDPARRARAIVQAVTHYSDPTILADVSTGLGEAMVGINLNDPKVERYAARSE

SEQ ID NO: 191918 - protein, 131 aa, Zea mays
  Clone ID: MRT4577_106614C.1.pep
HNISKSGTGNITFSKKKKKKKRKREKERVKKKAPWGNQPKQQTPIGAKGNLNSKNPGGRATKQRGNPSKGRGGKAAKPLVMLKLTHPKIFFGYPPRGHKPWRERALTQCPSLAGAPKERKLKRNPGLRRKI

SEQ ID NO: 191919 - protein, 305 aa, Zea mays
  unsure (1)..(305): unsure at all Xaa locations
  Clone ID: MRT4577_106615C.1.pep
MASDGSGVVTVYGSNGAELLEPSKQPKSATFSVKVGLAQMLRGGVIMDVVTPEQARLAEEAGACAVMALERVPADIRAQGGVARMSDPGLIRDIKRAVTIPVMAKARIGHFVEAQILEALGVDYVDESEVLTPADDAHHINKHNFRVPFVCGCRDLGEALRRVREGAAMIRTKGEAGTGNVVEAVRHVRSVMGDVRALRSMDDDEVFAYAKRIAAPYDLVMQTKQLXATPADAALMMQLGCDGVFVGSGIFKSGDPARRARAIVQAVTHYSDPTILADVSTGLGEAMVGINLNDPKVERYAARSE

SEQ ID NO: 191920 - protein, 340 aa, Zea mays
  Clone ID: MRT4577_106616C.1.pep
MQHLAAVLLVLAATTALPPGAAAWRPWPPRDNATAAAGLGASKRLEGSSEFVKLEYHMGPVLASAITVHPIWYGPWPAAQKRTIRAFLRSLSPSAAIPSPSVSAWWRTVRLYADQTSANVSASVSLGAEKSDARMSRGARLSRMDIQAVVRDAVTARTRPLPVDASGGVYLVLTSPDVAVDDFCGQVCGFHYFTFASVVGSTLPYAWVGNSARRCPEVCAYPFAVPAYVRGRRPESPPNGDVGVDGMVSVIAHELAEMASNPLANAWYAGGDPSFPTEIADLCEGIYGTGGGGAYTGQLLTDARSGAAYNVNGVGGRRFLVQWVWNPVLSYCSGPNALDQ

SEQ ID NO: 191921 - protein, 97 aa, Zea mays
  Clone ID: MRT4577_106617C.1.pep
STSTSHLLFLSAASSSPAPKKKVGRKGWEEMSLGEKAVDLYVGEKGLLFWLNKFAYASIFIMVGAWVLFRFVGPSLGLYQLDAPPLPPTAVFSGGSP

SEQ ID NO: 191922 - protein, 226 aa, Zea mays
  Clone ID: MRT4577_106618C.1.pep
YSPATTSESQPPPPHDKRNSATTNAKSRQLGPLAPSNGDVAGGRGEGRVVVARKAKQEPGKVPAPLYPQHEGEREWTPWLVPSILVANITVFTIAMYYNNCPAHNARPGRDDGQCVARFLHRFSFQPLRQNPLLGPSSATLVKMGALVWDKVVHGHQGWRLFSCMWMHAGVLHLLANMLSLLFIGLRLEQQFGYVRIGAIYLVSGVGGSVLSSLFIRSAISVGASG

SEQ ID NO: 191923 - protein, 181 aa, Zea mays
  unsure (1)..(181): unsure at all Xaa locations
  Clone ID: MRT4577_106619C.1.pep
MDEFELEDNLEFILQSIQELMEDPGDNNAFGDANQNELFASIVNYDQENMLPDVSAADVAAGKDIQGIPWEKMLFGRDKYREMKMKNYRNYQNLSYAREDALQECXATTKHDVYTMHDQSVTHWSSLEQTSTELINADDCIVPXQRGHGSQSVAMVQVTTMAVDSNLLVXGGFQGGDICKR

SEQ ID NO: 191924 - protein, 140 aa, Zea mays
  Clone ID: MRT4577_10661C.1.pep
MSKRGRGGSAGNKFRMSLGLPVAATVNCADNTGAKNLYIISVKGIKGRLNRLPSACVGDTVMATVKKGKPDLRKKVMPAVIVRQRKPWRRKDGVYMYFEDNAGVIVNPKGEMKGSAITGPIGKECADLWPRIASAANAIV

SEQ ID NO: 191925 - protein, 471 aa, Zea mays
  Clone ID: MRT4577_106620C.1.pep
MGDGRTGGANRPAWLQQYELIGKIGEGTYGLVFLARLKPPHPAPGRRGPPIAIKKFKQSKEGDGVSPTAIREIMLLREINHENVVKLVNVHINHADMSLYLAFDYAEHDLYEIIRHHREKLSSSINPYTVKSLLWQLLNGLNYLHSNWIIHRDLKPSNILVMGEGDEHGIIKIADFGLARIYQAPLKPLCDNGVVVTIWYRAPELLLGGKHYTSAVDMWAVGCIFAELLTLKPLFQGVEAKNPPNPFQLDQLDKIFKVLGHPTVEKWPTLANLPWWQNDHQHIQGHKYENPGFHNIVHLPPKSPAFDLLSKMLEYDPRKRITAAQALEHEYFRMDPLPGRNALLPSQPGEKIVQYPIRPVDTTTDFEGTTSLQPTQPPSGNAPPGGQSVARPMPRQMPQQPMVGGIPRVAGGVTMAAFNAASQAGMAGLNPGNMPMQRGAGGQSHPHQLRRKADQGMGMQNPGYPQQKRRF

SEQ ID NO: 191926 - protein, 68 aa, Zea mays
  Clone ID: MRT4577_106621C.1.pep
MSTAAGSGSGNGRYGAGTGLAVGAVAGALGGLAIDEAVKYKEDKGAERVEEKVVPAGRDDYSEYRGDY

SEQ ID NO: 191927 - protein, 58 aa, Zea mays
  Clone ID: MRT4577_106622C.1.pep
FSDLLEYSAWLVARQGGRATRLGEGPVGGCRLARPRLGAKRVGVLPGVPRHLAARGGE

SEQ ID NO: 191928 - protein, 33 aa, Zea mays
  Clone ID: MRT4577_106623C.1.pep
SDGLAVVTAVVVVSRPVLAVAAAAIKVGNDTRL

SEQ ID NO: 191929 - protein, 68 aa, Zea mays
  unsure (1)..(68): unsure at all Xaa locations
  Clone ID: MRT4577_106624C.1.pep
NGTNHHHHSNNPKTPSSQRHXGEXGTNHHHHSSNPKTPSNQRHXGEXGTNHHHHSSNPKTPSSQRHIE

SEQ ID NO: 191930 - protein, 206 aa, Zea mays
  unsure (1)..(206): unsure at all Xaa locations
  Clone ID: MRT4577_106625C.1.pep
XKDDVAIQILYCGICHSDLHTIKNEWKNANYPVVPGHEIAGLITEVGKNVKRFNVGDKVGVGCMVNTCQSCESCEGGHENYCSKIIFTYNSHDRDGDMVVVNERFVIRFPDGMPLDRGAPLLCAGITVYNPMKHHGLNEAGKHIGVVGLGGLGHVAVKFAKAFGMRVTVISTSPGKREEAMETLGADAFVVSGDANQMKAAKGTMD

SEQ ID NO: 191931 - protein, 357 aa, Zea mays
  unsure (1)..(357): unsure at all Xaa locations
  Clone ID: MRT4577_106626C.1.pep
MSVAVLRVRAMELLARPAAAASSCCACARPSLQLPAPGTSRPRRLGFPTLRAAAAAAIAAEPQSNEQQNIIMETEVFACPVCYEPLMRKGPPGINLPAIYRSGFKCSKCNKSFTSKDIFLDLTVTAGTKEYSEQKPARTELFRSPLVSFLYERGWRQNFNRSGFPGLDEEFQMAQDYFQPIAGGILLDVSCGSGLFTRKFAKSGTYSAVIALDFSENMLRQCYEFIKQDDSLPQCEXLALVRADISRLPFASCSVDAIHAGAAIHCWPSPSNAVAEISRVLRPGGVFVGTTFLSSPRNNPFSVEALRPLRQIVGPVNTSYNYFTEGELEDLCKSCGLVNYSSNVQRSFIMFSGQKPY

SEQ ID NO: 191932 - protein, 356 aa, Zea mays
  Clone ID: MRT4577_106627C.1.pep
MSVAVLRVRAMELLARPAAAASSSCARPSLQLPAPGTSRPRRPGFPTLRAAAAAAAAIAAEPQSNEQQNIIMETEVFACPVCYEPLMRKGPPGINLPAIYRSGFKCSKCNKSFTSKDIFLDLTVTAGTKEYSEQKPARTELFRSPLVSFLYERGWRQNFNRSGFPGLDEEFQMAQDYFQPIAGGILLDVSCGSGLFTRKFAKSGTYSAVIALDFSENMLRQCYEFIKQDDSLLNANLALVRADISRLPFASCSVDAIHAGAAIHCWPSPSNAVAEISRVLRPGGVFVGTTFLSSPRNNPFSVEALRPLRQIVGPVNTSYNYFTEGELEDLCKSCGLVNYSSNVQRSFIMFSGQKPY

SEQ ID NO: 191933 - protein, 48 aa, Zea mays
  Clone ID: MRT4577_106628C.1.pep
DGLRLPEKKFFMVISPRGLVGLTNGYRDVGILLLQVGEDGAGRREGHQ

SEQ ID NO: 191934 - protein, 112 aa, Zea mays
  Clone ID: MRT4577_106629C.1.pep
MSAVTTVAAWLQAAVTLMQPDKIGCRAPFASMTCRPMPQLDCRAFGVNASALRITCSMHDDMSRSVDPAMLVGFALDTLSLLFSGASAMGTPKRLTYDEIQSRTCMEVKGTG

SEQ ID NO: 191935 - protein, 140 aa, Zea mays
  Clone ID: MRT4577_10662C.1.pep
MSKRGRGGSAGNKFRMSLGLPVAATVNCADNTGAKNLYIISVKGIKGRLNRLPSACVGDMVMATVKKGKPDLRKKVMPAVIVRQRKPWRRKDGVYMYFEDNAGVIVNPKGEMKGSAITGPIGKECADLWPRIASAANAIV

SEQ ID NO: 191936 - protein, 64 aa, Zea mays
  Clone ID: MRT4577_106630C.1.pep
LLHLQVDYITHRMRIAICVHVGIILDDVPFPTVMILPLESHNSQLDLICGCYHSIGNKGLFILH

SEQ ID NO: 191937 - protein, 76 aa, Zea mays
  Clone ID: MRT4577_106631C.1.pep
MKLNFLLAAALATCAMAASTTETTTKTEHHSTKTETSKASATSHSTSKSKGAAAPTMGADILGMAGKNGIAVAMAI

SEQ ID NO: 191938 - protein, 353 aa, Zea mays
  Clone ID: MRT4577_106633C.1.pep
MDLSSPAASGAATTTASLFCYNSAMAASPQHSREFEFHMSAPPDLWEPVASPADELFYKGKLLPLHLPPRIQMVEKLLESASEKGLLSASTAPATPYQSAANSCYPSGELAAEYYFHDCISTGSDAAEEAAACEKKPWSKKLKFIRHLNLGLKLKASKAYLKTIFASKGGNPDGKNGVPRANELSSTQFSTWRKNPFGHIGSKRYIASPISNSTTVGGKFKEGESGHRRSFSSIIVRYSSSNKTSSVSSSSSSSSCSSSNSSSFSIPSSNGSGGVGPVLRRSSSASSEMDNPIQGAIAYCKKSQQLASVRKSASDAGFRFMSSSASKIAAESEDADGIFEITRNTNVNSVSPQ

SEQ ID NO: 191939 - protein, 77 aa, Zea mays
  unsure (1)..(77): unsure at all Xaa locations
  Clone ID: MRT4577_106634C.1.pep
GRAGTAKSAPXQAICPLEPSYTTKKRSAHGHGLSSHRRHAPPAGRRLGAGGEAAADEPTARTADVAHPSNGHAPRAH

SEQ ID NO: 191940 - protein, 77 aa, Zea mays
  unsure (1)..(77): unsure at all Xaa locations
  Clone ID: MRT4577_106635C.1.pep
MARRLMLELPELLLLLLDGQCHGGRSGACYGRTADDLTAPDKAAQLKHQQSITYQRIYDTDIDASNAYTNXTGEELM

SEQ ID NO: 191941 - protein, 66 aa, Zea mays
  unsure (1)..(66): unsure at all Xaa locations
  Clone ID: MRT4577_106636C.1.pep
MPPRAPCRWTSPRRRAGMMEQGLGGWTSGPSLMVCGLLGAPXSTRPLMMPQMMTPNMMSPLMMSSM

SEQ ID NO: 191942 - protein, 89 aa, Zea mays
  Clone ID: MRT4577_106637C.1.pep
GCVFIKPWVPPQPPDRNRKSDNVSQKGTKLKHGETKEKAVQRRKKVSPHKTTKKTTRKQKMKTPGKKKKDPTQKKGNEHTAKFKPEKPV

SEQ ID NO: 191943 - protein, 91 aa, Zea mays
  Clone ID: MRT4577_106638C.1.pep
GARISSFLPPYKTRCINPDGPLVISKSGCLSLLDPPFPLVSTFNVAVFCLVPLPNVSVLTHVPCWELGSLSHPGPTLIKIVRYLSSCDVIL

SEQ ID NO: 191944 - protein, 93 aa, Zea mays
  unsure (1)..(93): unsure at all Xaa locations
  Clone ID: MRT4577_106639C.1.pep
LTLQTIATQHQQQQQFXPSLRHLAVVNPVTYLQQQLLASNPLALANVAAYHQQQQLQQFMRGLSQLVMALPAVYLLLLSSSPLALVIASTFVH

SEQ ID NO: 191945 - protein, 79 aa, Zea mays
  Clone ID: MRT4577_10663C.1.pep
LIWCILIIFLLLLFLYNCGWLFVILFPCHSCRVSPMFQLCLCSHRGGGPFIFFFPLMAAVSMNKKHFFSSFMALLESLG

SEQ ID NO: 191946 - protein, 88 aa, Zea mays
  unsure (1)..(88): unsure at all Xaa locations
  Clone ID: MRT4577_106640C.1.pep
WYTSSSKQLIRLRSKGGGGDGGXGLETIIPRVGWSLFLRLEQGAAMRGQRAVGAWVSVFERXXGAGQXXMAXPAHSHRRXGETIREGS

SEQ ID NO: 191947 - protein, 101 aa, Zea mays
  Clone ID: MRT4577_106641C.1.pep
LGFCGLLVGRGGFSLVLRGLVFVSFGLVCARASFCGACVLCRRFPGLLSCLFVSLRCLGRRASCSSLLSCRLLLLCSSSFPGCGSRRLLAWVSPGFLPCCP

SEQ ID NO: 191948 - protein, 201 aa, Zea mays
  unsure (1)..(201): unsure at all Xaa locations
  Clone ID: MRT4577_106642C.1.pep
LWHGAEEDDDGGEKNAPRVLTWPPLLRGRVEGEKRKVQFLQLLGWMQRSEAQARKASLAESVLAAISELMPSAAAAVDAEHESFMDVGSHLHHGALPTVSVEAQKVQGSPANALHVMEYLAANVDLAKDLVTRCSAIAQQLMDDDLLGITEDLDKVIKNISNELNKMPAATFESSMFAEPAVSGHLXVVRNQHDLFEQQSF

SEQ ID NO: 191949 - protein, 61 aa, Zea mays
  Clone ID: MRT4577_106643C.1.pep
GLVLGLVKRYFFLVCEWRDSFKVVVVEAREVVVFGIYFKEGNVFFDKWGGIFLLNNGVVCV

SEQ ID NO: 191950 - protein, 87 aa, Zea mays
  unsure (1)..(87): unsure at all Xaa locations
  Clone ID: MRT4577_106644C.1.pep
SPNLLTIRYSLCMNGFIPVVCLLRHHAKINISLCKHVCANIMCLCLGAIPCRSLFSVLVIDVKIXYVPPGTLLSGRNSWFSLLVCSR

SEQ ID NO: 191951 - protein, 218 aa, Zea mays
  unsure (1)..(218): unsure at all Xaa locations
  Clone ID: MRT4577_106645C.1.pep
MDITEVTVVHHAALVLAALWVAAASGWTHPALFLVGLLYIFAVNQRYTMRLWRRIQYEERKCANQRKLLSDAETVRWLNYAVEKIWPVCMERVASQQFLLPIFPWFLEKFKPWTARKAVIQSLYLGRNPPMFTDIRVVNQSTDDDHLVLEIGMNFLSADDMDARMAVQLRKRLGFGITTNMHITGMHVEGKVLVGVRFLRQWPFIGRVRVCXFVEPPY

SEQ ID NO: 191952 - protein, 82 aa, Zea mays
  Clone ID: MRT4577_106646C.1.pep
GGGKQSIENRNMPPKYPVTKLGPGGDQTKGSQVEDFDKGDFRCPEKPYPLGLPKNLCFSLGGGKPPPPNLDHGAKNLSLIPP

SEQ ID NO: 191953 - protein, 366 aa, Zea mays
  Clone ID: MRT4577_106647C.1.pep
MMEEGAPDLRELVRLPDVLVVCSSTGWTDEKHMLYLQLLEETFVHQLHGSGCIFKGLFNCSPRYCRQMKSSKQIVKYTTPGQGCAIVEGGKVKSCIKAEHVELPSCCGNQQDEKVRSLEDNASTTKPMEKATSHARAASPGQASTCYVGKHRHSPSRSAEGSDQNFDEETQGTGESKHEYNPRRLKSADGTRDHQVVNAEAHQVGCLDVSDKNSENFSASSKVLAASLDVEARVTLKSRQYVRVRSTMSTVTSCTFLSLGSPVRPAVSSARPAAAAVASRRRPRSLSVCCEAGRKGDHNPKTDLHPFNIPAFVLVHPVAPREERWQLEEDADKVNLWFEVPGQSKDDLTVEIDEDVLVIKKRKELV

SEQ ID NO: 191954 - protein, 446 aa, Zea mays
  unsure (1)..(446): unsure at all Xaa locations
  Clone ID: MRT4577_106648C.1.pep
MMEGGGARSARARAHASGKITVLVHPVAPREERWQLEEDADKVNLWFEVPGQSKEDLTVEIDEDVLVIKKRKELVGQRSPGSGVAEYGSQSQQQSRRGTADGKDPLPAAQQGQGGEVVYARMLHAAGFSGAAAQLLPPAGVLKVTPEPEYGASVWEDLRSHLSQRLVQRANMARTQSHSRRHGEPVTASRDVLVVCSSCGWTDEKHMLYLRLLEETFVHQLHGKCCIFKGLFNFSCCYCGGMKSSKQIVKYTTPGQGCAIVEGGKVKSCIKAEHVESPSCCGNQQDEKVRSXEDNASTTKPMEKATSHARAASPGQASTCYVGKHRHSPSRSAGIKFIYLSDVARFLKENYSCIYSEGSDQNFDEETQGTGESKHEYNPKRLKSADGTRDHQVVNAEAHQVGCLDVSDKNSENFSASSKVLAASLDVEAGSPSGDCKDHGPKRYGM

SEQ ID NO: 191955 - protein, 416 aa, Zea mays
  Clone ID: MRT4577_106649C.1.pep
MASAHNALRVFFILAVVCAVCTAKRTGANKEESAAAPGGAAGGSGGTFDISKLGATSDGKTDCTKAVQDAWTSACEATGSATVVIPKGDYLVGPLNFTGPCKGSNIAIQLDGNLLGSNDLDKYTASWIELSHVNNIGITGSGTLDGQGTAVYSKSKTDNVKAMPNTLVLFHVINATVAGIKLLNSKFFHINIDNSESITVKDVNITAPADVENTDGVHVGGSSKISILNSTIGTGDDCVSIGPGCNGVLVDSITCGPGQGISVGCLGRYKDEKDVSDITVRNCVLKNTTNGVRIKSYVDAESVLTASHLTFENIRMEEVANPIVIDQYFCPQKVCPGKRSNSSHVSVKDVTFRNITGTSSTPEAISLLCSETQPCSGVSLIDVNVEYAGKNNKTMAVCSNAKGTAKGSIEALACLV

SEQ ID NO: 191956 - protein, 140 aa, Zea mays; identical to SEQ ID NO: 191935
  Clone ID: MRT4577_10664C.1.pep

SEQ ID NO: 191957 - protein, 90 aa, Zea mays
  Clone ID: MRT4577_106651C.1.pep
DMYQMLYWLHPLLFTFWWGLHAYQTLGNCRLMGTVQSVHLKILMKDLIRTNPTNYRSKKMLMVHALSYLLTDTSFMGTFFSLLSTFLCRL

SEQ ID NO: 191958 - protein, 37 aa, Zea mays
  Clone ID: MRT4577_106652C.1.pep
APAMLHVNFYRSYGKTFKIPWRPYENERLDARLKLVS

SEQ ID NO: 191959 - protein, 105 aa, Zea mays
  Clone ID: MRT4577_106653C.1.pep
AIALCVQVKKYLQSIQLDLIAPILYGSGISGAAAELLAPAGSCNLQPEPEFRPPMWEVLQSLVRQRLVQRANMARTQSHSRRHGEPVTASRVRRNLPRYCFMMAF

SEQ ID NO: 191960 - protein, 74 aa, Zea mays
  Clone ID: MRT4577_106654C.1.pep
ERPATGFELRLRYILFSGPDNQSISLLGDAFVGGFLSQLVLGKGIEDCVRAGCYAANVIIQRPGCTYPEKPEFN

SEQ ID NO: 191961 - protein, 73 aa, Zea mays
  Clone ID: MRT4577_106655C.1.pep
VTKIARTSVHRQKCLLHHLMLKLGLPPATARIMDQKDNAMSTECFLELTNTPTWRAATESEIGSQSVQVCKIS

SEQ ID NO: 191962 - protein, 267 aa, Zea mays
  Clone ID: MRT4577_106656C.1.pep
MWEVLQSLVRQRLVQRANMARTQSHSRRHGEPVTASRESLKVSSYWIRTDEKHMINLRLLEETFVHQLHGSGCIFKGLFNCSPRYCRQMKSSKQIVKYTTPGQGCAIVEGGKVKSCIKAEHVESPSCCGNQQDEKVRSLEDNASTTKPMEKATSHARAASPGQASTCYVGKHRHSPSRSAEGSDQNFDEETQGTGESKHEYNPKRLKSADGTRDHQVVNAEAHQVGCLDVSDKNSENFSASSKVLAASLDVEAGSPSGDCKDHGPKG

SEQ ID NO: 191963 - protein, 71 aa, Zea mays
  Clone ID: MRT4577_106657C.1.pep
DELFYFYLKNGIMGYKKTPALGKGGFRKRDGHYQKGGTGKEYWSLFMGPGKSLGGITIKPLKKGYNIDLNL

SEQ ID NO: 191964 - protein, 164 aa, Zea mays
  Clone ID: MRT4577_106658C.1.pep
MAMTVAVTWLPSTASRGRTLAAPLPPFAAPISMHMPLRAPPPIPIPHKPRLVVASAQFDFSRAVQTVWRVGNDAVEAGSNLVPGSVPRPIARIGVAVAAVSVALFLLKSIVSTALFVLAMMGLIYLGFLAMNPKEASGSRLDEATGDPSEDTVEEARRIMEKYK

SEQ ID NO: 191965 - protein, 35 aa, Zea mays
  Clone ID: MRT4577_106659C.1.pep
LLPPLKDTPTHPLTDSVSHSPDGFKEPNEKLQITL

SEQ ID NO: 191966 - protein, 73 aa, Zea mays
  unsure (1)..(73): unsure at all Xaa locations
  Clone ID: MRT4577_10665C.1.pep
MADVDVEPEVAAGDPKKTTPREDSYRGANLNALPDTSTDHLVQIFPARARRTAQKRSKRKPTAXHLEAVQGEK

SEQ ID NO: 191967 - protein, 144 aa, Zea mays
  Clone ID: MRT4577_106660C.1.pep
MAMTVAVTWLPSTASRGRTLAAPLPPFAAPISMHMPLRAPPPIPIPHKPRLVVASAQFDFSRAVQTVWRVGNDAVEAGSNLVPGSVPRPIARIGAAVAAVSVALFLLKSIVSTALFVLVRNHNICGMILLPLMINVLCAILNDI

SEQ ID NO: 191968 - protein, 86 aa, Zea mays
  Clone ID: MRT4577_106661C.1.pep
MARLHWLEAVLPLGIIGGMLCIMGNAQYFIHKAAHGRGIDQPQTFLDVDEPRSKAQKYCSFVSCTIGTKTCLFCFEISTVRRIICI

SEQ ID NO: 191969 - protein, 133 aa, Zea mays
  Clone ID: MRT4577_106662C.1.pep
REGEGRGKGREREGKKGKGGGEKKKRGGQAGQQGGDEVAGEIEVSMSGRNICGRRRSGVGQGALGLGAGRVVVVGHLRKLRSWRMARGPPMTVVISPIYACRNARRQAFSAPASSSACPCSRSTARLNTTQAE

SEQ ID NO: 191970 - protein, 63 aa, Zea mays
  Clone ID: MRT4577_106663C.1.pep
PKKTRHPVRGVFYPLDKTPARPGVEPYFLTPPRAFLFFNPVPPKSLKPKKKNPPEGFGAPASF

SEQ ID NO: 191971 - protein, 64 aa, Zea mays
  Clone ID: MRT4577_106664C.1.pep
MARLHWLEAVLPLGIIGGMLCIMGNAQYFIHKAAHGRPKHIGNDMWDVAMERRDKKLVEQSSGN

SEQ ID NO: 191972 - protein, 44 aa, Zea mays
  Clone ID: MRT4577_106665C.1.pep
QHPPVPPDFRSVRFFGLQAPAMAPPRRPPSTDHIRALWLRRLGR

SEQ ID NO: 191973 - protein, 64 aa, Zea mays; identical to SEQ ID NO: 191971
  Clone ID: MRT4577_106666C.1.pep

SEQ ID NO: 191974 - protein, 386 aa, Zea mays
  Clone ID: MRT4577_106667C.1.pep
MAKETEYYDVLGVCPAASDEEIRKAYYIKARQVHPDKNPNDPHAAENFQALGEAYQVLSDPLQRKAYDGYGKNSVSRENILDGTVVFTLLFGSELFEDYIGHLAMATMASSELTSDNDTPEKLQDRLKNVQREREEKLARFLKEFLSQYVRGDKEGFANRAEAEAKKLSCTSSGLDILRTIGYVYSRQAAKELGKKAMYLGVPFVAEWVRNKGHLWKSQITAAKGALQLLQLQEEACRQSSKDGNATEQDVDLQMRMNKDLMMSSLWKLNVVDIEMTLLHVCEMVLSENNVKKDDLKARATALKFLGKIFMREKEALPGPAPAPGPSGPSKRTVLDDDSSSDDSSDDDLTRTAPYRTPAFTQGIGRLFRCLCNPAYDVDDDFEPHK

SEQ ID NO: 191975 - protein, 78 aa, Zea mays
  Clone ID: MRT4577_106668C.1.pep
VGDPLSRVEVVKGHRSHPALFLTDLLYPSLNPPALICLSGVEAPFWFRFFCFFFFVVACLYIICEIFLCLIFLSLPGF

SEQ ID NO: 191976 - protein, 90 aa, Zea mays
  Clone ID: MRT4577_106669C.1.pep
WERLFHSDLLTDFSMLTASFDLVAIRIGQKLAVTTTVIVIDKACILDLKHVVNGFILHSELRIRLYLMAGPTTTTSSAEVDYGPTSNPYA

SEQ ID NO: 191977 - protein, 75 aa, Zea mays
  Clone ID: MRT4577_10666C.1.pep
ESGGLAVRIVVWRGVLSDRPTPSSLERDSCEGESPMLPGPCRTTRRHQRVSLYGNACQIARYTTSNAKYKRDTDS

SEQ ID NO: 191978 - protein, 46 aa, Zea mays
  unsure (1)..(46): unsure at all Xaa locations
  Clone ID: MRT4577_106670C.1.pep
LEXLRDFLVLNTLLEKSGPSGEEGREEKGKEKGAKGAGRVRVGPPR

SEQ ID NO: 191979 - protein, 95 aa, Zea mays
  Clone ID: MRT4577_106671C.1.pep
VLFQGRKLSGETNPEKVERFAREMAKEHARRKKKQQQQQQMGPCLPVVAAAASGKAAPPNNDKQPPPPPPTTTTANAAMKKHTPTTSRPHGGGTR

SEQ ID NO: 191980 - protein, 88 aa, Zea mays
  Clone ID: MRT4577_106672C.1.pep
RKLGIRLVVQCIQNKPLYFADRLYDSMKGKGTRDKVLIRIMVSRSEVDMLKIRSEFKRKYGKALYYYIQQDTKGDYQKALLYLCGGDD

SEQ ID NO: 191981 - protein, 82 aa, Zea mays
  unsure (1)..(82): unsure at all Xaa locations
  Clone ID: MRT4577_106673C.1.pep
AHGLHIVEHDTMTVLIAGLALLDASCERHLQLNEVACGVLRRPHGYSLLCRTXLYRQPTDLSRXLTTMLTRGNTPPKHRSSL

SEQ ID NO: 191982 - protein, 56 aa, Zea mays
  Clone ID: MRT4577_106674C.1.pep
QRAESLRTDIIAKIVGRLGLDKTMFEASNSNTSEWFVRRYGPRVRTPLPLGKPQAD

SEQ ID NO: 191983 - protein, 27 aa, Zea mays
  Clone ID: MRT4577_106675C.1.pep
KIKHLFGNKLQSFFVMAVPIMKPVCNP

SEQ ID NO: 191984 - protein, 124 aa, Zea mays
  unsure (1)..(124): unsure at all Xaa locations
  Clone ID: MRT4577_106676C.1.pep
AWLLRKLATLALAVLLAATVAAPTAAVRAAMSCSTGCSTLMPCLSFVQMGGAMPPQPCCWGIRSLLQQANNTPDRRTICGCLKNVANCSYGSGTYIMRADELANQCCVXLPYNTASDVYCSSIK

SEQ ID NO: 191985 - protein, 43 aa, Zea mays
  Clone ID: MRT4577_106677C.1.pep
QLRFHCMFVLSINSSSIAFSSSSSANGLKSLSHALLGGAGVFG

SEQ ID NO: 191986 - protein, 46 aa, Zea mays
  Clone ID: MRT4577_106678C.1.pep
LFGRLAIDLPGFGINVILNYAHVPFKGAEELQYSTKSTDCVSVLGP

SEQ ID NO: 191987 - protein, 79 aa, Zea mays
  Clone ID: MRT4577_106679C.1.pep
HGDISERQHHAINRSHNEVETSMDPHIKTSKHGRQKKKRHYHLRADRPITKPLLSRRHHHWANRCNPHRGHNPPHGGRH

SEQ ID NO: 191988 - protein, 117 aa, Zea mays
  unsure (1)..(117): unsure at all Xaa locations
  Clone ID: MRT4577_10667C.1.pep
FPXRPTPPPFFTLHPEAMNIVPILKSSRCYSTRIPIPSTLTLPNPIPTSLPSKVSFTSSPNIYHQDIYTSWTSTKENHTHSPTHYSPQILLLLTITTMMLNPHQQHLLPSSHPYHNH

SEQ ID NO: 191989 - protein, 171 aa, Zea mays
  unsure (1)..(171): unsure at all Xaa locations
  Clone ID: MRT4577_106680C.1.pep
MTQAKSAPGRKEMGRGRSPEPLDFFIWTVEEFPCSYLGLPLSVHKLSRAELHKIVDKVADNLPKWKGALINKAAXLVTVKAVLSALNIYHMTALDLPKWVFKAIDKKRRGFLWVGKDKANGGNCMISSDSIQRPLQYGGLGVLNLEVMSWALHVWWIWLEKQILADPWKDY

SEQ ID NO: 191990 - protein, 367 aa, Zea mays
  Clone ID: MRT4577_106681C.1.pep
DFKRKFRDEESVPAARRESIMILHSELKRQRKLVKNLKKKSLWSRTLEEIVEKLVDIVIFLHKQIRDSFNETGTDFCASEQTQNKRLGSCGLALHYANIINQIENIVSRPLSLPPSARDNLYHGLPTTVKSALRSRLQTYNPEEERTVAQIKAEMQKTLRWLLPVAENTIRAHQGFGWVGEWANLDMGKKSGYQHRHSVIRIQTLHHADKAKTEHYMLELVVLLHHLVMQVKSRGYGTGKPSRHEHDASSRSRKAAPGLHPETETETRRNTSPVNSRVASSPLSDCERAALDHLGFRRATYGRSQSCEPPPPGRRSLARRSWGLCRSHGGSPARALGSKTPAVGRDAAMDLDVIDGLDLDRLTSSWP

SEQ ID NO: 191991 - protein, 43 aa, Zea mays
  Clone ID: MRT4577_106682C.1.pep
VSCSYSDYSKRSSVPVCVLNIRIPSVFDDTGPNPYFVCRFPFL

SEQ ID NO: 191992 - protein, 48 aa, Zea mays
  Clone ID: MRT4577_106683C.1.pep
KSLCPPPFFFFKAQIVSRAREIPCGHTHGAHLAVLNQAWLTSCHLTEL

SEQ ID NO: 191993 - protein, 48 aa, Zea mays
  unsure (1)..(48): unsure at all Xaa locations
  Clone ID: MRT4577_106684C.1.pep
YQCHKLTMCIMYNVYLFDHASMRADGXGGRCAFILSLPWLSAVVWVLG

SEQ ID NO: 191994 - protein, 68 aa, Zea mays
  Clone ID: MRT4577_106685C.1.pep
ICSRPPPLYVAPHCFCPELSIAPRCLFSTAAGVWSRPAYNMFRCWHLVSGPICIRIPLFGQDSRALLK

SEQ ID NO: 191995 - protein, 65 aa, Zea mays
  Clone ID: MRT4577_106686C.1.pep
PCTARQPPAYIKHTGKHERAWMPRRRAVQLTLARKLSLRSRTSPAQATMLSKTLEARTTNTGPTW

SEQ ID NO: 191996 - protein, 98 aa, Zea mays
  Clone ID: MRT4577_106687C.1.pep
FRPHQWTQPRSTGSPGSGGFDGSWGRPGEEFEAMSRLASGLQRPRRSLSPCEVLWAGVTRGYRARPPVEEVHRSDGVGAALRALQHPPIVGRLHLRNP

SEQ ID NO: 191997 - protein, 222 aa, Zea mays
  unsure (1)..(222): unsure at all Xaa locations
  Clone ID: MRT4577_106688C.1.pep
RRITARDLKCGCIVERHLEDGDVVFFNRQPXSLHRMSIMCHRVSMSPYFIKVYIKHFFTFEYLLLYLSXARIMPWRTLRFNESVCNPYNADFDGDEMNLHVPQTEEARTEALMLMGVQNNLCTPKNGEILVASTQDFLTSSFLVTRKDTFYDRSSFTLLCSYLGDGMENIDLPTPALIKPVELWTGKQLFSVLVRPNAHTKVFLNLAVQEKIYSKKKKKKAA

SEQ ID NO: 191998 - protein, 107 aa, Zea mays
  Clone ID: MRT4577_106689C.1.pep
MSRLASGLQRPRRSLSPCEVLWCALASCGLVLFSQLAVAMVPRLFPSLYLLAMLPIAGLVLLAAIVLGRLWRRFIGVTASAPLFVLFNILLSWGVYIFVIRRSELLW

SEQ ID NO: 191999 - protein, 464 aa, Zea mays
  unsure (1)..(464): unsure at all Xaa locations
  Clone ID: MRT4577_10668C.1.pep
MGKWGKEISSHELQKEELSINGGLQSCDAPNAGSQQPLSAVSVPSSVSIPSKVSSISTNNANEGVSIRSDEVTVKSSTDGSATSAAGKSSNLSLDALAKAKKALQLKKELSEKLKKLPMLNNKLGTSVTATQVSKEEAKTSVSAVDAQLFSKGEAKLTDVSILPTSTISGTPAVGGAIGIPGLTNIPNLESVKRAQELAAKIGFRQDPQFGPLINLFPGTSTEVTVPQRPAKAPVLRLDSHGREIDEQGNVISMTKPTNLSTLKVNINKQKKEAFQIIKPDLDSLAKSSVHFDERMGINQKKLLRPKRPGFQFVEEGKLTRQAELQKIKSQFGEAQAKELKVKQAQLAKAKAEVDINPNFIEVAPGVRAPKQKQNEDIPEIEPWDAKILIYATYEDISVEKINMDKITIYVEHPEPYDPPAEPAPPPXQPLKLTKKEQKKLRTQRXRLAKEKRXKEMIRQGPLG

SEQ ID NO: 192000 - protein, 133 aa, Zea mays
  Clone ID: MRT4577_106690C.1.pep
FIIYKHIIYIMKVIFVYLRIMQIYMLKVMLVIVIIELVYMLNKLIINILLLNVLLLHELVNIFYIIIILILILYIIIIVILDIIIIYKLVLVVYYIVLNFLIYNNIINDYDKNDYYYYILTPIYYDFQNNKYD

SEQ ID NO: 192001 - protein, 58 aa, Zea mays
  Clone ID: MRT4577_106691C.1.pep
GGRQFWVGLIKKESSGFTSKYYTFKQIKTWLVGWTTTPKTGGTQLYLNINHCFQTGLG

SEQ ID NO: 192002 - protein, 104 aa, Zea mays
  Clone ID: MRT4577_106692C.1.pep
PRGGGEKKKNIRGGGGGGGAVGQRTERERRGPRRKKRNAPGGASGPNRASCAKQGAATAGEEQPHRPSLLAPPPRLRRAVTRHRGRRGEQHGAAVAAEGAIAVP

SEQ ID NO: 192003 - protein, 126 aa, Zea mays
  unsure (1)..(126): unsure at all Xaa locations
  Clone ID: MRT4577_106693C.1.pep
GGPKGPPGGGGGAPGGASGPRGPQKXKGGVPKKNCFFSKPPGGSKGRPXGWGPRGLNGTPPPPGPPPPPVETRIKGSPAPVSNPPPVPXEGPPPPPGKCPGXKQAPPPGKXPKECVWGPKPPCFGR

SEQ ID NO: 192004 - protein, 137 aa, Zea mays
  unsure (1)..(137): unsure at all Xaa locations
  Clone ID: MRT4577_106694C.1.pep
MSLRPSEREQMRKGNYKQTVDAEESRHRREGQMMDMRKAKCEESLQKKRRDGFPASAAGMPPMVHSTALQQKGMGDVVALHLLGSDLTFLXRDGFPAMAHAVHSNDPSVQLEATTQFRKLLSIGEIGILCAVSIPDG

SEQ ID NO: 192005 - protein, 101 aa, Zea mays
  unsure (1)..(101): unsure at all Xaa locations
  Clone ID: MRT4577_106695C.1.pep
SKQRNKTTCFPFLEDNEILLTTPSRLSCTCRSSXTMGLLLQVGLLVPDLEETSPAGLATALLGVPPENNDAHDFVEAAAVSGRGDHGCNCGDHCKRDSWNC

SEQ ID NO: 192006 - protein, 309 aa, Zea mays
  Clone ID: MRT4577_106696C.1.pep
MRLYAPALCLLRSSTHPHPNQFRAGFTQSMASWKCSHSPSSPYLAKSGLVDSSLNRNVKSSQPQSIKYFVSLMGQQFRCGLSTREGSLSVKLDIPSHEKSRIGWNWKNMHQKIGGVAGGLCFGFSVTGVASAEVPIIRVKDNAETSSSSTSSTHGKEVYTDYSVTGIPGDGRCLFRSVVHGACIRSGRPIPNEDLQRKLADELRATVADEFVKRRKETEWFVEGDFDTYVSHIREPHVWGGEPELFMASHVLQMPITVYMRDEDAGGLIAIAEYGQQYGKEDPIQVLYHGFGHYDALQIPAKVGSKRKL

SEQ ID NO: 192007 - protein, 57 aa, Zea mays
  Clone ID: MRT4577_106697C.1.pep
PCHCADSGRPALCRVVLAPCVHVKSDVSCVQSIDHLMNVAQLFMINVQSQCRIKVLY

SEQ ID NO: 192008 - protein, 158 aa, Zea mays
  Clone ID: MRT4577_106698C.1.pep
ALTSLLVTELHGSPGIPGDGRCLFRSVVHGACIRSGRPIPNEDLQRKLADELRATVADEFVKRRKETEWFVEGDFDTYVSHIREPHVWGGEPELFMASHVLQMPITVYMRDEDAGGLIAIAEYGQQYGKEDPIQVLYHGFGHYDALQIPAKVGSKRKL

SEQ ID NO: 192009 - protein, 130 aa, Zea mays
  Clone ID: MRT4577_106699C.1.pep
FFFFFFFFFAANKIQFRSRRVPDSTVYVLSTCPSFKTCTLTGRLDQLVSCVAYFTLNERTCSHQSMVNGSPAPLLSSTVPVTQTTQVRFSGHGVQIQHPKLGLTFCTGTHLNACMHAAYCFRIFSVVVGG

SEQ ID NO: 192010 - protein, 604 aa, Zea mays
  unsure (1)..(604): unsure at all Xaa locations
  Clone ID: MRT4577_10669C.1.pep
SQSLALIFNCTFATVLSFFPPPQLNNKLGTSVTAAQVSKEEAKTSVSAVDAQLFSKGEAKPTDVSVLPTSTISGTPAVGGAIGIPGLTNIPNLESVKRAQELAAKMGFRQDPQCSPLINLFPGKCTGVTVRYRHANTPVLLLDAQGREIDEQGNVISNTKPRIRSTLKVDISKQKKEAFQIIKPDLDSLAKSSVHFDERMGINQKKLLRPKRPGFQFVEEGKLTRQAELQKIKSQFGEAQAKELKVKQAQLAKAKTEVDMNPNLIEVALGVRAPKQKQKEEIPEIEPWXFVSFLNDVFKVLCXNEHKVIFIVVFRDAKILLSATYEDVSVEKLNLDKITIYVEHPEPYDPPAEPAPPPPQPLKLTKKEQKKLRTQRRLAKEKDRQEMIRQGLLEPPKPKVKMSNLMKVLGSEAVQDPTRMEMEIRTAAAEREQAHVDRNIARKLTPSERREKKERKLFDDPTNTVETIVCVYKIRDLSHPQTRFKVDVNAQENKLTGAAVITDSISVVVVEGGKKSIKRYNKLMLNRIDWAAAVGGDEDAEAEAEADKPVNSCELVWQGSVAKPTFHRFTVHNCRSESAAKKIFVDASVPHYWDLAVNSSEGSP

SEQ ID NO: 192011 - protein, 100 aa, Zea mays
  Clone ID: MRT4577_1066C.1.pep
MRRPATAIALCWPDLAHPNQNKGFRWYTRQLSMDEDGDVADEFLDEIIPEGSVNNAKSPVGRFQVKYNTKRTALALRKHVIAVDGDIRHSLEHQGQLRWV

SEQ ID NO: 192012 - protein, 81 aa, Zea mays
  Clone ID: MRT4577_106700C.1.pep
IAIVKFLDSTEKGIKSNGVVNNISVEITKDDHMQLRLDREMGQEEARCAPTRLTTSTKAGAKRAGASLRLNLKGHLRPHES

SEQ ID NO: 192013 - protein, 164 aa, Zea mays
  Clone ID: MRT4577_106701C.1.pep
RCIIYFLYGCSLPCDRRSNADKMPAIPPSTTIPSDSGHHGLLAVRQNDDSRTSFTAVPTAYKSADTSLHPGAVAGIVLGAVAAFLLLLYIIYMLLHRGPVVRPMGDGASTVASGYPMSTVTSDTSTYLSFRSRRDRRPKNRSRSRGTSRATSRSKRTRSRTTVQ

SEQ ID NO: 192014 - protein, 63 aa, Zea mays
  Clone ID: MRT4577_106702C.1.pep
MCSPHCTLLCRVGAHCICYEKQAVLHPQAKSRWRDPFLTRKSYSIWGTGGHQNMPYPSSIWMG

SEQ ID NO: 192015 - protein, 50 aa, Zea mays
  Clone ID: MRT4577_106703C.1.pep
FGLSRMMKMNCLPNLTPPKFNYFEVLTLRSWYEWTFLMLTSRYVRSVILR

SEQ ID NO: 192016 - protein, 156 aa, Zea mays
  unsure (1)..(156): unsure at all Xaa locations
  Clone ID: MRT4577_106704C.1.pep
RSXTXRATQNFFLSLKDLESHSSSIDRAVSISTTLPLLLLYCALWWAGGSGGGPATVVMEFTSKQKAVLLLCFFMLSCLLLLPRASSAAPLSRSLSLTNRQLPTKNPALEVPAQQDQGAVEDGNLGEVAARMDIEVNDYPGSGANNRHEPRSPGRP

SEQ ID NO: 192017 - protein, 77 aa, Zea mays
  unsure (1)..(77): unsure at all Xaa locations
  Clone ID: MRT4577_106705C.1.pep
ENVDRFPVTLRPLLHHPPELGPRRGVAQDEXXXEESESCSCSGSGSSTSWPDRXSSSSSLWMMSLXXXPRTHHRLXN

SEQ ID NO: 192018 - protein, 76 aa, Zea mays
  Clone ID: MRT4577_106706C.1.pep
PGVGPPAPFLAPREPTTRLFFAREALELASGGGGGPRTRNKRPRLCFLPPVCSTGAKIHPPKQAGVFFCPPFFPLN

SEQ ID NO: 192019 - protein, 144 aa, Zea mays
  Clone ID: MRT4577_106707C.1.pep
PEPHSPADSNVHRLSASHRSLLPPVRLAIKCIAASALLTAITPDEFTMTSAETCRGGSVPGLRLLGHNGPQGSWRLREWVPWRPETRRPRELRTLFLHRPPKEKFSKTMRNSMFLCLKKVLPANSGRCKFILYRIMPAEILPLL

SEQ ID NO: 192020 - protein, 147 aa, Zea mays
  Clone ID: MRT4577_106708C.1.pep
PGSTTPMTSVVICLCFADLLSRRIHTRCDPHQRELIGTPGRGHTTTTCYLISPVCTPNPTRLPALGTASLLLQPHPPRCLRCSVRSRDLQFASLYDRSTTLPPDLGASLCLLRTEYGAPSHWMCDPWFPNLCAGERVQCHSARGSTS

SEQ ID NO: 192021 - protein, 67 aa, Zea mays
  Clone ID: MRT4577_106709C.1.pep
KMPSYIMVAALWTGVAPRLVLSLESASLSGPSHTEPAGRNLLPVCPVSRHLAGKQMLDELAALAHEY

SEQ ID NO: 192022 - protein, 425 aa, Zea mays
  unsure (1)..(425): unsure at all Xaa locations
  Clone ID: MRT4577_10670C.1.pep
MAAAHYGNGSSTSGGGGGRGRGKPITCKAAVAWGPGVPLSLEEVEVAPPXAPWXGXRVKVLFTPICHTDLSAWKGECXGAXVASLGYGAKLXGGHENGFFSLNXTPSDFCTCRVVESVGEGVEGLAPGDHVVPIFTGECEKCVYCKSDKTNLCGTYRVDPLKSSMVYDDGTRFSVVDQASGQRRPVYHFLNTSTFTEYTVLDAACAVKINPEAPLQRMCLLSCGISTGVGAAWNTANVSARSTVAVFGLGAVGLAVAEGARLRGATRIIGVDVNPSKFTKGKEMGITDFIDPNDICDKPVHEVIREMTDGGVDYSFECTGINDVLREAFLSTHDGWGLTVVLGIHSTPKMVPLHPMELYGRRITGCVFGDFKGKSQLPDLVDKCVNGEVNINFDGFITHKMPFSDINKAFRLLEEGKSLRCLLSL

SEQ ID NO: 192023 - protein, 111 aa, Zea mays
  Clone ID: MRT4577_106710C.1.pep
AEPAQDPHSPDRWDRVGAQHAREHPVKVGEAGCPGGWGGGHGGEEARAGVAAPSSEAGEPEGGAHAREVHHDGGGGHGATEAEPDWPEPGPEAPTPNPRLALRPPRRRSTE

SEQ ID NO: 192024 - protein, 57 aa, Zea mays
  Clone ID: MRT4577_106711C.1.pep
STPLLFSASHRLHRSRRFNRHPSIDDEHDEMELGTGIQECILRRSPLCRQTQGFAYR

SEQ ID NO: 192025 - protein, 87 aa, Zea mays
  unsure (1)..(87): unsure at all Xaa locations
  Clone ID: MRT4577_106712C.1.pep
CPRPTFFFRLPRGGPPAPPPFSPPPPFCPPAFAPSXPPPNLGPLTPPIVFSGGPHKPPPPPPGTPPPPPPPPAPKKKKTPHQTPTPP

SEQ ID NO: 192026 - protein, 104 aa, Zea mays
  unsure (1)..(104): unsure at all Xaa locations
  Clone ID: MRT4577_106713C.1.pep
MAEVPRILALGLLALLGAAVGPVAGQNXTCHPYLCYSKFRYXGTTDAYCGDRGQSGPCQSGGXKSTEAADAXGRSDSANDANGVTDAFFNCIKNQPDSDLEGNN

SEQ ID NO: 192027 - protein, 142 aa, Zea mays
  Clone ID: MRT4577_106714C.1.pep
MQASRARLFKEYKEVQREKSADPDIQLICDDSNIFKWTALIKGPSETPYEGGVFQLAFAIPEQYPLLPPQTGEICLDILKNAWSPAWTLQSVCRAIIALMAHPEPDSPLNCDSGNLLRSGDIRGYQSMARMYTRLAAMPKKG

SEQ ID NO: 192028 - protein, 90 aa, Zea mays
  Clone ID: MRT4577_106715C.1.pep
MVEEMCYIPVIDQDHTQDEDRITADLQCLICGNGLMEDSKTPSHSTNGMESSLQLTFCLRCVLNTRTMNTSTTPYKINTDRAGGALRAAS

SEQ ID NO: 192029 - protein, 157 aa, Zea mays
  Clone ID: MRT4577_106716C.1.pep
MQASRARLFKEYKEVQREKSADPDIQLICDDSNIFKWTALIKGPSETPYEGGVFQLAFAIPEQYPLLPPQVRFLTKTFHPNVHFKTGEICLDILKNAWSPAWTLQSVCRAIIALMAHPEPDSPLNCDSGNLLRSGDIRGYQSMARMYTRLAAMPKKG

SEQ ID NO: 192030 - protein, 294 aa, Zea mays
  Clone ID: MRT4577_106717C.1.pep
GSNNLVPAIFSILTVKTASGSITTYALEFIENLLRLDIDLQQQDEHLVKKVVLQHMDVLIHSLHDFVNHRKELNRRSGTWLGQRELRLFKLLLNYITDPSTADKFIDLILPFFSKKDLNSDDCLEALCVVRGIIQNLRCKVSEKVLNALNPLLAIVGLEPRLCICDIYAGLSLNNPSMLFLAGLIGDLNAVSASELGELDYDTRLNTYDKVRPQLFLGLTEEHVGAILSHCVYDMSSEELILRQSASRALQSFLDFSASVMNNDVSKYSIDDKFRENNTRSICTDSTGIRAGTR

SEQ ID NO: 192031 - protein, 74 aa, Zea mays
  Clone ID: MRT4577_106718C.1.pep
VKTRPCPSARSWPQSQLSQSSSQHCKYFRVDNIVPLGGTALQHLHLLACFFVIRSLGFNMIVYSDKLRASSKDI

SEQ ID NO: 192032 - protein, 151 aa, Zea mays
  Clone ID: MRT4577_106719C.1.pep
MNQPVQKNTLYVGGLAEEVDEKILHAAFVPFGEVKDVKTPLDQATQKHRSFGFVTFLEREDAAAAMDNMDGAELFGRVLTVNYAFPEKIKGGEQGWAAQPVWADADTWFERQQQEEEMKRLQTEQNAAMKEAERLHREKIAAEKNGETDEA

SEQ ID NO: 192033 - protein, 247 aa, Zea mays
  unsure (1)..(247): unsure at all Xaa locations
  Clone ID: MRT4577_10671C.1.pep
MAAALYGNGSSTSGGGGARGRGKPITCKAAVAWGPGVPLSLEEVEVAPPGPMEVRVKVLFTSICHTDLSAWKGECEAQRKYPRILGHEAAGVVESVGEGVEGLAPGDHVVPIFTGECEKCVYCKSDKTNLCGTYRVDPLKSSMVYDNGTRFSVVDQPSGHRRPVYHFLNTSTFTEYTVLDAACAVKINPQAPLQRMCLLSCGISTGVGAAWNTANVSARPTVAVFGLGAXGLAVAEXARLRXALGSS

SEQ ID NO: 192034 - protein, 118 aa, Zea mays
  unsure (1)..(118): unsure at all Xaa locations
  Clone ID: MRT4577_106720C.1.pep
GSRPASWPKVEKMGVTALFQQEGEGSNNIGFVVNLRLNSLTEFGTPXQFIAGKLLQAEKKKDVXSVGERSGHGGLAVYEIEYTLDSTRXGMKQIFSGAFVASRKLYLLNIAYSDTRTV

SEQ ID NO: 192035 - protein, 48 aa, Zea mays
  Clone ID: MRT4577_106721C.1.pep
PNNRSLPWRGCVDTNTSRQCSARALPMEVISGLHSGDSSLRVILAEAL

SEQ ID NO: 192036 - protein, 178 aa, Zea mays
  unsure (1)..(178): unsure at all Xaa locations
  Clone ID: MRT4577_106722C.1.pep
MDEGYSNLPTSHLLGSVPAVTQDDRKLGPPAAQVADAAATSRLQEFPPGGGNVGGYRPPGGPADGDVENQADWKGYFNVASYAPYFNVDTDVVVDRLISSVYPMDGFYRKIDANPDMYGPLWITTTLIFMLAXLYFGSRPSLVRFWCMWGYSLVIFXPASVLLLIPVGFLXWVIIALA

SEQ ID NO: 192037 - protein, 149 aa, Zea mays
  unsure (1)..(149): unsure at all Xaa locations
  Clone ID: MRT4577_106723C.1.pep
KQARLQELGRKYIGGSTSCFGGGRTQPGYGGGGNSQPGYSRCRNRQTXYGGGYMRYQTGGGYGHGQGGSTXTCGGGYGGCFGRPGHGEPPGGGSGTGGGVGIAVGYGGGGGGGFSGRSGRGCDFAHGGGCHHDCDSRSQAYHCQLDTLL

SEQ ID NO: 192038 - protein, 231 aa, Zea mays
  Clone ID: MRT4577_106724C.1.pep
FSVADAAATSRLQEFPPGGGNVGGYRPPGGPADGDVENQADWKGYFNVASYAPYFNVDTDVVVDRLISSVYPMDGFYRKIDANPDMYGPLWITTTLIFMLAVFGNYATYLVQTKKDMDIWNFDVGYFSWAASVMYSYAIIVPVVFFFLFQYFGSRPSLVRFWCMWGYSLFIFIPASVSIRFPSVCFVIYITGKNTQTFNFNMMYIHRNFQFSRLQLYITVLKIDSLNVKNP

SEQ ID NO: 192039 - protein, 70 aa, Zea mays
  Clone ID: MRT4577_106725C.1.pep
SLSLSLSPLDLSTNTTPPRFRNTQHKCVSFPSSRKLASASDMAGEKTASSGATDLVDPATATATAQKKPR

SEQ ID NO: 192040 - protein, 40 aa, Zea mays
  Clone ID: MRT4577_106726C.1.pep
FFLSPASTDLVYWALRRAGGELPTTSEPCSAARSLTTFSS

SEQ ID NO: 192041 - protein, 60 aa, Zea mays
  Clone ID: MRT4577_106727C.1.pep
SKSRGTCLLPPIFAYALMQGLVVRLDPPIFLRPPRQVVFPLKPSVAFDLGGVPKSVFFSV

SEQ ID NO: 192042 - protein, 69 aa, Zea mays
  unsure (1)..(69): unsure at all Xaa locations
  Clone ID: MRT4577_106728C.1.pep
NAQGYFAGSLIXSFESLTXFTERYDIVYVYRNNNCTRYMKESSNFFKHFNSTKNPNKNILTPPYKFLAL

SEQ ID NO: 192043 - protein, 121 aa, Zea mays
  unsure (1)..(121): unsure at all Xaa locations
  Clone ID: MRT4577_106729C.1.pep
MEEVYMTDLTALFTWTCSRCNDLTQGFEMRSLIVDVENCLQAFVGVDHSLNSIIVAIRGTQENSVQNWIKDLIWKQLDLSYPNMPNAKVHSGFFSSYNNTILRLAITSAVHKAXKSYGGIN

SEQ ID NO: 192044 - protein, 71 aa, Zea mays
  unsure (1)..(71): unsure at all Xaa locations
  Clone ID: MRT4577_10672C.1.pep
EKRVAPPPPVRGXFCVXWVGVLAPPLVKKHSWCSSLETCKRKSFSLGLAMFMTALYYSLXGVFHVAEGERF

SEQ ID NO: 192045 - protein, 351 aa, Zea mays
  Clone ID: MRT4577_106730C.1.pep
MERWSLGAKVVALALLLSAASHGRELPVKSSDRSFIYNHTLAKTLVEYASAVYMTDLTALFTWTCSRCNDLTQGFEMRSLIVDVENCLQAFVGVDHSLNSIIVAIRGTQENSVQNWIKDLIWKQLDLSYPNMPNAKVHSGFFSSYNNTILRLAITSAVHKARKSYGDINVIVTGHSMGGAMASFCALDLAMKLGGGSVQLMTFGQPRVGNAAFASYFAKYVPNTIRVTHGHDIVPHLPPYFSFLPQLTYHHFPREVWVQDSDGNTTERICDDSGEDPDCCRCISMFGLRIQDHFTYLGVDMEADDWSTCRIITAQRVQQFRLELAGNIMMTKHDIDVSIVEPSVQNRLEQF

SEQ ID NO: 192046 - protein, 247 aa, Zea mays
  Clone ID: MRT4577_106731C.1.pep
MPLLAVCPRRVPPLSLARRHRRSLYRARSLALKCEVSSPPLLLTRRMSAAGSLLVAVVPVPAPSPQLPVASASELETETAEGESGASEGLALERYTDQEQGFTLLKPASWPKVEKAGATALFQQEGKGSNNIGVVVNPVRLNSLAEFGTPQFVADRLLQAEKKKESTKSAEVISVGERSGHGGLTVYEIEYTLDSTRGGMKRIFSGAFVASRKLYLLNIAYSDTQEKPLDRETRTVLEKVLHSFDSV

SEQ ID NO: 192047 - protein, 52 aa, Zea mays
  Clone ID: MRT4577_106732C.1.pep
SFFFYFTRIHWKDSSRRRWGRQPSFPFLESLLSGFIPSLHFLLIQLKQLMPP

SEQ ID NO: 192048 - protein, 140 aa, Zea mays
  Clone ID: MRT4577_106733C.1.pep
KKKKKKKKKKKKKKKKKKKGGPDKKDPKQKRAALLRGSLFSSATLLQFTALFFTPKCLSKTRGWPDLNPVKTLPFPTLWGFNNMPLSPGPFKQLGPLQGRLAHPLLSLINHWGSPCSAPLCPVHCGGPYHRVLSLCHLPF

SEQ ID NO: 192049 - protein, 100 aa, Zea mays
  Clone ID: MRT4577_106734C.1.pep
MAGGKNQYNPVRDIKVQKLVLNISVWESGDRLTRADKVLEQLIGHTLVFYKARYTVRSFGIRRNEKIACYFTVRGDKAMQLLESGLKVKEYELLMRNFSD

SEQ ID NO: 192050 - protein, 206 aa, Zea mays
  unsure (1)..(206): unsure at all Xaa locations
  Clone ID: MRT4577_106735C.1.pep
MSVLIVTSVGDIEVDLHTDRCALTTKNFLKLCKMKYYNGCLFHKVEKDFLAQTGDPTGTGTGGDSVYKFLYGDQARFFDDEIRPELRHSKTGTVAMASAGENCNASQFYITLRDDVDYLDDKHTVFGMVAEGFDTLTKINEAYVDDNGRPFKDIRIKHTYVLDDPFDDPPQLAELIXENSPTGKPRDEVAEERLEEXWGPLDQTVL

SEQ ID NO: 192051 - protein, 33 aa, Zea mays
  Clone ID: MRT4577_106736C.1.pep
KPIHRPHDNQCDYHHLLPRTLVPHYTFNTLIHI

SEQ ID NO: 192052 - protein, 61 aa, Zea mays
  Clone ID: MRT4577_106737C.1.pep
ECVIPLHNFTHNHTDARTRIEGVQALGRRLTEMELTSQCNVRCRSPAPAFQSRKPSRASVH

SEQ ID NO: 192053 - protein, 112 aa, Zea mays
  unsure (1)..(112): unsure at all Xaa locations
  Clone ID: MRT4577_106738C.1.pep
MEDSKDISXTPSVTRKNMNNRLVDRKQFXLEVIHPGRAIVSKAELKERLAKACHVKDPNSIFVFKLQXTFLRSISPMITELINDNLKAAKKIKRKYSLIENGXLATKGDNSR

SEQ ID NO: 192054 - protein, 89 aa, Zea mays
  Clone ID: MRT4577_106739C.1.pep
CDLGTQDAHYWYYLLEPAKACIGLHRFRATACFMSPCFAQAIHAIRMHDTPIWPLASLSESWCIIMCSSTLRRCRAQWSCIISMATPPC

SEQ ID NO: 192055 - protein, 155 aa, Zea mays
  unsure (1)..(155): unsure at all Xaa locations
  Clone ID: MRT4577_10673C.1.pep
PRTKAPATGHESLLCLDRNIAYAQESRDTAXIRDLPMDEEDAQDVKKLIEEWGHKTLLLPGDATADKFARYLASRSPQRLXDLDIMKXIIGKKVANSDIAELTDYQFQKIFAINVLXLMCLTXKRSPWLPIDASIIAPATIHAYHPNPHLRDYAS

SEQ ID NO: 192056 - protein, 105 aa, Zea mays
  unsure (1)..(105): unsure at all Xaa locations
  Clone ID: MRT4577_106740C.1.pep
SYAHQNPWFNGSFSPPVANGRGSRYTKSGAITKLFPLLSFQVHRLPHATAYXPAADFPYXYSHSFHGWHGHGFPRQAPQGQHLDAYFKVLLLAVYVLVIANLIAF

SEQ ID NO: 192057 - protein, 143 aa, Zea mays
  unsure (1)..(143): unsure at all Xaa locations
  Clone ID: MRT4577_106741C.1.pep
RPTNAAIHAGEQRWAGRKIALMVGIDYPVTKGELKECYNDVDRMGRXLFNCFGFXDDVDIRILTDVDRSASQTTADMMRRGLVRLVGEARRGNFVFFYYRRPLHWTRLXSYTVLIDDIXYDXCIQTCEMDLLXESDYRLLVHK

SEQ ID NO: 192058 - protein, 64 aa, Zea mays
  unsure (1)..(64): unsure at all Xaa locations
  Clone ID: MRT4577_106742C.1.pep
ACLFGPRLXXPXLWCCXXLXRLCALLXVFVSLHKVPLXLRSLXXCXXWSNHTVETXRRIESPQR

SEQ ID NO: 192059 - protein, 58 aa, Zea mays
  Clone ID: MRT4577_106743C.1.pep
AQGVPNAPNVPPKELFATQLVQLQKMGFFYTQKKIQALAAPAGNVHFPVERLFGNMGQ

SEQ ID NO: 192060 - protein, 48 aa, Zea mays
  Clone ID: MRT4577_106744C.1.pep
LSAASPLRAAARTQQCSPGPARPSGGDDALFSQRPLYGVIVVEVFVCR

SEQ ID NO: 192061 - protein, 135 aa, Zea mays
  unsure (1)..(135): unsure at all Xaa locations
  Clone ID: MRT4577_106745C.1.pep
PDSRSTHLRVYNNGSQNICFLSPGFLKVGPTISKCSQLYSFLFPYLYHVXLIFYPIVNPIVLLFFTFFTIFLCSLIFFSFNYFFFIIFFFFFXLFFISFLFFFXFFFLFFFFLYLFFSIFFFFYFFLIFFLFFFI

SEQ ID NO: 192062 - protein, 86 aa, Zea mays
  Clone ID: MRT4577_106746C.1.pep
NTCLNSNRFLSFPMFVHYFFTLFNFCLKISLKGLRGVILIPRISLQVLRDDRLSTILAQLDSWCKKWQVRLSQTKQMRSHKHPNCQ

SEQ ID NO: 192063 - protein, 138 aa, Zea mays
  unsure (1)..(138): unsure at all Xaa locations
  Clone ID: MRT4577_106747C.1.pep
MGEAYDNDHHEEELLDYDEDLDWTDEGYTVKTDLEVDHKGXVXIHSCGYRDLLLKPELLIAIQHCEPEHPLQEQHXCIPHAILVMDXIXHAKFGMAKTAEFVLSDVQQFDRVAFQFSXALVLCHTSELAXYDMCHEFE

SEQ ID NO: 192064 - protein, 66 aa, Zea mays
  Clone ID: MRT4577_106748C.1.pep
YFGTPKNINSQQGCWYTSYTFIKQPGHTFLQTLQEKKKRTCKSEQSAPLFKMGQACQIQRKHSPPK

SEQ ID NO: 192065 - protein, 160 aa, Zea mays
  Clone ID: MRT4577_106749C.1.pep
NRIVRNADMPVAAVLHCPPPGTGPGFPGGTPKTEVHEPPCPLCTAPTDDEAHVSFSEPLHVALRSARRNLSLGSGAGGSNSSGARPPCSDRGLKRNHSAIVPRRGGGGSLFRNRFKRQFPFKARIGKELFGGRVFSKVGSSSGQQDDHRQQAPKRDRPMK

SEQ ID NO: 192066 - protein, 76 aa, Zea mays
  Clone ID: MRT4577_10674C.1.pep
PRVRGRVGSDTDVHKEELMDYTMTTTRRPMAPLLSPPHRPQRLAPFGSTRPLPETFYSSHNCSGLYTIVVPRLLAN

SEQ ID NO: 192067 - protein, 58 aa, Zea mays
  Clone ID: MRT4577_106750C.1.pep
GGPGSGGYRGGGPPEGGGGYGGGGGGYRGGRGYGGGGGGFRGGHRGGGFGHPPGNWRN

SEQ ID NO: 192068 - protein, 592 aa, Zea mays
  Clone ID: MRT4577_106751C.1.pep
HASASALPGIPKGSARQLFQRLQGPFEEGTLKTHFEKIILLGQKLHQTRRKDEIHELRQKNPLHTSHGFALSQACPGNLSGVILTPLDLCDGPSNSDALSIGYTGSNTSGLGLPNNNCSVGATLPTSNMNLRLPGSPGMVLGSNSPLPLNAPSRDVQRYGVPRPTSIQGDEQSRIHYNQMVNGRNLQQPGVPVPGVLPSGVDQGARMMPPAHGVGIMAGLNRGTPITRPGFPRLGSLGNMSPTNGQGLKNTVNVHPGAILGPGSTMLRPRDPMQMLRPGQNSEEHRQMMMPEFQLQVSQGNNHAVHFRAPPYSNTGASSPVQSLPAQQSQPHQMPQQSHMYGNTHLLHTQGTNQSNPQQQQAYAMRLAKERHMQQMMPQQQRPLSVASAVSAVQNGSPMQQQSQGSATCVIPATQTQHKQQYPAQNAQGSSMLPHQPSATTTHKQKKQQGQQQPRQNQQQRNQGSQQAKLMKSLGRGNMMQQSPVDVIQASGISTSCKDQVPDKNMMQQGPGHFVVSKGSIPLIPQPGNQPNVYTSQMPPSPMQTPDISNQGAVKGSSNHALLTSQQGSLHTPSQLGTAAAAATTVHESVTE

SEQ ID NO: 192069 - protein, 110 aa, Zea mays
  unsure (1)..(110): unsure at all Xaa locations
  Clone ID: MRT4577_106752C.1.pep
PRCQPKTQTHQCPCQQPYPSPCLLYVTCWVCLTPLLGXCAFSLRLISAARRXPYWSPHHQPLLHENCQHFMPMGSDQQLQAISGLYHHCILQNRQRSIRCGVLFAAPIDH

SEQ ID NO: 192070 - protein, 191 aa, Zea mays
  Clone ID: MRT4577_106753C.1.pep
PLEGLGARGQSIRAHFGSLDHADVRLSHYGVPPDTEGNMSMQPHYDDSVVTAIVQHEVEGLEVHAGDGRWVAVPAEAGTLTFVAGEQFRVVTNGRVPACLHRVRTPSNRERFSVLFGRRQKDGVAVRAMEDLVDAEHPLAYNPLRHEEYSRWRYSEEGLKFGDPLKVYCGVEKVVGVGGAMALSYSTPVTA

SEQ ID NO: 192071 - protein, 67 aa, Zea mays
  Clone ID: MRT4577_106754C.1.pep
GPPSCGILAFLRGHAKSISLVWGYPKFISGAPLLQPSFLDSPGVPLFTVVVKHNRSARWVFTKRAAT

SEQ ID NO: 192072 - protein, 108 aa, Zea mays
  unsure (1)..(108): unsure at all Xaa locations
  Clone ID: MRT4577_106755C.1.pep
MTPKPGEDCLEIHLPFSSKPQYXPHLGEKKKKKKKKKKKKKKKKKKKKKKKKKKKKKKKNCPPPHPPKVNPEPVLFQGGNGFGAPLFPKGVKPPPPPRPKGGQPTWQT

SEQ ID NO: 192073 - protein, 39 aa, Zea mays
  Clone ID: MRT4577_106756C.1.pep
VDINIAFDINNDIVPNQTQVKNCQTYPSHIKAIAPDAFT

SEQ ID NO: 192074 - protein, 39 aa, Zea mays
  unsure (1)..(39): unsure at all Xaa locations
  Clone ID: MRT4577_106757C.1.pep
LGGHTHFHTGLFKSYQNNPSIPPRGELLAARTRACXKHV

SEQ ID NO: 192075 - protein, 43 aa, Zea mays
  Clone ID: MRT4577_106758C.1.pep
PRVRKKKKKKKKKKKKKKKRKRKKKKKKKKKKKKKKKKKKEKK

SEQ ID NO: 192076 - protein, 198 aa, Zea mays
  unsure (1)..(198): unsure at all Xaa locations
  Clone ID: MRT4577_106759C.1.pep
NLGRGWGGGAXTCXIAAGLLVFLAGTRMYRFKKLAGSPLTQIAAVFFASWPKLLRGGGAXPXXLYXXXXXNAPSLFDCSSTXNSKRKERLPHTDQFRFLDPSAINEDPSAGASISIFFLLAPLSVLAHVNTVASLLPFCATTILFSALSLAPFLLSLFLPSLPPLPPPSPFFLFPFSPPPAPPLLLFFPPLAPPLPYN

SEQ ID NO: 192077 - protein, 85 aa, Zea mays
  unsure (1)..(85): unsure at all Xaa locations
  Clone ID: MRT4577_10675C.1.pep
MDKWRRHMHLLLAAASVALVAAITLPTAEAKLSPDYYRSTCPDVEATGKAVLANKVNEIFATVPATLKIXXHDWFVNGCDAWVII

SEQ ID NO: 192078 - protein, 209 aa, Zea mays
  unsure (1)..(209): unsure at all Xaa locations
  Clone ID: MRT4577_106760C.1.pep
PASADSPQATASRTGGGLVWISGWNSLQHATNAAFLSVVYSDYMLSTRTAAVQCSGKYYSPTDIRNFAXHRCAMLNLTLLDTKVPDGHLSISHCRFLLRLTKQAALCKLKDTVKXNSCPHVVSQANYILGDNPMKLSYLVGYGSSYPKQVHHRGXSIPADAKTGCKGFEYLHSPSPNPNVATGALVGGPFQNDTFVDSRDNAVQTESST

SEQ ID NO: 192079 - protein, 55 aa, Zea mays
  Clone ID: MRT4577_106761C.1.pep
LRCPLFFSPTFHHLSQYVPAFWAIRPLLQFYYRIFVFLVLSSMRNFPLTYTLCVF

SEQ ID NO: 192080 - protein, 526 aa, Zea mays
  Clone ID: MRT4577_106762C.1.pep
MGSKYTRGCCGWLIVALIAALVATAAMFAIMKRKPGGRHIKPLPVPGPPGAIDSKYGDALGVALQFFQVQKAGKLENNQIPWRGDSALTDGKEAGLDLSKGMYDAGDHMKFTFPMAFTATVLSWSVLEYGDQMSAAKQLDPALDALKWITDFLIAAHPSDNVLYIQVGDPDLDHNCWERPETMTEKRPLTQINKKTPGSDVAAEAAAAMAAASMVFKSRDTTYSDVLLQHAQKLFTFADTYRGLSSESYPKLQDFYNSTSYVDELLWAASWLYHATGDQTYLSYVTVQNGKSYADWGRPTWFSWDDKNPGTQVLLSRLNFFGSKQISNAENEGLKMYRDTAEAVICGLIPDSPQATASRTGGGLVWISGWNSLQHATNAAFLSVVYSDYMLSTRTAAVQCSGKYYSPTDIRNFAASQANYILGDNPMKLSYLVGYGSSYPKQVHHRGASIPADAKTGCKGFEYLHSPSPNPNVATGALVGGPFQNDTFVDSRDNAVQTESSTYNSGTLVGLLSGLVTTSSVVQSFT

SEQ ID NO: 192081 - protein, 248 aa, Zea mays
  Clone ID: MRT4577_106763C.1.pep
TRPLSYVTVQNGKSYADWGRPTWFSWDDKNPGTQVLLSRLNFFGSKQISNAENEGLKMYRDTAEAVICGLIPDSPQDTASRTGGGLVWISGWNSLQHATNAAFLSVVYSDYMLSTRTAAVQCSGKYYSPTDIRNFAASQANYILGDNPMKLSYLVGYGSSYPKQVHHRGASIPADAKTGCKGFEYLHSPSPNPNVATGALVGGPFQNDTFVDSRDNAVQTESSTYNSGTLVGLLSGLVTTSSVVQSFT

SEQ ID NO: 192082 - protein, 92 aa, Zea mays
  Clone ID: MRT4577_106764C.1.pep
WPCCCAICITVQFSVTSSRELVVMNSNVNGTCIQFASSISQYGRAIAVLYDPAVVVSVDGAVYERANEVVPVKSDRSIIEHHSMEWTRSVRA

SEQ ID NO: 192083 - protein, 81 aa, Zea mays
  Clone ID: MRT4577_106765C.1.pep
TRPCCLNKGNTHCLSCCLSYLYKERGCDSLWQCWATVIRCPKEDSGGFMGPRCELIALERRSGALITSLGAWVFSFRTSSG

SEQ ID NO: 192084 - protein, 222 aa, Zea mays
  unsure (1)..(222): unsure at all Xaa locations
  Clone ID: MRT4577_106766C.1.pep
LTPANRSIALSCNNGRSVLLPAFERDARHGSVAAASLTARIGTMTPDKNXHKRDKYRVAVPLTHNDNTGAILSAMIQRDMLSPSRYSPEVPRYATCNCLTNXTAAYCTGLLLARPAINTRSVDPPYEGQADPTXHDLYVETDDAIRPFRPLLDVXLIRTTTGYRVFGDLNGPFNGGLDIPXDMNKFDEFHKDDKXLDIDTHRXKYIYGXHVADYTKSLAEDD

SEQ ID NO: 192085 - protein, 83 aa, Zea mays
  unsure (1)..(83): unsure at all Xaa locations
  Clone ID: MRT4577_106767C.1.pep
TPTIFFKTVTKIVDGEKPKFXEFLQNLISVTGALDLAVTKMVDFINGKSIFDFLRLSLKPTPPLFLCTMLGYEQKNIGSTIFF

SEQ ID NO: 192086 - protein, 81 aa, Zea mays
  Clone ID: MRT4577_106768C.1.pep
AETFLRQVDSAAVFHNASTRFSDGARFGLGAEVGISTGRIHARGPVGVEGLLTTRWIMRGSGQVVNGDKNVAYTHKNLPLQ

SEQ ID NO: 192087 - protein, 66 aa, Zea mays
  Clone ID: MRT4577_106769C.1.pep
VCHAVTSRDAEPSVQEFHHGPVGDSVVAFDFSACTVQLHAPCVSMVQPWAIIRLVAFCRVPGSAST

SEQ ID NO: 192088 - protein, 52 aa, Zea mays
  Clone ID: MRT4577_10676C.1.pep
PLEYQPMPSEPKGKLICNCQTSSCPMVPINVYQHETTKFRHWQCPTTKTRSK

SEQ ID NO: 192089 - protein, 175 aa, Zea mays
  Clone ID: MRT4577_106770C.1.pep
MPTSLICSQILIVLDKSGVAIFGGPVAHEVLCIPEANSFHHEYSSMACTIEFVDDVQSAIDHIHCYGSAHTDCIVTTDDKVAETFLRQVDRYLTDGIFFYNCNSAAVFHNASTRFSDGARFGLGAEVGISTGRIHARGPVGVEGLLTTRWIMRGSGQVVNGDNDIAYTHKNLPLP

SEQ ID NO: 192090 - protein, 717 aa, Zea mays
  Clone ID: MRT4577_106771C.1.pep
MATADRTRTFMKDVKRVIIKVGTAVVTRGDDGRLAVGRLGCLCEQVKELNVLGYEVILVTSGAVGVGKQRLKYRKLVNSSFADLQKPQTELDGKACAAVGQSGLMALYDMLFTQLDVSSSQLLVTDSDFENPNFRERLCETVESLLDLKVVPIFNENDAISTRKAPYEDSSGIFWDNDSLAGLLAIELKADLLVLLSDVDGLYSGPPSEPGSKIIHTYIKDKHYSGITFGDKSRVGRGGMTAKVKAAFVASNSGTPVVITSGFASQSIVRVLQGEKIGTLFHKDASLWEPSKDVSAREMAVAARECSRRLQNLSSDERKKILLDIADALEQNEDLIRTENEADVSAAQDAGYQKSLVDRLTLKPEKIASLAKSIRTLANMEDPINQILKRTEVAEDLVLEKTSCPLGVLLIVFESRPDALVQIASLAIRSGNGLLLKGGKEAMRSNTVLHKVITGAIPDNVGQKLIGLVTSRDEIADLLKLDDVIDLVIPRGSNKLVSQIKASTKIPVLGHADGICHVYIDKSADMNMAKRIVMDAKTDYPAACNAMETLLVHKDLIKAPGLDDILLSLKTEGVAIYGGPVAHEVLCIPKADSFHHEYSSMACTIEFVDDVQSAINHIHRYGSAHTDCIITTDDKVAETFLRQVDSAAVFHNASTRFSDGARFGLGAEVGISTGRIHARGPVGVEGLLTTRWIMRGSGQVVNGDKNVAYTHKNLPLQ

SEQ ID NO: 192091 - protein, 744 aa, Zea mays
  Clone ID: MRT4577_106772C.1.pep
MATADQSRIFMKDVKRVIIKLGNPIPIYGIERVREKEGIERAERAREKVGTAVVTRHDGRVSTGNFGVLCEQVKEINALGYEVIIVSSGAVGVGKQRLNYRKLVNSSFADMQKPQTELDGKACAAVGQSGLMALYDMLFTQLDVSSSQLLVTDSDFENPNFRERLRETVESLLDLKVVPIFNENDAISTRKAPYEDSSGIFWDNDSLAGLSARGLKADLLGLLSDVDGLYSGPPSEPRSKIIHTYIKDKHHSGITFGDKSRVGRGGMTAKVKAALVASNSGTPVVITSGSASRSIVRVLQGEKIGTLFHKDASLWEPSRDVSAREMAVAARECSRRLQNLSSDERKKILLDVADALEQNEDLIRTENEADVAAAQDAGYQKSLVDRLTLKPGKIAALAKSIRTLARMEDPINQILKRTEVAEDLVLEKTSCPLGVLLVVFESRPDALVQIASLAVRSGNGLLLKGGKEAMRSNTVLHKVITGAIPGNVGQKLIGLVTSRDEIADLLKLHDVIDLVIPRGSNKLVSQIKASTKIPVLGHADGICHVYIDKSADMNMAKRIVMDAKTDYPAACNAMETLLVHKDLIKAPGLDDLLLSLKTEGVPFSGRPLPHEVLCIPKADSFHHEYSSMACTIEFVDDVQSAINHIHRYGSAHTDCIITTDDKVAETFLRQVDSAAVFHNASTRFSDGARFGLGAEVGISTGRIHARGPVGVEGLLTTRWIMRGSGQVVNCDKNVAYTHKNLPLQ

SEQ ID NO: 192092 - protein, 43 aa, Zea mays
  Clone ID: MRT4577_106773C.1.pep
SMFGFFVQAIVTGKGPLKNLVDHISDPVNNNVWAYATNFVPGN

SEQ ID NO: 192093 - protein, 385 aa, Zea mays
  Clone ID: MRT4577_106774C.1.pep
ENLIRTENEADVAAAQDAGYEKFLVDRLTLKPGKISALAKSIRTLARMEDPINQILKRTEIAENLILEKTSCPLGVLLVIFESRPDALVQIASLAIRSGNGLLLKGGKEAMRSNKVLHKVITGAIPSNVGEKLIGLVTSRDEIADLLKLHDVIDLVIPRGSNKLVSQIKTSTKIPVLGHADGICHVYIDKSANMNMAKQIVMDAKIDYPAACNAMETLLVHKDLIKAPGLDDLLLSLKTKGVAIFGGPVAHEVLCIPEANSFHHEYSSMACTIEFVDDVQSAIDHIHCYGSAHTDCIVTTDDKVAETFLRQVDSAAVFHNASTRFSDGARFGLGAEVGISTGRIHARGPVGVEGLLTTRWIMRGSGQVVNGDNDIAYTHKNLPLP

SEQ ID NO: 192094 - protein, 102 aa, Zea mays
  Clone ID: MRT4577_106775C.1.pep
PNRTYFLNRDPVRTENKAIIYGASGKGPQKTTFFSRGKGKTTAGLLDKQKKWNPKKNQKSKGALRNYKLGLFLPKTKLFKGNPFEKTRNPFAGPKGRYPRLI

SEQ ID NO: 192095 - protein, 97 aa, Zea mays
  Clone ID: MRT4577_106776C.1.pep
NHLEFGSHQSGVHELPEQCEQVSAQSVSCSLSMCMPPCSCVRPSPPHSGTGSVLVFDQSWTSSVHPIRRPAILSASRNSRGRTRDAQQFSRISCLPN

SEQ ID NO: 192096 - protein, 92 aa, Zea mays
  Clone ID: MRT4577_106777C.1.pep
GELPFRIAENMGEPVANVKGAQGQLLEFFNGFWSNRWLIIKKFFGRRVFLMIFIFLGACPFGPFCPGCFGPYGKFFLFLLKLPRGPNFPLGR

SEQ ID NO: 192097 - protein, 92 aa, Zea mays
  Clone ID: MRT4577_106778C.1.pep
IINQLRNTFWICANAMVVFPPVYAERQHMHPDWAGTFQFSFFCPTSLLYPQWLVSGGIRFRFCCKIVPKKKIFGRNLFFRQFVMERRVDCSL

SEQ ID NO: 192098 - protein, 95 aa, Zea mays
  Clone ID: MRT4577_106779C.1.pep
PRFPCPPISAGKKKKKKAPPGKPSPPFKSVSPQFQLLFVYWSNGDLVSKNFGPQFFFFSCLRVFGTPRPGSYYCKNWAPLFLQKKKPVVSPRPPP

SEQ ID NO: 192099 - protein, 49 aa, Zea mays
  Clone ID: MRT4577_10677C.1.pep
YTMRSLPDSQFINSSFQLLQLIDHRSAICLLQTCRYLISYSHHIYVQHL

SEQ ID NO: 192100 - protein, 81 aa, Zea mays
  unsure (1)..(81): unsure at all Xaa locations
  Clone ID: MRT4577_106780C.1.pep
WGFIXRRGSTQSVHFKQGACKILRXMEICYILFLGFPRLFCRPARAFHNASAXVCVSQGAVPRTILGLRCGRLRNRPAFVM

SEQ ID NO: 192101 - protein, 109 aa, Zea mays
  Clone ID: MRT4577_106781C.1.pep
RVRPTPSGRRAGTLIPLPPCLSCALYWRLLQQARCRITHVHDYQTSPDQAQVSLTSSLDLEQVYRERNWDHQILLTDLVFLHIERGSASGSTNAVVGLEKAYHGGASAR

SEQ ID NO: 192102 - protein, 107 aa, Zea mays
  Clone ID: MRT4577_106782C.1.pep
RAKQIVASSVVYSLYVVPVCTTLSLLMPSPIWEATTLRRFWEGERGGRGRDADARLARHDGDSAGNGSVRTFDSAGCRGRRPPTDPTACSTVAATHRNPSSMAAPAG

SEQ ID NO: 192103 - protein, 80 aa, Zea mays
  Clone ID: MRT4577_106783C.1.pep
SRPAGIVSSLASLSPTQRSHGARVPTGGGYSRASCRVRRWAATAAPSRVERADAPIPRSSSSLSQLSSGRPWLTRRLRPS

SEQ ID NO: 192104 - protein, 107 aa, Zea mays
  Clone ID: MRT4577_106784C.1.pep
PRTHSYVTSKFSRGIFFIFYTTRKVPLFFLYYTLNITRPLSHSFTMPLHARTLKHLVNQRTAPHKPQPLPLTLPSDLINKPYDHHFSSYHSLPSSAHLLIQEPHPQL

SEQ ID NO: 192105 - protein, 50 aa, Zea mays
  Clone ID: MRT4577_106785C.1.pep
KCDPLLQWPDSSRAKYLKLNALEQVGCLQYVASNKKVLQVNQTEGKELRR

SEQ ID NO: 192106 - protein, 83 aa, Zea mays
  unsure (1)..(83): unsure at all Xaa locations
  Clone ID: MRT4577_106786C.1.pep
TAKKILSQTIPPGGEPYLPMEPAGGAXFLXYPSTAHHXIKNHPSPLTHTENPPRKNNSHQPPPPWGGGGNPPTPQKPTPPFPP

SEQ ID NO: 192107 - protein, 90 aa, Zea mays
  unsure (1)..(90): unsure at all Xaa locations
  Clone ID: MRT4577_106787C.1.pep
AKTHLAIRIINDLTTLATEIFALLALIALFVSATNAFIIPHCSLAPSAIIPQYLPPDTSMGFXEHLSEQANMLLQAXAVNFLQQPIANCN

SEQ ID NO: 192108 - protein, 125 aa, Zea mays
  unsure (1)..(125): unsure at all Xaa locations
  Clone ID: MRT4577_106788C.1.pep
PRRGRGPVXAVXAPPGPPPXAPAPAPKGGRRLRRGPPGRRPRPXRRELEXLSGGARPAGFPVRPRVXPLGRGFXSFVSCLCCPPGFXXKALVPASXVFTPVSADPAXQQXCLRRNYLKPVSSKLS

SEQ ID NO: 192109 - protein, 52 aa, Zea mays
  Clone ID: MRT4577_106789C.1.pep
NQLLCYGMPYVIDNFSYFYAAGNKLGSIAVLGCSYKCPVRAVAAERLGMRHG

SEQ ID NO: 192110 - protein, 97 aa, Zea mays
  Clone ID: MRT4577_10678C.1.pep
ISMQFEPGSGGVTDRVLGIASDYLYQAEQEPPGVTSDVGDYHRTLASQIEHQLPRQLIILITDLSAYGPAFFSLPHSILAVLSSPSYLCCRLLIPML

SEQ ID NO: 192111 - protein, 149 aa, Zea mays
  Clone ID: MRT4577_106790C.1.pep
VLAPGSVFGGFFSRFALLPGAPCPVGAGGFSSSPFSGLFPVLGSRGGGPPPPFLFAPLPPPPLWGLPPGGAPAFRCCFTIGFLVALSRVPFGCPAGPWTRFWPPQRACFVFFCMKVCLLFGDERSTESAHGSEASRYIRGTPTRLIIRT

SEQ ID NO: 192112 - protein, 83 aa, Zea mays
  Clone ID: MRT4577_106791C.1.pep
SLLAECQCISWKVGVKSSCLGQPPDAMVTGLSIKPKVLSSMKPLCRMYHGIKSWLGYYPTHMGAGSTGPVELVDECGAARRQR

SEQ ID NO: 192113 - protein, 62 aa, Zea mays
  Clone ID: MRT4577_106792C.1.pep
CMGLMGPRMNTILKTEPKRLSNQKPSWATTNDANRDKPSGLGKTSRKGTGLLGGGGPTVQFL

SEQ ID NO: 192114 - protein, 121 aa, Zea mays
  Clone ID: MRT4577_106793C.1.pep
AGAVAQTQKRNFKSWGKPQGRNSGRTHWGAFGKGGPQLKGRGTQKRRERKREREREREKEREKDTQRQTHTHTQTHRPTQPRPPTGIAHPPWAHIPGPRGGPPFFYGRAPPRGGGPQAEEP

SEQ ID NO: 192115 - protein, 89 aa, Zea mays
  Clone ID: MRT4577_106794C.1.pep
MLLSIKNLLQGPDYLLCIGDDNSNKNMIHLIDTAACMNSLTSNAYLFLYTVSLKPSKANYYLDDALYFVSLIQGLSYVYDELALSNHLH

SEQ ID NO: 192116 - protein, 29 aa, Zea mays
  Clone ID: MRT4577_106795C.1.pep
VLKFSPLNQISLNCATQTGRAQAFHPTRP

SEQ ID NO: 192117 - protein, 271 aa, Zea mays
  Clone ID: MRT4577_106796C.1.pep
ISDEEKSYIEIIFGLIHSKLLNLGEYNVHLTKLIDGGRNKVATEFAMSLVQTLITQDPVSISELHNVVDAISKVLAAQVNKEESIANETTLIDPNQVAVLFSEWCQICSHVNASDAIYSRFVTQLEQDSLLNGDDISERFFHILTELAVTHSLVSEQIVAPGGSSQQSPQQPHISYFSIDSYAKLVVMVLKYSSVEITPNKGSILSKIISVTVRTIQKDAEEKKASFNPRPYFRLFINWLYDLTTTDGHHDGSNFQVLTAFAHAFHLLQPL

SEQ ID NO: 192118 - protein, 85 aa, Zea mays
  Clone ID: MRT4577_106797C.1.pep
DRHSIHVYSALNTTNSDSRISSNRQCQACPSGYLVVWGRPDIVLSLVERLFFLEQGAKMEDQAYLAVSRCAILTARYGTPMRTRG

SEQ ID NO: 192119 - protein, 443 aa, Zea mays
  unsure (1)..(443): unsure at all Xaa locations
  Clone ID: MRT4577_106798C.1.pep
YSSVEITPNKGSILSKIISVTVRTIQKDAEEKKASFNPRPYFRLFINWLYDLTTTDGHHDGSNFQVLTAFANAFHLLQPLRVPAWSFAWLELVSHRSFMPKLLMSNSQKGWPFFQRLLVALFKFMEPYLRNAELPEAVDLLYKGTMRVLLVLLHDFPEFICDYHFSFCDVIPSSCIQMRNVILSAFPRNMRLPDPSTPNLKIDLLAEISIAPRIMSDVDGTLKSKQLKTEFDEYLKRPEGSSFLSVLKQNLLLPQNEAAVAGTRYNVPLINSLVLYVGIQAVQQLQQNKANASASVQQIKHTPTMDSFQIETATEMFTNLITSFDTEGRYLLLNAIANQLRYPNSHTHYYSFIILHLFAEATQXEIIQEQITRVLLERLIVNRPHPWGLLITSIELIKNPRYNFWNRSFTHSAPEIEKLFESVARSCGAKAVDEGISVQDGSH

SEQ ID NO: 192120 - protein, 88 aa, Zea mays
  Clone ID: MRT4577_106799C.1.pep
SSNSRYLPALMEQRRHRPTDQAGTAATIGSGEQLRQQQVIPKLEGASACFPKVYPFPKMGLRGRYGGQAELPPRRHAKPFSLLLYDAG

SEQ ID NO: 192121 - protein, 359 aa, Zea mays
  Clone ID: MRT4577_10679C.1.pep
MGRAPCCDKNNVKKGPWSPEEDAKLKEFIEKHGTGGNWIALPQKAGLRRCGKSCRLRWLNYLRPNIKHGEFTETEDRVICSMYASIGSRWSIIASQLPGRTDNDIKNYWNTKLKKKLLGSTAAPHPHRAPRQQQQHHHHRPGLNLMLQQTLPSLPQLATYNSFFSVAGGGALHHDDPIIPALALPPPHQDYMLSPGGGGGGLGIPTSLLHAQQQFQQQHQQHVVKEESGSMIVFGRDQQSCSSSDGGGGAHSQHQQPQYGNGHGKELSFDGYLFGYSNGGSGMEHDNCGRLMQQLQDAHQQQAHQHLVPVEYNYEEIKQLLMSTAAADTLHAAGSHDDDDDNGGIEGFGGSQGNKVTMM

SEQ ID NO: 192122 - protein, 77 aa, Zea mays
  unsure (1)..(77): unsure at all Xaa locations
  Clone ID: MRT4577_1067C.1.pep
SQGRCAHPSPWRCSPVPAVETRRVLVHAQHLVAPGASPHGAQTLESAKPGTSSKLSRGRPATLCXTTSNRLPQLEPN

SEQ ID NO: 192123 - protein, 860 aa, Zea mays
  Clone ID: MRT4577_106800C.1.pep
MMRQFAMTKPVALGPGAPVTGIAQFLSNPAQVGVSESPVLLGGTIGAASNDLPVSSTTVTTNEITAMVPPPSTSAADRLGSILPELLNTGDALERYQQVAQKLEALIANDGKDVEIQSVIMEVPDILRRCVSRDEAALAVAQKVFKSLYDNASNTAYVSWLLATLVAIRDVCKLVVKELTSWVIYSDEEKKFNIDIIFGLIRSELLNIGEYNVHLAKLIDGGRNKVATEFAMSLVQALFAHDPVGFTEFQNVLDALSKHTKRPGSPESLQQLIEIARNNVSTTTGFVAVKDEKVKLPKDKKVLATRANKEENTANEITLVDPNQVAVLFSEWCQMCNHVSASDAAYTRFVTQLQQDGLLKGDDISERFFRILTELAVTHSLVSEQIVAPGGSSQQSPQQPHISYFSIDSYAKLVVMVLKYSVEITPNKASILSKILSVTVRSIQKDAEEKKASFNPRPYFRLFINWLYDLTTTDGHHDSSNFQVLTAFANAFHMLQPLRVPAWSFAWLELVSHRSFMPKLLMCNSQKGWPFFQRLLVALLKFMEPYLRNAELPEAMDLLYKGTMRVLLVLLHDFPEFLCDYHFSFCDVIPSSCIQMRNVILSAFPRNMRLPDPSTPNLKIDLLAEISIAPRIMSDVDGALKSKQLKTEVDEYLKRPEGSSFLSDLNQKLLLPQNEASVAGTRYNVPLINSLVFYVGIQAVQQLQLNKANPSASVQQINHISPMDIFQIGTATDIFRSLITSLDTEGRYLLLNAIANQLRYPNSHTHYYSFITLYLFSEATQEITQEQITRVLLERLIVNRPHPWGLLITFIELIKNPRYNFWSRSFTHCAPEIEKLFESVARSCGAKVVDEGISVQDGSH

SEQ ID NO: 192124 - protein, 82 aa, Zea mays
  unsure (1)..(82): unsure at all Xaa locations
  Clone ID: MRT4577_106801C.1.pep
ILSIQKHKRCGLTTTLQPWVTRILPFLCSLAFCESATYAXIIPQCSLAPRAIIPHILPPDTLMGFEHLSVQANMQQQALAAS

SEQ ID NO: 192125 - protein, 85 aa, Zea mays
  Clone ID: MRT4577_106802C.1.pep
HRPTPYLICQNNCKRGGFGRGDQPLLLDPLSRGGELLRVLLRTAYRIRHAGDQHLYWCHHDMRPTFGCNPERTTYCHVLNARKRC

SEQ ID NO: 192126 - protein, 62 aa, Zea mays
  Clone ID: MRT4577_106803C.1.pep
KPIKQMISKLTGLETHARPSNISNLTFPSMQLTISSILIPTLQSNARCLQHCILQKPYPHPT

SEQ ID NO: 192127 - protein, 655 aa, Zea mays
  unsure (1)..(655): unsure at all Xaa locations
  Clone ID: MRT4577_106804C.1.pep
DLGTKVKIEGDINRCVAYYKIALYYXWHCADAMYNLGVAYGEMLNFEMAXVFYELALHFNPRCAEACNNLGVIYKDRDNLDKAVECYQMALSIKPLFAQSLNNLGVVYTVQGKMDSAASMIEKAIHANPTYAEAYNNLGVLYRDAGSITLAIHAYERCLQIDPDSRNAGQNRLLAMNYIDEGSDDKLYEAHREWGKRFMKLYPQYTSWDNSKVADRPLIIGYLSPDYFTHSVSYFIEAPLTHHDSTVCKVVVYSGVVKADAKTLRFKDKVLKKGGLWRDIYGIDEKRVASLVREDKVDILVELTGHTANNKLGTMACRPAPIQVTWIGYPNTTGLPTIDYRISDSLTDPPMTKQKHVEELVRLPESFLCYTPSPEAGPVCPTPAISNGFVTFGSFNNLAKITPKVLQVWARILCSVPNSRLVVKCKPFCCENIRQKFLATLEELGLESLRVDLLPLIHLNHDHMQAYSLMDISLDTFPYAGTTTTCESLYMGVPCVTMAGAVHAHNVGVSLLSKVGLGRLVAKTEDEYVSLALDLASDVNALQELRMTLRELMMKSPVCEGERFTRGLEAAYMDMWRRYCDGDVPSLRRLALLEEHPVANGPDSDKTSEKLADLKAQRASATVEEDNQPPAMANGVRSPSSPAAAKCESNGHSSQ

SEQ ID NO: 192128 - protein, 98 aa, Zea mays
  Clone ID: MRT4577_106805C.1.pep
VFEREVTQDQVILMAARASRIENQDAIDTAIVGMLADPKERRAGIQEVHFLPFNPTDKRTTLTYIDSDGKMYRVSKGAPEQILKLAYNKLEIERRVHA

SEQ ID NO: 192129 - protein, 52 aa, Zea mays
  Clone ID: MRT4577_106806C.1.pep
SHSKNEKIFYTIISQYLISYYNLHHRTSFYNSNILITISYTIKTQYYQQLPS

SEQ ID NO: 192130 - protein, 42 aa, Zea mays
  Clone ID: MRT4577_106807C.1.pep
RIMRRLVWILLQAKVKTKERNTSYNLPIGPDACHAHRISASA

SEQ ID NO: 192131 - protein, 49 aa, Zea mays
  Clone ID: MRT4577_106808C.1.pep
RLQTHVALQARFSTELARETRIRQQMADQVAQKSSELEQYLQRVRELED

SEQ ID NO: 192132 - protein, 78 aa, Zea mays
  Clone ID: MRT4577_106809C.1.pep
GGAKLFEPQCFKCFIRWKLWCDIIEEDLVPSPFFFLVSRLEMLKLVPHCFVLPLVHVGGYCSPAFICQGCLSPLKPFF

SEQ ID NO: 192133 - protein, 109 aa, Zea mays
  unsure (1)..(109): unsure at all Xaa locations
  Clone ID: MRT4577_10680C.1.pep
MSRGGSAGGCQSSLGXVFGSAESTKPXEGDQSASAPPXTEKPSAAKTDAAKQVAAGVTSQTNNYLFFVGPTTGNFLTDRPSTKVHADPREGSSLGYLFGGNCCPSWRVH

SEQ ID NO: 192134 - protein, 96 aa, Zea mays
  unsure (1)..(96): unsure at all Xaa locations
  Clone ID: MRT4577_106810C.1.pep
GENFFPRENLWPLFPPTLNRPPKRKNGTPPGTGPEIPGGPPGPVWNGGMGGEXFPPPKEGGXPPGGPPAGAPPXGERAGPFNPXGFPPEAGKKNVP

SEQ ID NO: 192135 - protein, 82 aa, Zea mays
  Clone ID: MRT4577_106811C.1.pep
RSHVSSRTLWLTLCLITGISWGATSPVVRSSQSYGRALMISGEVKVHMMADKSTIQVPCGHVTSLKTAWHGPRVCSCLYGKH

SEQ ID NO: 192136 - protein, 115 aa, Zea mays
  Clone ID: MRT4577_106812C.1.pep
AGRVAARSRRRGSTTEGMRTTCARAASVARRRRRSPETPAPGPRSTRPSALAVVGSSSTSWWTTTCEQPCSGRRRLRSRPVAYSRKSGHAGAPADPGPLRVLLVDVVGGADLQRL

SEQ ID NO: 192137 - protein, 95 aa, Zea mays
  Clone ID: MRT4577_106813C.1.pep
SPPPKEGPPPLVLGFRGGMQIFVKTLGGKPLTLGGESSPPPPPVEGKIPAQRGVPPHPQGFIFFGKHLEDGRPPAGFPLPKGGPPPLGVPPPGGQ

SEQ ID NO: 192138 - protein, 101 aa, Zea mays
  unsure (1)..(101): unsure at all Xaa locations
  Clone ID: MRT4577_106814C.1.pep
VQEQLRASNQLALAXVVANXVQQQKQQXLATLSKLGIXNPPVYVTEQQLLSSSPLAVGNPPTYLQXHLLQQIVPXLTNLAVGNXVAYLQQLLPFNXLTLSN

SEQ ID NO: 192139 - protein, 160 aa, Zea mays
  Clone ID: MRT4577_106815C.1.pep
GALMNDFIGRIKREEWKPPKGEIRTVRVTLDTAQYHIDVTETAEKGTENVYGTFNILMRRKPKENNFKAILESIRDLMNETCVVPEWLHNIFLGYGNPSAAQWMNMPDLLEVIDFKDTFLDANHVQQSFPDYQVYILTIFFFFAFLECIYSHFHLQSPVI

SEQ ID NO: 192140 - protein, 124 aa, Zea mays
  Clone ID: MRT4577_106816C.1.pep
KGAPVVSGGDLSVHPLGFHQIPVLLGAPVPKVFSGGKGFQVPLKGPKPGVLEGTHPFSFGGPMGFFWGPLRGFFLGFFPLKGPIPRNFLPPRGGPFGFSPLGKAAPFWARGFLGGSPWAFGGFS

SEQ ID NO: 192141 - protein, 62 aa, Zea mays
  Clone ID: MRT4577_106817C.1.pep
IEQVMIVFRKGRLRGSTKITYPQHPKVQYTLPSSWRKTAPYHNVSVISTCLAPMELKQGVVQ

SEQ ID NO: 192142 - protein, 71 aa, Zea mays
  unsure (1)..(71): unsure at all Xaa locations
  Clone ID: MRT4577_106818C.1.pep
XAPPXXPXVRGXAXXRXSGGXGXGRXAXQRQPXPDXXHPPPPXXPRLXXRXXTPXXXPXAXTARSSSPQII

SEQ ID NO: 192143 - protein, 79 aa, Zea mays
  Clone ID: MRT4577_106819C.1.pep
ARSDLRRLVLPRARKPRLGGYKPSQVHLVLPPVVGVVVVSFKQALSCAFSCSSGVEGVCNGQNFACVIICHGGKKKKKK

SEQ ID NO: 192144 - protein, 75 aa, Zea mays
  Clone ID: MRT4577_10681C.1.pep
AGIPVARDNDVARCQHGSLSCIHIHTYVIIKFGYINGSWCEGVVFPKYRNLIVPLLHCSYTNMSIYAANAPIMEL

SEQ ID NO: 192145 - protein, 180 aa, Zea mays
  Clone ID: MRT4577_106820C.1.pep
MTPSPSSRLEHELEKPPHPHGLDAHFMRRLVSRSWEESRLLWRLAFPALLTEVFQFSIGFVTTAFVGHLGEVELAAVSVVENILDSSAYGVLFGMGSALDTLSGQAVGAGQLDRLGTYTQQSWIICGATALALAPAYAFAPRLLHSFLHQPDHVSRAAGPYARWAIPELFAHAVNIPLLM

SEQ ID NO: 192146 - protein, 57 aa, Zea mays
  Clone ID: MRT4577_106821C.1.pep
RRCAACSCSRHLPALAAQLSAGCTTEKTMSSNTNVMEAVTSYLSCSWTHVSEISNVS

SEQ ID NO: 192147 - protein, 113 aa, Zea mays
  Clone ID: MRT4577_106822C.1.pep
CNWGSNWGLGSNCKWGKKYPSLEEKSPPGQAPVVLGVAPKKKAAPHFFKAPGESGKAPPPLGLGKNFKFAPRNFCSHRLPPREMIFFFLAWGGGLTKKKEAELGPKKRFFLVF

SEQ ID NO: 192148 - protein, 80 aa, Zea mays
  unsure (1)..(80): unsure at all Xaa locations
  Clone ID: MRT4577_106823C.1.pep
IYQCIXKKKKKKKKKKKKKKKKKKNEKKNKKTINRHKTQKIDPQQGRKNARXKKKKRGPSVPRAPIFLPPKRHHNSLPRQ

SEQ ID NO: 192149 - protein, 73 aa, Zea mays
  Clone ID: MRT4577_106824C.1.pep
PRVGSGVAKALALPKTTHVLVAPPYHPFRRPASLFNGLGRFSYMSWAEAKPAEKPVPDPVLRKQQAGRSWATA

SEQ ID NO: 192150 - protein, 61 aa, Zea mays
  Clone ID: MRT4577_106825C.1.pep
GAPGGVKKKKKKKQKKKKKKKKKKKKKKKKKKKKKKKKKKKKKKKKKKKKKKKKKKKKKKL

SEQ ID NO: 192151 - protein, 160 aa, Zea mays
  Clone ID: MRT4577_106826C.1.pep
PRPPRVRRCSTNPWVRAHAVIHGRQRHALAASWTTGHRRLRVVVLRPCQADGARRALVRGRYATYPHPAGWGAAARPSPDHDHQTRPYGCHLCHHQTLGPASQQEVPSHSGVSDLLHSIQTNRSWSLLRHPTCFLWQSLLWAPKTTGCNADDHGQPGGAR

SEQ ID NO: 192152 - protein, 75 aa, Zea mays
  Clone ID: MRT4577_106827C.1.pep
KVNKRSRGPREEFTFVLYGPPTLVSVQPQVGYNGRNSTANRTVSGEPPTALKNPPHQIRSTTGRESSNNLIKKER

SEQ ID NO: 192153 - protein, 56 aa, Zea mays
  Clone ID: MRT4577_106828C.1.pep
IFLFSFSFSIFLFLFFAPQAPCTFYFYEGPGEYFFYLSEGNSVVELKKSSIPFWCN

SEQ ID NO: 192154 - protein, 42 aa, Zea mays
  Clone ID: MRT4577_106829C.1.pep
VRARERSSIGCIYLVLERTCSLSSSFTYQYITNYFLKPYIFF

SEQ ID NO: 192155 - protein, 99 aa, Zea mays
  Clone ID: MRT4577_10682C.1.pep
ACAVFFFANRRLVEQTAASGTDTASTLRDLATAATTCTVTCSGRTARRRHETSPPTHRGSSSMARLKMCGCLTSMIASLIKVPYYYDTEVWGEPYNVAY

SEQ ID NO: 192156 - protein, 84 aa, Zea mays
  Clone ID: MRT4577_106830C.1.pep
MADIALLVAEQFEKTARRGAPGGDSGSGSGTGGETRNFGAVAKVWSSWVESASAAASGVRFTVAVQLEPKTGLALAAADGLFSA

SEQ ID NO: 192157 - protein, 257 aa, Zea mays
  unsure (1)..(257): unsure at all Xaa locations
  Clone ID: MRT4577_106831C.1.pep
KKPIAARFHPSAPNRMIVSNEDINILVRAKAHMLVALKLDRCSGFSTPSIALVARSCRKLETLFLEESTIDEKENDEWIRELATSNSVLETLNFFQTDLRASPEYLTLLVRNCQRLKTLKISECFMPDLVSLFRTAQTLQEFAGGSFEDQGQPVAEDHCQIVQRCPNLETLEVRDVIGDRGLQVVAETCKKLQRLRVERGDDDQGGLEDEQGRISQVGVMAIAQGWPELTYWAIYVSDITNAALEXVGTCSRNLNDF

SEQ ID NO: 192158 - protein, 448 aa, Zea mays
  Clone ID: MRT4577_106834C.1.pep
MDPFSKKRKPDDNGAVTASPAGGAATLGLTRDDVIRLLEPLSRDQLADIAAAAALVSAHALDAVRAAADRDPALRKLFIRGLGWETTSDSLRAIFSAYGDLEEAVVITDKSTGRSKGYGFVTFRHADSAVLALKEPSKKIDGRMTVTQLAAAGSAGGPSVGAPGSGGAPVADVSLRKIFVGNVPADMSSERLLAHFASYGEIEEGPLGFDKQTGKFRGFALFVYKTPEGAQASLVDSVKVIDSHQLVCKLAIDGKKGKQGQSQQSGPGNQQQQQQQQMLPGGPQEIQGGLGLGSQMGAQYGGPGSGMPSFGFGGVGGGFGGPNPYANMPSSMGGGGAGGLGSVGGQVPTGLAGAGGFGPGGLGGGSFGGSSQFGAAGMGAYGGLGMGGGSMYRMQQGAGGLPAGAFGEGGNYPLPGSGFRGHDPQGGMSPPGPGGRAPPMYPNVPPYF

SEQ ID NO: 192159 - protein, 293 aa, Zea mays
  Clone ID: MRT4577_106835C.1.pep
MSPAAGGPAPTPAQSAPAVPQAIAPPPGPGRAAPAAPRRDPPGDPEGADPANAAARKTPWSMLVQPPAAAAAAAAEAPESGGIIGGDASWPALAGSTRAGPKSGSSDSLKALSDASGPSPQEVPIAAPSVPPYPVVGANPIPTAQNPTSIPPPMAAASSQQNGGTTQTIPVRRGGSSGGNGGGGSRGYGSIGGRRAANSNGGDGSSGSGGDDNWNNGSLGTGSGCNSTNGDGSINLDDNAPGAGHAGGNGNGSSRDAPGNRHWNHNIRGGISSNGAGSGDGNNRNSSGSSNHW

SEQ ID NO: 192160 - protein, 89 aa, Zea mays
  unsure (1)..(89): unsure at all Xaa locations
  Clone ID: MRT4577_106836C.1.pep
ASDTNWQHRKHNWGPTLVDNIFRLHTLRGLYASAATDTIFSQRTQAYIAPLFPTHLITTGSTVXENPILQPYTIQHAIGAGITPISPVV

SEQ ID NO: 192161 - protein, 98 aa, Zea mays
  unsure (1)..(98): unsure at all Xaa locations
  Clone ID: MRT4577_106837C.1.pep
VFAPVFGEPPLAPLGGFFSLLSPFYVVIWITDGWPLFXSPLKGKLPVFPHPFSPRIWRPTLIFGPPLARLGRKSLLFSKSVGVPAKVFGPFFSLNPFP

SEQ ID NO: 192162 - protein, 48 aa, Zea mays
  Clone ID: MRT4577_106838C.1.pep
YGDSEPAAPSEKSSFRNSGITCRPLPLLQCRTWWHCRSGFCIFFPLLY

SEQ ID NO: 192163 - protein, 91 aa, Zea mays
  Clone ID: MRT4577_106839C.1.pep
SSPSRIRFRVHAMARLLFPNLAHSPVRFRWSCSLVPPASGLQGGQTCVGWCNHARPGYEYDAHHSRLVKCGARGYRPTTPTPTTLAGCARA

SEQ ID NO: 192164 - protein, 72 aa, Zea mays
  Clone ID: MRT4577_10683C.1.pep
MLLLPAAQRALPHLTDLGAMAKLALALALLLLLTVAASRSASIRSHLDLDLGFLSSGDRRRECRRTGAECLA

SEQ ID NO: 192165 - protein, 84 aa, Zea mays
  Clone ID: MRT4577_106840C.1.pep
RSYTAQMHPSYLGTQIYYLYFGEEHHLDQGEKQHGHPFIQPAVGAGASRPSRRRFWRRPFCAWARRACRAGIRRTGASPCARTP

SEQ ID NO: 192166 - protein, 63 aa, Zea mays
  Clone ID: MRT4577_106841C.1.pep
RSSHAPFLTQDMRKGTALLLRHPQGARGIHVHIRGGYHGLGSGFGDYYRRRHTMPMHRALLCR

SEQ ID NO: 192167 - protein, 81 aa, Zea mays
  Clone ID: MRT4577_106842C.1.pep
FKKKGLKKLLKGNAPSPNFWPKGGPKREGGAPPVGGDTPMGKGKCSAFLGKQPLPFFLVKTKGVRVLNQCFLLGERVFFYL

SEQ ID NO: 192168 - protein, 53 aa, Zea mays
  Clone ID: MRT4577_106843C.1.pep
HTNHFFFFFFKPLITNDHLAQLGNLERLEALIGSWNGLLDLVLNVEGWNAWVL

SEQ ID NO: 192169 - protein, 60 aa, Zea mays
  Clone ID: MRT4577_106844C.1.pep
DLRFEGIFDYTFLKAINTGNRAGRSIGYMLTFACMLRYISFIVLRKFHSLLRFLQLPDWE

SEQ ID NO: 192170 - protein, 184 aa, Zea mays
  Clone ID: MRT4577_106845C.1.pep
LNGRGGGGGFFFFFFFVGFFFFFFLGKGENVRNIHWKPKGGCTKTTPKGNWGSQHGGGGGMIFILAHQKEKKSGLDHWGKYNIPIPDQWILELKPVVVHPPRIGLQWERVKSPSILVGGSRTVGFGIGVFSGRIGEGGPGGELFLPKGRGFRAVRDKGGGFPLWGPLGGVRIGVETNSFNFFKL

SEQ ID NO: 192171 - protein, 61 aa, Zea mays
  Clone ID: MRT4577_106846C.1.pep
IQLNQTSTKISNPISSSLIRLHLAPVTMLTSSPGGFRLRCRIRLAQFKIYLFLKVSGLVPI

SEQ ID NO: 192172 - protein, 85 aa, Zea mays
  unsure (1)..(85): unsure at all Xaa locations
  Clone ID: MRT4577_106847C.1.pep
NWRPLKHALKGPNWPXRKWNKNQLAVVXQRGNWKNLGVTKLNRLAENPLFASGGNTKKARTNRLSKHLPSLNGKGTPPEPANKPR

SEQ ID NO: 192173 - protein, 111 aa, Zea mays
  Clone ID: MRT4577_106848C.1.pep
MGTQRLQHRVARHRRGLDDGKLNKHGQRRDVGATRSQRSAGVEHGGRSPASRRDGEASTTRISGSTMVMQHSGDGGRQRTARVVANNAELDFICREGGQAMPRRAIAVDNN

SEQ ID NO: 192174 - protein, 69 aa, Zea mays
  Clone ID: MRT4577_106849C.1.pep
GVYYFLNFCFVPIVRQNSHLAWSGFRAYFSLISLLVARHKLAFVNRGLSAVSGVALLIGHLIIPVLASP

SEQ ID NO: 192175 - protein, 65 aa, Zea mays
  Clone ID: MRT4577_10684C.1.pep
KLHEASSCLSPSTTGLANIFWLWNTLTQVYCKIRTILTNLTVCASVQVRLLIRYIMTQLYVIFNI

SEQ ID NO: 192176 - protein, 173 aa, Zea mays
  unsure (1)..(173): unsure at all Xaa locations
  Clone ID: MRT4577_106850C.1.pep
MSNTLLDSSAGADDCFLTRHDSXLNNAVLSDYKTLAMCDELHTXSVLPYSRGGGIHNAISIPQRMHXTPGAIRDMICVGNDNPDVAMMKNVHAAIVTAHDYDDENAPTDTWAVCDGDEPRALSANLIALTXYCSDIXKRRDNCAPGEDAXYIYIAGYCLTVTPASIQLGAELA

SEQ ID NO: 192177 - protein, 204 aa, Zea mays
  unsure (1)..(204): unsure at all Xaa locations
  Clone ID: MRT4577_106851C.1.pep
ILHNIASSTVLLLRTHTLCPPYLLAYSSSPPVRNEITHTPISRELLTANLGNNTTTEHLIYTMDMINKXRRLQTVEKDAAXEMSXYACNHACVXLDKLQADREXNSTIDIALSKLETTXYDCTXIDAPADRDFIKEHVVTXTSHADCVVLIIDSTTGVFEAMISNDGQTLEHDVLALTLAPEXMICCCSKMDATTTTYLKIPHE

SEQ ID NO: 192178 - protein, 44 aa, Zea mays
  Clone ID: MRT4577_106852C.1.pep
ATTYWAWLILLPFKTIQFFPWSHHVICFDRYDYGVVQKLGKFIF

SEQ ID NO: 192179 - protein, 61 aa, Zea mays
  Clone ID: MRT4577_106853C.1.pep
FGVGYRCDPTERKTLIKYKKALYTPPSHNIRRMFHCVEPFSNNYFIYFFAKTHDSCALFKK

SEQ ID NO: 192180 - protein, 135 aa, Zea mays
  Clone ID: MRT4577_106854C.1.pep
MVVDPVLKGFDLNIAAVDESSPLEGIGLGLYATEFIHKYLRFNPTDQELMEWLEAKVRDGGARSDPLIDKFIPTIEVEYGYPHPQQLPGVTMDGTIKHFFCRPRAFESGRRKHRKIKAERNDRTAWHKTGKSMAL

SEQ ID NO: 192181 - protein, 131 aa, Zea mays
  Clone ID: MRT4577_106855C.1.pep
SPTPPTYAKKIQYMQANTGSGSYANKASVFLVWTRHNTSSACPGIGENMHEHSTKGTCIAVYVNNKKNQLKQVTKDIEDNHEACRYMHHSPSGEPCPRNQSNFCPIPDVPYGCPGKIVRATDHCIASPRPN

SEQ ID NO: 192182 - protein, 69 aa, Zea mays
  Clone ID: MRT4577_106857C.1.pep
QLWLTTPETASQNLLFHQLEVLFRFFIHCACVCLHYLFVMSISLQFKLTLLPLIELVIMGLSVSFCFFP

SEQ ID NO: 192183 - protein, 83 aa, Zea mays
  Clone ID: MRT4577_106858C.1.pep
GSTKSHTDQIMPEEHLTLATYKPDEYRKHGTFDFAGLQSAAYPTPAGAPDEEYSRHAIIDSGANFWSGYYREHAPVALGAGGA

SEQ ID NO: 192184 - protein, 58 aa, Zea mays
  Clone ID: MRT4577_106859C.1.pep
CPRRYGCLIHYIPLPCMTERSITANTHNHIYLKTKITLHLPDLLAYIWIFMTTQALLT

SEQ ID NO: 192185 - protein, 58 aa, Zea mays
  Clone ID: MRT4577_10685C.1.pep
DFQHIPLCSTFLQTRVHLKYRCLYTDRIKPPNSHFSYKYACKISGKHFCIAKTLLNFL

SEQ ID NO: 192186 - protein, 123 aa, Zea mays
  Clone ID: MRT4577_106860C.1.pep
HKGDKGGHQFITSLIYHWRRSYPLSCQLRARDLAAVRRWRRRRGSTGVSALRLRVGAHVLHSAPSRWWRRPALMPSVWLSFLDLGGAVDNDIARHDDSQEHRYHIHEARTRTPLRRHGVVGGV

SEQ ID NO: 192187 - protein, 236 aa, Zea mays
  Clone ID: MRT4577_106861C.1.pep
MERESAAVYGDPRLLNPSARPPEDSQQFAEAQYSGSYELQWRRRTLLCRPAHGALGESHKDGQEKRKPQVFYSPHKGIMPRKELRIEGSPSQRSVARGFGGMRSSDSANAAEGSPNAAARLATSQASQAQRITRATVPRRSRRKLRSVGLGGARDGRSPSQGDPAVSFGRHNPNRTKKISSDEVAPRGSLKETPRCAIERLERGPSGQPKRHKRARHCGQEWAESRDGLDSAQGQS

SEQ ID NO: 192188 - protein, 35 aa, Zea mays
  Clone ID: MRT4577_106862C.1.pep
RRPAIPLRGESSASHPRRRCMGDVLGLDRLQGARP

SEQ ID NO: 192189 - protein, 35 aa, Zea mays
  Clone ID: MRT4577_106863C.1.pep
CCQVHFCTPNCRLLQFICKFQSCSRRMIIYWHVFS

SEQ ID NO: 192190 - protein, 96 aa, Zea mays
  unsure (1)..(96): unsure at all Xaa locations
  Clone ID: MRT4577_106864C.1.pep
PVTRHISIAXIVHVYSRTSTTTRHLIYXLGRIDMHVXIYRSQKDAADMYKPNFKYAWVLYTLNAELERSTTIDTAMRKFETTRFYCTDIDVXGHSD

SEQ ID NO: 192191 - protein, 489 aa, Zea mays
  Clone ID: MRT4577_106865C.1.pep
HPIEQTLAYLPSRRVRTATLRRDGRLLRQGRRRRRLPRRQVVEHIIREENMMAAQEILELFCELIAVRLPIIETQRECPIDLKEAISSICFAAPRCADLPELIQVQMMFATKYGKEFVAAASELMPDCGVNRQIIELLSIRPPPVHAKLKLLKEIAEEHEVDWDPSETEIEFLKPHEDLLNGPTYFNGSTLPLPKEKHEETVAASAAERPDKDCESDTGLDSLDFPEVPKAAIRPPSNTPLTPDIGPHAPGSQPLPREFSDRTNLEENPTAGGAFNVIQMKSLEHLISAPSAQPNTPDLPDEKKQFIPFASPPPVVATPLEKTETVPSPSMSPPVKPTEPKISTKRVDELATPPVPPTDYTFTKQPEQVRPISSESEASIDLDDVLSAAQTAAESAERAASAARAAANLVQLRIADLKKNSRVYNKYTDSAQKESPHQAEGTQKPVFDHQDSFTNETQDYVPSHVPQRSPSLEDDPYFSYPNLFSAPKP

SEQ ID NO: 192192 - protein, 92 aa, Zea mays
  Clone ID: MRT4577_106866C.1.pep
RSASAARAAVNLVQLRIADLKKNSRVYNKYTDSAQKESPHQAEGTQKPVFDHQDSFTNETQDYVPSHVPQRSPSLEDDPYFSYPNLFSAPKP

SEQ ID NO: 192193 - protein, 185 aa, Zea mays
  unsure (1)..(185): unsure at all Xaa locations
  Clone ID: MRT4577_106867C.1.pep
RRGSRXCXRXRXXGSSFXXRRWXSXXLRSRRXPPPRRXLPXXSRXXGAWXPCPSRSXXXWXXAGARXXXXRXSPACXXXGRCRXXGXRXPGXXWXVFCXAXRXVSPAXXSPCCLGRSGXRXXPXRCLWXXLLAXXAPPXLWGCSXXXGSAASPLXAAXLCRARFACWLXXRSAPVVLLPGXGLLL

SEQ ID NO: 192194 - protein, 611 aa, Zea mays
  unsure (1)..(611): unsure at all Xaa locations
  Clone ID: MRT4577_106868C.1.pep
TDRSPLPPSSPPDRPPPHKSPADTRSSKPSLTSRHVASERRRCAVMDAFFGKGGGGGGFRGAKCKTLLKLSIPRIRLLRNRRELQLRQMRRDIAKLLEAGQEATARIRVEHIIREENMMAAQEILELFCELIAVRLPIIETQRXIILKYKAGILNPAREYKWAIVDKIDXCFVTKNSARDADKSDXLCFLVLLAXECPIDLKEAISSICFAAPRCADLPELIQVQMMFATKYGKEFVAAASELMPDCGVNRQIIELLSIRPPPVHAKLKLLKEIAEEHEVDWDPSETEIEFLKPHEDLLNGPTYFNGSTLPLPKEKHEETVVASAAEQPDEDYESDTGLDSLDLPEVPKAAIRPPSDAPLTPDICPHVQGSQSLPHEFSDPGNLEENPTAGGAFNVIQMKSLEHLVYAPSDQSNIPDLPNEKKQFIPFASPPPVLSPSVGKAETVPSPSLSPPVKPTEPEPEILTKKIDEVTTPPVLPSDYIFTKQPEQVRTISPSESGANIDLDDVLSAAQTAAESAERAASAARAAANLAQLRISDLKKNSKVYSNYGDSVQKESHHQTEATQKPVFDHQDSFTNDTQDYVSSHVPQRSSSLEDDPYFSYPNLFSAPKP

SEQ ID NO: 192195 - protein, 206 aa, Zea mays
  Clone ID: MRT4577_106869C.1.pep
TRAEPPRRPTRDRRRLILDGLKSLLKGSPNMNTLVGLGALSSFAVSSIAAFIPKLGWKTFFEEPVMLIAFVLLGKNLEQRAKLKATSDMTGLLSILPSKARLMVDNDAEKSSLIEVPCDTLAVGDYVVVLPGDHIPADGIVKAGRSTVDESSLTGEPMPVTKITGAEVSAGSINLNGKLTVEVRRPGGETVMSDILHLVEEAQTRA

SEQ ID NO: 192196 - protein, 101 aa, Zea mays
  unsure (1)..(101): unsure at all Xaa locations
  Clone ID: MRT4577_10686C.1.pep
AGQQHRKQRMPSRLDLLKNAMKFIIRQLGDDDRVAIVAFNDQVIKEYTTGILEIXRRWSDGYRKKRWMGFVAKGDTAFKPSLEHAVKLLDDRADKKRAGFI

SEQ ID NO: 192197 - protein, 85 aa, Zea mays
  unsure (1)..(85): unsure at all Xaa locations
  Clone ID: MRT4577_106870C.1.pep
ADNMECLGDVVGRLQESALEASSKGNKCINSCLRLNKXMIGLERLVMHLKILRKNVDSLDLIVSQVLCLHVDNGCYQSSYKGSGS

SEQ ID NO: 192198 - protein, 133 aa, Zea mays
  Clone ID: MRT4577_106871C.1.pep
RPAGPGCYRSYSTASASYRSAPSGASRMSLSPRAPLTSPDRLRRTCGISLVLLPEMPLPHQRCEAHYGYRVLVSGGTRGSSAPPGCVRMPRNRTHRSDGSDARVLRGSALRRRGVQGDFVSGQRSSFCLTAQA

SEQ ID NO: 192199 - protein, 93 aa, Zea mays
  unsure (1)..(93): unsure at all Xaa locations
  Clone ID: MRT4577_106872C.1.pep
CVNIRHIDILCLGSNIFVGPXPNSMATSPSLVELRLFANSLNCALPADLGKNAPLVCLDVFDNSISGEIPRSVCHRPKLKELLMLDNHLSKHI

SEQ ID NO: 192200 - protein, 111 aa, Zea mays
  Clone ID: MRT4577_106873C.1.pep
HASAHASERKIGVAMDFSPSSKKALRWAIDNLVRKGDTLVLLHVRHHGREEGKNVLWSRTGSPLVPLEELMEPPVRQRYDVPYDAEVFDMLNAAARQKEMYTVVLVKKAAR

SEQ ID NO: 192201 - protein, 158 aa, Zea mays
  Clone ID: MRT4577_106874C.1.pep
MAERKIGVAMDFSPSSKKALRWAIDNLVRKGDTLVLLHVRHHGREEGKNVLWSRTGSPLVPLEELMEPPVRQRYDVPYDAEVFDMLNAAARQKEMRVVVKMYWGDPREKVCDAVEELQMESLVMGSRGLGQIQRILLGSVTNYVLSNASCPVTVVKSK

SEQ ID NO: 192202 - protein, 189 aa, Zea mays
  Clone ID: MRT4577_106875C.1.pep
SLVDSPRLHPDAYSETTTMTSRPSFMPPTEGSFLSSGSFTPSGLTPSTRTQAEEALTANSTAQTDSAAPDPRLLPLMGSGGGNETPTQNGPTEALKAYTGYRRPGVVRASSTNYENALKRAQEASVSSDFSTDSELPDNNNGQTVASPASMSTPFPLPGQGVVPLNYNSPVGLSQGDSQKEVAVSRPQA

SEQ ID NO: 192203 - protein, 86 aa, Zea mays
  unsure (1)..(86): unsure at all Xaa locations
  Clone ID: MRT4577_106876C.1.pep
RGNNADTRDSKKKKKKKKKKKKKKKKKKKKKKKKKKKKKKKKDXGGXPMFKGEXQKGGGGYYWNQTPYQTCIKNGNSCFLGEKDIG

SEQ ID NO: 192204 - protein, 144 aa, Zea mays
  Clone ID: MRT4577_106877C.1.pep
ISYSNADPEMHVRIACQLNKTNKNPRNRSLLQIYNNTRAVPSCATTSKKLLSVPVHTRTGERKEETARRGEEEEEEKMYTRGKARQGEGPASLHWICDPACQPRTIVAAMRDHRSGAGRTGGWWPRRRESQRHAPEPGRLRGYP

SEQ ID NO: 192205 - protein, 47 aa, Zea mays
  Clone ID: MRT4577_106878C.1.pep
GKGHPRGRPAYLLIIKTTSSIERAVLRQQRQPGYCACLCSLGFPRAL

SEQ ID NO: 192206 - protein, 37 aa, Zea mays
  Clone ID: MRT4577_106879C.1.pep
YELAPKKKKKKKKKKKKKKKKKKKKKKKKKKKTKHTT

SEQ ID NO: 192207 - protein, 107 aa, Zea mays
  Clone ID: MRT4577_10687C.1.pep
AAGKKKKNRSPVQSRAASPLSSGSSQSGNPAPPARCSPALLRPPPWRPSPPPPRRRRSPPRPGAWLPSERPSPHSAPPPRAGSVRRSHPRRRPRLHRQDASGPSSGL

SEQ ID NO: 192208 - protein, 45 aa, Zea mays
  Clone ID: MRT4577_106880C.1.pep
YHSGFGVYFIIPSYPKKNIFKNKLIATMQFKKSIPFLQKNESYFK

SEQ ID NO: 192209 - protein, 121 aa, Zea mays
  Clone ID: MRT4577_106881C.1.pep
LFLFFFIFTSSGSSSTLISLRRNRSIADRGNILLSFHPQKHNLFTGKSMLNHLHLLCITTLPDCWERYIKIQRQAPHWGATKQASVRKAPHARGEALTHHFFIKESQWTKRRTSSGWRAWT

SEQ ID NO: 192210 - protein, 92 aa, Zea mays
  unsure (1)..(92): unsure at all Xaa locations
  Clone ID: MRT4577_106882C.1.pep
MPHRVLLLLSLASVAAVAAAADAGDPLIRHALPGVDDNHLQLNAQSHFLSFVLRVVKSYKDADEHAYRVYVFXGNLRRARRGRLLDSGMPIH

SEQ ID NO: 192211 - protein, 77 aa, Zea mays
  Clone ID: MRT4577_106883C.1.pep
YFFFFEGKINGPWHFLSTPWKYWLKSIICVNICYTRGIHIYIYIYIGIDALAHYLGVISDNGVSAIGTHKLHDYTQY

SEQ ID NO: 192212 - protein, 129 aa, Zea mays
  Clone ID: MRT4577_106884C.1.pep
LPNISTTIKAAKVVGHSRVLPPFSFPCLSFQFFILSFSFPPPAKFPHPAKLIFILIPPYNPRLAKIKKTHMSSRGFEPMTSQAKAKSTLVQRRSILTVVNPFLVAFIVTAVLGVSKNHHFYRRVTEDRQ

SEQ ID NO: 192213 - protein, 73 aa, Zea mays
  Clone ID: MRT4577_106885C.1.pep
TWRTSMAIPEALESFSWHRWHGSLGLSSERGCSSSRARGASSSRRAYGRLLLPPHRHPKIACLSLLGAAAGLR

SEQ ID NO: 192214 - protein, 113 aa, Zea mays
  unsure (1)..(113): unsure at all Xaa locations
  Clone ID: MRT4577_106886C.1.pep
PCVWFVLXRLAGWSSSGLPXRCLCCWWSGXVLAAFFVPXLFGSAPGASVRLLGPAFFRRPVVXXLFLGPRSLCFRRRGFLLLFSLVAFDLTPCXGGFLARLILSGRVGRPGGS

SEQ ID NO: 192215 - protein, 67 aa, Zea mays
  Clone ID: MRT4577_106887C.1.pep
KFLTPPLFVVFKKGCHQWFSFFLNFLYILKKVAGFSHYCFLDSTPRNHRRLGAFSVKVLFFFQWERI

SEQ ID NO: 192216 - protein, 128 aa, Zea mays
  unsure (1)..(128): unsure at all Xaa locations
  Clone ID: MRT4577_106888C.1.pep
AAHQPARDFLAHRDGVDKLLKIFRYATPLALAAGAPAPXRLKSFESSVVLSRKGFRLGKFVQSLRAHPHLPPALALLAYGSEGVYYFVEQFVWLAKAGILPAHLLAKLLLKPEGTQVVDNTSYDEVKL

SEQ ID NO: 192217 - protein, 92 aa, Zea mays
  unsure (1)..(92): unsure at all Xaa locations
  Clone ID: MRT4577_106889C.1.pep
TNMTXGGCCALAPPXRRRGSRSEDASGSSTANRPXTMVSQRDERXRLDHXXANQRRPGHGDLQVLRXAWRMVDLTGPQRWLRGGSFFVSLVS

SEQ ID NO: 192218 - protein, 44 aa, Zea mays
  Clone ID: MRT4577_10688C.1.pep
MYFLQTHPKRGGLVRKNGQSTKQANTNPRNKGGAAQHNLTSTQK

SEQ ID NO: 192219 - protein, 128 aa, Zea mays
  unsure (1)..(128): unsure at all Xaa locations
  Clone ID: MRT4577_106890C.1.pep
QVDGYINGDQTEVSNQGEXQMVTYETEPTPVATGSTXAPPQTPMTSXVIRPTGEAGAANSAMPTRKVMEMSWPCXEQIAHQCSVIGALPKCVHALERTVRRVEDAEHRLRRGKKLNKDGKGSNRWYTD

SEQ ID NO: 192220 - protein, 147 aa, Zea mays
  Clone ID: MRT4577_106891C.1.pep
GRTCVRAWRTDRIVSPTSRATTSTSRSGGRAGRRGLPPPPGVASGTGLPFLLEDTTTGRPPALFRAELLQEPHPGHRSPPTSNFSRAQTAQLFSSIRAVGRGKSATQQARVVAGEEGGGRWLAAWRSEGEKGPPASGYRKATADDER

SEQ ID NO: 192221 - protein, 100 aa, Zea mays
  Clone ID: MRT4577_106892C.1.pep
ISIQSSNSVSLICNNSLPACFLYMMCHTDLKSEQPDHRCHVLYWNIVQEAAKENDAFQIFLFIQDILFYKNKGDMPTKYLTAILPTYTTISFEVNSRKTI

SEQ ID NO: 192222 - protein, 70 aa, Zea mays
  unsure (1)..(70): unsure at all Xaa locations
  Clone ID: MRT4577_106893C.1.pep
YACKYSSLIAKKTHASHXYXFSSARSLYTNLHISKSRMPNKSKYVSLNSIYNPLLLQHTSQLKPKTHSTP

SEQ ID NO: 192223 - protein, 74 aa, Zea mays
  Clone ID: MRT4577_106894C.1.pep
HRRPQWGGRASTSRPTKFVNVKTPNDEKHYADLPSKPFFQLLLNIHPLGPCAGHASEIAERLTNWTKNHCRHQP

SEQ ID NO: 192224 - protein, 70 aa, Zea mays
  unsure (1)..(70): unsure at all Xaa locations
  Clone ID: MRT4577_106895C.1.pep
TPTSPXPPXSPPPTIKGPQPLLPSHYKTNXQPFPTXSTSXPFNSPPTKNPTFPINLNLSNPSTSTFSRSN

SEQ ID NO: 192225 - protein, 87 aa, Zea mays
  Clone ID: MRT4577_106896C.1.pep
FIFFFFFFFFFFFFFFFFGIPNFFSICRTTGAQHSGSFSLITLRHKISGLNYWEIFWTNQNGYQTNRHTFGPFLSCYTQHGSKKTKS

SEQ ID NO: 192226 - protein, 282 aa, Zea mays
  unsure (1)..(282): unsure at all Xaa locations
  Clone ID: MRT4577_106897C.1.pep
TTPVLATSYNEQAQTQPALWLRLDWPVPLPLLVGNCAGVQGNAEINPTFSAPNTSGNNSKSSNSSNATDTSTFGKSSSSSVPPTPRTEKEILQSSNLRKFTFSELRSSTRNFRTDSLLGEGGFGSVFKGWIGERTFTPVKPGAGMIVAVKKLKLDSFQGHKEWLAEVNYLGQLSHPNLVKLIGYCLEDEQRLLVYEFMPKGSLEHHLFRRAPHFQPLSWNLRMKVALEAARGLAFLHSDEAKVIYRDFKTSNVLLDSEYNAKLSDFGLXKDGPSGDKXHVST

SEQ ID NO: 192227 - protein, 98 aa, Zea mays
  unsure (1)..(98): unsure at all Xaa locations
  Clone ID: MRT4577_106898C.1.pep
LKSSPPRPPSSPGTPKSPPPPPVRSKPPCAWPPPGSSPSPPSPRAPSPSPSSPRPRXWPPLAGFPGMFACPPGXGPPPPAPPGATCYLMDQYQCFLTP

SEQ ID NO: 192228 - protein, 200 aa, Zea mays
  Clone ID: MRT4577_106899C.1.pep
PSVLTNLRKASVNNCCYAHAAVKAGLHKHILHSSSKQMVNDLENSGRSFSGPSHGWEAGISLPEDLADLFEAIAGAIYVDSGNDKEVVWSAIRRLLEPLATPGTMEPDPVSELKELCEHKHYPKPSYSPTRDSVAGVTRVVAQVTAARTVYSGTGTGRNQDVAEVLAAKALLKKKRPQQEDEAWTWLGPGGHLIFGNLRT

SEQ ID NO: 192229 - protein, 350 aa, Zea mays
  unsure (1)..(350): unsure at all Xaa locations
  Clone ID: MRT4577_10689C.1.pep
MDASLRGVQKYLSEKAAAAVQALLPESAGGELSTVCPWADQVRWHYHWASPLHYANTPQVCNFKYSRDCHNSRGQQGMCVVGAINNYTDQLYSYGQKTSYNLTESLMFLAHFVGDVHQPLHVGFQDDEGGNTITVHWYRRKANLHHVXLLHLFDAKFQMCTHQVASLESLRVRILCFXXWDVSIIDTAIKDFYNKSMDTMVEALKMNLTXYDIPFVLFYLSCFSLKMNXGQQIFENGDSTRLTCYSKTNDAFLVSNTVSXDGWSDDIVHWENCKNKHATCANDYAIESIHYSCNYAYKDVEQDITLGDDYFFSRYPIVEKRLAQAGIRLALVLNRIFGGGEADDIPLQVQ

SEQ ID NO: 192230 - protein, 59 aa, Zea mays
  Clone ID: MRT4577_1068C.1.pep
FWLNVQMLGSLWIYKTGGIKCSGGELNQGGLLNIKGSTKLLGGENNYFLFTKGEPYRVF

SEQ ID NO: 192231 - protein, 94 aa, Zea mays
  Clone ID: MRT4577_106900C.1.pep
LAVTDMKVAPSTPGGGLYTFWVGLPQYIKPRGSVSILPYICRQLYYTAAAGAYPSGPGESRGNLSSIESDGGRVNWIGSSAARDATFRQILFSR

SEQ ID NO: 192232 - protein, 72 aa, Zea mays
  unsure (1)..(72): unsure at all Xaa locations
  Clone ID: MRT4577_106901C.1.pep
THXSGGGFLFIFFYVLLLIFTMETKTFFTPGDRTRGDQPHKTTGPLLNQSWGPLRGPERRWSFTTSFWGGGP

SEQ ID NO: 192233 - protein, 96 aa, Zea mays
  unsure (1)..(96): unsure at all Xaa locations
  Clone ID: MRT4577_106902C.1.pep
LLSSAGTAGGACDALRDLGIAACSACLFQPIWLKKCSLPASAPPCCMVSGGGGVCWGVSALRVGGRVSSAGRKVCGSPPGPCRSSTKSLRTLGXPG

SEQ ID NO: 192234 - protein, 135 aa, Zea mays
  Clone ID: MRT4577_106903C.1.pep
RPVRNTLNSESAFPDWLSQLGGLPCHHINIISYVSPSLERRTSMAAPNLATSGAARATWLPAWCVLRTTGDAQMSCSSWYCTADASPVDPSHGRCPDGPASLRRHPQTAAAGQQNTGSAAPYCCCIKNVCCAQQS

SEQ ID NO: 192235 - protein, 102 aa, Zea mays
  Clone ID: MRT4577_106904C.1.pep
HYTPGPTWWPSIGIVWCLWNQKINKVSRFATPPRRLAFFFCAPCVVIHAPLVDRLGFLAHYFNGSPIMCFYSIKLTKTVSPLKKKTHQKKKKKKKKKKGRRA

SEQ ID NO: 192236 - protein, 191 aa, Zea mays
  Clone ID: MRT4577_106905C.1.pep
LRGLRCRVCRRSIRGGERRLPTRCRRWRVSRPGGPGAGGTSGAGTRGWCCQISYRSGENSSTYRYAAWYEERRVGVQGRRRHGGRGAHHLIRVMGKIRNTQGADEFLGVAFGWFVAAKRRVPFFFFFEKIRLLAIIYIFNNMDMGGGGGGIVSTSVRLFFFFLGALMDEQEMSWNRRSWLRKESTGRPRGT

SEQ ID NO: 192237 - protein, 173 aa, Zea mays
  unsure (1)..(173): unsure at all Xaa locations
  Clone ID: MRT4577_106906C.1.pep
MANSSSGLTVSYXCKAKFLDLKAGGRLRVIRSTIDDNDMGIEXERLGGRNXGYGDCTDGLPADXAAXAIYRLDXFTTVVNCHKSKIFFFSWSPETARTRTKKLXYASSKDRLRRDLEGNQCEIQATDPVQMSLXIVKSRDEVIVHRPTNQATRSNRRLLYIASLYRGFINFQH

SEQ ID NO: 192238 - protein, 82 aa, Zea mays
  Clone ID: MRT4577_106907C.1.pep
NHTSQPREHDPVSPRSSDGATHDEQLRFVEMVTDCSCCNSLAIYTPAEAFQQGPQGVCSCNSSVKHFHPARATDFPRLRYRK

SEQ ID NO: 192239 - protein, 157 aa, Zea mays
  Clone ID: MRT4577_106908C.1.pep
DAWADAWADAWACLVPGAGLLNHSVSPHILNYGRVDEATKSLTFPLSRPCDAGEQCFLSYGKHPGSHLDTLYGFLPRGDNPYDYIHVDLDTSADDEDIAAQPSATTSQTTHMVRGTWLSTSGGFPTYGLPQPLLTHLRAALGCEVDEPAAEADVRVL

SEQ ID NO: 192240 - protein, 55 aa, Zea mays
  Clone ID: MRT4577_106909C.1.pep
FGHSEVVLWLDYCSQGDQLYLTSGSRDRSAKIWDCKTRSWVPTLEGHTDVVNDAC

SEQ ID NO: 192241 - protein, 76 aa, Zea mays
  Clone ID: MRT4577_10690C.1.pep
GAWCSSPKPQNCGLLALNCLISSPFPSKRNELGALSVICSVRFPTQGVHPLVVPGSHLGSNLVMLNPCFHTRCILA

SEQ ID NO: 192242 - protein, 102 aa, Zea mays
  Clone ID: MRT4577_106910C.1.pep
PIFFPKLLHLWNESEKNPNNLFVIGLFLYGLAAAIHIRCVCVSCERSSEITHPHVAAHRPVLMVSTHRAHIWPPTPPDSRPRPQAHERPCTVRIANATSRKP

SEQ ID NO: 192243 - protein, 217 aa, Zea mays
  Clone ID: MRT4577_106911C.1.pep
MASPSLVDTQLIEALEHQTRVILAELDKRFTALDSKWEARVQTHQVAVGAVVEWRPQVDASIEHLQQHQADQPHLRSVGNMPHEGGLLSSAITKQIEPVCLKELALLGDADSRVQATETDVVFPSSKMLSLVGAVDKEERHSTQEVPRRAPRRNALRGGTKPTPSPSSTTTAPLEHPALGSRETWSRASSTLCSSASCSSSRWRACATRRTRAWRPT

SEQ ID NO: 192244 - protein, 240 aa, Zea mays
  unsure (1)..(240): unsure at all Xaa locations
  Clone ID: MRT4577_106912C.1.pep
MKLNISYPANGSQKLIDIEDERKVRVFMDKRMGAEVPGDSVGDEFKGYIFRITGGNDKQGFPMKQGVMHPTRVRLLLSEGHSCYRPXRRTGERKRKSVRGCIVAMDLSVLALSIVKQGDADIPGLTDVVHPKRLGPKRATKIRKFFGLTKDDDVRKYVIRREVQPKGEGKSPYTKAPRIQRLVTPQRLQHKRHRAALKRRQAEKVKDEANEYAQVLAKRIAEAKVNKADARKRRARPMRK

SEQ ID NO: 192245 - protein, 38 aa, Zea mays
  Clone ID: MRT4577_106913C.1.pep
ELDVSGVSSRFPMISVALAKLPRTRWSPNAFTILVIPL

SEQ ID NO: 192246 - protein, 114 aa, Zea mays
  Clone ID: MRT4577_106914C.1.pep
MKLVRFLMKLNNETVTIELKNGTTVHGTITGVDISMNTHLKTVKLTMKGKNPVTLDHISVRGNNIRYYILPDSLNLETLLVEDTPRVKSKKPTTGKPMGRGRGRGRGRGRGRGR

SEQ ID NO: 192247 - protein, 153 aa, Zea mays
  unsure (1)..(153): unsure at all Xaa locations
  Clone ID: MRT4577_106915C.1.pep
TRSTGRTTGWNLLGAGMDAGMCXKCGEASSDPVSDHNRVKDGLSSVLAWVSMIADNNKDNLRGDELDTVQDIGRTYWATYCTHYYSHYDYANADAEPVKDLMANLVCMHASLTDVNEMLNEIRADVADVDAADKDADNDSVDSYECMHHRIRY

SEQ ID NO: 192248 - protein, 120 aa, Zea mays
  unsure (1)..(120): unsure at all Xaa locations
  Clone ID: MRT4577_106916C.1.pep
GRFAIFFPTLTEARFAGSGVRVTMATAQLGIKWKRNPPIPSLPLAVRQWPTWWCKKDNFPWXTYSAKQTCYLLQRKVKVYPKSHTQEFVEIRAGDLAPLPQGMSCTCDIRDAVDKHYNFK

SEQ ID NO: 192249 - protein, 603 aa, Zea mays
  unsure (1)..(603): unsure at all Xaa locations
  Clone ID: MRT4577_106917C.1.pep
MKKTECISFELKPSHMSPPIVPSSVGSVQDFTKYPVDDIVEDKPCFLHIPINRSGTKTKQAATGLVKPGLVNYKDNPVPPHYAVVQVLEITDSGCEDWEIDFPVEGIITLQEAMNELVLWHRRDIKLGDEPILSRVSRHKSPTLNSTPMQQKDSSIITYPMVQENMTPTSKKIIETIISPLAKELDKGDVDKIVPQNVDVNIKKEAKVDTNVEGPTISKKIHQRIATDDVKKPSESMSRYLHKLRRVMTNQSKAELASHXSRHMVPNRQXFKVWEEDGMIHTRESLRLKTNISIYNKEDVPPKFVNGRPFLTTVQLSKLSTPEIRMHEWYMVASNKYKLEDFTFVVSEDAFWSKDNIDPVRHLFFDDLWSLYHRQRMETNYLTLFCLMQYMDDKKKQLKTGFLDPLMISQARYKEVARRHGEEYKDLDDAEFEKAVKQNQRKKMKVMAAYIGRAMYNHVQHGKDLIIAPHHFNDHYICIMIFPKDGKVVVFDSLRMEKAMYNDFLKILENAYRFYWKDLGGEHPEDKPNLSISLFPYGDKQPPGTVLCGYYVCEWCRVTFHYMVNREDVPKSKINVEWLERDMVSVGVAKVVRAKRLALLYAP

SEQ ID NO: 192250 - protein, 76 aa, Zea mays
  Clone ID: MRT4577_106918C.1.pep
GGGAESEFLFQEQTSLVQSCTASEVWSWALNQVSCLNAQLLQPLEGEGGEKKKEKTRTKERREKGTGMEVQRVGRI

SEQ ID NO: 192251 - protein, 157 aa, Zea mays
  unsure (1)..(157): unsure at all Xaa locations
  Clone ID: MRT4577_106919C.1.pep
LAGTAHSPPHPSPRLSLGSVSLTFFSQQASTSAPPDRGKCPYSLSNKQGVVGRQWVAASARSATSRRARRLGKFPGVGRRRATRRRPRRRRRRSRRSSRRPRRXAEAQPREPEDSASPPPVQPEENAGSTTTAVAGDGEGKESLDNPLVAMECFIFL

SEQ ID NO: 192252 - protein, 47 aa, Zea mays
  Clone ID: MRT4577_10691C.1.pep
RQQGQGSGVRAIQLDSRAPGSALIKDDDWGIRRLSPSSDDMLYCTSI

SEQ ID NO: 192253 - protein, 606 aa, Zea mays
  Clone ID: MRT4577_106920C.1.pep
MYLKSSKKLVFMGHRRFLMKQHKYRKMKEEFNNQLESEGAPKPYSGKLVFEIVKNIHVVFGKGKNKGEKRKRTDPSTYTTFKKQSIFFKYLPYWKDMEICHSIDLMHVTKNVFDSIIGTLLGMPSKTKDGLKSRNDLVDLQIRPELHPVDSGKGKPYLPPASYNLSVEERTKICKCLRGVKVPTGFSSNISRLVRMKDLSLFGYNSHDCHVMMTVFLPIAVRALETEHVKVVITRLCYFFNAVSQKVIALEDLDYLKAYIIETMCKLEMCFPPSFFDMQLERYLGVLKGYVRNRAHPEGSIMEGYTTEEVIESCIDYISDGTMIGVPVPKHEGKLCGRGRMGKKTFRVEDYKLVHCAHGSVLQHLTIAKPYIEEHLNELRKENQNHTEDWIMREHKHRFSEWLMDKNIPFGDSSEEKTMKNLASGPSCFVTSWQAYDINGYTFYTKSKDMKSVAQNSGVRIDAFDLHGQKTTYFGFIEEIWELDYGPSMKIPLFKCQWVQHPVGVIVDNYGLTLVDLKKVGYKDDPWVLAECVAQVFYVLDPADEKMHVVISGKQKIVGVENVGDQDEEYNKYEEMFVFNCPERIKRVEKKIDKNLKPYMRKNGSS

SEQ ID NO: 192254 - protein, 877 aa, Zea mays
  unsure (1)..(877): unsure at all Xaa locations
  Clone ID: MRT4577_106921C.1.pep
MPSLQCQSIQEELQSRLCKKIPXKKNKNKKSTIGPESDDDTFDDMDGKKKSKNPALVMWYLPVIDRLKRLFSNPREAELMRWHAENRKQNNKQIRHPADASQWKNFDLMYPEFAKETRNVRFALGIDGMNPFGEKRSVHSTWPVTLTMYNLPSWLCHKRKYIMLTILIQGPKSAGVDIDVFLEPLMEDMTKLWNEGVRIWDEYCREYFNLRAIIFVTIHDSPGGATLSGQKTKGKNGCVVCVDGTASMYLKSSKKLVFMGHRRFLMKQHKYRKMKEEFNNQLESEGAPKPYSGKLVFEIVKNIHVVFGKGKNKGEKRKRTDPSTYTTFKKQSIFFKYLPYWKDMEICHSIDLMHVTKNVFDSIIGTLLGMPSKTKDGLKSRNDLVDLQIRPELHPVDSGKGKPYLPPASYNLSVEERTKICKCLRGVKVPTGFSSNISRLVRMKDLSLFGYNSHDCHVMMTVFLPIAVRALKTEHVKVVITRLCYFFNAVSQKVIALEDLDYLKAYIIETMCKLEMCFPPSFFDMQVHLIIHLVDQIKILGPLYLHHMFQLERYLGVLKGYVQNRAHPEGSIMEGYTTEEVIESCIDYISDGTMIGVPVPKHEGKLCGRGRMGKKTFRVEDYKLVHCAHGSVLQHLTIAEPYIEEHLNELRKENQNRIEDWIMREHKHRFSEWLMDKNIPFGDSSDEKTMKNLASGPSCFVTSWQAYDINGYTFYTKSKDMKSVAQNSGVRIDAFDLHGQKTTYFGFIEEIWELDYGPSMKIPLFKCQWVQHPVGVIVDNYRLTLVDLKKVGYKDDPWVLAECVAQVFFVLDPADEKMHVVISGKQKIVGVENVGDQDEEYNKYEEMFVFNGPERIKRVEKKIDKNLKPYMRKNGSS

SEQ ID NO: 192255 - protein, 116 aa, Zea mays
  Clone ID: MRT4577_106922C.1.pep
AVLPCLLLSTQTPLPPAQASQGFRTRFLQARKTALSDNGRRTDGKPLCCLSGPTCTSDFLKELQYGTEEQEGVLDSHHYLHEYISNDEALDSEQTRTLNIMIITNGVTTIYTSYHI

SEQ ID NO: 192256 - protein, 124 aa, Zea mays
  unsure (1)..(124): unsure at all Xaa locations
  Clone ID: MRT4577_106923C.1.pep
RKPRASNPXHQPXSSRVYKGNGGDKRSEEPKEHRTAGGVELEVYNQGMLKTELCNKWEETGACPYGDQCQFAHGVAELRPVIRHPRYKTQVCRMVLAGEVCPYGHRCHFRHTLTPAERLHLPRP

SEQ ID NO: 192257 - protein, 37 aa, Zea mays
  Clone ID: MRT4577_106924C.1.pep
MTFSYLVYSHTMPFSHLFYSLTIPLSQLFYSVTIPIS

SEQ ID NO: 192258 - protein, 501 aa, Zea mays
  Clone ID: MRT4577_106925C.1.pep
SGSVDKTVKFWDLETFELIGSSGPENNREYFELASVIRSMKFNSDGKTIFCGLHDSLTAVWGEPTICHDVIDVGWSTLADLTVDEGKLLGCSYNQNCVGVWVVDLMRNEPYVDSSAGSHLNGSINRPIQSDDSMSSVFGRLSISRSPANEIGSDTLLGCSMSGSKESAVWTSASMRGLSKPPGKGDLRLSRSISTPLLSPRVRLNPNFIVGSRNQAATAVPLPEPIVRFKANLSSDAGMLSRKSHASAALMYRSRSNSSRYGIMESSSIPVLALRHSSRKDAGPVHSEAATGELADIEPQNIEKEGLVANHGKEDGKLVPVIASRSSKIVEEVGYRRITNDVGCKRVTLESGLRVNSDMDYRSRAPESHEVQQLIHLSEPAGLHGKFIRESSGAGDNNCSGSICTESAEFNEDDIWYRVSGFDKWNPAAARNPEFASIHRNEVIGIRQLMESSGKYVVDDRPSSSNYDNIQYVTTLYSSRLHSSLSGKLSASASYEDDISG

SEQ ID NO: 192259 - protein, 66 aa, Zea mays
  Clone ID: MRT4577_106926C.1.pep
MRTPAMLRWAAALAVLLAVAAPAAGFYLPGVAPSDFAKVCSFHAVSLPPWCPLEWLCNCVRVQSWI

SEQ ID NO: 192260 - protein, 208 aa, Zea mays
  Clone ID: MRT4577_106927C.1.pep
MGSTRTSHPSFPVLLLFLLATAAAAGSNKAEEVDDLQYLIDNSEDIPPNDPDGWPEGGGGGDYDDDLLFQDQDQDLPDYEPQIDETHVVVLTAANFSSFLAATRHVMVEFYAPWCGHCRELAPEYAAAAAHLAVHHNQTDLALAKADATEETDLAQRYDVQGFPTIILFIDGVPKDYNGARTKDAIVDWINKKLGPAVQDVTSVHEGR

SEQ ID NO: 192261 - protein, 81 aa, Zea mays
  unsure (1)..(81): unsure at all Xaa locations
  Clone ID: MRT4577_106928C.1.pep
ITHKVRRFKIILPTATFALGITFAQYITCIXQDATGEEVIFLYTITTLHSHLGYPELVIKMYPXWRMSHHLREMKRGDYLS

SEQ ID NO: 192262 - protein, 234 aa, Zea mays
  unsure (1)..(234): unsure at all Xaa locations
  Clone ID: MRT4577_106929C.1.pep
DTRLLQPWLPLRGLSTAADPTQLFGCRASLRKSAKWAWSGMGRERXPRSIAVPGVPAANSADCVPHMKNRKVMNLRLLGRISLPTVSMVVPYRDFFVPAGSRNARRGTYPEDKLDNDITEEAWLSTQGPDDRTLAQGLKGDPTYLVVEQDKTLATYRINAVCTHLGXCVVPWNDXKNKFICPCHGSQYNNQGKVVRGPSPLSLALDHADVDNXQVLFVPCVETDFRTGEDPWWK

SEQ ID NO: 192263 - protein, 87 aa, Zea mays
  Clone ID: MRT4577_10692C.1.pep
KVVGICRVMLKHHHSSHIFLPLSHLLVLTIESFPDLEVRDHARICLRMLSCAPGKDMRHIMGVGEQPSGVTPSHPDSLFDIHHRVLL

SEQ ID NO: 192264 - protein, 150 aa, Zea mays
  Clone ID: MRT4577_106930C.1.pep
AARAGSPPATRERSAAAIVAITGDAGSAWALSAYGGLPILINAGGFFSGSPALQAFAVAAIKNVSSVDDVRSTLVEESGLPVLVDLLASGTAETQKSAALCLWALASMGDHKTQNQIVQAGALSPLLQALHIASDQDLHDSVLRAIHALT

SEQ ID NO: 192265 - protein, 104 aa, Zea mays
  unsure (1)..(104): unsure at all Xaa locations
  Clone ID: MRT4577_106931C.1.pep
MTGRVKRAKGMGKAGAKRHRXVLRDNIHGITKAKIRRMDQAGAAVKRISGLIYXETRGGLKIFLENDIRERATYTEHARRKTVTAKDVVYALKRQGRTLYGIDG

SEQ ID NO: 192266 - protein, 58 aa, Zea mays
  Clone ID: MRT4577_106932C.1.pep
EYLREALALSTDVNHMSVSQLVALLKTIPGLSSVHLRLVVQVDVDDIVVHLRVHARVG

SEQ ID NO: 192267 - protein, 65 aa, Zea mays
  Clone ID: MRT4577_106933C.1.pep
MGTRDITLLAPVALDASATHAFIIPQCSLAPSAIITQFLPPVTSMGIEHLSVQANMQQLALAASV

SEQ ID NO: 192268 - protein, 60 aa, Zea mays
  unsure (1)..(60): unsure at all Xaa locations
  Clone ID: MRT4577_106934C.1.pep
HIRWHLAQEARGGTYLILWLDXNREGENICYEVIDCTGIPEKEAAKRFFRARCGSDTEKD

SEQ ID NO: 192269 - protein, 95 aa, Zea mays
  unsure (1)..(95): unsure at all Xaa locations
  Clone ID: MRT4577_106935C.1.pep
DNSSDKDREDSITYTTVDWRDFMCNTWHLEPTLRLISWTGRKIDPVGVDXILQKLGIFHARTTIPKWLQRGVMDPLDKVLSVLIXKLGTALQDEK

SEQ ID NO: 192270 - protein, 120 aa, Zea mays
  Clone ID: MRT4577_106936C.1.pep
MAKTSSFKLEHPLEKRQSEANRIREKYPDRIPVIVEKAERSDIPDIDKKKYLVPADLTVGQFVYVVRKRIKLSAEKAIFIFVKNTLPPTAALMSSIYEENKDEDGFLYMTYSGENTFGLL

SEQ ID NO: 192271 - protein, 120 aa, Zea mays; identical to SEQ ID NO: 192270
  Clone ID: MRT4577_106937C.1.pep

SEQ ID NO: 192272 - protein, 86 aa, Zea mays
  unsure (1)..(86): unsure at all Xaa locations
  Clone ID: MRT4577_106938C.1.pep
MRWRCRWIIRDIDTKTYLVPPDLTVXQFVYXFRKRIKLSAEKAIFIFVKNTLPPTAALMSSIYEENKDEDGFLYMTYSGENTFGLL

SEQ ID NO: 192273 - protein, 120 aa, Zea mays; identical to SEQ ID NO: 192270
  Clone ID: MRT4577_106939C.1.pep

SEQ ID NO: 192274 - protein, 87 aa, Zea mays
  Clone ID: MRT4577_10693C.1.pep
LSIGRAPFFRIVLLGTRLSSCIYNRSLRLNSSTYIPTHDKASQRNDSISAHTWFDLSSEPAAISQRLVSSLGAPRAAAQHLMAMCGL

SEQ ID NO: 192275 - protein, 872 aa, Zea mays
  Clone ID: MRT4577_106940C.1.pep
MNGHLHLIPSTPPRLHLTSLSPTFLSFPPAPCPHPPPHGPHPRLPLRSVAVAAAADPRAAHAAAVKSGALGPSSDARTANAVMCAYLRVGRLGDARDVFDWMPARDAASYSALISGYARLAGGSGSVTATVASAELLGRMRLADGLLPTEYTFVGLFTACARRGNPRLGTQVHALAAKSGHSSLLLVANAILGMYVKCGRFGDAMRAFDGMDRRDVSSWNAVLAGLVELGRHDEAFEMFGEMRASGNVRADRFSLSALLTAAGEGVGQLQGEAVHALSFKSGLETDLSVGNALIGFYAEHGASVEDVVSVFQRMPVKDVISWTGLLNGYMEFGLVDMALDVFERMPQRNFVTYNAVLTGFCRNKEGVRATFAKKAGLRGLGLFRQMVEDGLEISDVTVTGVLNACAIAADRKVSEQVHAFVIKCGCVSSPWSDAALIDMCIKCGRSGDAHLLFEQWQHEESFHIAWNSLLLASVRGGEYEKALSTFLQMFRSSGAEFIDEFMLTSVLGVCGSLGFAELGKQMHTFAAKSGLLSARGVGNAIISMYGKCGELKDAISLFERMSCRDLVSWNAMITAHLLLHQGDDILKIWSEMERSMVRPDSITFLLVISACSHTSSDSTDKCRKLFLSMPSTYGIEPAMEHYAAFVYVLGCWGRFDEAEQLIGGMPLQPGALVWRSLLDSCSKHSNMAVRRRAMKHLLALEPQDPSTYVLTSNLLSESARWRSSENTRLEMYEKGMRKIPARSWTFHGNMVHSFFARDKSHPQSRDIYAGLDVLILECIKAGYEPDTTFVLHDVEEYQKRHFLMYHSMKLASMYGLLMAGPGQTIRVVKNIRMCGDCHSFLEHASAATGKVISVRDSSGFHIFRGGKCSCSQ

SEQ ID NO: 192276 - protein, 102 aa, Zea mays
  Clone ID: MRT4577_106941C.1.pep
YFVFCFFFFFFSFVLFLRFYLCKKGVILDLLGEFADVVFLPPPNKKGGLFGKKNPRQKTFWKNTPDPQGENLSTRGGKHKDRGGKRHPFHYEDKKKRPFFGV

SEQ ID NO: 192277 - protein, 174 aa, Zea mays
  unsure (1)..(174): unsure at all Xaa locations
  Clone ID: MRT4577_106942C.1.pep
MMRVLAXWWPCWPXAFFAVPARAEQCGSQAGGALCPNCLCCSQFGWCGSTSDYCGSGCGGQCSVFCGSTPNPPSSGGVASIIPESLFNQMLLLRIDAACPAXGFFTYAGFIAAANAFPGXAPRGRAAXRKRELAAFLAXSSLVSSGGWASAPGGPYAWGLCFXAVPGGSSVPVL

SEQ ID NO: 192278 - protein, 161 aa, Zea mays
  Clone ID: MRT4577_106943C.1.pep
EDFPLDLRAKIVVKIAEALEYLHSPATGIIRHGYVVPSKILVDNNFMPKLTGFSWARRLIQESNTTASDDVISSHQHPSSGFNNDPIHDHYVSLKLKTDVYQFGVLLLTLISRKSFVFYADHDGLVSQFLTACQEDGSGRAFFDDDVAVHGGDVVLLEEMG

SEQ ID NO: 192279 - protein, 113 aa, Zea mays
  unsure (1)..(113): unsure at all Xaa locations
  Clone ID: MRT4577_106944C.1.pep
VLTMAGQGRQIYHHCCSFGQDGRCRRAPPKAHPHHHGWTLVRLASPPSAEIRXXLTRFGVIFSXRILMLLDKGFLAMXNILFVSGVSLTIGXSQLPXSSQSLRIARPYTCNIE

SEQ ID NO: 192280 - protein, 164 aa, Zea mays
  Clone ID: MRT4577_106945C.1.pep
TPKGDWDPRGRPGFYDVFLKFPSAGADRRTAGGTWEPASQPRGCARATTTASLNGAHAACAAGRRGTSAQPRHELFTPTAPMARAGGERRHLSHPMADRGDRLPAFKSAPETRARALSSALAVADRVSRTYSRCCGSAVQLPPPAARARLVRRSWVGVSAPHGL

SEQ ID NO: 192281 - protein, 148 aa, Zea mays
  Clone ID: MRT4577_106946C.1.pep
MGMEARCGDLAVAAGARVRRPLQPRDTNVAASTVVVGKAAPKPKAHPKGATRPTLPSLPPAPLFPVVKPTPPVKDQCDASVAGVAEVSLAEELERARERRARLRAAREQTEREMVSRAETMERATAEWERRAEDQRRLVSELMRLFGV

SEQ ID NO: 192282 - protein, 79 aa, Zea mays
  unsure (1)..(79): unsure at all Xaa locations
  Clone ID: MRT4577_106947C.1.pep
MLKFFHHTDTCFISLPKCFQAIIAAQLFPNLXPLLAYSCVNPASXPYMLQQAIPTSNIPLSPLFQHSSALSLVQSLVQT

SEQ ID NO: 192283 - protein, 43 aa, Zea mays
  Clone ID: MRT4577_106948C.1.pep
ELGFKASTGRLSMRIPPTPAAMVLGIGSAVLGLPGRESLGQKG

SEQ ID NO: 192284 - protein, 46 aa, Zea mays
  Clone ID: MRT4577_106949C.1.pep
QLTLHNVTLQLHHFNIIQMYLPIIVLPSSTSNQTLLLQTFQITFCT

SEQ ID NO: 192285 - protein, 120 aa, Zea mays
  Clone ID: MRT4577_10694C.1.pep
MSGGSADYNREHGGPEGMDPDGVIESNWNEIVDNFDDMNLKESLLRGIYAYGFEKPSAIQQRAIIPCIKGYDVIAQAQSGTGKTATFAISILQQLEIEFKETQALVLAPTRELAQQVLIV

SEQ ID NO: 192286 - protein, 82 aa, Zea mays
  unsure (1)..(82): unsure at all Xaa locations
  Clone ID: MRT4577_106950C.1.pep
ALLALLALLVSATHAMIISQXELXSSVIISQFLPPDTLMGLEHXSSQAXRLQLELAVSVLQQPIAQLQQQYLAHLNLQNIAT

SEQ ID NO: 192287 - protein, 80 aa, Zea mays
  Clone ID: MRT4577_106951C.1.pep
NGTIKEDLKLQTDETLGAQIKEGFKGGKDFVGTVQSAMGEEQICPFKDFVPNKLLFFCKLNLTFSKLKSKIKCISKGLFT

SEQ ID NO: 192288 - protein, 66 aa, Zea mays
  unsure (1)..(66): unsure at all Xaa locations
  Clone ID: MRT4577_106952C.1.pep
RAAXTRVACSCSSTCWLLLPPLRPNPPASPSPQDSACSQLPPPPTLSSLSGGLRRRREILMRSQEE

SEQ ID NO: 192289 - protein, 67 aa, Zea mays
  Clone ID: MRT4577_106953C.1.pep
QFLGCSVHVQNGKKKRFFECQAPVYSYCAPCVVSHRPIHRVYNSHSKNILVFSIIIFSPKFSVILNL

SEQ ID NO: 192290 - protein, 72 aa, Zea mays
  Clone ID: MRT4577_106954C.1.pep
LILSRWFPTLAGFFLMKTFPGPQTTPDLLTNISKWETNSYHAEKGRAHKEPRETFQKTLRPQQAQVSKKLLG

SEQ ID NO: 192291 - protein, 66 aa, Zea mays
  Clone ID: MRT4577_106955C.1.pep
NTNAYTEGDMDTIPKLRAADGQADDAVTAAPAREKHTVMATELLGGRRSRASGCGAAAAAGAVISV

SEQ ID NO: 192292 - protein, 89 aa, Zea mays
  Clone ID: MRT4577_106956C.1.pep
PAPLHDTPQMTKLAPEHMGNKVNRKAMPLFKLGDKCDVTLDVLYLASDPGSYVSGAIISVNSSLWLSRSLHIPHDDLKAVFKVVSKIVK

SEQ ID NO: 192293 - protein, 72 aa, Zea mays
  Clone ID: MRT4577_106957C.1.pep
FVEHTLAIIPTSSVQWFTLRFTHRYIMASSTTNSHVIRHSSILLDAFSLELREPFNMFRSIMDSEGSSGSGT

SEQ ID NO: 192294 - protein, 88 aa, Zea mays
  Clone ID: MRT4577_106958C.1.pep
TKNLTSLIELPPSTEERSSKANTEVQCHLNSKTSSVLGVERNVLSIGVGEVIEIRTNELTRSSRAHGSTSEDVRVHFKATIRSGDRPA

SEQ ID NO: 192295 - protein, 71 aa, Zea mays
  Clone ID: MRT4577_106959C.1.pep
LFHPCSLLGLISGGETVLSLTDPTCDSYAGKASRLESDYPMREVCVPVQLEEGEGPQAPWIRVELSGRPLL

SEQ ID NO: 192296 - protein, 72 aa, Zea mays
  Clone ID: MRT4577_10695C.1.pep
KTPPRQYRLPLHTNETPTTTHYHKAQAATKIPKHGINEKKSQIAHDNHFNIETLHRPYHPLSHRFSTKPILT

SEQ ID NO: 192297 - protein, 78 aa, Zea mays
  unsure (1)..(78): unsure at all Xaa locations
  Clone ID: MRT4577_106960C.1.pep
IDENQRGTYDFIYLPIDFRDRCNAGYAFINMTDPLQIVPFYMTFIGKKWEMFNSDKAASLAYARIQXRNAMSAHSQNS

SEQ ID NO: 192298 - protein, 91 aa, Zea mays
  Clone ID: MRT4577_106961C.1.pep
KVMTLHVQHFSDRTQTDSGGTFKTYTGMSHAILCTRVVNSERQRSHVHSYTLFALTYPQSKMFPAVREKSVVVALFYCSRCLISCTRYRHF

SEQ ID NO: 192299 - protein, 154 aa, Zea mays
  Clone ID: MRT4577_106962C.1.pep
EAWPGKRSPLYTTPPPFAARRLSSQPVRQRLQSRILSCSASWTASPRASAVAALTFRRDPTPQAGARRRQEEARRSGRSKSVRLCSVLAFVVQIATSRYFAYPPPRPPPSGEDFGASGRGSDPYFALLRSASFGRRFEQILRWTISRILRKLIF

SEQ ID NO: 192300 - protein, 76 aa, Zea mays
  Clone ID: MRT4577_106963C.1.pep
QLGAELGLQYKWGDKKMATNDQQCKEYWTWLNIRNVNSAYAQTDTIDRPNARGSSALTRGFAHLASVHAGHVMPGT

SEQ ID NO: 192301 - protein, 61 aa, Zea mays
  unsure (1)..(61): unsure at all Xaa locations
  Clone ID: MRT4577_106964C.1.pep
EGFPLGASKLVPVGYGLQKITFMFAIVDDFVSLAPLIXAPLPQSPSIXFVQSFDLVAFHKI

SEQ ID NO: 192302 - protein, 96 aa, Zea mays
  Clone ID: MRT4577_106965C.1.pep
MLRAPLLSEARDAAGRLRGVSGFSTASAPIPGLAGKVAVITGAASGIGRATAAEFVRNGAKVILADVQDGARRAVAPELGPAAAYARCDVTDEAQI

SEQ ID NO: 192303 - protein, 54 aa, Zea mays
  Clone ID: MRT4577_106966C.1.pep
FSNYQFKYNDWPPKQVGHPPVEECRNGSNAGTSNGKAARPKSHRFLRADWPLVA

SEQ ID NO: 192304 - protein, 45 aa, Zea mays
  unsure (1)..(45): unsure at all Xaa locations
  Clone ID: MRT4577_106967C.1.pep
XICDCXXFFXFXFLXXSTAHKNERAVLGKILYTRFIHLSPFWVXR

SEQ ID NO: 192305 - protein, 61 aa, Zea mays
  Clone ID: MRT4577_106968C.1.pep
ISIYFYLPVQSYDIKPYHEFIAPNSSMVVFFPSLSNMSFVLFTSSNHTMELEIKIVSQEIY

SEQ ID NO: 192306 - protein, 319 aa, Zea mays
  Clone ID: MRT4577_106969C.1.pep
MRAASSTVYPVYLSLHRHPNSHQASFRPSRANHDNTHKCTKPPKVLRRSLFSLPASFLLLHTSSSLAVDDANMPSTSTIDTTITDRIFMDFSVCPSYFRSDRPLGAELSSCPDSEPLGRVVFGLYGRLLPVTTANFKATCTAAAYRGTLVHKLLQGQFFAAGRQGPRHDKGEVQPPSGLVRNSETVNPKAFELRHARPGTLSLCLGQNDDDDDIKLNPNYHNLEFLVTTGPGPCPELDGQNIVFGTVLEGMDVITSIATIPTYKPAERIRLFNGFAQLIGDGRAQTARAMWDRPLKTVYISDCGELTVTKPSLSPPSLP

SEQ ID NO: 192307 - protein, 49 aa, Zea mays
  unsure (1)..(49): unsure at all Xaa locations
  Clone ID: MRT4577_10696C.1.pep
VKLGCLFASIPQVLIWIGTGRFFNQINNFNRIQGTQRITRHILLXYFPS

SEQ ID NO: 192308 - protein, 77 aa, Zea mays
  Clone ID: MRT4577_106970C.1.pep
LRHAPERQDHSAHSVTQARRATTWSPLPRSPPATPSRPPPPAAPEPLPGPPPRFSCWEEERPAIFQDRAVELLAGGS

SEQ ID NO: 192309 - protein, 122 aa, Zea mays
  unsure (1)..(122): unsure at all Xaa locations
  Clone ID: MRT4577_106971C.1.pep
EAAAWQAKALSEQAAAVALHAQLQQAXAXARASVEELTAXAXAGDAGPAESSASAFVDPRRTRPPPDHACLACRLRPASVVLLPCRHLSLCGECFAAGDADAAMPCPVSHAAGTGSVEAILC

SEQ ID NO: 192310 - protein, 72 aa, Zea mays
  Clone ID: MRT4577_106972C.1.pep
LQRKRTGHVVIGVFAWMPVRSCPEIGLKVLTKMRGALYTYSSEGPFTACTSSLRSCERRQLWRTGYITVSTS

SEQ ID NO: 192311 - protein, 84 aa, Zea mays
  Clone ID: MRT4577_106973C.1.pep
RPRAIKPPLSCTATRMRQHLLWSAVRIGLTAQVVLPCERRRVTPVHLWSWHPPMSSNRLRWSISYAGRLDTRSSGSSISITGAA

SEQ ID NO: 192312 - protein, 56 aa, Zea mays
  Clone ID: MRT4577_106974C.1.pep
RGSFRFSACWPRCWSFQFLPLRLAWAVPVFPVTVEGPGSFGLVSYQWFGCFVISFF

SEQ ID NO: 192313 - protein, 331 aa, Zea mays
  unsure (1)..(331): unsure at all Xaa locations
  Clone ID: MRT4577_106975C.1.pep
XKEGLSFVPIVHKVLSRXXTWKVSILNDGSVAVEVGGIELGQGLWTKVKQMTAFGLGQLCPNRSQELLERIRVIQADTLSNVQGGWTTGSTTSESCCEAVRLACNVLVNRLKPVKEQSQEKQGNVSWDELISKAIMIGVDLSAREYYIPGPSGSYLNYGAAASEVEIDLLTGASTIVRSDLIYDCGQSLNPAVDLGQVEGAFVQGIGYFMSEEYVTNSDGLLISDGTWTYKIPTVDTIPKQFNVKLLNSGFHKKRVLSSKASGEPPLLLAASVHCATREAIRAARNEPHCSGSKPSPSHFDLEVPAIMPVVKELCGLDNVERYLESLLSSE

SEQ ID NO: 192314 - protein, 120 aa, Zea mays
  Clone ID: MRT4577_106976C.1.pep
EDASVARCYGRVGGSVLSTSLSDPCSRCRSWPAPPARRHHPRPRPPTTSHASPLTPSRRLLFGPCPPRHSLPNLAFKFMSPSSPMGLLHRPVSPSATASNRRPCFTTDRTPCPVPALALP

SEQ ID NO: 192315 - protein, 58 aa, Zea mays
  Clone ID: MRT4577_106977C.1.pep
FCHAYGGLVQGVAYYPLADVSRLFHEILKTISLLIIWTLTLCIAKLVLNVYSRAPLLA

SEQ ID NO: 192316 - protein, 121 aa, Zea mays
  Clone ID: MRT4577_106978C.1.pep
KPALLKGPFILCTGAKITTLLKFKYIQGGQSKPNFLLLVFPAPHNKPIMFDNPFYKPGVTTNTGGSHMDWGPNIQRGGPFPKKTLGPMETNKRFMQICHTFFGNWGGHFLGLGNPQEFLKP

SEQ ID NO: 192317 - protein, 87 aa, Zea mays
  Clone ID: MRT4577_106979C.1.pep
MLLIGGEGFQHILGLVDTNLDGKEKIMVPMTLIKGGGRRFFNLVCKKGDIDMNQRARELTPEEVERLVTGVGHPWQVKVPDWFLNKE

SEQ ID NO: 192318 - protein, 113 aa, Zea mays
  Clone ID: MRT4577_10697C.1.pep
IFPKNFYFPKGKKTNFFWEKKNFLEKRGGKITLKGGIMPKKLFSLKRGTCLPTKKNGRLILNFFFFKKISLAGGGNLLKGESKNFPKIWAFSFNALEGPPLKKPHFTWDLGGK

SEQ ID NO: 192319 - protein, 81 aa, Zea mays
  Clone ID: MRT4577_106980C.1.pep
RYGTQATKPNTNTGNNSTPFKIMARVKVQIDTWLKILVKGCSLQCQIQLRTHDTQTLMVMTRSPWGSVSANGQSTLKCTLP

SEQ ID NO: 192320 - protein, 48 aa, Zea mays
  Clone ID: MRT4577_106981C.1.pep
IFTLCFPQNFFNVFFFFPIPIFKKLIPKISTYPLLLKPPYLQFFVQKE

SEQ ID NO: 192321 - protein, 92 aa, Zea mays
  Clone ID: MRT4577_106982C.1.pep
MASTCFRAAARVASAAGRSAAATRSAPSAARAAAAAHRASSFSRMPVELGCCAGLSLLPLHSAVAAARLTSRLSTASSCRALSQEMGLSVRR

SEQ ID NO: 192322 - protein, 75 aa, Zea mays
  Clone ID: MRT4577_106983C.1.pep
TSFCLNQLIETRYKNWILKRLVDSNQGLMRLLNLIAKLKKGCIEPTSLANGTTAPGYSGASIYRERPMLYLQIGV

SEQ ID NO: 192323 - protein, 324 aa, Zea mays
  Clone ID: MRT4577_106984C.1.pep
MAFHPATLFLLLVLAAVAPIPSNARHIITFAPSRAVNPASLAWDPTAQHFVVAGGGDAVLSVSDAGVTESIVSSGASCVAVDDRRRRLLVASPGSVSAFDLRSPRPHRLILSTPVADPAPPGGIAVDPHTGNAFLTVGARIYKLSVEGELATLASAPALGSVPLASLTAHVSRGFLLVGQPSSGSVLRVDMEDGATRTVSCALTPTAVAVRTDGAVAVGGAAGLRLVVSNDGWASCGVRDEAAPAPDGPVAAVAVRERRRVYALVGAAAMDGDNKWRIEEASWKSESEGEMVVVLVFVGVALAIFMFWRFQMRQLAGNMNKKIR

SEQ ID NO: 192324 - protein, 91 aa, Zea mays
  Clone ID: MRT4577_106985C.1.pep
NQPHGVLILYVHSKRATTPKLYQNGTHGVMEIGLVAPAKQHDDAAAENVEPSPFLPQGSVEPPLSSSELHGLIERRFGAGKMSAELGYLRY

SEQ ID NO: 192325 - protein, 81 aa, Zea mays
  Clone ID: MRT4577_106986C.1.pep
YIDLTWSLVHILKWMAELSLKQPLLQITDQRVEGALWTSDQHGWFCHVCCYVLRVWSRSRHPLSGPSELCVSGASMWLRLL

SEQ ID NO: 192326 - protein, 212 aa, Zea mays
  Clone ID: MRT4577_106987C.1.pep
TEGLLVSAINPVKCQSNLSTDVEINYRIQKDAQQEISTSMVSQSFGQSDIAFNSIDSAINDGVMLNRNSCPPAPPQRMRTFTKVYKRGAVGRSIDIGRFSGYEELKHAVARMFGIEGQLEDRQRIGWKLVYTDHEDDVLLLGDDPWEEFVNCVKCIRILSPQEVQQMSLDGDLGNNVLSNQACSSSDGGNAWKPRRDQNPGNPSIGFYDQFE

SEQ ID NO: 192327 - protein, 72 aa, Zea mays
  Clone ID: MRT4577_106988C.1.pep
MSSIPATTFTVILYVIICATAGTAVNLYLLDYVINSPFDCDTCHAPFSTNVIEYITVSKVRLDFTQFGNDKL

SEQ ID NO: 192328 - protein, 68 aa, Zea mays
  Clone ID: MRT4577_106989C.1.pep
KEFCGGGAFKKPPHFVFCPCRPPHVCIPGAWSRSCCLELCSPSGPHCWRFGVRRAPLSPVIGSQADGH

SEQ ID NO: 192329 - protein, 52 aa, Zea mays
  Clone ID: MRT4577_10698C.1.pep
GYFSVPPFPEKFNGPRNFFAGKNAGSRRCSYGVRSSVKNGELTIKAVYSNAQ

SEQ ID NO: 192330 - protein, 198 aa, Zea mays
  unsure (1)..(198): unsure at all Xaa locations
  Clone ID: MRT4577_106990C.1.pep
MMDAASLYHITTLLGEALRARARVYDAGEQITMRRTVQIDPYSIXTAHNRPKYLGPXSHHIPPDLIAEDYGYYAWDTADLSGDPETXFERNRELYVIHSHWRILMLLAWVFIDILIINDMKIIHPESVLAGAQIFSIAAVDYQKYCNQSYTLIILNMWLMHLVHMRFLQDYHDPGSMLKEYFHKVYNVVAFYAVPLYD

SEQ ID NO: 192331 - protein, 79 aa, Zea mays
  Clone ID: MRT4577_106991C.1.pep
LRPGGGPPSPSARDQTESARARTSPSRTMRRSPGRGARRIGRGLRPRPRPRPRRASSSSPHPPGARRGGRDLPRMGRRA

SEQ ID NO: 192332 - protein, 47 aa, Zea mays
  Clone ID: MRT4577_106992C.1.pep
VETLLNLPKKIQTFRNYPFPNLINILLLYPLLYSYTLTSHIHFTLNP

SEQ ID NO: 192333 - protein, 49 aa, Zea mays
  Clone ID: MRT4577_106993C.1.pep
PRSVCCNRPVGWYRINVTSLFFFFSLDIIPFHLDGSVRVNAHTTTHGDG

SEQ ID NO: 192334 - protein, 120 aa, Zea mays
  unsure (1)..(120): unsure at all Xaa locations
  Clone ID: MRT4577_106994C.1.pep
GLRACPNVAGPAAAPRXHQTVAEPAAAAPCPRQIVAESAADAVAAPAPETKSDAEPAAAPGGGDKPVAXESAADAGAAPAPXETKSXXAEPAAAAXXPAPXEIKSDAGRRWDPAPGQGQQ

SEQ ID NO: 192335 - protein, 54 aa, Zea mays
  Clone ID: MRT4577_106995C.1.pep
IYFFFFFFFFFFFFFCSETTFITRLFYFPFFSHHRFIIFLVQPCTWIIRVMQIF

SEQ ID NO: 192336 - protein, 107 aa, Zea mays
  Clone ID: MRT4577_106996C.1.pep
LALGACPLAAGGVSPVVRLGRGPLAALCPPARSSLAAGGVSSRSLPSVGSVLGWLSGPAALALWCLPVGAPGGPAFSCPWLVGGVVPRPFLLVPPGAVCSCACVCPR

SEQ ID NO: 192337 - protein, 98 aa, Zea mays
  Clone ID: MRT4577_106997C.1.pep
HDCANAIPDLSKMIGAVKGLVAQCEDLKLKYYEEMDKRKKLHNIVQETKGNIRVFCRCRPLSKDEVSSGPECVVDFDGSSDGDIVITNGGTKKTFKLI

SEQ ID NO: 192338 - protein, 84 aa, Zea mays
  Clone ID: MRT4577_106998C.1.pep
IFFFFFFFFFFFFFFFFFFFFGENPTPFFNPQKPPVGPPPTWGKPGFQKGPKGVFILGNNQFPLPKTGTVSRGGGGPLNPPKRN

SEQ ID NO: 192339 - protein, 120 aa, Zea mays
  Clone ID: MRT4577_106999C.1.pep
GREQKLTPPGPPNPKPRTARRTHTQTDTKIPCFSAVNGGGRSSGLGEEGEVEANSPERRVRERSGRRRRVGVGAATAVAAAARARIHGPPSVKYPLPSHGHAWEAGSCHFDSGEPPQPVA

SEQ ID NO: 192340 - protein, 49 aa, Zea mays
  Clone ID: MRT4577_10699C.1.pep
ISFFFFWEQQRFVICQQITHMIVIPLRNRYDMTIRYAWSDASGERVGRT

SEQ ID NO: 192341 - protein, 75 aa, Zea mays
  unsure (1)..(75): unsure at all Xaa locations
  Clone ID: MRT4577_1069C.1.pep
HFCTAIEDPPLSFSKGKLGKDGRHFFGYGDAPFLPNNSGKSDTPPVXGKEHAPVVNLDNPGVTADTKTSNYSTNN

SEQ ID NO: 192342 - protein, 65 aa, Zea mays
  Clone ID: MRT4577_106C.1.pep
ILTSTLFNNSTLWAAELQNHPADNRPRQVARTALSSKHSYYKTNETVVRNIKTRHGRGGIPQCLG

SEQ ID NO: 192343 - protein, 63 aa, Zea mays
  unsure (1)..(63): unsure at all Xaa locations
  Clone ID: MRT4577_107000C.1.pep
KKITAPSSTRRAENFFFLEKVPCTGVPMNXVTVEKRGPHNKTRVLCPNPKGSPKGCPKEVACF

SEQ ID NO: 192344 - protein, 216 aa, Zea mays
  unsure (1)..(216): unsure at all Xaa locations
  Clone ID: MRT4577_107001C.1.pep
MFNRXXFGKPKEQANAGALATLDKLNETLDMLEKKEKVLEKKAGAELERAKEFSKAKNKRAAIQSLKRKKLYEQQIEQLGNFQLRIHDQMIMLEAAKATTETVDALRTGAKAMKAMQKATNIDDVDKTMDEINEQTENMKQIQDALSAPLGASADFDEDELEAELEELEGAELESQLLEPVVTIPIHTTPVPGKAQPTRPAPQKASAXEDELAALQ

SEQ ID NO: 192345 - protein, 167 aa, Zea mays
  Clone ID: MRT4577_107002C.1.pep
ELPAWHPDRTLASPPSSVTIPSQHGLFRRICNDGICSKDVCDQRSVTKIHCDRAARITQERSRNPEGADEEKGVKPTPAVLGVTKEEIKEHILRLGNDVFYARLDTIRQRHTIPHQQSRSTGLEVGTYQHVVSVLSLVHSSMHPPISAIDRHKINSNTKKKKDNAPT

SEQ ID NO: 192346 - protein, 158 aa, Zea mays
  unsure (1)..(158): unsure at all Xaa locations
  Clone ID: MRT4577_107003C.1.pep
HRRGRGRDAAARSEVSAPEPDPPPFARFFRYPQYAXARGGAGGXGAEETSRASAVADVEVGVVVDAHASLRVMAPRRPGQLLRMVAGMQALGLAVLHLNVATAAVDATALYTLSLKVRRRRTLPDGWVASKATVPFSFRPRTRTNRRRQSLVACHTLA

SEQ ID NO: 192347 - protein, 63 aa, Zea mays
  Clone ID: MRT4577_107004C.1.pep
KGPPFLNWFRQKIFPILPKISHDFGGHKFSPPKKFFFPQTFFLKSFYLKFKGIFFPSPQFFKP

SEQ ID NO: 192348 - protein, 58 aa, Zea mays
  unsure (1)..(58): unsure at all Xaa locations
  Clone ID: MRT4577_107005C.1.pep
MSGRGKGGKGLGKGGAKRPRKVLRDNIQGITKPXAIRRLARMSAVXAISGIILRETRA

SEQ ID NO: 192349 - protein, 105 aa, Zea mays
  Clone ID: MRT4577_107006C.1.pep
MASGSRGGGGSDFSVVVVGSDAGAGAALLVPSDRHSWHDCLAEADACFSDLEERQVVRVQGTDRARRTIVRVVGKFFPGARIGHVFAPLTAAVARSGVDCYEKKK

SEQ ID NO: 192350 - protein, 48 aa, Zea mays
  Clone ID: MRT4577_107007C.1.pep
VRRDFFLSWYSQMLLEHGDRILSGATFVFGAGPVEVSLKVGGIHWHYF

SEQ ID NO: 192351 - protein, 474 aa, Zea mays
  unsure (1)..(474): unsure at all Xaa locations
  Clone ID: MRT4577_107008C.1.pep
MESRALLHARPAALPHRAGLRLHLPLLRPRAVSRSPAAKPALQSPLLASRGPFLQRHDAVLGNGFVKRRAASAGGDVSFRAQAAASAAVPAPQPEESTKKLLGIDVKTLKKIVPLGLMFFCILFNYTILRDTKDVLVVTAKGSSAEIIPFLKTWVNLPMAIGFMLLYTKLSNVLSRXALFYTVIFPFIAFFGAFAFVLYPLRDVIHPTALADKLLAALGPSFLGPVAILRIWSFCLFYVMAELWGSVVISVLFWGFANQITTVDEAKEFYPLFGLGANIALIFSGRTVKYFSNLRKTLGPGIDGWEVSLKGMMSIGVLLGLVITSIYWGVRVFPLVDPSLPKADRKKKKEKPKLGMKESLKVLLSSRYVRDLATLVVAYGISINLVEVTWKSKLKAQFPSPNEYSSFMGDFSTATGIATFTMMLLGRIILRKFGWGVAAKITPTVLLLTGVGFFSLILFGQPLTPMLATMGMTP

SEQ ID NO: 192352 - protein, 77 aa, Zea mays
  Clone ID: MRT4577_107009C.1.pep
PWLTDFGLLGSVLVCVGLCVLSSKVSCSCSKNSKANLRFASCHVLVSDCLVFFRKHFFFQINILKHPRPLRLIGIKF

SEQ ID NO: 192353 - protein, 72 aa, Zea mays
  Clone ID: MRT4577_10700C.1.pep
TLGTQASLRVARTILTPKQGKRGTCTWHSKGTGNLSDSSQGVAITLQGSPHHFFDLKQAAVYLWAAVVYQRG

SEQ ID NO: 192354 - protein, 183 aa, Zea mays
  Clone ID: MRT4577_107010C.1.pep
APPIPAPNPTDDWVDGSWTVDCSCGVTFDDGEEMVSCDECSVWVHTRCARYVRGVHTSFSCHKCRRSKRVPSSADEAEVAELLAELPTHRPPPLYRRWAEVPLPARVHVHGLPGGGDGALFRGAPAFSAALWRCTGYVPKRFGFRYCEFPSWADDNDGADALFALAREKPREMTDDVLIGTEP

SEQ ID NO: 192355 - protein, 106 aa, Zea mays
  unsure (1)..(106): unsure at all Xaa locations
  Clone ID: MRT4577_107011C.1.pep
MRIERWASDVDYRCFXGPSTRDTDEHCLHIVLRNYGEELXTRTIHDQETQMSRGYLFLTXYSMLKAXRNHVRGRNGRELHHRYITANQGQSRGRRGVRRRAHRGGL

SEQ ID NO: 192356 - protein, 93 aa, Zea mays
  unsure (1)..(93): unsure at all Xaa locations
  Clone ID: MRT4577_107012C.1.pep
RASLHPKPXEATGKLLTLALANIGAALPTLWRVKKALADEQRISSSRMCYSRFLEKLDKGRTKKVDLFGNGTIAIVEAISPEIANRVQRGRVP

SEQ ID NO: 192357 - protein, 34 aa, Zea mays
  Clone ID: MRT4577_107013C.1.pep
GAEAHDFNWTRVHYIGVITEGQTYGPCLSSGAKQ

SEQ ID NO: 192358 - protein, 40 aa, Zea mays
  Clone ID: MRT4577_107014C.1.pep
HEARACFGYSHEYKLSVQSSYQSKLQGQAKTQTAVKTQVL

SEQ ID NO: 192359 - protein, 132 aa, Zea mays
  unsure (1)..(132): unsure at all Xaa locations
  Clone ID: MRT4577_107015C.1.pep
VGRSPSSGGGXPDAEPRRSASLGTTRNTPSPSGGPPSCSRSASTPTPRSWRPGRSTCTCSPRSGARTPSMSTAEQASTLLPXXSTRTSRSSSSSRHLPDRASAAGAGAQRPISEQDERQGRSTRVESRSGCV

SEQ ID NO: 192360 - protein, 39 aa, Zea mays
  Clone ID: MRT4577_107016C.1.pep
IAQGATHKIAQQTVYRNRWSPNTSQTVRSCGMAELNNKP

SEQ ID NO: 192361 - protein, 112 aa, Zea mays
  Clone ID: MRT4577_107017C.1.pep
FIKDRLTFRKKLGFLNYNFGGGRSSYFFLKEGKKKLTNYALPVLYMPNKEVVPLFGSKKNHCSKKEKGFFSRRKGLFCSLGLGKTAPIILWNWEGIFFIFEFPFKKGKFFIF

SEQ ID NO: 192362 - protein, 55 aa, Zea mays
  Clone ID: MRT4577_107018C.1.pep
MVLRRLRGLKKVIVPEGGARRKAAADVVLRQAAEYICALELKVAVLRRLSDMYGV

SEQ ID NO: 192363 - protein, 71 aa, Zea mays
  Clone ID: MRT4577_107019C.1.pep
MNYMGWGFSSRWQQLKHESSRGPLGFTDPHANRLIKLRGLHYKLRPPLKTPPFYLNPQGRALGGLSNNGGG

SEQ ID NO: 192364 - protein, 209 aa, Zea mays
  Clone ID: MRT4577_10701C.1.pep
MIWHERAKHARPPSLTPNQSHRRSSWTTMASPLLKSHSQLAAAAALHSVRRADRCPATIHLGKFHDHGLRSGRSKRSGSAKVGAFPSLDVVPLMVTMVEHVDMSRDYVVTKSIWHLSDAALKSVYTFYAMFTVWGVCFFASMKDPFYDSETYRSQGGDGTVHWYYDRQEDLEASAREELLREELLEEIEQRVGGLRELEEASKEEQLTK

SEQ ID NO: 192365 - protein, 104 aa, Zea mays
  Clone ID: MRT4577_107020C.1.pep
GRDHPARPYYRALVSPSPAFSNMSPSIDPHAGEVGAATRDRPPRGRATYCAAPRNQLLRSFAGYEIDGHDERYEPGQERALRHRSALLSIAEGQCILLTHLSFL

SEQ ID NO: 192366 - protein, 73 aa, Zea mays
  Clone ID: MRT4577_107021C.1.pep
KGGHHIWRSIVTHKKMVTPMNVKFHRSVQMTRDRQGLIKIKALSDDAGWMEEKPSHQVLMNDDMPACLPAQRD

SEQ ID NO: 192367 - protein, 823 aa, Zea mays
  unsure (1)..(823): unsure at all Xaa locations
  Clone ID: MRT4577_107022C.1.pep
MPRLHLTSTAMAGTNGAPRLLRLPTTATTSTSSTPLLRLLALLQLLCLASALNQDGILLLSFKQSLASDPLGSLSGWGYADATPCAWNGVVCSPDSRVVSVVLPNAQLVGPVDRELALIENLRHLDLSGNALSGTIPPDLLRAPELRVLSLAGNGITGGLPEQVGQLRSLRALNLAGNALSGAVPQNLTLLPNLTAVSLANNFFSGTLPRGGFPALQVLDVSANLLNGTLPSDFGGAALRYVNLSSNGIAGAIPSEMASRLPANVTIDLSYNNLTGAIPSVPPFSAQRPTAFEGNAELCGRPLDSLCGFTSSSSAAAEPPNATAKSPPAIAAIPRDPTEALPGDGSSSAAGASASGEQRGRMRLATIVAIAAGDVAGIAVLFVVVMYVYQVRRKRQRQEXGKAEDGRRVQEAXPTTLRTLSAGAFPAACARRPATTATTRRKSRTRRRPPSQITRTARRPELKRRAXEDGRGRRGXLVTVDGGAELELETLLKASAYILGAAGSSIVYKAVLADGAALAVRRIGSECSGVRRFGELDAHMRAVAKLRHDNILRLRGFYWGPDEMLIIHGFAINGNLANHSVKRKQGSSPINLGWSARLRIARGVARGLAYLHDKKWVHGNVKPSNILLDADMEPLLADLGVDRLVRSADGGGLTKPSSAALAGRFGGSKRSAKSLPDLSPPPSHVGGTAAQPASPAVDTAAHYRAPEAVRSPRASGKWDVYSFGVLLLELVAGRALTSLELCQCAAAEGKAQALGVVDPLLRREVEGREEEEAVASCLRLGAACCAMVPSKRPSIRDALQAVERMIPAAVASSSTSTAASHRH

SEQ ID NO: 192368 - protein, 46 aa, Zea mays
  Clone ID: MRT4577_107023C.1.pep
LKSLRQNMTEKSTCTFQATGGRNGKHENSNLLMLLNNQRLICDFTT

SEQ ID NO: 192369 - protein, 63 aa, Zea mays
  Clone ID: MRT4577_107024C.1.pep
GTLTLDLCDVRHRHRTIPFSCHSVGAPFCLPGLVNCLYVHLRVRRGGRGPLRPPQICSNATWS

SEQ ID NO: 192370 - protein, 106 aa, Zea mays
  Clone ID: MRT4577_107025C.1.pep
PTRPDDIKYDEEYVLNARGMNLFTCQWRPLNSEPKALIFLCHGYAMECSISMRGTGTRLAQAGFVVHGMDYEGHGKSSGLQGYINSFDDIVVDCSKYFASVCEKEE

SEQ ID NO: 192371 - protein, 46 aa, Zea mays
  Clone ID: MRT4577_107026C.1.pep
RPFSFVLIFQICTPYFGMIRILRKTNSRGPVKSANFAAIIHAPRTG

SEQ ID NO: 192372 - protein, 85 aa, Zea mays
  Clone ID: MRT4577_107027C.1.pep
KIVHIRFLQEGVHMSEDPKVVLTGFLWRPFVVFLPPYGICWATLPEAQGEGAQNAALLPGCNRCLLGVNRSTQYLMEGHSQDMFN

SEQ ID NO: 192373 - protein, 52 aa, Zea mays
  Clone ID: MRT4577_107028C.1.pep
PVQAEVADVMVMVAGHFDLIPAAETGICFNVIMDCYDWNFPHSMFTIERPLA

SEQ ID NO: 192374 - protein, 92 aa, Zea mays
  Clone ID: MRT4577_107029C.1.pep
TRSKAMDWGLNCLTTKTYRPYGLSKNYWAKIFGKLLNAGPRWRRKKKQHGGFIFTHPGHFIYRTGARLLGSFGGRKGHFSNRLSRGDGFTGG

SEQ ID NO: 192375 - protein, 106 aa, Zea mays
  Clone ID: MRT4577_10702C.1.pep
SRAKTKKNSLLFFFLFSLAGGGGGFLDQPVFAGAGPGGEPCLARVKPYPSGLVFSGTECTAGARRRGPGAQSASGRGCAGGGTSWHAGAGARRERSGGSGSGQWGG

SEQ ID NO: 192376 - protein, 56 aa, Zea mays [sequence omitted]

SEQ ID NO: 192377 - protein, 122 aa, Zea mays
  Clone ID: MRT4577_107031C.1.pep
KKHPPFWAGSRTRLIKPHIRKASRGAWKQASLEQNLTKGRVVVVGRPMHEKVGASGKGLNSSNGSKYDVPKATTKAAGPTRREPGRVFACPPREKKGGRQNRHLGRGGEGPIRNGSAREGGG

SEQ ID NO: 192378 - protein, 61 aa, Zea mays
  Clone ID: MRT4577_107032C.1.pep
RNPICNVHTINNPIYNLKEFRASPISYHSHFNVKRFNDHRYLATTNTFRTILVSQIILSIP

SEQ ID NO: 192379 - protein, 200 aa, Zea mays
  unsure (1)..(200): unsure at all Xaa locations
  Clone ID: MRT4577_107033C.1.pep
MSRPNTRNKSKRPRSDESINPSAAVFKKIHSAGDISKDDICQLYMVWKPPCHGCHGNTKDSPNCFCGLIPAANGVRKTGLWQKMQEMVRGLGPNPSKDLRDSTDTPAGLTNLGATCYANSILQCLYMNIAFRSGIFSLELDVLEKHPVLDQLARXLFAQLHSSKMLFIDSAPFIKTLELDXGVQQDSHEFLXLXLSLLEQ

SEQ ID NO: 192380 - protein, 93 aa, Zea mays
  Clone ID: MRT4577_107034C.1.pep
RKAHGGVSAQSKWRVFGLPPSDPRGVRRLLSIRQHEELCGCSIPVLIGDSRRLSFVTGIGWGISSSGTSDHSAVFIQRPAGAKKGVPSLVRVE

SEQ ID NO: 192381 - protein, 104 aa, Zea mays
  Clone ID: MRT4577_107035C.1.pep
MSSSAENDPTVSVTERGGKDKHEDGGDKEQGGGGVIATLLSTSRRKRKTELRRKEQRTAGALLLPFTKRSEAEDAGIVVDLILIPLALVKLLPLAYGALLFCIV

SEQ ID NO: 192382 - protein, 102 aa, Zea mays
  unsure (1)..(102): unsure at all Xaa locations
  Clone ID: MRT4577_107036C.1.pep
MAGSVITHNTIAHLNLFQMTFKRKPPGITHYRAKIRLTSQHTFMYSTPXYRXFVVRFITNDITSHIISASTAXDMVLASAYSHELPQYGLEFGLTNYTAAYC

SEQ ID NO: 192383 - protein, 175 aa, Zea mays
  unsure (1)..(175): unsure at all Xaa locations
  Clone ID: MRT4577_107037C.1.pep
MSSSAENDPTVTVTERGGKDKHEDGGDKEQGGGGFIDKVKDFIHDIGEKIEEVVGFGKPTADVCGIHIPHISLHRADLVVDVLIKNPNPVPIPLVDIDYLIDSDGRKLVSGLIPDAGTIHAHGQETVKIPVSLVFDDIKSTYKDIQPGSIIPYLVRVVLLXVDVPIXIGRVKIPD

SEQ ID NO: 192384 - protein, 124 aa, Zea mays
  Clone ID: MRT4577_107038C.1.pep
FVSSPPPTTGLLSRRHGCTARGFHSLRPRSEQGGGGFIDKVKDFIHDIGEKIEEVVGFGKPTADVCGIHIPHISLHRADLVVDVLIKNPDPVPIPLVDIDYLIDSDCRKLVSGLIPDAGTIHAH

SEQ ID NO: 192385 - protein, 224 aa, Zea mays
  unsure (1)..(224): unsure at all Xaa locations
  Clone ID: MRT4577_107039C.1.pep
MSSSAENDPTVTVTERGGKDKHEDGGDKEQGGGGFIDKVKDFIHDIGEKIEEAVGFGKPTADVCGIHIPHISLHRADLVVDVLIKNPNPVPIPLVDIDYLIDSDGRKLVSGLIPDAGTIHAHGQETVKIPVSLVFDDIKSTYKDIQPGSIIPYLVRVVLLVDIPIIGRVKIPIQKDGEIPIPYKPDVDVEKIKFHHFSFEETTATLHLKLENKNDFDLXLNLLE

SEQ ID NO: 192386 - protein, 122 aa, Zea mays
  Clone ID: MRT4577_10703C.1.pep
CLNGQDSVCLIRDDISRGAVHVVVDGAAHLVHGRLSVRLGRVGLGFAGYVVGRLRQGLFVLCPAHLSGLGLRALVVAWCGCLRGRRSVIVKDLVGWFSGLEFGCSVGEDSVRSCSWIPARPA

SEQ ID NO: 192387 - protein, 164 aa, Zea mays
  Clone ID: MRT4577_107040C.1.pep
ATHEWRSRTRMRVAGCAVWTRRRDDQPIVARRRTGSRRVPVHHGTRRSPDNLLPLRVCDTGGREGSAAVKLVSLRLLLICPECTSGSWRPSLLTAHGFSFTALMTTAAPIPKQRSAIGRRSQHQRRRPVLGIFREGHSAVIRRLEVHPSRRPCIHGFGRVSPGR

SEQ ID NO: 192388 - protein, 71 aa, Zea mays
  Clone ID: MRT4577_107041C.1.pep
QSTYTYIKTYTHSSFQLLPFMIFYSQTQFTICITHPQTHVKHSLLMPNIPFNTFLITLIHNLVCITPNYTL

SEQ ID NO: 192389 - protein, 312 aa, Zea mays
  Clone ID: MRT4577_107042C.1.pep
MSSSAENDPTVTVTERGGKDKHEDGGGFIDKVKDFIHDIGEKIEEVVGFGKPTADVCGIHIPHISLHRADLVVDVLIKNPNPVPIPLVDIDYLIDSDGRKLVSGLIPDAGTIHAHGQETVKIPVSLVFDDIKSTYKDIQPGSIIPYLVRVVLLVDIPIIGRVKIPIQKDGEIPIPYKPDVDVEKIKFHHFSFEETTATLHLKLENKNDFDLGLNLLEYEMWLGDDSIASAELTQTAKIEKQGITRMQVPFSFRPKDFGSAVWDMIRGRGTGYTIKGKIDVDTPFGNMKLPISKEGGTTRLKKEDDDDDDDDN

SEQ ID NO: 192390 - protein, 99 aa, Zea mays
  Clone ID: MRT4577_107043C.1.pep
HAPPCTASLMHSTAMLPDGIQPCQPQGKSLTTAQAWWKEHTSPPIVAAFRKCISNAMKLDNRIHTYIRRFDWLAHQGRNVPTFTRSAPNLAATSNTLIR

SEQ ID NO: 192391 - protein, 319 aa, Zea mays
  Clone ID: MRT4577_107044C.1.pep
MSSSAENDPTVTVTERGGKDKHEDGGDKEQGGGGFIDKVKDFIHDIGEKIEEVVGFGKPTADVCGIHIPHISLHRADLVVDVLIKNPNPVPIPLVDIDYLIDSDGRKLVSGLIPDAGTIHAHGQETVKIPVSLVFDDIKSTYKDIQPGSIIPYLVRVVLLVDVPIIGRVKIPIQKDGEIPIPYKPDVDVEKIKFHHFSFEETTATLHLKLENKNDFDLGLNLLEYEMWLGDDSIASAELTQTAKIEKQGITRMQVPFSFRPKDFGSAVWDMIRGRGTGYTIKGKIDVDTPFGNMKLPISKEGGTTRLKKEEEEDDDDDN

SEQ ID NO: 192392 - protein, 37 aa, Zea mays
  unsure (1)..(37): unsure at all Xaa locations
  Clone ID: MRT4577_107045C.1.pep
LQIASLATQKPHESLPTSRTGGFLGKTPTXVTYLTTE

SEQ ID NO: 192393 - protein, 424 aa, Zea mays
  Clone ID: MRT4577_107046C.1.pep
MIKEDENLAKKKKSSPEPKVAVSKKRKAPALKPKADLEEVPSTPSATDAEEILKVMTESLPNNLSPLGPELMKLLQKKKKELSAAEKPAEPKKRRIITVIEAIEETPPSTSAPKTAAAKAAPAEASTSEATAAEATDLENTLIDIDEMILNMAEEETAAATEETPAAVPEKGEKIPGKEKEPVEDTSDEENFNFQNIIGQELSKAENEELKDYAISCGYQPGALLFGGVAKESLGCLRDRVGAKVVSTLSKSVGFPKLETDLSRYQRQHIVGSLFYSNFKSLLLSKSLRMQQDLEDKKNEFIIEGLEKKIKDHEAALEKKDFVLQTMEGEIDALDEVIAGHGDFCALLASRGTTAAFMKAGCTHGNIVNRPNFSLSPADLDDIPGLTRSIRNRFITQIWAKGARNLAGDKARSHLKPDDEAEEH

SEQ ID NO: 192394 - protein, 94 aa, Zea mays
  Clone ID: MRT4577_107047C.1.pep
LRGRLRLVAVVLIDHLGDVLLERDLAAVPRDLEEIDKEIEDKKTELEPKVVEAYEASPPEVKALFKDKKPVKVIKKNSAAVTKFLDELAKIGRT

SEQ ID NO: 192395 - protein, 60 aa, Zea mays
  Clone ID: MRT4577_107048C.1.pep
RRGATVKRLTVLIASAHDLLRFSVILLAAGVSSGLQPAGPVQAAVRMDPAWHTLRSTDIV

SEQ ID NO: 192396 - protein, 59 aa, Zea mays
  Clone ID: MRT4577_107049C.1.pep
IWFNVICHPSRYNVTIYPSRYNVTICEPNSYINWHPNELPDGRTVCLIHISEDSFTSNI

SEQ ID NO: 192397 - protein, 58 aa, Zea mays
  Clone ID: MRT4577_10704C.1.pep
VKINPTKTMVVKTFKGNPPLGRFAVRTIRKTVVVEVIKSVKKKEPTGAKVTKATAKKK

SEQ ID NO: 192398 - protein, 217 aa, Zea mays
  unsure (1)..(217): unsure at all Xaa locations
  Clone ID: MRT4577_107050C.1.pep
MATEKRSRRRSPSAATPSASLTSSSNPEAAILHSPSPSLDLIPDITSRXSPSRTSSLCAPPAALTAPSFRRPARPSPASPRSSSSPFSPPSPRRYSTSRSAASTASASPGAITCPPPAAPSTTRTATSSPPPPRPPTTPRGSCSSTSSPASSSASPRSPRRSPASSSPTTWPPSSSCPAGPLSSTATLGTRSGAWPPRMRPTLLKICSSSMTPSTPW

SEQ ID NO: 192399 - protein, 112 aa, Zea mays
  unsure (1)..(112): unsure at all Xaa locations
  Clone ID: MRT4577_107051C.1.pep
REIAIMPVQWHALALGLFASIIAPFGXFFASGFKRAFKFKDFGDSIPGHGGFTDRMDCQMVMAVFAYIYYQSFVMVQDLSVETILEQILRNLTFEEQRELYGQLGKLLVRAN

SEQ ID NO: 192400 - protein, 224 aa, Zea mays
  unsure (1)..(224): unsure at all Xaa locations
  Clone ID: MRT4577_107052C.1.pep
TAMLFTYGRFLSHQLVNTMTADKLLYKLVSRLIKYQMFICYFLYIAXFILPASLIAINDVAAYFFGFFFGKTPLIKLSPKKTWEGFIGASVTTLLSAFVVANFMGHFQWLTCPRKDLSTGWLYCDPGPMFTPEGYDLPGWIPQWFPWREIAIMPVQWHALALGLFASIIAPFGGFFASGFKRAFKFKDFGDSIPGHGGFTDRMDCQVCTFNLICFQLHIYWWWF

SEQ ID NO: 192401 - protein, 64 aa, Zea mays
  Clone ID: MRT4577_107053C.1.pep
IREAIRPGIVPTYQSDTTEQGLTLVCSNWYHLAHAHAILLPLCPELIRRVRNIHDSPNCFPLAK

SEQ ID NO: 192402 - protein, 104 aa, Zea mays
  Clone ID: MRT4577_107054C.1.pep
MAERVSRLSTEKAVVIFTTSQCPMCHTVSSLFSELGVCAAVHELDKDPRGRDMERDLARRLGRAPPVPAVFIGGRLVGSTDKIMSLHLAGKLVPMLKGAGAIWL

SEQ ID NO: 192403 - protein, 50 aa, Zea mays
  Clone ID: MRT4577_107055C.1.pep
CRRERGWLDGSQLAADSTSGVTSKHHIFLAWVPSRVSIEGGGDLDQEPRA

SEQ ID NO: 192404 - protein, 64 aa, Zea mays
  Clone ID: MRT4577_107056C.1.pep
NLCKKLTKCQNKSWTKKKQKRPIGKHYSYKKGNRKIMDMVHWKNYKRGMQNNLKYGLLRLKLGI

SEQ ID NO: 192405 - protein, 81 aa, Zea mays
  Clone ID: MRT4577_107057C.1.pep
RYGSRRLVTTLHACHIFMCKFSTEEVYHIFESAVMVAAHSQFMDNCVVDRPRSMYPIPHCMQSLQIFIMCQMHMYHGSHAI

SEQ ID NO: 192406 - protein, 135 aa, Zea mays
  Clone ID: MRT4577_107058C.1.pep
MAAADERKQRSSLLQVHVPSWSGRGALSHGVKTTRPCSVPQTTRARATAAQRTACPVALTPRQGKRHLWQAKRASFHLRHDDRVKKGTGKGDISKGILLREGSGPRALLLIRGSKAGPSEGFDSRPRALGLQAHY

SEQ ID NO: 192407 - protein, 418 aa, Zea mays
  Clone ID: MRT4577_107059C.1.pep
MRGKANCCCLARVQHSVLCLGDCGRLHRGVAQHVVRREGGTRVLGRSRSRVRGEDGSEDLSVRFGAASARRCGVGGQVDAAVGAEVVAAGEGFSADDTVNATHAPGLQLLGFNGWFLSPVRDVNEGLPAVTFALGPLLLLQRLPASHPEFVVPQALRWLRLRSAGRGVCLGRDPCGDLGYDGPSLVLASSFEVEDLFVGSRIVYPSESYLSRKVMSEDPATEAVEKRERCSGRKTFSEETFDAEGVPPFSTLRMAQQCQPSTSVTRRSAEGEGATIDMAESGPTVMVATGERKQQSSRLQAHVPSWSSRGALSHGVKTMRPCSVPRTARATTAPQTTHPVALTSRQGKRHLWQAKRATFHLRHDDRIKKGTRRGDISKGILLREGSGPRALLLIRGSKAGPSEGFDSRPKALGLQAHY

SEQ ID NO: 192408 - protein, 45 aa, Zea mays
  Clone ID: MRT4577_10705C.1.pep
TTRPMNTVLPCSQRSSSGYQLPRKTTPSISWEGSPLIVLAASDDP

SEQ ID NO: 192409 - protein, 111 aa, Zea mays
  unsure (1)..(111): unsure at all Xaa locations
  Clone ID: MRT4577_107060C.1.pep
RPHPHTQLHPCSCQQPHASPCXLLGTCGVGITPILGQRVQFLRHQCSPTATPYCLPQGQSLRQQCCQQLXQVEPEHRNQTIFGLDLQSILQQQPQSGHVAGLVAAHIAQQL

SEQ ID NO: 192410 - protein, 95 aa, Zea mays
  unsure (1)..(95): unsure at all Xaa locations
  Clone ID: MRT4577_107061C.1.pep
GSPGWGSGGEQNETAASDVEYRCFDGGPDWATDDHSLNNGFSTYSQVLESNIILDRETHRSRDFGSTTXYTEEAMRHAIQGMNXKEQDGRNITAN

SEQ ID NO: 192411 - protein, 280 aa, Zea mays
  unsure (1)..(280): unsure at all Xaa locations
  Clone ID: MRT4577_107062C.1.pep
AHFQPRADTIRKELTQLPTTQDFSWAPYAGHWHKRHWDDLHSFSTRWFRPDPLCCKQQQHGQHSRCTADAALGSVVEVNLQCQISLLPSEHNNGHRTTSPSPTSEGRGRHPLRDRQDLEAGLLFSPHGSSESMLPPPADTASSTTVSVHGGEQHTGVTLEQLEEIVLPRAVDHFQRNTEATVYQTLWKAVHGAAYIHFAKPATGSAEAAPPGARRASRGASSWRRRRKLQVRRRREDLELHRQTRVISHVLDLWGAHAPVELRGLVLNWIRKXRPASRVP

SEQ ID NO: 192412 - protein, 54 aa, Zea mays
  Clone ID: MRT4577_107063C.1.pep
HRAACSSGFVAAGLPCLTGAHVSYGTRHISNSGGASGIPAAARATSKAEGDEPM

SEQ ID NO: 192413 - protein, 63 aa, Zea mays
  Clone ID: MRT4577_107064C.1.pep
APAGWEVWAGTRVCRSSISPAADIPSPRLSMGAGSPLFAFPSGKKKKRACGAGCGLLQRIPAG

SEQ ID NO: 192414 - protein, 73 aa, Zea mays
  Clone ID: MRT4577_107065C.1.pep
HEVMQEPPPPPLRRRRCVHTAGWCRRDLAMRRAATAEGSRQQHLHILLAPSLSLKISLLSPSVLHTCLDILLV

SEQ ID NO: 192415 - protein, 73 aa, Zea mays
  Clone ID: MRT4577_107066C.1.pep
RRLPDRKITCPTYRTQQCKVAKRAKMTPPTERQLPNNRNRGAKSKNSNPSRNTRTNNIATVDSTTTTQAQVNN

SEQ ID NO: 192416 - protein, 161 aa, Zea mays
  Clone ID: MRT4577_107067C.1.pep
MGSQSCGSCYVRSIVDRMKPRCLEGKPRRRETNTVRTRSRAEARQGTLEDILYSPQSIDGDAPGAPSPRRHSPKVCPLNMDCAYENNSPNVRESFSIDRMSLRSQNSIVRRVSFRLPDESDVFIIPARKDPDEYSAHDESTEDVSEEVDPKKLVKTPRRNE

SEQ ID NO: 192417 - protein, 405 aa, Zea mays
  Clone ID: MRT4577_107068C.1.pep
GNKGIITVDVILAILLTWADAWSRGKYAEVDKQRSSGSGGYIGGLHQRYESRLGGYSPRKKKTSLQAEQATTKTPSKVIQSPEKKSATWDQPPVKANQSNFPTTFLPTVGQMAPTPFSFSVIKDPSTTAVTMLAGNSLTADSVQLTQATRPLRRLHIENLPDSATEDKLIDCLNDFLLSTGSKLQRSKPCLSCTINREKRQAFVEFLTPEDATAAISFDGRSLNGSVLRIRRPKEYVETVNVTPKKAEETALISDVVADSPYKIFIAPRVRPRVRPRVREIVSAFGPLAAYRFLFNNELGGPCAFLEYADRSVTSKACAGLNGMMLGGRVLTAVHVFPNPHVEAANEASPFYGIPDNAKLLLKEPTKVLQLKNVFEREEYMLLSKSELEETLEDVRVECLEQSNL

SEQ ID NO: 192418 - protein, 312 aa, Zea mays
  unsure (1)..(312): unsure at all Xaa locations
  Clone ID: MRT4577_107069C.1.pep
MERPWRDKDKGAAAPAAGRARRYGDQPSFSSTLLDAIYRSMDEPDDGVTSSSSTAAKKQNQDLRHSCYYYKASLAAGSYRGSSRAAAPRGPQAATTSSSSDQCSSYGGFSSSEAESSQHRRLRPIRTSLATTAVAVAAPALAPEKKKAGVSIRARLRDXSAASRRPXGPGARLAGFLNAIFSGRRAPPSASSCSRSCLSETPSTRGQPKRTVRFLDSDGGGERRRTVPVGVAXAGADAAPXMAVDSGDDDDDESSDASSDLFDLENFAAVDPDGGAAYSDELPVYETTRLVLGHRAIGHGYARTGGVPTRVV

SEQ ID NO: 192419 - protein, 81 aa, Zea mays
  Clone ID: MRT4577_10706C.1.pep
FMCLVIIHLLKSSSPSCLHLPILRRPQNMSKFYYYFNNTAAYHTTTSLYPIIKMTQRIIPSHRYFPLHYLLQMSLPFTRQT

SEQ ID NO: 192420 - protein, 65 aa, Zea mays
  Clone ID: MRT4577_107070C.1.pep
GVKFGGFTPKDLRAWGQKKKTTWGAFPCFDPQKKRKGGSTWSPKHPVNWGQNGRAFSGHPGFFSP

SEQ ID NO: 192421 - protein, 118 aa, Zea mays
  Clone ID: MRT4577_107071C.1.pep
LRADVTEDVEAGAEVGGGVCALLHYAGAGPHPRLQHHGSSTICGAYTGTRETGSSTQATLVFMPATLTSAGSTMRLPSTESTWGPRRTFVGTLKNSKTEVHHKTEGTMIGPKRSSVCF

SEQ ID NO: 192422 - protein, 94 aa, Zea mays
  unsure (1)..(94): unsure at all Xaa locations
  Clone ID: MRT4577_107072C.1.pep
MTYLAERYDLRDLTKRATPLRCRMSSSVHDHAYETVLRVXMIYLXIMICTLLRAYNLSKGHLHFNEPSPYPYIHIRNKDVPWGPDALFETYDLH

SEQ ID NO: 192423 - protein, 34 aa, Zea mays
  Clone ID: MRT4577_107073C.1.pep
TRRSISNSIIMRSRSIYTSRSKLCRCCYASFSSV

SEQ ID NO: 192424 - protein, 210 aa, Zea mays
  unsure (1)..(210): unsure at all Xaa locations
  Clone ID: MRT4577_107074C.1.pep
VGVFDNGGVRGTKNANSLFHSGTMVRGNAFTPKDGKGRGLRHEARRKEKFERLGNFAMAPTIDTNHEFTVFHYPDPSGKVPGLSVKFGSNDKSCYRWLATFGLIYVLGKHXSGRRLRXYTEKGRNFNHSVASAKPAVDDGDTASTETXDKPLVERKFTKSLRGVTRRTDIVKVSKGFPLTCSISELGKKATVKDTTLVNRRFDVAHILNA

SEQ ID NO: 192425 - protein, 77 aa, Zea mays
  Clone ID: MRT4577_107075C.1.pep
TIFFLFAPFSPSITFIGVDNLWFTNLSKEPFLLRKGQGDQKAKQQWRFANRASRLFSWNREGVPKKKLPNSIFLRVL

SEQ ID NO: 192426 - protein, 73 aa, Zea mays
  Clone ID: MRT4577_107076C.1.pep
PHLEGRIRRRVRYADDHRYDTCLSLSPEFLPTVKSSLNPGSSHDERYVGLLSISGETETLDMMPSSSTAPTAL

SEQ ID NO: 192427 - protein, 122 aa, Zea mays
  unsure (1)..(122): unsure at all Xaa locations
  Clone ID: MRT4577_107077C.1.pep
PFKQLFALNPAAYLQQQIFSFSXIDHEYFQXQQLFPFNQLAALNHHVYLQKQIVLPFSQLHPLIRVSLLTELQFVAFLQQQMVIPFSLLHAPQRVSFVQHHQTEPLASSQRQFIGGSLILND

SEQ ID NO: 192428 - protein, 57 aa, Zea mays
  Clone ID: MRT4577_107078C.1.pep
SHLPFLIFIILLSAPPQPESIFFKIYHLTTSLIPNTISIYNTTSHCYQQSPIIKSSL

SEQ ID NO: 192429 - protein, 59 aa, Zea mays
  Clone ID: MRT4577_107079C.1.pep
ARFNMHHTVGDIRSFIDAARPGAARPYQLQTGFPPKQLADPTQTVEQAGLANSVIMQKM

SEQ ID NO: 192430 - protein, 49 aa, Zea mays
  Clone ID: MRT4577_10707C.1.pep
MAWPRPGVRVAWSFRELTGCTSTQRRAPGPSTSGHNRNRPSWVGYVVGG

SEQ ID NO: 192431 - protein, 75 aa, Zea mays
  Clone ID: MRT4577_107080C.1.pep
VNFKLLELQSERKIHVRELPPCFTLVLELLFISSFPLSDYVHVYTVENLSQGALHAEPRGLRSRTCHFVHSVRCV

SEQ ID NO: 192432 - protein, 51 aa, Zea mays
  Clone ID: MRT4577_107081C.1.pep
SYTFLQPFTGDQHSSGGEHHTHLTDIRISLCTLTHPLFLSKPFPRNCLSLI

SEQ ID NO: 192433 - protein, 107 aa, Zea mays
  Clone ID: MRT4577_107082C.1.pep
DRVSSDISSLMKVLLVRCAATCHVKVALHAALLRYTVSSAPNKCSLALAEKDTGFLTVFQKNVPAGPLSLRTRVATTAPVATPISNTAATDGKKTVRQGLVDITGSY

SEQ ID NO: 192434 - protein, 337 aa, Zea mays
  Clone ID: MRT4577_107083C.1.pep
EILAEKYKDRLESSYRGLIHEVFSKVLRGLSSAKVTRPSTFRSCLDGYAVKSSLKAEDGLLYPLEKGFFFLPKPPTLIPHEEIEYVEFERHGAGGASISSHYFDLLVKLTNDQELLFRNIQRNEYHNLFNFISGKHLKILNLGDGQGRTSGVTAVLQSTDDDSVDPHLERIKNQAGNEESDEEDEDFVADKDDSGSPTDDSDAEGSDASMSGGEKEKPSKKEASSSKPPVKKKQKSGPDEGSQKKKPKKKKDPNAPKRAIAPFMYFSKAERANIKSSNPELATTEIAKKLGERWQKMTAEERQPYVEQSQVDKQRYAEESAAYRGAAAQQGSGAGSE

SEQ ID NO: 192435 - protein, 222 aa, Zea mays
  Clone ID: MRT4577_107084C.1.pep
GPGDAKAELEKACPRTVSCADIVAFAARDATRNLSYGAIDFQMPAGRLDGRVSLKEEAEKNLPGPFDSLDDLQKSFAAQGLGFNDMVTLSGAHSIGVARCRFFTNRLPPNPSDMDRDLARSLKATCDQNGLDSKVVQDPVTPVALDNQYYKNVHNGKVLFTSDAALNSTDDARKVVDGFANNAVDWYRAFADAMVKMGNIRDRTINRPKPEIREKCFIYNTY

SEQ ID NO: 192436 - protein, 251 aa, Zea mays
  unsure (1)..(251): unsure at all Xaa locations
  Clone ID: MRT4577_107085C.1.pep
PTCFYESDIASCPFIIFLSGKHLKILNLGDGQGRTSGVTAVLQSTDDDSVDPHLERIKNQAGNEESDEEVLLPLVNDSIXFTFCRLHVHFCVTPLQXDEDFVADKDDSGSPTDDSDAEGSDASMSGGEKEKPSKKEASSSKPPVKKKQKSGPDEGSQKKKPKKKKDPNAPKRAIAPFMYFSKAERANIKSSNPELATTEIAKKLGERWQKMTAEERQPYVEQSQVDKQRYAEESAAYRGAAAQQGSGAGSE

SEQ ID NO: 192437 - protein, 103 aa, Zea mays
  Clone ID: MRT4577_107086C.1.pep
ELISRRPPLCCCWVCLTCLALILSEDKMMTQGARTRKTAPRKYAGKGPRPPGPRAGTNRGETIRIEGKQTTGDQPNQPRERGCPHRGCLCTGGAAVHGQQGRP

SEQ ID NO: 192438 - protein, 60 aa, Zea mays
  Clone ID: MRT4577_107087C.1.pep
DVSMSRTYGLVLRVHALFALPPLGCPGSCGFQSPYLGVAHASTSEVLVMYECSVCRPPDA

SEQ ID NO: 192439 - protein, 140 aa, Zea mays
  Clone ID: MRT4577_107088C.1.pep
PPPSPSPPPPLLPPPPLPSPSLPPPPPPLPPLPPPPFPPPSSPPPPSPPLTTPPCPPSPPPPPLPPPPPLLPPPPPPPPSPPPPPTPSPSPPAPLPPPPPPPPPPPPRSPPRSRSGCRCACPPDFPALAPGPRPIRGPSI

SEQ ID NO: 192440 - protein, 61 aa, Zea mays
  Clone ID: MRT4577_107089C.1.pep
FKSFPTGVASDLIGKRSSYTNLIPGLLETGLIHRKAMPRAFFMPLTGWGLLLKSEAMGGLK

SEQ ID NO: 192441 - protein, 77 aa, Zea mays
  Clone ID: MRT4577_10708C.1.pep
KQIPRGGSPKGDISSYYSLTNFKSSQNKKTPKGLKHVKNRSMSSFGSSDGGPAPPFHPFFTLGTTGSAPAVLRAWAF

SEQ ID NO: 192442 - protein, 121 aa, Zea mays
  unsure (1)..(121): unsure at all Xaa locations
  Clone ID: MRT4577_107090C.1.pep
ADLVGSHLLYRLLERGDCAVEQDNLLTRLKDHLPHHLQNTSYKIIPHDAXEPIAXTSTQIYHHCLKQTXKHYTYNAIKTIXTQGVITLYILAYDIMTGSRHLLTSTIYGYGEPLHHHKVET

SEQ ID NO: 192443 - protein, 67 aa, Zea mays
  Clone ID: MRT4577_107091C.1.pep
PKSTIPGTAALPPALRCQRGRAPPSPLFLPTALIALWIAILSTGHAGTDANSSRIRSRWRPKQHRDY

SEQ ID NO: 192444 - protein, 315 aa, Zea mays
  Clone ID: MRT4577_107092C.1.pep
QGFLSSPFPSKVEAEYLHGQAAPSYSTTATVFWPYATRRRKRAEDGSDLSLASDMDLDADAQRAAVRSFLTWSSEEWTHAMNASEDKLKAVSEELGHEIRVFSSENFALQPSKLPSADHEEGDDFYELQPADYYNLISNRMGELSKMLKTRKMREAELAAQRAKRTKAVMRVRFPDGYILEADFLPSERIHSLVDLLMKVLARPDLPFYLYTVPPKKRILDTSQDFYTSGFVPGANVHFSYDLPEGLLLNADDLKAGPFLREGILSLDGLSLLLKPASQPDDSRMNSSTHQSGASQSDPVPTTNKKPGRPKWLKR

SEQ ID NO: 192445 - protein, 134 aa, Zea mays
  Clone ID: MRT4577_107093C.1.pep
LNSRLLEEIEESKAFFQVYEGAVYMHQGANYLVEELDLASRTAFCRKADLKYYTKTRDYTDINVLGGEFAYLPTSICRTNRVKTTAQANDCTVTTKWFGFYRISKSSNTISDSFELNLPPYFFTSQAVWVRIPH

SEQ ID NO: 192446 - protein, 69 aa, Zea mays
  Clone ID: MRT4577_107094C.1.pep
KIRGPFSMKKKTLLLFNPRPPEEIGAHFSPGPHLDSSECGYYTQKTPKSMIMTREKGALSPGNKKKKPP

SEQ ID NO: 192447 - protein, 340 aa, Zea mays
  Clone ID: MRT4577_107095C.1.pep
PGSRSSPLPPICEAEYPHQQAAPSYSTAATGFWPDATRRRKRAEDGFVSSPVPAKEDDGDPHQQAAPSYSTTATVFWPYATRRRKRAEDGSDLSLASDMDLDADAQRAADKLKAVSEELGHEIRVFSSENFALQPSKLPSADHEEGDDFYELQPADYYNLISNRMGELSKMLKTRKMREAELAAQRAKRTKAVMRVRFPDGYILEADFLPSERIHSLVDLLMKVLARPDLPFYLYTVPPKKRILDTSQDFYTSGFVPGANVHFSYDLPEGLLLNADDLKAGPFLREGILSLDGLSLLLKPASQPDDSRMNSSSHQSDASQSVPVPTTTNKKPGRPKWLKR

SEQ ID NO: 192448 - protein, 283 aa, Zea mays
  Clone ID: MRT4577_107096C.1.pep
TREYPHQQAAPSYSTTTTVFWPHATRRRKRAEDGSDLSLASDMDLDADAQRAADKLKAVSEELGHEIRVFSSENFALQPSKLPSADHEEGDDFYELQPADYYNLISNRMGELSKMLKTRKMREAELAAQRAKRTKAVMRVRFPDGYILEADFLPSERIHSLVDLLMKVLARPDLPFYLYTVPPKKRILDTSQDFYTSGFVPGANVHFSYDLPEGLLLNADDLKAGPFLREGILSLDGLSLLLKPASQPDDSRMNSSTHQSGASQSDPVPTTNKKPGRPKWLKR

SEQ ID NO: 192449 - protein, 38 aa, Zea mays
  Clone ID: MRT4577_107097C.1.pep
VKCIMTLEVQFGNKMNHVSISCNSLRGLKAFNSDPLHI

SEQ ID NO: 192450 - protein, 128 aa, Zea mays
  unsure (1)..(128): unsure at all Xaa locations
  Clone ID: MRT4577_107098C.1.pep
GAPNNPGGRXDPHGQAAEPDADAEHKEKERKNGRHAQGTTXGHXXQAGGGGKGPXENXXDHXXDPXNNNAGANATNXXPGNQKRGNARGERAGGGQAVFFAQGASRDDELALDTMMNDACAIVGGVLV

SEQ ID NO: 192451 - protein, 246 aa, Zea mays
  unsure (1)..(246): unsure at all Xaa locations
  Clone ID: MRT4577_107099C.1.pep
FRVRAGPRVRSSEFVCDKLKAVSEALGHEIRVFSSENFASQTSKLPSADHEEDDDFYELQPADYYNLISNRMGEHFKMLKTRKMREAELAAQRAKRTKTVMRVRFPDGYILEADFIPSERIHSLVDLLLKVLARPDLPFYLYTVPPKKRILDTSQDFYTAGFVPGANVHFSYDLPEDSLLDADDLKAGPFLREEILSLDGLSLLXEPASQPDDSRMNSSSHQSDASQSDPVPTTNKKPGRPKWLKR

SEQ ID NO: 192452 - protein, 163 aa, Zea mays
  unsure (1)..(163): unsure at all Xaa locations
  Clone ID: MRT4577_10709C.1.pep
FRPGSARPRPGXGPPGGKLYQPGWQKKKGRLSGQNHGPKNRVPQKVSLGNRPQGGPPRGAQDPLLRFPFQGVFLPWPGLGRSKGNKPWQGGSVLVFFSPKFFSRWFPWSRSLCFLKWIPCPPINFSPFLNPGTPGFFFGFKSKIPARLEFLYWVFLNKNNRPL

SEQ ID NO: 192453 - protein, 343 aa, Zea mays
  Clone ID: MRT4577_1070C.1.pep
KFVSIASNTHLNAALQVIERALVGVNHCSHSIYQIYTGNPDGGTVSSDVAAGIDCLYMILDFVPGNKRVFKRTVPGLVGALFNIILHLQSPHIFYSQNLPPQGSVFHPDAGATVLMCVEVITSFVGRHSFQIDASHVSQCLLVPVTLFKEFKHLLAKYCNQSVQHHGDHAEYILDRQFSVGIYAACCKLLCTTLRHQQREIGWCVALLEDSVSILLGCLESTDSKMINVAGYFAWNMEEALKCASFFRRIYEEMRQQRETLGKHAMHFLAGYISMFSGQGPFQTGITREIDEVLRPGVYSLIDICEESDFQQLHTYLGEGPCRTTLADLVRDYKLHFQYQGKI

SEQ ID NO: 192454 - protein, 321 aa, Zea mays
  unsure (1)..(321): unsure at all Xaa locations
  Clone ID: MRT4577_107100C.1.pep
MEYPHQQAGPSSTTITLICPYATRRRKRAAGDDLSSAVDMDVDADAQRATDKLKAVSEALGHEIRVFSSENFASQTSKLPSADHEEDDDFYELQPADYYNLISNRMGGXILFRTXLFSVNLVXILTNLNYFAFXLLTVALLKMAXCAEHFKMLKTRKMREAELAAQRAKRTKTVMRVRFPDGYILEADFIPSERIHSLVDLLLKVLARPDLPFYLYTVPPKKRILDTSQDFYTAGFVPGANVHFSYDLPEDSLLNADDLKAGPFLREEILSLDGLSLLLKPASQPDDSRMNSSSLQSDASQSVPVPTTTNKKPGRPKWPKR

SEQ ID NO: 192455 - protein, 303 aa, Zea mays
  Clone ID: MRT4577_107101C.1.pep
MVVTLLDIQIRVLEMSGYQMVWACAHQQAAPSYSTTATVFWPYATRRRKRAEDGSDLSLASDMDLDADAQRAADKLKAVSEELGHEIRVFSSENFALQPSKLPSADHEEGDDFYELQPADYYNLISNRMGELSKMLKTRKMREAELAAQRAKRTKAVMRVRFPDGYILEADFLPSERIHSLVDLLMKVLARPDLPFYLYTVPPKKRILDTSQDFYTSGFVPGANVHFSYDLPEGLLLNADDLKAGPFLREGILSLDGLSLLLKPASQPDDSRMNSSTHQSGASQSDPVPTTNKKPGRPKWLKR

SEQ ID NO: 192456 - protein, 43 aa, Zea mays
  Clone ID: MRT4577_107102C.1.pep
LLRSRSCRTRVGSCIIHAPTSDGHLCGNLRESSQDHRHGLRVC

SEQ ID NO: 192457 - protein, 104 aa, Zea mays
  Clone ID: MRT4577_107103C.1.pep
QQCCEVNPSVSECHFIYFVSYLLRYEVNKPSILHIQCPLTAVCWKFSLWYIAFHRSSSSLQMGNSPNISINFFFFVYCKVIGSTRVLLCQSIGYTFALTQLVKC

SEQ ID NO: 192458 - protein, 63 aa, Zea mays
  Clone ID: MRT4577_107104C.1.pep
EEWEEDTDEYMQKNLPSELDDISGWTEDLFTARKSAINLLGVIALSKLFRCFDGIWRPPRFSD

SEQ ID NO: 192459 - protein, 207 aa, Zea mays
  Clone ID: MRT4577_107105C.1.pep
WETRVQHSQESTICLAESTTDDNIHMYHSMQKRLKTQINKSEHTPLSTPTVPKEKTLTQIETQLASAEKTEMFRNEETPALKMKARKKKHRPKVIRENKPAKVPKPDSTPDGKSPNQKVKRSYVRKKRNLSSLENWAGPVSDQSISGATGVAARSRTSSGRRSLQFESKEQGLQGGHSSMANIHHHNYEKPGHAQKLFLLRVRSADW

SEQ ID NO: 192460 - protein, 144 aa, Zea mays
  Clone ID: MRT4577_107106C.1.pep
FGTRADAPPSIFLSAATLPWLCPCFHGELAPAPTSDVPSPSRPAPPSPWFPPSSDQVCQVRPFCSSRPPYASTRAPPPVPAPLHRRPGRCRAPSPSRWRGQASRYSLGRLSHGIDVVLVYSELIEVDELWDNIMIRSSACVLVH

SEQ ID NO: 192461 - protein, 164 aa, Zea mays
  Clone ID: MRT4577_107107C.1.pep
AKVLCTSPCFYVTIYINITNKVLLDQFFDHAIGINVPRSRFLPVKATSDLQLVQSDLYTLVDGFVTRNSARTNPSNPSIELGPEFKKVGSFLGRFKSIPSIVELDILKVSGDVWFGSGIVLKGKVTITAKPGVKLEIPDGAVIGNKDNFGKGKRKQYQMPYNLN

SEQ ID NO: 192462 - protein, 93 aa, Zea mays
  Clone ID: MRT4577_107108C.1.pep
NTATKATSILAHRARERVSHKNGAPACFLFRYSCFPICFLIVCFLPFFFAFYHLEFIHIHCMLYIFCFFYVHLFFLYPCYYLFCIRRYSIPGL

SEQ ID NO: 192463 - protein, 96 aa, Zea mays
  Clone ID: MRT4577_107109C.1.pep
PGGGIAAPPMLRNVPPGVKAQANVGGKLVPSNLCEVIKAANKWSGLSLNASFSKKIKGGFCKLYAPGNPIEIDPPCLLRGFSGRGHVDCQSMFQKF

SEQ ID NO: 192464 - protein, 119 aa, Zea mays
  Clone ID: MRT4577_10710C.1.pep
FFRSPGTILSDFVSLFSPSRSRPIIPTAYTDVYTNQWISSAMICSLWRHPIFPGLLNPSTHHRMPFHRSGLDADCRHANVRLGGIVRSCSGRGSLHSCELSLRYWDLWPFFKMIWDFDV

SEQ ID NO: 192465 - protein, 113 aa, Zea mays
  Clone ID: MRT4577_107110C.1.pep
FIDLVGLPPTCPCDHSISLIPGAQPFHIRPYRYPPTLKDEIETQVKEMLSQGVIRKSSSPFGSPILLVISILRQPHVLVDGKVRTDKTYPAGFMVQALQGEVLFSLARKASPT

SEQ ID NO: 192466 - protein, 64 aa, Zea mays
  Clone ID: MRT4577_107111C.1.pep
ACTPCVSSPLSLCHTHTHTRVMSGREGRGGLVRVRISYPSRTTRARSRIDDGQCTQAAAGLRRA

SEQ ID NO: 192467 - protein, 69 aa, Zea mays
  unsure (1)..(69): unsure at all Xaa locations
  Clone ID: MRT4577_107112C.1.pep
TKIQLFALMLSLSLYELKSPHFGGANXIVYNSFIIISGGGNVYRSEVIQTNIGVQIWTDSEILTQTAVT

SEQ ID NO: 192468 - protein, 83 aa, Zea mays
  Clone ID: MRT4577_107113C.1.pep
TSCTVRDLQHADGSPSFLEKALKFIEDHGVKVEGILRQSADVEEVKRRIQDYEKGKNEFSPEEDAHVIGDCIKEVTRQEDFMR

SEQ ID NO: 192469 - protein, 70 aa, Zea mays
  Clone ID: MRT4577_107114C.1.pep
FPFDPRPTLNLPQHHFHNFLIPAFQHPFPSGYYYLRNHLQSQSPSSIHYTHPILIIPNSPPHTTLSSHSH

SEQ ID NO: 192470 - protein, 118 aa, Zea mays
  unsure (1)..(118): unsure at all Xaa locations
  Clone ID: MRT4577_107115C.1.pep
MIDKLGRAFFMLCKMRSVQFGQKDIPYXLNTYDDCTIRYPDXGAHCQPYPDPLIKANDTIKIDLETNKIMDFIKFDVGNVVMVIGGRNTGRVGVIKNREKHKGRFETIHVLLGAFCYV

SEQ ID NO: 192471 - protein, 74 aa, Zea mays
  unsure (1)..(74): unsure at all Xaa locations
  Clone ID: MRT4577_107116C.1.pep
LISCHPDPLIKANDTIKIDLETNKIIDFIKFDIGNVVMVTGGRNIGRVGVIKNRKKHKGSXETIHVLLGAFCYV

SEQ ID NO: 192472 - protein, 77 aa, Zea mays
  Clone ID: MRT4577_107117C.1.pep
SVSDSVIPIFRQQAEQLLSSSSLSAADLLAKALAKAVGYTDIKKRSLLSSLEDYNTLHLQTGRPMWSPGLTSATWSW

SEQ ID NO: 192473 - protein, 34 aa, Zea mays
  Clone ID: MRT4577_107118C.1.pep
PDAECTRASLLGRYEILWALGEGNFSKVNYARHI

SEQ ID NO: 192474 - protein, 194 aa, Zea mays
  Clone ID: MRT4577_107119C.1.pep
CAELPGVFSSPCRALASLSLHLSLARALLPPRAVRPVEFFPSRSRAPSLCALLLLAERRSPSHLPWRLASSLPPQSSELLPHPGPGPRRACSLELAHAARSSVPAFSARPWRGQPPSPLHPSSLCSERCHLKSLRAPSPPGHGTRPWLGFQRPAPCLPQLAWPLRSPISFSFLSSSLCPRASFPWVAGRAGPCA

SEQ ID NO: 192475 - protein, 102 aa, Zea mays
  unsure (1)..(102): unsure at all Xaa locations
  Clone ID: MRT4577_10711C.1.pep
AGSGSRGSACRSSRGCFRVSGRGWVRWRLCVVDFWSAGCVVAFGVPLACSSPGLVCWLVYALLXXAFLGFAPLMPPRVPLCVRWFSPRGVXGTAASRGSPLS

SEQ ID NO: 192476 - protein, 110 aa, Zea mays
  Clone ID: MRT4577_107120C.1.pep
GVARVNGEYIQSFVDFGAVADASGEKLVATAAAPGTMLSPDMEVDSWLGFQFRPRDLGTGPPCAFLPPDLPIEGLMVFVPSRTAKGGVDLFMAVAECHVDAFEQICHSID

SEQ ID NO: 192477 - protein, 41 aa, Zea mays
  Clone ID: MRT4577_107121C.1.pep
ASGPTVSTALIPLMSHPVLEGKPNANHVRARIRNSRTRRLH

SEQ ID NO: 192478 - protein, 74 aa, Zea mays
  Clone ID: MRT4577_107122C.1.pep
KPPQRAILCVQFAMTSQKVFHCCIGCVAVMTDKSDQRQITPHYHVVVIRSVHITTTVASAVRPRVTLVAHVSAI

SEQ ID NO: 192479 - protein, 191 aa, Zea mays
  unsure (1)..(191): unsure at all Xaa locations
  Clone ID: MRT4577_107123C.1.pep
AGRAGQNPVIPTTARPFSRPCRARHCSASLLLRRRARPRLPRRRGDCARPQSQTTAASGTRPPGRMSSSRRPARRAPTSGGCLGVESIGEHGAMGRHSSKSLHSGTSLLTRIPRVSACVIGFPVAAAAVIFVSACKSFVDHAHYSMAALHSFFYVFLSKTTSEDVWEYSSSNHDTVVVASXKREKKKKKAP

SEQ ID NO: 192480 - protein, 211 aa, Zea mays
  unsure (1)..(211): unsure at all Xaa locations
  Clone ID: MRT4577_107124C.1.pep
GLRSVXGAIERSYAAKQATNVPLWRRLLGNASKKSKNDSAALTTAPPSPGVLVGTQREEQERAKEGADVASSAPRHPSEAGAEGDDVQPAAQDRSVHAATMMKSALARIQGGQNSGAFVDMELAMKGLMDVSFKGRERVPVLPAEFRSKWPHGNISQLERDIIADPLILTSGHTIDRFSYQWSSLGAAKRFLTVPNHLLRDIITAWCLDHE

SEQ ID NO: 192481 - protein, 71 aa, Zea mays
  Clone ID: MRT4577_107125C.1.pep
FYSIQEVILVSITRSNLVTTLFSMYLMSTTCFVRTLCLSKAHHITLLVIFYEPYISQCQPCASSFSAPSFV

SEQ ID NO: 192482 - protein, 66 aa, Zea mays
  Clone ID: MRT4577_107126C.1.pep
TVTAVTSIAPFPTLSGGTIRWGPRGQVILLASVMFTLVQMVYNRSSRVCCCPSVFLIAGQLCVSLL

SEQ ID NO: 192483 - protein, 57 aa, Zea mays
  Clone ID: MRT4577_107127C.1.pep
SARWRTALAARARGASNSPATSYQLLQVKDCNGWYRAHGGSHEPALVYTRRLSLVPN

SEQ ID NO: 192484 - protein, 146 aa, Zea mays
  Clone ID: MRT4577_107128C.1.pep
GKRKGTKQKKRGERAWKKERAPWGEPPPPPGIKARYKGGPIPNQGGQMLGKGVGKGPFGNTPNGKKGKCCKANKLGKPRGFPIPQVEKEGQGNGKPTPKGGKGPPKRKEKRPPRGRKIPKNAPKGGPAEGQNLLLFSLYVWFQLMV

SEQ ID NO: 192485 - protein, 68 aa, Zea mays
  Clone ID: MRT4577_107129C.1.pep
KLGRGALKVGAMDSFFVGQGLLRPPRFKPGPPIRGGAPVQKKTGGFQIQMGGERGGAWLWGVAANGDV

SEQ ID NO: 192486 - protein, 163 aa, Zea mays
  unsure (1)..(163): unsure at all Xaa locations
  Clone ID: MRT4577_10712C.1.pep
MDSGGGKHFILLHGLAHGAWCWYKVVAQLRAAGHRATALDMATSGVHPARLHEVASFEDYSRPLLDAVAASPDGDRLVLVGHSLGGLSVALAMERFPGKVAAAVFLAAFMPRVGSHMGVTIEEFKRTIKPDFFMDSTTTVVNTEQGPXTALMFGPNLLAFTIV

SEQ ID NO: 192487 - protein, 95 aa, Zea mays
  Clone ID: MRT4577_107130C.1.pep
PWATRSPSGCRDPMHRPLGGPPFCYSMRRGSFPFAFRWEGLALWFSLPWLPPPRVPFLPLPFVQLVLATGGVSPSFSLNWLAPVRVPGLWIGPLN

SEQ ID NO: 192488 - protein, 84 aa, Zea mays
  Clone ID: MRT4577_107131C.1.pep
KEKKLNKREIKKQNTAKKAQQIEGGGPRGSSLSYVKTLRLTTLIGSQNFLLVALVFNIHDWETPSVADIKPLSADPASSRGCSS

SEQ ID NO: 192489 - protein, 105 aa, Zea mays
  Clone ID: MRT4577_107132C.1.pep
MLQSKSFVKKTKQGRVVKVVREHYLRDDIPCGAFSCSSCDAAARRLNADAAAILVVDTNVVLHQIDLLENPAIEDVVVLSAVLDEVKNKNLSVYNRLKTLCTNTA

SEQ ID NO: 192490 - protein, 79 aa, Zea mays
  Clone ID: MRT4577_107133C.1.pep
LFIAFFGADLVIRGNVVLNTYRRQKHIHTHTHERSRRHDRVSSLQGPLDPGASSERTLSPLETAPVCVYLVAGTLCPLS

SEQ ID NO: 192491 - protein, 58 aa, Zea mays
  Clone ID: MRT4577_107134C.1.pep
HLVLVLHGDTTLAETCKQIVKCNPFYYNAICNARSFIERKPFDGTYLKRHIFQSNIYH

SEQ ID NO: 192492 - protein, 143 aa, Zea mays
  Clone ID: MRT4577_107135C.1.pep
MGRKRKELLSSAPWRTGEAAEDEDAARMSREGKVSVTSNPGETPTMSVPRSKRQDLDLTVDDFEEDEIDPELRYSFQRNSRFLKRVFSVDTLVKPLPPVMAYSVSRNINFFFRIFTQFWDEEGIANAQKSLGLGNEDGSRRMR

SEQ ID NO: 192493 - protein, 179 aa, Zea mays
  Clone ID: MRT4577_107136C.1.pep
MSLTHGEPHVRDIVMGWIQRGDLMAMMKLLCFSMIRQFDDGNDEALMLLNDPTAFGTMSQASTQLAIGFVPNPDLEPGQGATLHTTFPATVVEVLIHRALSLPPEITLLGFESNKTNDEDEEDGRSQSHHEALLDRTKAKPGIHPVNIRQRCCPGIQLGSRQKFVILASFPHHYELLIA

SEQ ID NO: 192494 - protein, 52 aa, Zea mays
  Clone ID: MRT4577_107137C.1.pep
RTRGFFFFLFFFFFFRNQTHLKYRLNYHWLSFTIHIIQILYTYTLLQTQHLA

SEQ ID NO: 192495 - protein, 108 aa, Zea mays
  Clone ID: MRT4577_107138C.1.pep
GTTCKSDHNGMDPKGGSFNGMDPNFPKNCPMPCLSGRITRLQCLGQKSSEPGTKNLVDPRSAHSAGAVLVPQSKGLLGIGNSFFICERCTASSTGFSGRSKLMVRYLN

SEQ ID NO: 192496 - protein, 306 aa, Zea mays
  Clone ID: MRT4577_107139C.1.pep
MGRYGPFPAAAGDGGGCLPLPIVAAEGALAVLDGAIATAAFVQLARIHRHNQLQGWTRQKIFHFMIGLSNIVFLVYFVSTIIATCQRWICWVHGCGFVLMASPQILLLASFLLLLSFWVDLCHQTNDEDEEDGRSQSHHEALLDRTKAKPGIHPVNIRQRCCPGIQLGSRQKFVILVLLLSFVVMLAFAILIWVGRGDNPIDSSLLKRVYLDVFSVVVIVLGGALACYGAVLFSKMSKVRSETVSTEKWKVASLAAVSLICFSSSAILALVTNVPVLLYWYSTDVDIINNAVILFIYYFIGIFIFL

SEQ ID NO: 192497 - protein, 93 aa, Zea mays
  Clone ID: MRT4577_10713C.1.pep
APPRSTGHARCVRGYRDLQPAVGARAADTAACFGMLDTSHSLARTGMMELRARRSGDRQVVAQQVKHLVTVLGRVSSRSSFSRRIITPPPSSR

SEQ ID NO: 192498 - protein, 86 aa, Zea mays
  unsure (1)..(86): unsure at all Xaa locations
  Clone ID: MRT4577_107140C.1.pep
RTWSDAWEHLKSVFPQCKTVVHHREARSLFEPLKDVQDPENMXVRACSDSRVCPSVTLGLQPAEAITVRSIAAMVPAYDKTKYTGI

SEQ ID NO: 192499 - protein, 143 aa, Zea mays
  Clone ID: MRT4577_107141C.1.pep
MGRKRKELLSSAPWRTGESAEDEDAARMSREGKVSVTSNPGETPTMSVPRSKRQDLDLTVDDFEEDEIDPELRYSFQRNSRFLKRVFSVDTLVKPLPPVMAYSVSRNINFFFRIFTQFWDEEGIANAQKSLGLGNEDGSRRMR

SEQ ID NO: 192500 - protein, 90 aa, Zea mays
  Clone ID: MRT4577_107142C.1.pep
LDSNVCLIIGLWHAIVKGKHSVVRVLPFSSLRMHVGIHGPAYLPSPASEGYVSQFKCICFQVFVHDISYVRSFRYTITEQGLDMCVSPCM

SEQ ID NO: 192501 - protein, 165 aa, Zea mays
  Clone ID: MRT4577_107143C.1.pep
AEPIRFHRRVAVTAALSRARRRHRQPLVTWRPWRIASDAAPPFRIRTGTTRAQVCGAGSQLGAPAGPKEIKKAAFFFSAAVARSNSAGWTDGAARTPPNCRSGGEVVGLGGVVRPRLTEVGRSAAMRRGRTDRAGGRGRWPPWVVPGACLALVSGWGPNKWIDQR

SEQ ID NO: 192502 - protein, 54 aa, Zea mays
  Clone ID: MRT4577_107144C.1.pep
VSLEPVRRSPLVSSICHQPDRSFILGSSIRYISVRVVTYISQRGYSVQSLGDSS

SEQ ID NO: 192503 - protein, 332 aa, Zea mays
  Clone ID: MRT4577_107145C.1.pep
MAAPAPSGAASAAASPSPLMQLPSPFAELVKGPSGLEKVVLRGARNCCAEIYLYGGQVTSWKNDNGEDLLFLSSKAIFKPPKAIRGGIPICFPQFGSHGNLEQHGFARNRFWTIDNNPPPLPLNPAIKAFVDLILKPSEEDLKIWPHSFEFRLRVSLGPSGDLSLTSRIRNTNTDGRPFSYTFAYHTYFSVSDISEVRVEGLETMDYLDNLKAKERFTEQGDAIVFESEVDKVYLAAPSKIAIIDHEKKRTFVVTKEGLPDAVVWNPWDKKAKAMQDFGDAEYKSMLCVEPAAVERPITLKPGEEWKGRLVLSAVPSSYCSGQLDPSKVLQG

SEQ ID NO: 192504 - protein, 149 aa, Zea mays
  unsure (1)..(149): unsure at all Xaa locations
  Clone ID: MRT4577_107146C.1.pep
MARLHLVAVAMGLLLALTTAQAPGASTMPAPMAQPPATSAPPRPAPSPTQKTAPAPAPNATVPAPASPPAPSSIGQTPTEAPSSPPAXPAPRPASPPPCTWPPLWRLSCFSSEVGSRRRWIRRLWYGTVRCGFDTMAPATAGRVCLLGY

SEQ ID NO: 192505 - protein, 81 aa, Zea mays
  Clone ID: MRT4577_107147C.1.pep
SRAGTGAPGWPRIGALFFRGNRVGLGKKKKPGLEFFTNAAGLFPSRMGGFFGPFFGILRKKNLGPHGPQGGEAIPRVSPFR

SEQ ID NO: 192506 - protein, 84 aa, Zea mays
  Clone ID: MRT4577_107148C.1.pep
PRVRTIPTKMEHVFYTYSDNLPGVLIQVFEGEWASTKDNNLLVKFELSGIPSAPKGVPQITVLFYMDANGILNVLSEDKTSGQN

SEQ ID NO: 192507 - protein, 56 aa, Zea mays
  unsure (1)..(56): unsure at all Xaa locations
  Clone ID: MRT4577_107149C.1.pep
MEPHQDAITIIFDALLLPFMANLFFDMXQMKLGSTLFYIIILLFTMAFSSRTPSSL

SEQ ID NO: 192508 - protein, 94 aa, Zea mays
  Clone ID: MRT4577_10714C.1.pep
SGTVFPVPLQIPSHYPYPSVRIQGLALQAGIHPTAASRCTLQQVPALYEGYALIIHHGYGRLFSSPVCICISKLVHLRDLATAFARIPYDSAGL

SEQ ID NO: 192509 - protein, 67 aa, Zea mays
  Clone ID: MRT4577_107150C.1.pep
ALLNGRPGRLNSKGLGWFGLFKSPFYVKVKNRWPPWGLFCPGWFLVASFGKNSLFFYPWMVHNPPQS

SEQ ID NO: 192510 - protein, 77 aa, Zea mays
  Clone ID: MRT4577_107151C.1.pep
HLFLKQQRNKVSYPIPWRQNLQQPPLVHSYHYLSHGEEAPCQVPSPLMADPLCSLISPHAISGKQPLRADPARLASL

SEQ ID NO: 192511 - protein, 54 aa, Zea mays
  unsure (1)..(54): unsure at all Xaa locations
  Clone ID: MRT4577_107152C.1.pep
KTPRGPGKVWQSVFHRGRNLATKGMGANFLDGPKPNSPTVXDWFXSGKTRSTPR

SEQ ID NO: 192512 - protein, 189 aa, Zea mays
  unsure (1)..(189): unsure at all Xaa locations
  Clone ID: MRT4577_107153C.1.pep
HASGNPSDFVGAALGVSESQTKGILAATLGKVLVIDEAYGLYGGKGSTSDPYKTAVIDTIVADVQNVPGDDRCVILIGYQEQMEEMFQNVNPGLSRRFSVDTPFIFEDFDDDALRQVLEFKLQASGFTTTGEGKTAALDVLVRERXRANFGNGGAIENLLSKAKASYQKRLSAGKLXKKNQIEAEDFVE

SEQ ID NO: 192513 - protein, 75 aa, Zea mays
  Clone ID: MRT4577_107154C.1.pep
LLFIQATPLGEWIFKSKSKQNSCGLQGACEGFMFGLQVTELLETWPEQVTHGRRWVSGHVIPQQQQLAVSQVLIS

SEQ ID NO: 192514 - protein, 110 aa, Zea mays
  unsure (1)..(110): unsure at all Xaa locations
  Clone ID: MRT4577_107155C.1.pep
TENATRTEQSHPEYARSSLRFSSSSLLLPLQSHRICSTVVAPVAAGKKNPKPKGLSPPSLFHQVRAPGSDGGAEPPAGRRAPGASPQARRPGAGLERRVPQRVAVTENAX

SEQ ID NO: 192515 - protein, 76 aa, Zea mays
  unsure (1)..(76): unsure at all Xaa locations
  Clone ID: MRT4577_107156C.1.pep
HYSVPTMAAKXICLLMLSRYFCKCCYGDHLGQCSQAPIASLLPPYLSPAVSSDVKPNLNPRSTGFLALPYTLPHNI

SEQ ID NO: 192516 - protein, 122 aa, Zea mays
  unsure (1)..(122): unsure at all Xaa locations
  Clone ID: MRT4577_107157C.1.pep
RIEKDIDEVVKIARQANTKADALDDDYLSDRLXPGCGQGSAVGRSIEQSTELTTEILKERLDDFQTLXETFRQEFRQDDQRMVFTVTGTGTDDQTVDDSIDTLIGDQIFEDAIQHAVQRQIL

SEQ ID NO: 192517 - protein, 54 aa, Zea mays
  Clone ID: MRT4577_107158C.1.pep
CHHILITRTGYFRNKSPALTYKTTKTRCVRSGFSLTDFPDLHKQQAIDEKYIIE

SEQ ID NO: 192518 - protein, 40 aa, Zea mays
  unsure (1)..(40): unsure at all Xaa locations
  Clone ID: MRT4577_107159C.1.pep
ATDDHFLHNAFSTYGEVLESNIILDRXTHRFRNFSFLTFS

SEQ ID NO: 192519 - protein, 89 aa, Zea mays
  Clone ID: MRT4577_10715C.1.pep
SASLLQKFQGKFQHAVPTFALQIHRMCGQCVLVSSRSLFRRMVFLSYVLAQHKTNASCSSGRPVFLSHQFGLWILVCICLVYLSILFNK

SEQ ID NO: 192520 - protein, 72 aa, Zea mays
  Clone ID: MRT4577_107160C.1.pep
MIMYTRCLRQDYSYTDKLRKTGLAGSAITQSKQVLRGYGSSCYDYDNDDDDDDDDDNDDGAGLMEIEALHNP

SEQ ID NO: 192521 - protein, 34 aa, Zea mays
  Clone ID: MRT4577_107161C.1.pep
ESPDVESTASVYKRGEGDSWHSILRSMTHLIACK

SEQ ID NO: 192522 - protein, 128 aa, Zea mays
  unsure (1)..(128): unsure at all Xaa locations
  Clone ID: MRT4577_107162C.1.pep
STIVIVAALCGQEPETINHLLVGCVFARGKXLLGQVNLEGLTPQMEEGNAMQWWKSCSDQLHGIAKKGFNSLIILGLWIIWNHRNSCVFDSLSPNLDAAIRRAGEEKELWELSGAKSLALLLAPIPGI

SEQ ID NO: 192523 - protein, 92 aa, Zea mays
  Clone ID: MRT4577_107163C.1.pep
FFFLKKKQKMFSFGENLAQKKKPGGSPIWVQLYLGQGGEKIFIKLVKFFVLPPKIVWAPGDPLKFGGFKKKKIFGAGPPLQGGIPKNCFCPI

SEQ ID NO: 192524 - protein, 160 aa, Zea mays
  Clone ID: MRT4577_107164C.1.pep
LGDDDLDLSHELMAASSMCIILRYLFLTDRDDESMAVHGRRLLLGEERASEKFPEHQQVGQRLNPHTASMDHRPPFRWHNWRPTSPIGAESWRRHPHSYTTLSVHGNSSEMEGCAAAEKEKVFIFLTDESGGDHGIPERDSRARRGHAARHTRDSVKGCN

SEQ ID NO: 192525 - protein, 42 aa, Zea mays
  Clone ID: MRT4577_107165C.1.pep
PVKAAWKLKLVLGASLESSSIKIRSLGAIPRVLSKKKRGFPI

SEQ ID NO: 192526 - protein, 36 aa, Zea mays
  Clone ID: MRT4577_107166C.1.pep
QCKHHENLRVNIIRSKNLIKDTTCLLLGNQTAQVLP

SEQ ID NO: 192527 - protein, 161 aa, Zea mays
  unsure (1)..(161): unsure at all Xaa locations
  Clone ID: MRT4577_107167C.1.pep
MPHQGSHRPGAPVQGDPVFPRATSTVLPDPSRFFAPPLLAAPLPTNSFFQNFVLKDGDMPEYIHPYSVRSPGGGALDVCYPSRVHSPSSVTQTFVADLTVSDAAAGSAQRHVVSAFDDLSVTLDVSPSLRAHLXRGCPYVTVTTTAGPIDVFVSSVHAFVE

SEQ ID NO: 192528 - protein, 116 aa, Zea mays
  Clone ID: MRT4577_107168C.1.pep
SFFFFFFFFFVVFFFFFLRFFSFFFSGKKMPPPLNSYLKNHRTIGKARAPGPPKRKNRGQLTPKFPPPRGTPYTRKLSCRLERARLTQMWAITFRGRPVPSGQQGNPLWGGGSNPP

SEQ ID NO: 192529 - protein, 294 aa, Zea mays
  Clone ID: MRT4577_107169C.1.pep
PGKGLTFFPKKKKKKKKKKKKKKKKKKKKKKKKKKPRPWAMACSSHVLAGAPPSPMPQRSSSHPLPALVLQLGSPPCRTSLPLLGVPSARFQLRVRAPISHGRVPWCSGVISSVPALGFPFFHGARPAVELPCARVLLPCSHRRAAPCVHPWLNASPWSASDSLLLGQNSSSPSHRSSLFSHGHTVVGTGTSWSVHGRSLRRWCSAINPLRRARSCPSHRARIPSVSPPSSSLAKSSPCCRALRPRRVPSPSRSLSQCTWRCLLRKNAKPCGVRWTIRTEERGRSREVKSNWSW

SEQ ID NO: 192530 - protein, 132 aa, Zea mays
  Clone ID: MRT4577_10716C.1.pep
EGISRITTVVPGTVESIGKLVQQLYKLIDVHEVHDITHSPFAERELMLIKVSVNTAARREILDIAEIFRAKPIDVSDHTVTLQLTGDLDKMVALQRLLEPYGICEVARTGRVALVRESKVDSKYLRGYSLPL

SEQ ID NO: 192531 - protein, 184 aa, Zea mays
  Clone ID: MRT4577_107170C.1.pep
GLAARAQRPVRWHDPRGGANRSCVANPRERADRGTQAPGRSCACFFSALMEFMVSVSLPNSLHSTSMNAIDARLKAPTVVSLPSSLYKATGTFFLFPPGVFFGFPHSGGRGRPTRSPIAQSHAISHLATGYGRCHCRSWPTRLVGFYFVHGPHGRGARTRSKASPIPPCQAFALGHWSPFAVVH

SEQ ID NO: 192532 - protein, 57 aa, Zea mays
  Clone ID: MRT4577_107171C.1.pep
MAVAAFAAVSSHELPDKLSHHRLPDASTGTDALASLPLTRSDVPAAPFASALSGAQL

SEQ ID NO: 192533 - protein, 137 aa, Zea mays
  Clone ID: MRT4577_107172C.1.pep
MASFSGHLHRPLSAMAVAAFAAVSSHELPDKLSHHRHPDASTGTDALASLPLTRSDVPAAPSASALSGAQLLPRDLHSLRLLKAPFASVPVMQTVYQYANFAKTSGQADAMPAIPSSPSDVLYRWHLPDPRVYADFP

SEQ ID NO: 192534 - protein, 65 aa, Zea mays
  Clone ID: MRT4577_107173C.1.pep
SSLNFYPSHGGKQNPQRRALGSLSRKPTLQSPTYPEGEDAKPAADAASPLFCYLFQLDRTHGRNP

SEQ ID NO: 192535 - protein, 69 aa, Zea mays
  Clone ID: MRT4577_107174C.1.pep
CWLSCFDINTHQSFEAFNPVSFSFMIYPTHTVNINAIIDAFHLINPQTMILSHYPPHTTSNVCHLNNPS

SEQ ID NO: 192536 - protein, 78 aa, Zea mays
  unsure (1)..(78): unsure at all Xaa locations
  Clone ID: MRT4577_107175C.1.pep
KKKKKKKKKKKKKKKKKKKKKKKKKKKKKKKKKKKKKKKKKKKKKKKKKKKKKKNSKXRHHARVFGACVYIFKRVAIK

SEQ ID NO: 192537 - protein, 363 aa, Zea mays
  Clone ID: MRT4577_107176C.1.pep
MTNQDVVVSEMGIAAGTALPGSSPALLACRGAAAWMRTPAAGAMSLRYLDLAAAAARSASCTWVEAMRASSPTRSRAAADVDELTAWMRKHPSALGKFEQIASASQGKKVVMFLDYDGTLAPIVADPDAAYMSDVMRAAVRDVAKHFPTAIVSGRCRDKVRSFVDLSELYYAGSHGMDIEGPSSNPESVLCQPASEFLPVIDEVYKALVEKTKSTPGAKVENNKFCLSVHFRCVDEKRWNALAEQVKAVIKDYPKLKLTQGRKVLEIRPSIMWDKGKALEFLLESLGFASCSDALPVYIGDDRTDEDAFKVLRKRGQGVGILVSKCPKETNASYSLQDPGEVMDFLLRLVEWKRKSTTTRPPV

SEQ ID NO: 192538 - protein, 88 aa, Zea mays
  Clone ID: MRT4577_107177C.1.pep
LTRPFRLYIYSTSEATPSISTLSKLASPQTPLSLLTIALLSLIPFFIFFLFNRSKGKQPKVPPTIPGAWSILVHLSLLARFSTTHLLL

SEQ ID NO: 192539 - protein, 79 aa, Zea mays
  unsure (1)..(79): unsure at all Xaa locations
  Clone ID: MRT4577_107178C.1.pep
TYLSTTQVSNPPPYKVILIHPKKXETXKAADPTTKPTIQEHGSKSKARMTHQKTLTHKSHLHTLTKQLHNNNEQTTSQA

SEQ ID NO: 192540 - protein, 65 aa, Zea mays
  Clone ID: MRT4577_107179C.1.pep
AVAFVVQGMRASTHCGRARRQISYFTLYVDEFRAQPFRLGGGLAFPLCHVKSCVYSENLSDSKHL

SEQ ID NO: 192541 - protein, 71 aa, Zea mays
  unsure (1)..(71): unsure at all Xaa locations
  Clone ID: MRT4577_10717C.1.pep
XXTXIMHHSYSPTLHEGAEEPIWCATQKLXDQQPSPSKTANKTKCLDGLLTFYPGAPHQYQKGDESSALRK

SEQ ID NO: 192542 - protein, 59 aa, Zea mays
  Clone ID: MRT4577_107180C.1.pep
KKIICPLLHSFWLAYDLIEIWLNIKFYLFNPIKMMGWGVYHFFSGVLVVTSLLNFSYQF

SEQ ID NO: 192543 - protein, 104 aa, Zea mays
  Clone ID: MRT4577_107181C.1.pep
LEGGGEIGYPLFWGALRKSFLFLGITLFLFWSLLERFLLPARSKQRCCLLTLLNDLGSKFPLQFFFGGYNFSLFPKKKDPLVRGSPPLILSGPVKNKGYPCSFS

SEQ ID NO: 192544 - protein, 43 aa, Zea mays
  Clone ID: MRT4577_107182C.1.pep
DCYHWIVLSWSNFWRFKIDPCVANRINVSKNVENYIVLLIPHL

SEQ ID NO: 192545 - protein, 64 aa, Zea mays
  Clone ID: MRT4577_107183C.1.pep
MKNNNFVTHDQAIYRHSPFPSLFDNLLFYGLQLFLPISILFLAPLHVYHISFQHIMNEQILVIL

SEQ ID NO: 192546 - protein, 47 aa, Zea mays
  Clone ID: MRT4577_107187C.1.pep
GGESMASTAGYLARRAAQKERMRLLYLTTLNDTLILSLHIHLFYQHP

SEQ ID NO: 192547 - protein, 91 aa, Zea mays
  Clone ID: MRT4577_107188C.1.pep
YFGKAGACGAGPQLRGRPRVPYLVRYDRGPKGGPFSFISRRNKPVRVEPYYTSWSMNSEMSRKGHGGGRGATVCEVLLIQDEDMGIPYEIT

SEQ ID NO: 192548 - protein, 63 aa, Zea mays
  Clone ID: MRT4577_107189C.1.pep
EYLYPGPVVIFECMRGQALLTSPTTWVVDDDDDGARRLTTTQMQGGNPHQQVLGDANYLHNYN

SEQ ID NO: 192549 - protein, 99 aa, Zea mays
  unsure (1)..(99): unsure at all Xaa locations
  Clone ID: MRT4577_10718C.1.pep
AFGWDTTLSVRDXILTRVHYNMCYLADEGLLKSSGFEGVILPLITILFAEELLYPHLNNKRMRCPAYGMLVSGTLDYKRSVTSNADNVRDELYCEGKGG

SEQ ID NO: 192550 - protein, 53 aa, Zea mays
  Clone ID: MRT4577_107190C.1.pep
TLPVHLRNYSAHNNTSDVHTISSNNIIVSTSYCTRIRHRRNYKMKHSEELIQS

SEQ ID NO: 192551 - protein, 52 aa, Zea mays
  Clone ID: MRT4577_107191C.1.pep
MSVRSCLIDPDGSALVELVAPSDRLPALSAEAEALPWVRLARGDLQWAHVLR

SEQ ID NO: 192552 - protein, 109 aa, Zea mays
  unsure (1)..(109): unsure at all Xaa locations
  Clone ID: MRT4577_107192C.1.pep
RKDHCQGNFTTSLLFDHFLACYMAXKKNIXSATSIFDVQGVGFKTFXKXARVLITLLQNIYNDNYPQTLSHMYIINAGHCFKILCSTIKSFLDPKTASNTHVLENTYQH

SEQ ID NO: 192553 - protein, 116 aa, Zea mays
  unsure (1)..(116): unsure at all Xaa locations
  Clone ID: MRT4577_107193C.1.pep
STRTHAHNSSRDEQSVLWNQDYWPAANSGHTEHLAPAQKVSQDIEKDSVLLRATAVEDRLQNGVPERIYKLAQAGTKIXILTGDMMQTAVNIGYTCNLLTKEIEEIFITQENSRTS

SEQ ID NO: 192554 - protein, 194 aa, Zea mays
  unsure (1)..(194): unsure at all Xaa locations
  Clone ID: MRT4577_107194C.1.pep
DARDRAPNEIESRGEKKERGARAAARPITSPWPPPAAARPRCWAPPPPASSIRVPTRPPPPXSPAVFVDKSTRVICQGITGKNGTFHTEQAIEYGTNMVGGVTPKKGGTEHLGLPVFNSVAEAKAETKANASVIYVPPPFAAAAIMEALEAELDLVVCITEGIPQHDMVKVKAALNRQSKTRLIGPNCPGIIKP

SEQ ID NO: 192555 - protein, 84 aa, Zea mays
  Clone ID: MRT4577_107195C.1.pep
RGMVVQSLVADNAQVRPPLKAHEINRSTCCRAQGSCGHRGSRCYMRVATSGTLLIRPQTQAEGQRRHLERKVGFDMQPVALVPN

SEQ ID NO: 192556 - protein, 47 aa, Zea mays
  Clone ID: MRT4577_107196C.1.pep
PLYLFFSVLDLTKPPAFHLLPITIGDRSELSNELPHNDPIFLMRSIP

SEQ ID NO: 192557 - protein, 95 aa, Zea mays
  Clone ID: MRT4577_107197C.1.pep
LSGQLVIRRGMLRYRPITSCLDSDACDGERSVRICPCLTKTGLLLAWLVQNAKEIKPQKACNSNLQSQRSAIESSSKEPTRTTYLPELRIACYCC

SEQ ID NO: 192558 - protein, 98 aa, Zea mays
  Clone ID: MRT4577_107198C.1.pep
RIGGGLSPTLLFSYSSCTIYPSVSDQHLLVMSFRLLDCHTYSHFTRSSYHDIPFCILLAYCPHLKLQPFRYRFDFHSGILPLSILQLKQSTSFLQNLP

SEQ ID NO: 192559 - protein, 51 aa, Zea mays
  Clone ID: MRT4577_107199C.1.pep
AQKLSRLAIVYLPDLHCQTVNLYLAGAKCRPYWSYLHDLYILSLWGKYRPF

SEQ ID NO: 192560 - protein, 209 aa, Zea mays
  unsure (1)..(209): unsure at all Xaa locations
  Clone ID: MRT4577_10719C.1.pep
MSVASSHRLRPSPSGPARRPGSAAPRVAFWPAGASPPYRGRCTVVAAAAAAGAGGEASSAPVAVSAVAPAGAARDKVRRHTISVFVGDESGMINRIAGVFARRGYNIESLAVGLNKDKALFTIVVSGTDRVLNQVIEQLNKLVNVLSVEDLSKEPQVERELMLIKLNVEPDQRPEVMVLVDIFRAXVVDISEKTLTMEVAGDPGKLLQC

SEQ ID NO: 192561 - protein, 92 aa, Zea mays
  Clone ID: MRT4577_1071C.1.pep
SVNLLQGSQTPLDTNRPIFAVVKYQENLEKELYSSDKASNITYSRVSMHVLHYPGIKCRYLLDITRCPGQLAEQHEAAVDPMKLISQALNLY

SEQ ID NO: 192562 - protein, 363 aa, Zea mays
  unsure (1)..(363): unsure at all Xaa locations
  Clone ID: MRT4577_107200C.1.pep
MSGRKNAGKVSPWLLVLICLGCFFVTYNLLTMPSRGRDGXASSSAAAGIATQLPXGVRXPDSDPAKRFHVALTATDALYSQWQSRIMHYWYKEMRDRPGSDMGGFTRILHSGKPDGLMDEIPTMVVDPLPEGKDQGYIVLNRPWAFVQWIQKAKIVEEYILMAEPDHVFVKPLPNLSHGDEPAAFPFFYIKPTENEKILRKFFPEEKGPISNIDPIGSPVIIKKAQLEKIAPTWMNVSLKMKEDQETDKAFGWVLEMYAYAVASALHGVHHSLHKDFMIQPPWDLKTDNTFIIHYTYGCDYSMKGQLTYGKIGEWRFDKRSYLQSPPPRNLSLPPPGVPESVVTLVKMVNEATANIPGWEDDR

SEQ ID NO: 192563 - protein, 122 aa, Zea mays
  unsure (1)..(122): unsure at all Xaa locations
  Clone ID: MRT4577_107201C.1.pep
MRASRGRDGPRKFLGGGGDRHSTASLGSGSDSDPAKRFLXSLTPTDALYSQWQSRIMHYWYKEMRDRPGSDMGGFTRILHSGKPDGLMDEIPTMVADPLPEGQDHGYIVLNKPXVFVQWIQK

SEQ ID NO: 192564 - protein, 99 aa, Zea mays
  Clone ID: MRT4577_107202C.1.pep
GKRFVKKKKFYYRRTKTLAWKNLSKGKISKAPSPFMAQYIKRGIPSKGNFQNVDGPKQIFFNERSFLRVDRPKVKPPKKKKKKKKGGRFRTDGLGRPGN

SEQ ID NO: 192565 - protein, 133 aa, Zea mays
  unsure (1)..(133): unsure at all Xaa locations
  Clone ID: MRT4577_107203C.1.pep
NIVSIGNSPVIIKKAQLEKIAPTWMNVSLKMKEDQETDKAFGWVLEXMYAYAVASALHGVHHSLHKDFMIQVLRSLALDRSSHTWGDDNLFHLRCAXXLQPPWDLKTDNTFIIHYTYGCDYSMKGQLTXYGKI

SEQ ID NO: 192566 - protein, 364 aa, Zea mays
  unsure (1)..(364): unsure at all Xaa locations
  Clone ID: MRT4577_107204C.1.pep
MSGRKNAGKVSPWLLVLICLGCFFVTYNLLTMPSRGRDGXASSSAAAGIATQLPXGVRXSDSDPAKRFHVALTATDALYSQWQSRIMHYWYKEMRDRPGSDMGGFTRILHSGKPDGLMDEIPTMVVDPLPEGKDQGYIVLNRPWAFVQWIQKAKIVEEYILMAEPDHVFVKPLPNLSHGDEPAAFPFFYIKPTENEKILRKFFPEEKGPISNIDPIGNSPVIIKKAQLEKIAPTWMNVSLKMKEDQETDKAFGWVLEMYAYAVASALHGVHHSLHKDFMIQPPWDLKTDNTFIIHYTYGCDYSMKGQLTYGKIGEWRFDKRSYLQSPPPRNLSLPPPGVPESVVTLVKMVNEATANIPGWEDDR

SEQ ID NO: 192567 - protein, 62 aa, Zea mays
  Clone ID: MRT4577_107205C.1.pep
SARAGPAPLGMRLVPRVLADGRLGYMLRQPGGMSASSSLPGGTDRRDSGRGGNGHIRGCRPY

SEQ ID NO: 192568 - protein, 74 aa, Zea mays
  unsure (1)..(74): unsure at all Xaa locations
  Clone ID: MRT4577_107206C.1.pep
WETIRYSVVRLWTREKPPGLRPRVASRYGAWWLLLSKCLLLLLLPLSKESHPKXTPPPDYRVLGTNGPAWPVSG

SEQ ID NO: 192569 - protein, 97 aa, Zea mays
  Clone ID: MRT4577_107207C.1.pep
QQELINDENEQTESVENKATASPKDHEDIDEDEKPKQAVEAQEAKEAKAVEESNEAEASTGDMTGGSAERKEQDDRARKGEEPAGKEDKPVEGAKKE

SEQ ID NO: 192570 - protein, 44 aa, Zea mays
  unsure (1)..(44): unsure at all Xaa locations
  Clone ID: MRT4577_107208C.1.pep
VTINYLLGNLGKTYADTGGVFDXLGGGSVQMAYAIAEKDAKKAP

SEQ ID NO: 192571 - protein, 87 aa, Zea mays
  Clone ID: MRT4577_107209C.1.pep
SRAFPRNPFVGEPLLVLAQVYFTMERYGDAQMQAEKVLKLLLEWGSSWDKRMTWKGWVSWGRAMLTKASEKDWLHTAFGIINLGLVK

SEQ ID NO: 192572 - protein, 53 aa, Zea mays
  unsure (1)..(53): unsure at all Xaa locations
  Clone ID: MRT4577_10720C.1.pep
ALVRGERVLELELMCFILXVGFFCSYNIPXPCWSDKICEHTLRLREKASYNLI

SEQ ID NO: 192573 - protein, 67 aa, Zea mays
  Clone ID: MRT4577_107210C.1.pep
SFSESYYSTVDPSMSFDTQDLGAALKGFIATISKPKAAYRGWRTLSYVLGWIFYTKRIVARRKKHGK

SEQ ID NO: 192574 - protein, 76 aa, Zea mays
  Clone ID: MRT4577_107211C.1.pep
SPPLLSPPRRRRTDQQWRCSGPNQAKRTLAFAWVRSCDLCDLTTVDAAITAASAAGRTPWSTRAASDELEPNSELT

SEQ ID NO: 192575 - protein, 144 aa, Zea mays
  unsure (1)..(144): unsure at all Xaa locations
  Clone ID: MRT4577_107212C.1.pep
WGGGGFFFFNKKRKRSIWPKTPGPLPLPLQGGKKRGKKPPVFNPGPRPGNPQRGGGGPSFXGAPGPGKPPPPPPPKNKTPPKNPKIVGPAPPGGGPGKTXITGPERGGAGAFFCPAPKGRGPQQGAPKGGPGPLGGKRGSEKNP

SEQ ID NO: 192576 - protein, 74 aa, Zea mays
  unsure (1)..(74): unsure at all Xaa locations
  Clone ID: MRT4577_107213C.1.pep
LPLLMNRSGGVMLLDDGSSLYTFGAKVRDDVFPGAMLCLGDSCLXGGVMCISLMLVPCMRLLNSCVWFAVFVIS

SEQ ID NO: 192577 - protein, 76 aa, Zea mays
  Clone ID: MRT4577_107214C.1.pep
KQQKKGQNHGFTYFKGGGIQRVIQPLQQILGGHILIALLDWTYNLGEEQKGYTLFKLTGRVCPCKNGGLSNRNKCL

SEQ ID NO: 192578 - protein, 211 aa, Zea mays
  unsure (1)..(211): unsure at all Xaa locations
  Clone ID: MRT4577_107215C.1.pep
MSLLSKLRLVTVDVTGTLLAYKGRLGDYYCMAAKSAGKPCPDYDRMHEGFKLAYTEMARKYPCFGFAAKMPTIEWWRICVKDSFVKAGYDYDDETFDKVFKRIYSAFGSSAPYSVFPDAQPFMRGLREKGITVGIVSNAEYRYKEVILPALGLNQGSEWDFGVFSGIVGVEKPDPKXLQIALEMAXNVAPEEXLHIGDSYRXDYVPXRSIG

SEQ ID NO: 192579 - protein, 299 aa, Zea mays
  unsure (1)..(299): unsure at all Xaa locations
  Clone ID: MRT4577_107216C.1.pep
MKRSWNLGRHMVHLIRQVKPSMSEPISQPGNPPTPGNESASPSPSLRSQPEPARRDFHRNPSLLAATSPDRFRHSWWPEKQSLVLCLRSSSDMSLLSKLRLVTVDVTGTLLAYKGRLGDYYCMAAKAAGKPCPDYDRMHEGFKLAYTEMARKYPCFGFAAKMPTIEWWRICVKDSFVKAGYDYDDETFDKVFKRIYSAFGSSAPYSVFPDAQPFMRGLREKGITVGIVSNAEYGYKEVILPALGLNQGSEWDFGVFSGIVGVEKXDPKIYKIALEMAGNVAPEEALHIGDSYRKDYVPA

SEQ ID NO: 192580 - protein, 219 aa, Zea mays
  unsure (1)..(219): unsure at all Xaa locations
  Clone ID: MRT4577_107217C.1.pep
MSLLSKLRLVTVDVTGTLLAYKGRLGDYYCMAAKAAGKPCPDYDRMHEGFKLAYTEMARKYPCFGFAAKMPTIEWWRICVKDSFVKAGYDYDDETFEKVFKRIYSAFGSSAPYSVFPDAQPFMRGLREKGITVGIVSNAEYRYKEVILPALGLNQGSEWXFGVFSGIVGVEKPDPTIYKIAPXRWAGNVAPEEALHIGDSYRKDYVPARSIGMHALLLD

SEQ ID NO: 192581 - protein, 223 aa, Zea mays
  unsure (1)..(223): unsure at all Xaa locations
  Clone ID: MRT4577_107218C.1.pep
DGALQKAVALVLQNREDFVAILFYASWCPFSKIFRTDFQKLSSFFPTIAHXSFEESNIKPRCVFLRQINTXLDLTIFSMQLKLQYLNCRVLSRYGVRAFPTIFLLNSTVRVRYHGSRAMNSVAMFYKDVTGLNPVSLDATCLERMEDSVTIVDHGKKAEKDDSLLSWARSPDRLLHQDTCLALASSFVLLRLLHFLLPKLNACMKQAWRMRLYELNRLFPSLS

SEQ ID NO: 192582 - protein, 115 aa, Zea mays
  unsure (1)..(115): unsure at all Xaa locations
  Clone ID: MRT4577_107219C.1.pep
PAPAPPAPAPPRSGCRPRPGPAAAPRRRGPGARRCPPPSPAPPSPAXVPPHQGLLADDPXPAPPPRAAAPPATAPGSPPTTAPRLGFPSSSWSPLLHFYRDIYISEYTSFVLLLF

SEQ ID NO: 192583 - protein, 54 aa, Zea mays
  Clone ID: MRT4577_10721C.1.pep
ATQSPAIPILSPPILPLRCTLRRIIKHPTSSKLTEPTHHIETFCQAHKPTHPLQ

SEQ ID NO: 192584 - protein, 267 aa, Zea mays
  Clone ID: MRT4577_107220C.1.pep
MRARDLLGFPPAGAAMSSAAALLLLPLLTVAGQGPVCQRPPVAAVILQQASTCRAVDAPGLRGHRAGFVEGDDGALQKAVALVLQNREDFVAILFYASWCPFSKIFRTDFQKLSSFFPTIAHFSFEESNIKPRVLSRYGVRAFPTIFLLNSTVRVRYHGSRAMNSVAMFYKDVTGLNPVSLDATCLERMEDSVTIVDHGKKAEKDDSLLSWARSPDRLLHQDTCLALASSFVLLRLLHFLLPKLNACMKQAWRMRLYELNRLFPSLS

SEQ ID NO: 192585 - protein, 80 aa, Zea mays
  Clone ID: MRT4577_107221C.1.pep
QAFFFFFFGTKPFFFHFKWSIKAMVKPALAPKGKADTILPNNLGRNTLRAKSGKIQYNGGPLNLPLKGPNPPKRKRNKNQ

SEQ ID NO: 192586 - protein, 53 aa, Zea mays
  Clone ID: MRT4577_107222C.1.pep
AVVTTQSTFFFFFFFFFAKQSLSWNSCYRMTNGNILTRFALVLTSLKTVGDIG

SEQ ID NO: 192587 - protein, 74 aa, Zea mays
  Clone ID: MRT4577_107223C.1.pep
SKAQDNKILVKRRLTNIRVEFFSQDPNHCQPTSSVSHFLCATWRNHLQSSFTKRINNAQTRKKKGIQPAVANLP

SEQ ID NO: 192588 - protein, 127 aa, Zea mays
  Clone ID: MRT4577_107224C.1.pep
GLAARARPGSVEVRERGERKGEKRTRSRERHDPSLHLLLSTSASFPRVPCLVIASPLSSSVVVSGHLACHHHATHSSPPTKKKAVRTIHPSCVQLGSENGYSYDFSREFCRVIAASNSSNSLKDSLN

SEQ ID NO: 192589 - protein, 870 aa, Zea mays
  Clone ID: MRT4577_107225C.1.pep
MSSLRVVTRGANPPSLGTVSLKTKAPKMAGMPIMSLANQDASTPATVTATHASVLSFTASTRYQMQGPTEHVCPYELEHQGSLIRPSEGKLWCTEIMEDSGNGNLDGAGKSSNEDLVLPGLLGGMTLPMFDEMSPNSGEEEIALFSEGFDYPVFDDMPLEKVVWDEEPGYDDLLNQLAQGADHLVDATMQPTIHPIAVDKQLQLGVNQGCFEMPVNTDDTEDLFQNYDVAASDVQVIDEDEVVLIEGKYTVDWKILQARETSEEEVEDYLAESKEGAMDEVLQVELIDDEVQWDEESPNQSVHKGLLPHTVRKMVYLKGFSQGGGISTMTQVQRCHPLAPLSTAKISVAIAIVRAAGCEFAVKYYPSFNEAIQRIDVNDIALVMVDHSCSGYCSEADAHYCRTGNSPLCCRTDSDSLMENGYARPVEGIGVAALYAGFSDTVLLKTKHRQCTSGLQDVADVAVAIKAGPYDIGIVAGLQSKTVNKVSLVEQMNSKVQLFSQAHGCFFPNGLTYENIAHCFGTTRLQPDQADVESHPGKSKEGLVIYSVAYVGDSCEHRFITHRPSFVGMVILFGDPDELHYRQNAFDAGEEGLEIKVHSREKGCECLDNLLVSKTRHEYLNLIRNDALLLMQAELQVLPSVRVLLLWMIRPWNPGILATLCVTVAWGQATFRWGAHADDAASAKGCDTGRGARWRKTELEHERRETGGLARLGKRQGAGKLEEQGARRGTRELSERVERELGNARLGAGAQNREPGRRSHGEREAGGGSCIAGAGRRAGSGRKLRARQGARSPRESSCQLKKKIAREDKGTRGRWLDFFFHERRPERISAGGGRRASQELAWVRQGSKWLEIFFLCQELIGAGPGEEKIS

SEQ ID NO: 192590 - protein, 184 aa, Zea mays
  unsure (1)..(184): unsure at all Xaa locations
  Clone ID: MRT4577_107226C.1.pep
PAENDALHRGEHPKIISHTIRNANVSRCAGSRSSTAAAAGITGVTASATTLNAAEKDLLPKYGLPKGLIPDSVASYSFDEATGAFKIHLAGTCYNHFGSHLVYYGRTITGKLSKGAISDLSGVHAKKLFLCNYVTLHVRAPXQCTIEIQAGFFSEDTSNSMLDEVSTWGAIPVAHLLTPCARTF

SEQ ID NO: 192591 - protein, 55 aa, Zea mays
  unsure (1)..(55): unsure at all Xaa locations
  Clone ID: MRT4577_107227C.1.pep
FTPYDLSYPFFNLTPXTRREPLTVMRGPNLPHSTIQSNFHLPDTTYNTHQCRLIQ

SEQ ID NO: 192592 - protein, 108 aa, Zea mays
  unsure (1)..(108): unsure at all Xaa locations
  Clone ID: MRT4577_107228C.1.pep
LHPILDISGWRSYSRRDALFRGRVRVVVPRVHIGSTDLVVKSSKLSSKSWAQRGSRPEIVFASSWSGGSRAGYNVFDDSTAXDGGSSSGENQSAELVRRLRAWGNGKR

SEQ ID NO: 192593 - protein, 79 aa, Zea mays
  unsure (1)..(79): unsure at all Xaa locations
  Clone ID: MRT4577_107229C.1.pep
FFSFXQHISSITGHFHMDRPYYNPSEYTFYLPQTLLDHSPLCSVYTCFYLVLVCIIIIIHNNHNLHKTRDHSPQNATEK

SEQ ID NO: 192594 - protein, 444 aa, Zea mays
  unsure (1)..(444): unsure at all Xaa locations
  Clone ID: MRT4577_10722C.1.pep
APSWRRRLPLAPGGEASSAPAPAAAVPAVAPGAAARDKVRRHTISVFVGDESGMINRIAGVFARRGXKIESLAVGLNKDKALFTIVVSGTDMVLNQVIEQLNKLVNVHSVEDLSKEPQVERELMLIKLNVEPDQRPEVMVLVDIFRAKVVDISEKTLTIEVAGDPGKIAAVQRNLRKFGIKEICRTGKIALRREKIGATARFWRFSAASYPDLIEALPKKPLTSVNKTVNGSFVRPSNAGGDVYPVESYESSANQVLDAHWGVLDDDDATGLCSHTLSILVNDCPGVLNIVTGVFARRGYNIQSLAVGSAEKEGISRITTVVPGTVESIGKLVQQLYKLIDVHEVHDITHSPFAERELMLIKVSVNTAARKEILDIAEIFRAKPVDVSDHTVTLQLTGDLDKMVALQRLLEPYGICEVARTGRVALVRESKVDSKYLRGYSLPL

SEQ ID NO: 192595 - protein, 61 aa, Zea mays
  Clone ID: MRT4577_107230C.1.pep
TYTMERTKTSKICFSLGPRLLRLLYNLANLVFMYKYKYAMRTSNGNVMQPESVCCTIICMY

SEQ ID NO: 192596 - protein, 48 aa, Zea mays
  Clone ID: MRT4577_107231C.1.pep
PQILSAFERPKIGMANSPPLGRPPPEYMSPPAFEKGLPGKQPDAPSSP

SEQ ID NO: 192597 - protein, 56 aa, Zea mays
  Clone ID: MRT4577_107232C.1.pep
SVRDCFSATSIKAYMAEFIATLLFVFADVSSAISYGQLTNGCALDPAVLVAIAIAH

SEQ ID NO: 192598 - protein, 294 aa, Zea mays
  unsure (1)..(294): unsure at all Xaa locations
  Clone ID: MRT4577_107233C.1.pep
HWVPRGRPXIGCIHHVLTSQPQAALRDLAQKHGPVMYLKLGQVDTVVISSPTAAQEALREKDRSLASRPSLLGSEIICYGNRDIAFAPYGDYWRSLRKMCTVELLNASKVRRFAAIRDSETMSLVREIRRACAAASGEPVDLGGLLLSCTNSVTGRAAFGNRCSRELTADFLSAISVVISNISGLCVSDLFPSLRFVDALTGTKRRLRRAHQRLEDVFARIISDGEARRAERKGTDAGAGGDDDDDDLLSVMLRIRDEGEFEIPINNTNXQAIILDLFTXGTETTSSVGEWLMA

SEQ ID NO: 192599 - protein, 40 aa, Zea mays
  Clone ID: MRT4577_107234C.1.pep
VLCHNRISRQWLESGRGKSKEPPFVLSGCEVRRWLLELRS

SEQ ID NO: 192600 - protein, 557 aa, Zea mays
  unsure (1)..(557): unsure at all Xaa locations
  Clone ID: MRT4577_107235C.1.pep
MDLTSTTTAFLSGLILILVSLVAHKARTSRSMKRRRPPGPRALPFIGCIHHVLTSQPQAALRDLAQKHGPVMYLKLGQVDTVVISSPTAAQEALREKDRSLASRPSLLGSEIICYGNRDIAFAPYGDYWRSLRKMCTVELLNASKVRRFAAIRDSETMSLVREIRCACAAASGEPVDLGGLLLSCTNSVTGRAAFGNRCSRELTADFLSAISVVISNISGLCVSDLFPSLRFVDALTGTKRRLRRAHQRLEDVFARIISDGEARRAERKGTGAGAGGDDDDDDGDDNLLSVMLRIRDEGEFEIPINNTNIKAIILVILHNVESLIRSVXHDMIQHVTXFCPAQDLFTGGTETTSSVAEWLMAXLMRNPDAMHKAQDEVRQAFEHSSPDEHEAQMDKLRYTKTVIKETLRLYPPLPLLLPRQCRETCDIGGFQVAKGSRVIVNAWAIARSPAHWDDADRFMPERFERDDSAAGYSRATTDGTTQFEYLPFGHGRRICPGMGFGLSTLEILVARLLYYFDWSLPEGMQVVDLDMDMTVGASARRTNKLHLVASPYQVPT

SEQ ID NO: 192601 - protein, 163 aa, Zea mays
  unsure (1)..(163): unsure at all Xaa locations
  Clone ID: MRT4577_107236C.1.pep
FAPPPSIKLNPPXPPPTLPIKFPPPPCPGFIIGNSFPPRDSNSQNKPTXKPPSKTTLFPRSKPPXPKFRVGPPPPPFFFSTPRTTPLPGKKNNPPXPIEPHPRPAFFSPNPPXPLVPPPRFTXAPVKSPPPPFSAFPPKFFFPLFIKIPPFFYPLHFQNSPTP

SEQ ID NO: 192602 - protein, 84 aa, Zea mays
  Clone ID: MRT4577_107237C.1.pep
NFFHCFKALKKKPQNQKKSPKAPLFRGVKQKRKTRGKTKKNPNMGKPNKNLFKPSRPPKASFRKKGPLWEKVPPILGGLQPPRG

SEQ ID NO: 192603 - protein, 32 aa, Zea mays
  Clone ID: MRT4577_107238C.1.pep
LPVLVFITGQKPSVMRRLRWLVRARSTARTAS

SEQ ID NO: 192604 - protein, 100 aa, Zea mays
  Clone ID: MRT4577_107239C.1.pep
LLGPRSSLSLCHHIRQAGRHINMFRWHCLMVRPCWRRPARAVHSCTGSRIRRLPRARAPLGRGGRVSVAAGAREPTIPLVGRRWQDCRSNFCGSMMAPGG

SEQ ID NO: 192605 - protein, 76 aa, Zea mays
  Clone ID: MRT4577_10723C.1.pep
LVLWLCPAVFSMVLCCCPPVLGPFFAVFCSGLFPPALCYGDCLSLSCLVPVFLFCFPVECLCTPPLNLSPLGSFNR

SEQ ID NO: 192606 - protein, 70 aa, Zea mays
  Clone ID: MRT4577_107240C.1.pep
MTEWETAKPAVDDNPDIKLFGKWSTDDLQINDISLQDYIAVKETYAKYLHHSAGQYAAKRVRKVQWSIVE

SEQ ID NO: 192607 - protein, 231 aa, Zea mays
  unsure (1)..(231): unsure at all Xaa locations
  Clone ID: MRT4577_107241C.1.pep
MELCTCAARSSAPPSSSCRAAPFPRVLSHRIWSRSGYCTVCFTPSSPVARSRFSTLMTTAHNTGTPDLVDFNWDDLGFQLIPTDFMYLMSCSSDGVFMNGKLVPYGSIELNPAAAVLNYGQGLLEGLRAHRKEDGSILLFRPHENARRMEIGADRLCMPAPSVEQFLEAVKLTVLANKHWVPPFGKGSLYIRPQLIGSGLCLXVAPAPQYTFIVFVXPXGHYFKXGLAPSA

SEQ ID NO: 192608 - protein, 306 aa, Zea mays
  Clone ID: MRT4577_107242C.1.pep
METPPAKDGLKMFDGMGSTSAAMERVINSSSVELPLLTKANYHEWALVMQVSLEAMELWDAVEAVCKERPKDRRAMAAILRGVPPEMKAGLAVKKTAKEAWEAVRSMRIGDDRVKAASVQRLWKEYENVGFCDGESVGDFALRINGLVASLREMGETLEDHRVVKKILRVVPKRLKQVAVAIEMLTDLNTTTIEELVGRLRVAEDADADDAKAKEVSTEGVGQLLLTEAQWEARRRERNKQRKPRDGDKRRGNGDRGNNGDDEHSDGDDDASSMASGSSRRGWSRNKGQCFECGGYGHIARFCREK

SEQ ID NO: 192609 - protein, 61 aa, Zea mays
  Clone ID: MRT4577_107243C.1.pep
IDHYHDLHELIGVVLVADIHRVTGRRGRIGLPVVSTLGILLKKGAPEPGGSAQRYLLMRSS

SEQ ID NO: 192610 - protein, 130 aa, Zea mays
  Clone ID: MRT4577_107244C.1.pep
MLLGAPPSSAAAAHADDDDGAARAAAHVGGGAFLQVAPGPSPGMEATGTVPPPVATSSWFMDSSCYDVLPSSPAAHANTAAAAAAVGASDCNVVNSGGGDNATSRNSSNCCGPGSAIPPWGDMSTFAMLP

SEQ ID NO: 192611 - protein, 139 aa, Zea mays
  unsure (1)..(139): unsure at all Xaa locations
  Clone ID: MRT4577_107245C.1.pep
GKNGQNRKIGKKHPPKTKPPQQSPGXETGDRRGRPPQDKDQGRQGTRGKKKTPPEKTPPGARGGAPPGPXGNFEHRAPPQEAGTQGAQRPPTLGGPLDVQTQPPKNGGQNRPKGTRGHQPGKPPKKRPQKAGAKIPKPK

SEQ ID NO: 192612 - protein, 42 aa, Zea mays
  Clone ID: MRT4577_107246C.1.pep
TTSGVLKTDTLGLCQFNFTTDDINANFYSKTCTPTYLSLTNK

SEQ ID NO: 192613 - protein, 58 aa, Zea mays
  Clone ID: MRT4577_107247C.1.pep
RGPQGEKGFTRGQFGLGPRELPLLKDNSQQATIIFPLGCNHNKGPNVFPRGRDQDPKN

SEQ ID NO: 192614 - protein, 55 aa, Zea mays
  Clone ID: MRT4577_107248C.1.pep
KNRLVTEIEQYTKRSRPVRRQITGSPRGGRCLNPSKVIQPLHAITYNTYGIHIKK

SEQ ID NO: 192615 - protein, 107 aa, Zea mays
  unsure (1)..(107): unsure at all Xaa locations
  Clone ID: MRT4577_107249C.1.pep
AASQGTPLLDPMVTLSGSVHDQMPDIMASMMSTLFPNFGTMFIVDHQQHVKANWDAESQRXGQDDATDHGSDDIDDNLQSPLITLRQQGVXEGKEIAAPHGSIFERF

SEQ ID NO: 192616 - protein, 97 aa, Zea mays
  Clone ID: MRT4577_10724C.1.pep
RSLWIDWLTHWRGTDGLETYRRVILHHDILYRVIMTSTESDQVHSCGGIAGRHPPVDQREADTALRHHHGVLHHAAQRPLAHRPVLHGGQVAHLRDR

SEQ ID NO: 192617 - protein, 88 aa, Zea mays
  unsure (1)..(88): unsure at all Xaa locations
  Clone ID: MRT4577_107250C.1.pep
VRTTINKLGARLTLAXAYSQXTASCLPFHTILCCXLNSVCLFGQQPTXXIQSCLAFAAYXXQHISFHFIPILAXALNXXCLLIYQXSN

SEQ ID NO: 192618 - protein, 290 aa, Zea mays
  unsure (1)..(290): unsure at all Xaa locations
  Clone ID: MRT4577_107251C.1.pep
MLGGGAGGGGAGAGLGLDLSAVIQAAVVGLVLFSAAVVAVRRAASRYFVVDAAGFAASYDDHHHSSPASPMSSKGNRSEQGAAAADLTGPCAACGVVTSKKCSGCKRVRYCSQECQTKHWQIDHKFKCKQMKSLDLADKLSCGGEANSKKTSGFGRISLVPACKKISKGQVLFPYDEFLKLYNWKDLDVVPCGLMNCGNSCFANVVLQCLSCTRPLVAYLLGKDHSRECSVRHEDWCFXLCELQCHIQRASXSLHPFAPTNILSHLPNIGGNLXGVGRQEDAHEFMRFAI

SEQ ID NO: 192619 - protein, 69 aa, Zea mays
  unsure (1)..(69): unsure at all Xaa locations
  Clone ID: MRT4577_107252C.1.pep
QQAVAMLASXHRVKGTIFFTQXGDGRTTVTGSVFGLKTRLHGVHVHSLFDTTNGCMITGPHYIDASKEH

SEQ ID NO: 192620 - protein, 64 aa, Zea mays
  unsure (1)..(64): unsure at all Xaa locations
  Clone ID: MRT4577_107253C.1.pep
IVSRIISISTELAQELGVYALSFDRPGYADSDLRPARTEESIALXDVAEVVDSLQVGRMFYLAG

SEQ ID NO: 192621 - protein, 62 aa, Zea mays
  Clone ID: MRT4577_107254C.1.pep
VYGPAADAWPQGLGVSNNLSVCRPALIRRSIWVQHLSSDLEVLMRACSHGRPPSLLSLALWT

SEQ ID NO: 192622 - protein, 66 aa, Zea mays
  unsure (1)..(66): unsure at all Xaa locations
  Clone ID: MRT4577_107255C.1.pep
MVVLQPDLALSELTSMYXRSTENGSVWVTMKRSTLMGKAHVRXMDNKGQDVEHMCLVRASNGEKNI

SEQ ID NO: 192623 - protein, 100 aa, Zea mays
  Clone ID: MRT4577_107256C.1.pep
GEIPPGAKKKKEPENLRGPKKKKLNYPKKKKRPKGTKTILRAPRGWKKGAFPIKRAIVVFFPPQNRGGGGALKKPKGDHVKKLPKAKKNFFFPGHLPDPG

SEQ ID NO: 192624 - protein, 253 aa, Zea mays
  Clone ID: MRT4577_107257C.1.pep
MAALSWIRLRPPRAAILILLLLALHISPSFAANFEGFDSDDLPVAAGGLDADDDEGLDGVYLPPPPPISLSTSAPSPPVTTTPAPNPNPATPTPRDPTPALDLWDEDEFEGIPVPEAIPSDDSAAPAEVDPSDPSAEAPVEVAPAAKRSPAELLRAFSFEIACASFLVCYVLNYFTGKRQNENIALAWATKFATRDSIFDKNFSLLGTGDGKDTPLLLKEGQDVFKFYASGRRFCQGLLATMEMRARYDLLSK

SEQ ID NO: 192625 - protein, 229 aa, Zea mays
  Clone ID: MRT4577_107258C.1.pep
MAALSWIRLRPPRAAILILLLLALNISPSFAANFEGFDSDDLPVAAGGLDADDDEGLDGVYLPPPPPISLSTSAPSPPVTTTPAPNPNPATPTPRDPTPALDLWDEDEFEGIPVPEAIPSDDSAAPAEVDPSDPSAEAPVEVAPAAKRSPAELLRAFSFEIACASFLVCYVLNYFTGKRQNENIALAWATKFATRDSIFDKNFSLLGTGDGKDTPLLLKEGQDVFKFYA

SEQ ID NO: 192626 - protein, 167 aa, Zea mays
  unsure (1)..(167): unsure at all Xaa locations
  Clone ID: MRT4577_107259C.1.pep
GRDGERAAGETSAAAPPPRPPPPPRPKRPSPTTRRXDGAXPGPADTDXANXXEPXPXADXAAEPGXRPEHXDPXGKHKAKAXAAXPEEXKAQQDGNXAGGGGNTPTPHGEGKXTTTAGRRQAHGAPREKKADTGRRQPPQGPTTGTKGGAAGGGHSXQTTPGDEPNP

SEQ ID NO: 192627 - protein, 250 aa, Zea mays
  unsure (1)..(250): unsure at all Xaa locations
  Clone ID: MRT4577_10725C.1.pep
MHKLGRGSRDKVQQFMAITGASEKVALQALKASDWHLEGSFDYFYSQPQISVTNSRHLEDLYSRYKERDADMIMVEGTSQLCNDLLVDPQDVVMLVISWHMKAATMCEFTRQEFIDGLQSIGVDSIEKLREKLPSLRAEIKDDNKFREIYNFAFAWAREKGQKSLPLETAIGMWXLLFAERHWPLIDHWCQFLQVRHNKAISRDTWAQLLEFVKTIDPQLSNYDDEGAWPYLIDEFVEYLTENGLVQRKR

SEQ ID NO: 192628 - protein, 58 aa, Zea mays
  Clone ID: MRT4577_107260C.1.pep
PRVRAQHLVEEVLFRAANKAGMDFHELIEIPHGDRRRYHDDVSVIVISLEGRIWRSCV

SEQ ID NO: 192629 - protein, 62 aa, Zea mays
  Clone ID: MRT4577_107261C.1.pep
ERSRQTWRWSGQRPCSTNQKPFSLLFGPPYVRGPASVPAGDQRPVVYSLIDVARVCLRRISD

SEQ ID NO: 192630 - protein, 53 aa, Zea mays
  Clone ID: MRT4577_107262C.1.pep
LWLAACCLLLLYSVRFRSGWCHGNGPRSYPVIGCLVDFYKNRWRLLDWYTELL

SEQ ID NO: 192631 - protein, 152 aa, Zea mays
  Clone ID: MRT4577_107263C.1.pep
YPPFLCVCAPVGVSPAFLAAAHGGGVWCGVLAPFFLMAPPLVFFGFFPVETGLFLARGSWVCIPPFFFLSPFSFVAGCVWLPLCGFPLCLGLVFPGGGFCFPFFFLFPFFFFVPLFVFLPPCVGSLSVGFFFYSTHPCVLQFIYKTKKTLII

SEQ ID NO: 192632 - protein, 42 aa, Zea mays
  Clone ID: MRT4577_107264C.1.pep
GQKGVLVDSVDWPGEALSSHQVQGVLNPVGLNGGDSAPLAGG

SEQ ID NO: 192633 - protein, 80 aa, Zea mays
  Clone ID: MRT4577_107265C.1.pep
VCMPCLLSCLPCSNKPSSAATNAVPQALDEPLPFFLVVPWLAADDAEVVRPVETELGGATGERGERRADVPSDPGQPVHR

SEQ ID NO: 192634 - protein, 221 aa, Zea mays
  Clone ID: MRT4577_107266C.1.pep
MKDGEQSAVGVADVRVGTDKGRAPRRRCLSRHGERRWAEVGRGGTAAWEQARFPARAGVRRWAVVSGFGGDGSGVRRPRPSPSGTRPGQRRCRTTGTSSLARGGRGRGSRSKQLRLQPTNHVAYEFSMRDPTPPRGNAGRRQSGSSPWDGMGRPLVRGAVDETGSIAIAGAAAEGRAQRRQQCSPARTAAGAGLLSGFSHASTRADLATAQSTLTQGSDDW

SEQ ID NO: 192635 - protein, 203 aa, Zea mays
  unsure (1)..(203): unsure at all Xaa locations
  Clone ID: MRT4577_107267C.1.pep
VVVPPNPDPXXLSXRSXXSSYXSVPNXYHGXNNGXASCSRPRXXFLXXRVXAAEGARLVRCGAGKTRXGPAPASWXGQXDDXTXAGTVXVPXADAFYLGXPGAXVLAIEDRLSWAAPPTWCXPVXPASRRAYERADRRVPXPXLSYGSXAARRRVPGSASSPVHRXEXRPEPLXSTVKGRXTGAXRHQGHXPSSLVGSHHRRA

SEQ ID NO: 192636 - protein, 126 aa, Zea mays
  Clone ID: MRT4577_107268C.1.pep
LSNHHLDSQSRWSKVKDRVESDPGYKAVDSSSMREDLFKQYIEKIAKNLDSEKEKELERQARIEASLREREREVQKARSEQTKEIDREREQHKREEAIQNFKALLSDMVRSSDVSWSDTRRTLLED

SEQ ID NO: 192637 - protein, 205 aa, Zea mays
  Clone ID: MRT4577_107269C.1.pep
MDAGSVTGGLAAGSHMRDELHVMRAREEPNAKVRSADVKTCRVCADEVGTREDGQPFVACAECGFPVCRPCYEYERSEGTQCCPQCNTRYKRQKGCPRVEGDEEEGPEMDDFEDEFPAKSPKKPHEPVAFDVYSENGEHPAQKWRTGGQTLSSFTGSVAGKDLEAEREMEGSMEWKDRIDKWKTKQEKRGKLNHDDSDDDDDQNE

SEQ ID NO: 192638 - protein, 49 aa, Zea mays
  Clone ID: MRT4577_10726C.1.pep
DRCDGYSDVLQILDCGLYLTSSPTCCVCVTGDRGRYRAANSIWGSMGSQ

SEQ ID NO: 192639 - protein, 64 aa, Zea mays
  Clone ID: MRT4577_107270C.1.pep
AGERYYNQLTLYIKPTKAEGPVVSPPPDVAHQGRDALNHPTRTECGHLARERTQHLWKRQSCGE

SEQ ID NO: 192640 - protein, 60 aa, Zea mays
  Clone ID: MRT4577_107271C.1.pep
RQPAIVTLVSSALCLAPSFSAFVVWSTQSTHTHQYVQVDLYHWPPPRSRSQLRFPRGGCP

SEQ ID NO: 192641 - protein, 101 aa, Zea mays
  unsure (1)..(101): unsure at all Xaa locations
  Clone ID: MRT4577_107272C.1.pep
AGRTRPPAHAAKKAFPKTKAKPAKGETAKTTGXAPAKAXAAAKSKKAATAKPKKAAAAGTKRKVPETKVGAKPKTGATGKAKAKPTTAKAPASKKARKAST

SEQ ID NO: 192642 - protein, 121 aa, Zea mays
  Clone ID: MRT4577_107273C.1.pep
WTSSVGERRGTSSSSAGMQRAREAAAMRERISTRNRVLTRIDQMQEDIEMKLMATRIHRKKLRQECLRKGTELAHGVADALFAVSPTEDLDGPIVHLPPPAVRLPREKHLGAGTSLPGFQD

SEQ ID NO: 192643 - protein, 61 aa, Zea mays
  Clone ID: MRT4577_107274C.1.pep
DVQTKAAHSAIQHKRSSGRSHGHRQRRRGDHHRCPHRDRQAQCSRAACDKGEEREGAVQLR

SEQ ID NO: 192644 - protein, 121 aa, Zea mays
  unsure (1)..(121): unsure at all Xaa locations
  Clone ID: MRT4577_107275C.1.pep
SIFRPGHLHDTNGTKHWTPDAMHPMPIIVIYTALTDCRPPTHKSXQAQTLLNLYSPAAXIHTPLLRCLPVDAPHDPPSITLANGRVPLIQILIGQARRYQIAQRTLLARMLHHSNRHAVPV

SEQ ID NO: 192645 - protein, 82 aa, Zea mays
  Clone ID: MRT4577_107276C.1.pep
PTLPSSSIHPTQRTSQGFFSIPISIQVRRYVKVSSEAVREGAHEDGHAKARRDVQASGSRPASSLLTHACVYSQAARPAPDP

SEQ ID NO: 192646 - protein, 83 aa, Zea mays
  unsure (1)..(83): unsure at all Xaa locations
  Clone ID: MRT4577_107277C.1.pep
ILGENLNPLVEQLEPNQTAKVPGKLLEMDQTKVPPPLESPKAPKSKVFXAMDFFPNVAPQQKANPPPSKLFAFSLTEGIFSLL

SEQ ID NO: 192647 - protein, 171 aa, Zea mays
  Clone ID: MRT4577_107278C.1.pep
MLVKGVGLRQGGAPQAPEHERVPAGERHTRRPRAQPAPRQHEPPLQRHALIHRQRHDGQAVHAVHLPQPVGVPDAGDPTVRNEHANTLLNEVKVTTNLAPIGRVFLSDDYLPRYLALDIDYIVSLIRDVPADAYSRGARPATAAMTSASRPAMNPSTTTSRRCSAASRLCR

SEQ ID NO: 192648 - protein, 58 aa, Zea mays
  Clone ID: MRT4577_107279C.1.pep
FQYSGLGHLAENCSKKAILGLTLAKSEWAKSQKEKLGYLNDSLQILTNTLEKLLVSYS

SEQ ID NO: 192649 - protein, 74 aa, Zea mays
  Clone ID: MRT4577_10727C.1.pep
TYGFQNSSSSIPICFNKQWQPDTYLDYPSINNRQSYFCSTYWYKLYSNMSWRTLFSLLTTKKLLHTFIYILRTI

SEQ ID NO: 192650 - protein, 120 aa, Zea mays
  Clone ID: MRT4577_107280C.1.pep
ILHTTRTPNSPAQVSPSIPLATAYSHQQQLLPFNQLSALNPAAYLHHQILLPFIQLAASSRSSFFTHHQLLPFYHQFSANPSTLLQLQQLFPFVQLSFTIPIFFYQQHIIFYSLIYISYY

SEQ ID NO: 192651 - protein, 38 aa, Zea mays
  Clone ID: MRT4577_107281C.1.pep
GVILGAVYAGYGTDCFCVNICRRCKHSMAIFAATSVSR

SEQ ID NO: 192652 - protein, 78 aa, Zea mays
  Clone ID: MRT4577_107282C.1.pep
AKLKAQFVLPNARKKVKKALASDDETKSADKSPLYQESADCSLATSSNDGGNGSSSVNMLHKTKIMTHLKSVRPRSWR

SEQ ID NO: 192653 - protein, 102 aa, Zea mays
  unsure (1)..(102): unsure at all Xaa locations
  Clone ID: MRT4577_107283C.1.pep
MAHHFLGNKHHGGEAAKVTDWRKEEKHHKHMEQLGQLGAITAGAYAMHEKHKAKKXDPEHAHSHKIKEGVAAAAAVGSAGFAFHEHHQKKDAKKHRHHGHHH

SEQ ID NO: 192654 - protein, 50 aa, Zea mays
  Clone ID: MRT4577_107284C.1.pep
RGPTHASKLSRISNIFFNRRPGKVYLVSVNYYCDRLVYSYRGATYFLYLV

SEQ ID NO: 192655 - protein, 96 aa, Zea mays
  Clone ID: MRT4577_107285C.1.pep
EAQGSCITIPRNHPVPQIPEEPAHLFASASVKSHAGVEIMNECSDIKEKIVLGGYKQLPESTVSHRLTASQNMSSGTLPSNLSASYAKTQGSAGSH

SEQ ID NO: 192656 - protein, 344 aa, Zea mays
  unsure (1)..(344): unsure at all Xaa locations
  Clone ID: MRT4577_107286C.1.pep
MDLGSCYLGGNADAVEFCPHRPFRHVLAAATYTLQEQERDRAGSISLFSVDVASEDASRRLQLLHTVETAGIFDMKWSPKSPLLAQADAHGRLALRRLEQEDVPDTGILLTDVSAEDIXSVNELILXWNQTDCTSSVGLSDGSLSLVSVREDRLEISQQWTAHQFEVWTCYFDRTSPHLLYSGSDDCCFSCWDLRESPPNIVFQNKKSHKMGVCCITQNPLEWNMLLTGSYDEFLRVWDMRFMAKPVNEKLINLGGGVWRMKYHPSIADVVLAACMHNGFAIVKVGSGDATIMETYCKHESLAYGADWQKSEEVEQNGNSSVVATCSFYDRLLRVWQPENLAEL

SEQ ID NO: 192657 - protein, 40 aa, Zea mays
  Clone ID: MRT4577_107287C.1.pep
LSLQKLHKRVLIQSMPLFFLELKFYEDKQISGEESPREIT

SEQ ID NO: 192658 - protein, 108 aa, Zea mays
  Clone ID: MRT4577_107288C.1.pep
VIIQASNHIMCSPPAPTHIRAFAPHSHKPLAHPARNDHLGKATEYSLPIWQGAESYVDDLQHDYTLASGLVINLSPFTVIQTYMALIRRYRVSFPFFFVFIQNKIKLL

SEQ ID NO: 192659 - protein, 44 aa, Zea mays
  Clone ID: MRT4577_107289C.1.pep
QTHGQRTPELTRRRCTSSSSIHNAMQLSWILHLSVHKSGRRDSS

SEQ ID NO: 192660 - protein, 145 aa, Zea mays
  Clone ID: MRT4577_10728C.1.pep
MAARIGADGKAMARRGRVELRRIEDRVSRQVRFSKRRSGLFKKAFELSLLCDAEVALIVFSPAGKLYPRGAAADRGPGEPAGALLQAPLGALQEGLRALPALRRRGRPHRLLPRRQALRVRLHQAKGVVRHLSIQTQEFVAITGL

SEQ ID NO: 192661 - protein, 74 aa, Zea mays
  Clone ID: MRT4577_107290C.1.pep
VEATPINSWNQTKPNQKFSCVIGAGGVHSIPPRTKNMPRETKPTGAKWFITMMGRGRVRNQGEGGGDWRRWRDR

SEQ ID NO: 192662 - protein, 94 aa, Zea mays
  Clone ID: MRT4577_107291C.1.pep
IPWEVGVEAILLAVLPPLVPVVVPSVRVPGPSALLFPDPVLGPVGADVPCWSPGLQYEISTLNHGARGVRQGTSSRRVLGQRRGVWPPKFRAVR

SEQ ID NO: 192663 - protein, 459 aa, Zea mays
  Clone ID: MRT4577_107292C.1.pep
MVMAAPRVLVLPYPAQGHVIPMMELSHCLIEHGVKVTFVNTEVNHRLILGALATGDKELGGVDMVSIPDGLGSGEDRKDLGRLTDSFSKVMPGELEKLITSINADGREREKVSWLIADVNMAWAFPVAKKHGLRTAGFCPSSAAMFAMRIRIPEMISDGVLDERGWPKRRGAFQLAPAMPAIDTSEFSWNRAADAKGKPIIFQLILRNNAATHLAETIVCNSIQELEPGALALVPDVFPVGPLSSDKPVGCFWAEDASCAAWLDAQPASSVVYVAFGSLAAYDAAQLVELAEGLLLTSRPFLWVVRPGSAGEQHLEQLRRRAAPRGRVVSWCPQQNVLAHPAVACFLTHCGWNSTMEAVRNGVPLLCWPYFTDQFLNQSYICDVWRTGLKVPLPPGTAHGTGLVGRDVVRDKIEELLRDSETKARALALRDLASRAVGDGGSSRRNLRQFLGLVRGSES

SEQ ID NO: 192664 - protein, 58 aa, Zea mays
  Clone ID: MRT4577_107293C.1.pep
AQPNPKLLVSHLLNLSFFLREMVMTIIHTDKPLRQIWYSSRHSVNRATIDRVGSLKPF

SEQ ID NO: 192665 - protein, 203 aa, Zea mays
  Clone ID: MRT4577_107294C.1.pep
MASEWEMAAMGVELGMGMGGTYHHNASSITTAPTSSHHSGGAGYSAAHHHHYYGMPPVGGDATAMRVDDLLENLDLSTGAGAHEFFPTAAAANKGHHHSGGAMVGEPSPTANSSDHQTSLLSFADEFYIPSEEAAELEWLSKFVDDSYSDMPNYSSATHAAMAAAAAAANTAGTGAGGTSGGQDSCAAAAPGRGARSKRSSRA

SEQ ID NO: 192666 - protein, 36 aa, Zea mays
  Clone ID: MRT4577_107295C.1.pep
DQHDDSYRISTLQRGMAEEALFRCTSHSSTTDRATP

SEQ ID NO: 192667 - protein, 51 aa, Zea mays
  Clone ID: MRT4577_107296C.1.pep
GGKNRGPLKSIRLFYMHLRKSPIESVKLPGPSCCPPCFATLAIKLGSSRIH

SEQ ID NO: 192668 - protein, 58 aa, Zea mays
  Clone ID: MRT4577_107297C.1.pep
MNINLQWGEFLHKRALSLSHHRVMDMHSTPQLDSLSQRTIANARKTSAFTSRSPGGWP

SEQ ID NO: 192669 - protein, 31 aa, Zea mays
  Clone ID: MRT4577_107298C.1.pep
LKTLHSPSSHLCSTKQITLHGLPNLFLLLLD

SEQ ID NO: 192670 - protein, 179 aa, Zea mays
  unsure (1)..(179): unsure at all Xaa locations
  Clone ID: MRT4577_107299C.1.pep
TLDRASRVAALMHVARSSSRSGDGLLHDLLRQHWRWRPHALAVPPPTSLFLPRPLLHEQDQQAKPYGDXPEALTRLTCDAPRGERARPTQLTTSLTRTRRTLTDTGHCTKRMTGLPAGTPTAEDHCTLDLAIRSMPSSEKALSLYTTRMKAAAKDIQCKLFLRELMINRVIEYTWSLHG

SEQ ID NO: 192671 - protein, 32 aa, Zea mays
  Clone ID: MRT4577_10729C.1.pep
HRVAVGLHHIPLLPSPFSCVVEVIMHPKALLL

SEQ ID NO: 192672 - protein, 171 aa, Zea mays
  Clone ID: MRT4577_1072C.1.pep
MASATSFYDFKPLDKRGQEVPLADYKGKVVLIVNTASKCGFTPQYAGLEKLWTDLKGKYPDDFVILGFPCNQFGGQEPGTDDDIQEFCQLNYGVTFPIMQKTEVNGDGTNPLWVWLKDQQSGLLGLKRIKWNFEKFLVGRDGKVKGRWASTTKPESLEKPILEALAEKPAA

SEQ ID NO: 192673 - protein, 41 aa, Zea mays
  Clone ID: MRT4577_107300C.1.pep
DTQSTQEYLLHCASTLFYISKTPPSSCWHIYVQNRLLVMPA

SEQ ID NO: 192674 - protein, 54 aa, Zea mays
  Clone ID: MRT4577_107301C.1.pep
HIHRLLTFYQHAAPIAGTLLQLRHLLHSHHFAVTTPNMMSSNYPLLARPLLDFL

SEQ ID NO: 192675 - protein, 72 aa, Zea mays
  Clone ID: MRT4577_107302C.1.pep
GRHLHLHATLWVWLALAHTVQLHRHLPPSNEKASTSDRKRCRQLCCERSCWPRRLRRLLCCGCDRPSASRTT

SEQ ID NO: 192676 - protein, 125 aa, Zea mays
  unsure (1)..(125): unsure at all Xaa locations
  Clone ID: MRT4577_107303C.1.pep
MGFRRCCRRVNLADSITNAKAGLIVLENVETKKIVLAHGEGFGAWCWYKTIXHLEVAGIDPVAYELTXSGIDDADTNRIATVADYYKPLLDYVDRLAEDEKVMLVGHSCRGASVLFALRQDPPKI

SEQ ID NO: 192677 - protein, 79 aa, Zea mays
  Clone ID: MRT4577_107304C.1.pep
RSVLTNRGGFRGACIRLHQPQLLHTGEEAYLEGLVAVEANASRRQPRHHIGLQAFYSGQLASGQSCLCVRSSPAPGGIL

SEQ ID NO: 192678 - protein, 104 aa, Zea mays
  Clone ID: MRT4577_107305C.1.pep
TMVLGTKIGPQPVFCPSMAIAGVAGSSTIRVRMEGGKGKRGACLWGILYWGPPWAPPLWPLTPYFIIWFGFNLGPAGPLFVPSLVLKSPQILLVDWAAFQIWFF

SEQ ID NO: 192679 - protein, 272 aa, Zea mays
  Clone ID: MRT4577_107306C.1.pep
MALLTLQQPAIPFLLLLLLLPAASAGLPGGRTLVFILAGQCRARGRGGATNGTWDGIVPPECAPSDRIVRLSPALRWEQAREPLHAGVDVGNVLGVGPGMPFAHAVLASEGAAAEPPVVVGLVPCAQGGTPIANWSRGTELYERMVTRARAAVAECSGRGHLAALLWYQGEADTMRRQDAELYQRRMETLVRDVRCDLGRPDLLVIQVGIATAQYNGKFLGVVREAQKAVKLPNVKYVDAMGLPIASDHTHLTTEAQVQLGNKLAKSYLETL

SEQ ID NO: 192680 - protein, 95 aa, Zea mays
  unsure (1)..(95): unsure at all Xaa locations
  Clone ID: MRT4577_107307C.1.pep
GGGVGGFFFFFWVFFFFFFFFFKDPHFFKTFPTNQVPESNPLPPPPKDLSGFVGGFKFKKPFPPYXPNTDNHRSXHXCRMAGGGGNKPPGTGGFP

SEQ ID NO: 192681 - protein, 109 aa, Zea mays
  Clone ID: MRT4577_107308C.1.pep
GEARHRGCFFFTLNVVFAPVELGFRAWVVRGSGPGSSRLLLGLFMLPALCWVVMLALVTQPVVSLVCKSSPPESLAKANISAPLGVSLGDSVPLKASPVQMDQFQPGNL

SEQ ID NO: 192682 - protein, 89 aa, Zea mays
  Clone ID: MRT4577_107309C.1.pep
DAWADAWADAWADAWEIKVCQVLEKDVSVLWVYLVGWLETQAGNALARGSTGGLFDCSWLKVTHNSNCYLVFLAIKSGQRWCTILTIVW

SEQ ID NO: 192683 - protein, 34 aa, Zea mays
  Clone ID: MRT4577_10730C.1.pep
IKNSFAAVPEGQHFHKYCINPGLLNYFSDGSNVN

SEQ ID NO: 192684 - protein, 56 aa, Zea mays
  Clone ID: MRT4577_107310C.1.pep
NPPNRQEPAQYTKKETGVIKGANTMVYTFPLPPLLFFFVVKFLNCFFCFFFFFFFF

SEQ ID NO: 192685 - protein, 147 aa, Zea mays
  unsure (1)..(147): unsure at all Xaa locations
  Clone ID: MRT4577_107311C.1.pep
KPGRSKGHGLGKGKNQPGRKKKNKNPQKGGGGGPKTTPRPRGRGEKNGPQQEQNKKGRGEKKNPGGGKNXPPGGRTGTSKRGPGGXKNKGTGPWTRGGHAPGGTEEANKTTEPTGKPTEGKSPPLNQRKKKWEANPGDKAPPTITKT

SEQ ID NO: 192686 - protein, 146 aa, Zea mays
  unsure (1)..(146): unsure at all Xaa locations
  Clone ID: MRT4577_107312C.1.pep
AVPXLNSLGDGLFXLLFFTFYDILLSLDILTSWGVPNQGWKELILMLIFMLTHLSSYPLPFTNALIHTSFISDAFSTILLLLISDLRPITHLPSLTFILLHSHILSLYIFSNLSLFLFRSISLFLLYLHSLSFHALLPEPFHLIFP

SEQ ID NO: 192687 - protein, 76 aa, Zea mays
  Clone ID: MRT4577_107314C.1.pep
NSDIALQLLTYAPTVSTSSPSDTQKSQNSTRNYDTLESFISFGIILSTCYLHKKVGQTSQKIFLNVTWSFVICINS

SEQ ID NO: 192688 - protein, 119 aa, Zea mays
  Clone ID: MRT4577_107315C.1.pep
GTHVGLFGILKVIVAHLPGAGGIFRFGAPVIPTPWPGFSPVLSRVHGISFRRVNPPVWPSFNRGKEPSAPFAWGQGERGENVPFLKGLVKARVFPRFGAGFAVNNRVPRVGPPQSGGGF

SEQ ID NO: 192689 - protein, 53 aa, Zea mays
  Clone ID: MRT4577_107316C.1.pep
MGISRDSMHKRRATGGKQKAWRKKRKDELGRQSVNTKFGSNKTVRRETDRRGT

SEQ ID NO: 192690 - protein, 35 aa, Zea mays
  Clone ID: MRT4577_107317C.1.pep
VGLFEDTNIWAINAKRVPIMPKEIQLACRIRGERA

SEQ ID NO: 192691 - protein, 99 aa, Zea mays
  Clone ID: MRT4577_107318C.1.pep
IWHSHYRHKAGNNVWRESRLHSRDWWLSFQPGRSDLQRHDLLLSLVWPLAWPGICTKRLRPDFARDLAGQASPAACERASSVALTATFSIMSISFFKNL

SEQ ID NO: 192692 - protein, 79 aa, Zea mays
  Clone ID: MRT4577_107319C.1.pep
SPSWSRPYPLTLLRLLQQHVLECCRCSTLYLILHNSQFSIVDQNVCMTRFHHNRLTHLFLYLLLHQAASATIAISATFF

SEQ ID NO: 192693 - protein, 56 aa, Zea mays
  unsure (1)..(56): unsure at all Xaa locations
  Clone ID: MRT4577_10731C.1.pep
MDQGKMETLSFVLFMEGSRLPRGTVRKKHPEGEALLPLLVKXIGCRMTVRRPRAPH

SEQ ID NO: 192694 - protein, 68 aa, Zea mays
  Clone ID: MRT4577_107320C.1.pep
GGPVNSKFFFNLNQFVTVQKWFNGSLMAKIGFKVSFRKRPDLPIVGERENTKGLTIFILQKIIYGGKT

SEQ ID NO: 192695 - protein, 117 aa, Zea mays
  Clone ID: MRT4577_107321C.1.pep
QCWHCIPSDLASMAYGVMVEQCASSSLVTHYYILAVSALISLTPRHRSNYPAETPAELVRPSANASIYIVITSYNRACVRFLFPQGPANMPSSLSVHLARSTGGCSWSGRCRAFVNS

SEQ ID NO: 192696 - protein, 104 aa, Zea mays
  Clone ID: MRT4577_107322C.1.pep
HCPQKAKKPFFFLSRTHHFISETLGGRADLLGNLKGGPPHGGAVFKNRGVGKKKKGGAPPHLWGGKRGPRLAQQGWKKATTGFVSKRGPDNTPTGGIKKKNCGG

SEQ ID NO: 192697 - protein, 119 aa, Zea mays
  unsure (1)..(119): unsure at all Xaa locations
  Clone ID: MRT4577_107323C.1.pep
YDRRQISFVWNKAPVSHVRPFTSPWDSSSELPHAKEIREVSTKVGTITGQVHLDKSYVSNAIPSLTHGKDEPWPMKGPDMSIAASKFDGAPDLQRALSLLSVGACGLPDPVHQNXCVIQ

SEQ ID NO: 192698 - protein, 141 aa, Zea mays
  Clone ID: MRT4577_107324C.1.pep
TNKQKLLNLTLIEKRFSWHSKFIIANNKVRIPFWRKWYQSLQHFISLKSNIIKCLDPRLIRDYNRWSNSCSILLFLGVNLLTKESCHLQQNIQLPSMNVVMARSSAFFVPPYILCRLNHMNYKNILTCKFTSFCKKFKVPV

SEQ ID NO: 192699 - protein, 331 aa, Zea mays
  Clone ID: MRT4577_107325C.1.pep
MEWTAPKRAASPPSPPLLWDWGGDHAGATGSGSGSSGDAPARRGGREREAKRARADDGEVRCQVEGCGLDLSRVKEYHRKHRVCEAHTKSPRVVVAGQERRFCQQCSRFHALSEFDQKKRSCRRRLSDHNARRRKPQPDAFAFASARLPSSSFDDRRQISFVWNKAPVSHPFTSPWDSSSELPHAKEIREVSTKVGTITGQVHLDKSYVSNAVPSLTHGKDEPWPMKGPDMSIAASKFDGAPDLQRALSLLSVGACGLPDPVHQTSCVIQFTSASENSGDLHLSHGANSGLASCGDGQHIASQPQAQLVRFTMDTSNSVYEPSFFSVNQIN

SEQ ID NO: 192700 - protein, 142 aa, Zea mays
  unsure (1)..(142): unsure at all Xaa locations
  Clone ID: MRT4577_107326C.1.pep
PAQIVAPAHGVDGPEARLIASPPLGTGETTPPRARAPPATPRRGAAGRSGRRSVPGPARTAGEVXRCQVEGCGLDLSRVKDYHRKHRVCEAHTKSPRVIVAGQERRFCQQCSRWVAFLLAFACPLHASALACSVRLLPSSFL

SEQ ID NO: 192701 - protein, 204 aa, Zea mays
  unsure (1)..(204): unsure at all Xaa locations
  Clone ID: MRT4577_107327C.1.pep
LRCRSGGEEWLPQRGAGRAPRRRPPPPPPPRPPPQTPPRRRRTSXGADPVGREPPDDPPXTSSPSAPPAAPTGISFGRRRPTSPPRLRSSSSPAWPLPRGPSFTSPSAASSASASPAPTTASPSSTPPATASPSRTATAMTPTASSASATSSQASEPACPIPRNRATLKKSSFLATSLSPSGSSAASSTTATLRMITGRQRAAM

SEQ ID NO: 192702 - protein, 234 aa, Zea mays
  unsure (1)..(234): unsure at all Xaa locations
  Clone ID: MRT4577_107328C.1.pep
PPFPDTARPPPPPCRRSGAGRICRRTSSAASATASTSSATPARGAPARPGDARSRRRPRRSSSSSTTPGAARPPRRSPPTAPSSSRTSSRGADASAPATAGSPSPSASTAARACSASSTPSXHGDPSAAXSTRAAGSPSSSSRPTPPGTTSPPPPSATSTGSPTSPRGPGGGPSSIPFASPAEISSPMSSTMKKVGSTASPAMEMSTCSACRSAAAGSLSSSRIRLAHQSQRCL

SEQ ID NO: 192703 - protein, 66 aa, Zea mays
  Clone ID: MRT4577_107329C.1.pep
TVPYAVPSFHTASCRKAEIISYLHRATQAEVARDISSAHLYLFFEAKGKDEDLRTRGIKNFPARPA

SEQ ID NO: 192704 - protein, 93 aa, Zea mays
  Clone ID: MRT4577_10732C.1.pep
TRTLHVPWIQLNQKIQQNPLLIHECTPGQEARAYNGPNELMVPINPQIIQAPMNYVHRGWPHACTCRARCVSHKDFLRTKKPSPRIARTEFPA

SEQ ID NO: 192705 - protein, 67 aa, Zea mays
  Clone ID: MRT4577_107330C.1.pep
LILCGSFALQILILHYHIFLLRQTNLYTPQSQIQIPYVSLLSLLIITRTASPLSYKTKGPKLFATSN

SEQ ID NO: 192706 - protein, 298 aa, Zea mays
  unsure (1)..(298): unsure at all Xaa locations
  Clone ID: MRT4577_107331C.1.pep
HASEQELARECDYVLEASNQKRYKELLCDSDGYNVPKVIDQLSSRKVLTSEFVXPGIPIDKVAQLSQETRNYVGCKLLELTIKELFVFRFMQTDPNWSNFLYDDATRKFNLIDFGAARDFAKHFVDDYLRMVHAFAVHTLSVSESIIRILPYLLFSRWLVSDLYCIVPMVVACANRDRTGVLEMSRRLGFLTGEEPEVMLDAHVQAAFIVGVPFSKPGGHDFRANNITHSVSNLGATMLKHRLTPPPDEVYSLHRKLSGAFLACIKIGAVVPCREILFQVYEQYNFSDGHSDVESSAG

SEQ ID NO: 192707 - protein, 110 aa, Zea mays
  unsure (1)..(110): unsure at all Xaa locations
  Clone ID: MRT4577_107332C.1.pep
TPARAPARNPGGDTTRAFSLHMGKQEAELTLRGNSAASYGELTSCKXLIRAVADGKDTGYNDRSALHFAGCXRYEGVAQVLINQGVDMDHTDQLWNTPLLEAAKQGHQRG

SEQ ID NO: 192708 - protein, 188 aa, Zea mays
  Clone ID: MRT4577_107333C.1.pep
MVDAGDITAGGPPRAHEEEQAGTPAYGSVVLGGTFDRLHDGHRRLLKASADLGRDRIVVGVCTGPMLAKKEYAELIEPVDKRIKGVEDYIKSIKPELIVQVEPIEDPYGPSITDEKLDAIIVSKETLNGGLAVNRKREEKGFPLLKVEVVDLLSGGVEGEKLSSSALRKLEAEQAQQSETKSGSLEAS

SEQ ID NO: 192709 - protein, 92 aa, Zea mays
  Clone ID: MRT4577_107334C.1.pep
LFPFFFFFGPPRFKNFLDQPGPGIIRGRHWFTGGLEVKFLGRKNPPHKFLWGGGRPRPHLGKETPFGKPSGGFFFGFYKPKLWNQFKGPRGG

SEQ ID NO: 192710 - protein, 72 aa, Zea mays
  Clone ID: MRT4577_107335C.1.pep
LVCCHMQSIKPELIVQVEPIEDPYGPSITDEKLDAIIVSKETLNGGLAVNRKREEKGFPLLKVHLCLLLYFL

SEQ ID NO: 192711 - protein, 116 aa, Zea mays
  unsure (1)..(116): unsure at all Xaa locations
  Clone ID: MRT4577_107336C.1.pep
NIPHSRQVAPAPVPDFDALAXQSLPKKRYDHITRKTXHEYTLXNEILGGYGTILLRPQLLLHEKKTDLSTSLLXYNMPSPIIVGPTGAHRLANPKEHVDTQRDDAHYNTLLTLGYS

SEQ ID NO: 192712 - protein, 160 aa, Zea mays
  Clone ID: MRT4577_107337C.1.pep
MATPTPPPLVLILLLLVASFPSPHTPPDVSPEPLPEPSPVPAPAPMPMPTPHSPPADDYVPPTPPVPGKSPPATSPSPQVQPPAASTPPPSLVKLSPPQAPVASPPPPVKTTSPPAPIASPSPPPPAPVVSPPPPVKSPPPPAPVASPPPPEKKKKKICG

SEQ ID NO: 192713 - protein, 111 aa, Zea mays
  unsure (1)..(111): unsure at all Xaa locations
  Clone ID: MRT4577_107338C.1.pep
HASDHRPVPKPQQGEIRGGNPSYFPKTQAAGAKIFQTHFARVYTPRYIVWGGAPXPGLWRLFPVNLGHGLHARGFCPPLLLWLQKGLLFFFPLVHRGGGGFFPVVPSFICD

SEQ ID NO: 192714 - protein, 139 aa, Zea mays
  Clone ID: MRT4577_107339C.1.pep
SSFFFFFFFFFFCGFFYYFLNFFFFFLLFFFIKMGNSSYCLYCHPRGRGENGEKGQKTTEREGGRWAAPPQQKYYRAGPGGPSKGQNPAHWGGAVGDPKGEKTRRKQGDRGNRGENANPAQFRTRGGTGRQKGKSPGGP

SEQ ID NO: 192715 - protein, 319 aa, Zea mays
  Clone ID: MRT4577_10733C.1.pep
MLQEVSELDLTDCHGKVHVPKQLFVNTDPSSIPAAVRRAGLSRPMLPNHIDVEPSPDARSRRGQLNPEARMARYDRAITVFSPDGHLFQVEYALEAVRKGNAAVGVRGVDTVVLGVEKKSTPKLQDSRSVRKIVSLDTHIALACAGLKADARVLINRARVECQSHRLTVEDPVTVEYITRYIAGLQQKYTQSGGVRPFGLSTLIVGFDPYTQKPALYQTDPSGTFSAWKANATGRNSNSMREFLEKNYKETSGKETIKLAIRALLEVVESGGKNIEIAVMTHEDGLHELEEAEIDEYVAEIEAEKAAAEAAKKGAPKGN

SEQ ID NO: 192716 - protein, 96 aa, Zea mays
  unsure (1)..(96): unsure at all Xaa locations
  Clone ID: MRT4577_107340C.1.pep
MVLLHLVPYTGFMYRDVLLCPLLAVQFTKLKVGLAVGCALNHAVLDGTATWHGMATWADLCRGVPLALQPIHDRSRSRSGRVRLEQPAXAEAHEKT

SEQ ID NO: 192717 - protein, 47 aa, Zea mays
  Clone ID: MRT4577_107341C.1.pep
FLIFSLHFTRQLTFTLVLADNILHQPLTYCNSNALVLLTISFNLMSL

SEQ ID NO: 192718 - protein, 111 aa, Zea mays
  unsure (1)..(111): unsure at all Xaa locations
  Clone ID: MRT4577_107342C.1.pep
RRLLALASGDSRHFLPDWMTKRSNKVGIVGQYGALHGARLRLHTPICQGSQHSTYFCEICDQLAVKRKAGGISXGKDCAIGTGGGAYTMNTATAVTVRRTIXRRLLQQTQV

SEQ ID NO: 192719 - protein, 86 aa, Zea mays
  Clone ID: MRT4577_107343C.1.pep
RLTPHSYGGFLTSLINNTLYAYSYTTIHWILGNNASVVQKFKRGSVVVDQIHACKSCVLREWPQADRSKYDVSDRLIVIDAGATQE

SEQ ID NO: 192720 - protein, 71 aa, Zea mays
  Clone ID: MRT4577_107344C.1.pep
NQITLHIKAYETDIIDRYHRIMIHVNIQTIFSAEFIRFSFKVESRQAKISRRVGGRHTSTLLWFVLSHFMA

SEQ ID NO: 192721 - protein, 62 aa, Zea mays
  Clone ID: MRT4577_107345C.1.pep
PPLPPGAFLGFSPKIKTGVFYSWISKNHGKHTLTRGQTTGDYNRHSSIAGKGYPQHQVIRTR

SEQ ID NO: 192722 - protein, 46 aa, Zea mays
  Clone ID: MRT4577_107346C.1.pep
FYRCLYRSSSPLLDLKNPVFFPPLVIWTGRRVGGHDRSEPTVVCLV

SEQ ID NO: 192723 - protein, 47 aa, Zea mays
  Clone ID: MRT4577_107347C.1.pep
FPGWRGYLSGGPRFFFFYRRNNTVLKINQQHIPSFMYNPQVHKSTNI

SEQ ID NO: 192724 - protein, 71 aa, Zea mays
  Clone ID: MRT4577_107348C.1.pep
SNSLAIHYLGKLTSLHTHKPIRKLQPHQHNWTKPEEPNRKGTALHTDTREQRGVLIPITLSGQIPLLGEQE

SEQ ID NO: 192725 - protein, 105 aa, Zea mays
  Clone ID: MRT4577_107349C.1.pep
LPGPHLKGTQEEKGGPPAEDPHLVWARLNPLINGEAPLGGEKKKQGLNRPKKTQMGPSCGAPGKRPTSAPGELNLPPKLGGPQDQKTGVHRGPNVMPWAPQTPPF

SEQ ID NO: 192726 - protein, 402 aa, Zea mays
  Clone ID: MRT4577_10734C.1.pep
LTISRGHEDVKNHHGIGNFKGNQCLRDACSISTIPYCDSFIDCGRGIGSGLYRQQWFNDSGAEACFNTGNDATFQYGIYEQAVLLTTEDSAVKRYIYSLFWGFQQISTLAGNLVPSYFIWEVLFTMAIIGLGLLLFALLIGNMQNFLQALGRRRLEMQLRRRDVEKWMSHRRLPEDLRRRVRRAERFTWAATQGVNEEELLSNLPEDIQRDIRRHFFRFLNKVRLFTLMDWPILDAICDKLRQNLYISGSDILYQGGTVEKMVFIVRGKLESISADGSKAPLHDGDVCGEELLTWYLEHSSANRDGGKIKFQGMRLVAIRTVRCLTNVEAFVLRASDLEEVTSQFARFLRNPRVQGAIRYESPYWRTIAATRIQVAWRYRKRRLKRAEKSRLSEETYASLGS

SEQ ID NO: 192727 - protein, 64 aa, Zea mays
  unsure (1)..(64): unsure at all Xaa locations
  Clone ID: MRT4577_107350C.1.pep
LHFGGQPALXPLTVLQASIKISGKASALIQHQXRPKXLVAIASEVHTKTMXKRLKVGIAVALKP

SEQ ID NO: 192728 - protein, 103 aa, Zea mays
  Clone ID: MRT4577_107351C.1.pep
NSPSPPLYMFFSTLLCYSIVLVVNIWYEMSTDVHRSSTPFMASTASIDSQLTQALESQTRALLSELDKRLRAIDSKWESRVVVLQSSKSRLQTPCVAWTRSPR

SEQ ID NO: 192729 - protein, 80 aa, Zea mays
  Clone ID: MRT4577_107352C.1.pep
LKRPLLFKTKSLLIKHQKRKSGTPGREKGLLLGGEKKTPKICNRLILKRAPPNCLAWEKMLAGQNLVAKKRPNFGGGIFL

SEQ ID NO: 192730 - protein, 89 aa, Zea mays
  Clone ID: MRT4577_107353C.1.pep
GWWAVKKMASRRFIGSLSRFPGSSPFSMVLFFSSGGAHFDPVSLSGGEMIARRADAPRAIHASVSSEWVVLPSSSCQRQHTRVCGILGR

SEQ ID NO: 192731 - protein, 59 aa, Zea mays
  Clone ID: MRT4577_107354C.1.pep
MGFPPPPPQKKKKKKKKKKKKKKKKKKKKKKKIKKQKKKKKKKKKLVQKKKKPPPPPGR

SEQ ID NO: 192732 - protein, 97 aa, Zea mays
  Clone ID: MRT4577_107355C.1.pep
SLFTRLYPRGKRNFTVSNERISHGELGIEARSHLRRDRPLHAHQNPLRRPECLTPWTCRIISSGFCILGPLYKSVSLFFSLFRIVEQHRRLRTRGRR

SEQ ID NO: 192733 - protein, 50 aa, Zea mays
  unsure (1)..(50): unsure at all Xaa locations
  Clone ID: MRT4577_107356C.1.pep
AKKSSSHWPVLRLFIDPPAVGLGVSGVWKXFSSRLRLRHGRRQPVRAGAE

SEQ ID NO: 192734 - protein, 62 aa, Zea mays
  Clone ID: MRT4577_107357C.1.pep
FRKAATKKAPHSYGSFLIGCIYKTRSYFSHLSIASREVIVAGKTKNWQLCDVHIHRFNKFHN

SEQ ID NO: 192735 - protein, 64 aa, Zea mays
  Clone ID: MRT4577_107358C.1.pep
LGDACQSCLAKKDSIHCSVSQPTCAGLCHYAGGSLMLVSLGCSKLSCILRGRQVTDLMGAIRAR

SEQ ID NO: 192736 - protein, 79 aa, Zea mays
  Clone ID: MRT4577_107359C.1.pep
WTRVSVTGRSVPTPGDARLVDHGELRDALYRRGSHPALPVQEFAGGVGEGVCPERTASAPRGALRARRRLLSPLTGAPT

SEQ ID NO: 192737 - protein, 268 aa, Zea mays
  Clone ID: MRT4577_10735C.1.pep
MVQLERHIVFPLVYRLIELALLLPVATATVERAFSAMNIIKTELRNKMSDVSIFTRTSHGGQAGGSDGDQPGRWPRADVDRHEGRRERVQEPDPVEAVSPQRTTDSATGGKDAGCGIGFLGDGFRKERRGRLGPGCGSLFPAHGSAARSGKGRMRHTAKWWTRSVHLWPSGSKGTTLATSQPRESVQAQPTREEDRPGEWAPRGSVTAERQARVSGELGRPAGLRGCQAGPLRWRKRSGARDTGRSGLPARAVARRAAARWAEARVWA

SEQ ID NO: 192738 - protein, 208 aa, Zea mays
  unsure (1)..(208): unsure at all Xaa locations
  Clone ID: MRT4577_107360C.1.pep
MLSAIELQPGVEDRHIFSIAPDGMYSAKSAYNGLFMGSVSFGHFTRVWKTWAPPKCRFFIWLAAHNKCWTADRIXKKGLNHHEKCLLCDQAEETLDHLLVACSFSRVFWYQLFRKFGLHSLAPQPAVTSFLNWWEEVSEVVSGVTRKGLNSLIILGAWTIWIHRNKCVFDGLSPCLTYILAWADEERSRWEAAGAKALCSLAASAAAP

SEQ ID NO: 192739 - protein, 242 aa, Zea mays
  Clone ID: MRT4577_107361C.1.pep
VPGGQDRLRPSATPSVHRDWLAAARGSIAQYRLRYTSGRRPSTKTQQQREAPGLHLLWDHHPRKGCAAHRRPLRFYSLYNIWLANISMSSVSNSIAVGLPSYGLYLETRFLTQTYRNFAQKSSYKYSRIRAVQGNGGRRRLVDIIRIIPELSRDYFKSRSRRALFGGISLLGGFYVAQTISLSFGTLGVNDVIAAVVCVLLTEYVTKFYYSRPKVTFPIALLNNFKMGFTYGLFIDAFKLAS

SEQ ID NO: 192740 - protein, 40 aa, Zea mays
  Clone ID: MRT4577_107362C.1.pep
GSLPCAATPMGFAAFREPIVDVVILTSSLCLNAAWSLDLL

SEQ ID NO: 192741 - protein, 67 aa, Zea mays
  Clone ID: MRT4577_107363C.1.pep
DICNGMVPIAPVYGLLIDSFSKAGRLEKALRLHKELMEVSSSLNITSKDTYTSFSAMLARQGSVAHV

SEQ ID NO: 192742 - protein, 194 aa, Zea mays
  unsure (1)..(194): unsure at all Xaa locations
  Clone ID: MRT4577_107365C.1.pep
VPSEPAGALSGFSSTCLYPRLHELGSGSSQRPSRSNLTGVLSPRTQLLFPSASPCSDLDAVLSLAPCARLPGAESGRLPAAVAPPRHSSPASPSLLRRARLHAVRRAGLSLLRRASPQHCSCSSTHCSSSPSTAAPRPRQSSPVTDTWVAGRAPSHLGVLPLCARRRPADGLLHAGXAGVLLLTTAPAVPSTST

SEQ ID NO: 192743 - protein, 196 aa, Zea mays
  unsure (1)..(196): unsure at all Xaa locations
  Clone ID: MRT4577_107367C.1.pep
MDRERHGASERARDRICATSTGPVSALAAPRRHIDNLTRNDANYTALTPLWILERAALAHAGTTSEVYTPVLYTWGDTYRRWRRLASDLTLLCVGHGSTAAVIAANVPAAYEAHFRAPMSAAVVSRGNIXLNAITIAFLLEHGRAKVEMMDQEFFNLTKNIVKLIGQKEELGISGCPPFLEGHPTTRPAHPQVLFP

SEQ ID NO: 192744 - protein, 85 aa, Zea mays
  Clone ID: MRT4577_107368C.1.pep
GELKSMMGRSIQQRYINLSDILYHPNGLLSPTQFKSNYGFSYPVIIIYPACIHPHQPQNVFFRKPHTGLCHPMAYLTKLITLLHH

SEQ ID NO: 192745 - protein, 95 aa, Zea mays
  Clone ID: MRT4577_107369C.1.pep
REIYEKINRYGVHSPFTLFKNWEGLPERNFSIFRQFPKGGRVKKRPRWGTTEFPQAGHCKSPPPFPSQDDSKQGPVSPGPRVHLRLNRIPALGSR

SEQ ID NO: 192746 - protein, 75 aa, Zea mays
  Clone ID: MRT4577_10736C.1.pep
ASVLCGNMTGSNFIKEGVKAIKKPRLVPSTAPLVTRKRCAGILLLACPAQGTCNGIRTAPGRWALSNDNWPRFLQ

SEQ ID NO: 192747 - protein, 40 aa, Zea mays
  Clone ID: MRT4577_107371C.1.pep
VYPIKKKGPPLKKKKKKKKKKKKKKKKKKQKKKKKKKKKK

SEQ ID NO: 192748 - protein, 49 aa, Zea mays
  Clone ID: MRT4577_107372C.1.pep
RKHIPHCRTPLRGNSYLRIQTPPPPLGLSCLNRAGSIKKLRCTANTCHP

SEQ ID NO: 192749 - protein, 89 aa, Zea mays
  Clone ID: MRT4577_107374C.1.pep
PSADRAVGEDLVRNERKRILELVQRRGMQRGSYPKFDVALKDQKVVDKFNMPSNCDVSQLIVDLVTHIGLEAEQHGGGSDVLMRAWESP

SEQ ID NO: 192750 - protein, 66 aa, Zea mays
  Clone ID: MRT4577_107375C.1.pep
MGTGEEHVAAPAPAVYETPEKKQGNTTELPAPLSLTKKLAPTRGGRSGRFEVIFCSPTGEEIKKQR

SEQ ID NO: 192751 - protein, 75 aa, Zea mays
  Clone ID: MRT4577_107376C.1.pep
FIHEELTHINNMFFEALLALSANPKCHSNYCIYMFCLTKKKGSCAASHFHHPPAAYLPSNDDPSSPLGNIWFFPF

SEQ ID NO: 192752 - protein, 52 aa, Zea mays
  Clone ID: MRT4577_107377C.1.pep
KSLCKKKLKLCISECLNLGCWLHIYTNLINRKHTFCALLKQNLFYVIHIYKP

SEQ ID NO: 192753 - protein, 121 aa, Zea mays
  Clone ID: MRT4577_107378C.1.pep
KFPPFFYFFFFFLVVFFGGFSPFFPFFAKRKQGRPSPLYKGNQGGEGPPWGTPWPKKTRGPKPGAKTGFPPRRAKQNGGAGLYPIPRKGPQGPPLKRAPFYLKGTNRQTPAPKKNLAPKNN

SEQ ID NO: 192754 - protein, 80 aa, Zea mays
  unsure (1)..(80): unsure at all Xaa locations
  Clone ID: MRT4577_107379C.1.pep
PAXEKKKKKKKKKKKDIPVAWPGKWGTLELGLVSSVRQNLPQEXQTAGDSLSXAPLSRAXXGSPGDHXRQWVXRQLLGPR

SEQ ID NO: 192755 - protein, 162 aa, Zea mays
  unsure (1)..(162): unsure at all Xaa locations
  Clone ID: MRT4577_10737C.1.pep
MRFARPDAIPDAGNRLLTFLAEGRHXTMDWMETTADRRRDPRHLWPDARAVVMLAMSYAPETDPMIALDDPLRGVVSTYAKRSDYHDVMKGKLKELAGLIERHTGAPVKVFVDTAPLMEKPLAQAAGIGWQGKHTNLVSRESGSXALLGAILTAAXLAPDPP

SEQ ID NO: 192756 - protein, 78 aa, Zea mays
  Clone ID: MRT4577_107380C.1.pep
MIRSRSLLPTFSQINGLLSRNLAANEALQWLDDELASLALPKLDSYACARFLQRCIARGDARAGRAVHARVVQRGGVA

SEQ ID NO: 192757 - protein, 69 aa, Zea mays
  Clone ID: MRT4577_107381C.1.pep
NSQPAKAKPGRLTSAKVTTANTPNLGSTYGIRTIPTLLIFKAGKKKETFIGAFPNSRLTTLINNYIGSS

SEQ ID NO: 192758 - protein, 87 aa, Zea mays
  Clone ID: MRT4577_107382C.1.pep
VSAPLQRSAAAGDRPAASASTYLVQWRDRLERPSYLHGQTKLTPQVVSPGEAILVDGGCVRHSLAGCCGPRMIRSEWLGFFSSFFIF

SEQ ID NO: 192759 - protein, 102 aa, Zea mays
  Clone ID: MRT4577_107383C.1.pep
KKQQKSSVLLAILNTTYAIILKISESNHKHRFTKKMSNMGQEQMPAIAEIKIRGLWQQNRLPPAVELNQFFIHNWSAAQPKCFRRLMEPTHFFLQLRQDTAH

SEQ ID NO: 192760 - protein, 59 aa, Zea mays
  Clone ID: MRT4577_107384C.1.pep
IHRNISNINRTRFCLKIVRVGHGNTNKDGDIYVVLEYMGGGWMMINRPLIAYAGGELTP

SEQ ID NO: 192761 - protein, 84 aa, Zea mays
  unsure (1)..(84): unsure at all Xaa locations
  Clone ID: MRT4577_107385C.1.pep
MEDISNIFHNDLLPSLGAKANESIKLRKFIISPYDSXQVKFIVFAFKYCERKYKYXLACLSCLIRTWETFLLXLVVYSAWICPF

SEQ ID NO: 192762 - protein, 57 aa, Zea mays
  Clone ID: MRT4577_107386C.1.pep
MALRHLVTGQNNCVPDGASSSNPLNALANAFLGQSSKAQVSLRGRPRVASKVSSVEG

SEQ ID NO: 192763 - protein, 56 aa, Zea mays
  Clone ID: MRT4577_107387C.1.pep
ESQAPPAYLLLAEPRILPVTIWRIVRLPCSTTTLKAHQNVFMYHILFGVFHPLNIL

SEQ ID NO: 192764 - protein, 58 aa, Zea mays
  Clone ID: MRT4577_107388C.1.pep
VVGVELERFLNWWLLLGLLWVLNFLLSLQGFFLVSKELFLFGLTVKFTRGFRGFCGQI

SEQ ID NO: 192765 - protein, 88 aa, Zea mays
  Clone ID: MRT4577_107389C.1.pep
RPVRYMELTVDNICPTLCRSSNCLESMCYSPALATTAHEVSPPYLYFTGLAHAQTASQLCCACLSFLASSTCFFFAYTAVVVSAAGAT

SEQ ID NO: 192766 - protein, 146 aa, Zea mays
  Clone ID: MRT4577_10738C.1.pep
GTVEKMVFIVRGKLESISADGSKAPLHDGDVCGEELLTWYLEHSSANRDGGKIKFQGMRLVAIRTVRCLTNVEAFVLRASDLEEVTSQFARFLRNPRVQGAIRYESPYWRTIAATRIQVAWRYRKRRLKRAEKSRLSEETYASLGS

SEQ ID NO: 192767 - protein, 162 aa, Zea mays
  unsure (1)..(162): unsure at all Xaa locations
  Clone ID: MRT4577_107390C.1.pep
PRXVFLLVGGAFRVLPPGGRAFLASSVFRFLCGCAALVSCAGVCLCDPFATFSAFLGGGGVXLHPSLCASVLAVLMPVFGASGWLVCSGWSFCWCGVVLWIWLACAWLIFGAFRSGLLLSVCCRATVVLGPGFPRXVNVVPGXVLGPVCTWAGVWRCTWCIL

SEQ ID NO: 192768 - protein, 88 aa, Zea mays
  Clone ID: MRT4577_107391C.1.pep
LTYACGLAAYYRSGTSLRGRPHSWIPWSRAPQGDLKCGLRHFLFFFGATDGAVDMAVPGLEQVMCSQMAWGWDLTQADKHFLKLSPDL

SEQ ID NO: 192769 - protein, 63 aa, Zea mays
  Clone ID: MRT4577_107392C.1.pep
YGRWRWRMNQTTHTPIRFLRPHTVPKLWPDHAARLSYICRNVVRSRRRNAQRSHALDAQFTPP

SEQ ID NO: 192770 - protein, 265 aa, Zea mays
  unsure (1)..(265): unsure at all Xaa locations
  Clone ID: MRT4577_107393C.1.pep
MASSARDIMFRRLKTLTISPALASGVIRQRYQLQQHAPVSGTSKGKAKLKAGQPLKRSTIGAKKGAPSAAGGGGGRGRREAIERIIQISESCLNASTPLRHLPLKERLREAKREELGLVSKERQRELDIAKAKSKAKSKGPGXDDGDRVLMGPPGLDYISLGLVDEEAIPKYELTVEDGRRLAKEYSRVLMRRHRARQTAESMLLTLKKEAIDALPEKLRAAAMVPDMTPFPANRYMATLTPPIEGYIEKVREAAKKHSVKEKLR

SEQ ID NO: 192771 - protein, 129 aa, Zea mays
  Clone ID: MRT4577_107394C.1.pep
GGFFPVFFPACESFFCLRGLPGFRKVGGPPVLPWPLKAPFPWGAFAFCPPASRFRPVFPPGTGTLGFAPPFLGNGVVPFWFFFGPGQSHFSPFFWWGEGEKDMILKGGVTTVFIKPPKKDKGGRQLVSS

SEQ ID NO: 192772 - protein, 63 aa, Zea mays
  Clone ID: MRT4577_107395C.1.pep
TWLPNIGIVWCVLKKKNQSSPVCYPPPHVWRQSLCSCTYVCPPASRLTRLHLLYPYINWPPMI

SEQ ID NO: 192773 - protein, 36 aa, Zea mays
  Clone ID: MRT4577_107396C.1.pep
VQDQALLEIGLTSGLFLLYELINSVYCLKKKKKGGR

SEQ ID NO: 192774 - protein, 364 aa, Zea mays
  Clone ID: MRT4577_107397C.1.pep
MSGNLWNNPNQLSEEMVRSMKDIFLHLSASPKISREEPFANSSSSAERLSGSTLTTLSDSSIIASVLRSPSIDWNNGDGIIDDDRNFDPYNVKGKEARRDIGSYCSVAEVSWMYIGNEQLEYASGALKKFRFLVEQLSKVDTSCMNCDEQIAFWINLYNALIMHAYLAYGVPENDIKLFALMQKACYTIGGQPVSAAEIEFVILKMKTPVHRPQLSLMLALHKFKTSENLRRYSIDGTEPRVLFALCCGMFSSPAVRIFSAENVRAELQESMRDYIRASVGINDKGELVVPKLLQSYAKGIVEDSLLADWICRHLTLDQVAAIQDTSSSSSHKQRLLGVRSFSVIPFDSRFRYLFLSNNTRCQN

SEQ ID NO: 192775 - protein, 356 aa, Zea mays
  Clone ID: MRT4577_107398C.1.pep
MACVADRQAAVREVAQVYELIKLQQPLLLLHSSTSQLAQSLLGKALRALNVALSVMNQQQPPPPPPPPPPAVAPVSVVVVKAEPHLSPPSPASADSEATAPPARRGAKRTRRSAAPMGEKKKNSSSWATLTAVPYDDGYEWRKYGEKKINGTLFTRSYFRCTYKDDAGCLATKHVQQMDSDDNSSPPMFHVTYHNDHTCSSAKAAAKANTGGSSSNNNSHLAALLADCCDGSGCNKGLTTTTTNGHAAADAAAMNMNMKQEPSLLPPPPPLAEPPSACFPYDQMPQQCHQLLFPVSMEQQFPGNGEEIPSAAGSCISGETSWDGYYYSGDMAAAEDDRFHDLERFLLGDSFMDYQY

SEQ ID NO: 192776 - protein, 118 aa, Zea mays
  Clone ID: MRT4577_107399C.1.pep
KIDPALLRPGRFDRVLDVQPPDEADRADIFRIHTRSMPCSADMNLNELARLTEGYTGADIKLICREAAVAALDERFDIQEVAMRHFKSAVGRTKPSDVKFFQELAKQFRRSLTSLRKQ

SEQ ID NO: 192777 - protein, 104 aa, Zea mays
  Clone ID: MRT4577_10739C.1.pep
AHIGLHYYIIITSLPARIVRAVLIIVFANSWQNTIFFLITMYHCDLRLVKFSSFQLTSVHRYESPYWRTIAATRIQVAWRYRKRRLKRAEKSRLSEETYASLGS

SEQ ID NO: 192778 - protein, 111 aa, Zea mays
  Clone ID: MRT4577_1073C.1.pep
SWCGDWIGFGHHRRDQPHRHLLLLSRWQRTVSMEPTVLNRERNAADRQKRMPIFRLFDDYRDEDYYVLPRKFSIVARVEVKFPIEPRYRDRQHFILSDINGSKIEAMTSSY

SEQ ID NO: 192779 - protein, 143 aa, Zea mays
  unsure (1)..(143): unsure at all Xaa locations
  Clone ID: MRT4577_107400C.1.pep
RVXGRTWALGAAAWEEASAFDGDVDYIASRDVAGEGTAKCPGSLALGAGETTAFLPCGLAAGSAVTVVGTARTARPEYVEALERSGTGNGTVLVAXFAVELRGLRATDGEEPPRILHXNPRLRGDWSSRPVLEMNTCFRMQWG

SEQ ID NO: 192780 - protein, 61 aa, Zea mays
  Clone ID: MRT4577_107401C.1.pep
TLSSLAPVRQLLFSIAHALIIFYFNTKQAYILHQNLSADTLPHIYTINPFFLITSSYLFLL

SEQ ID NO: 192781 - protein, 130 aa, Zea mays
  Clone ID: MRT4577_107402C.1.pep
MARGVVSAKGGAVAGKKKGSVSFTIDCTKPVEDKIMEVASLEKFLQERIKVAGGKAGNLGDSVTISREKTKVTVTSDGPFSKRYLKYLTKKYLKKHNVRDWLRVVAANKDRNVYELRYFNIAENEGEEED

SEQ ID NO: 192782 - protein, 179 aa, Zea mays
  unsure (1)..(179): unsure at all Xaa locations
  Clone ID: MRT4577_107403C.1.pep
MARGVVSEKGGAVAGKKKGSDSFTIDCTKPVEDNIMEVASLEKFLQERIMVAGGKAGNLGDSVTISREKTKVTVTSDGPFSKXTLIVSLYLATRYLKYLTKKYLKKHNVRDWLRVVAANKDRNVYELRYFNIAEQRGRGRRLDCTTLIFLVLNSLHFDTCTRSFSNVPCYGVVNLGCLI

SEQ ID NO: 192783 - protein, 85 aa, Zea mays
  Clone ID: MRT4577_107404C.1.pep
KLGFLNLRGCLVIPKPRIPTFKQKTAQALAPQKKTPNARGHQGWLKKSLSLKKVVQDPKKDLSVKKLFQSLWGTLSDPENFIVWS

SEQ ID NO: 192784 - protein, 130 aa, Zea mays; identical to SEQ ID NO: 192781
  Clone ID: MRT4577_107405C.1.pep

SEQ ID NO: 192785 - protein, 209 aa, Zea mays
  Clone ID: MRT4577_107406C.1.pep
CTWILSEDSFQHEWAFLPARMGALRWKGEDGAAGVDRGWGSVVVEGGMAGARAPLALQRRREAEYGDAAIFGEGSERPGATTATPAAVEPGEATRADTEPQSESVLPADLRGRIGAGCPRHRGIGPDVEGRSGSRPRLRPRPKQSHLAGRGIWALIQGSASRSDSPMARRSLSGRSTGTNRRRVSSPPGDRTWIGNRVWVEARLLDFER

SEQ ID NO: 192786 - protein, 107 aa, Zea mays
  Clone ID: MRT4577_107407C.1.pep
ETHLGLGAPFSGPSHFFFLRWPLPPWVGGWAWPGFSKRTGYLAAIVAAVGRRLPLGLPLPMGLVPVAPFVGSPLCSSVSVWLFGCRFCPVASGFAPSCFFCAGSLFS

SEQ ID NO: 192787 - protein, 128 aa, Zea mays
  unsure (1)..(128): unsure at all Xaa locations
  Clone ID: MRT4577_107408C.1.pep
PSHIRQSGLXLGNAIXSQLDCLLHLMHSDRYMPADKTMGXXEEACNTLFSETEADKNVPLTGVVKLEPSVIYKMMTGTYLQLCHTAPIMSAYVLAVNXYVEGPTPCDRGIADLGPDRLLKLADNCTDL

SEQ ID NO: 192788 - protein, 498 aa, Zea mays
  unsure (1)..(498): unsure at all Xaa locations
  Clone ID: MRT4577_107409C.1.pep
DSRASTKYATSSDDDSSSDEEDNLLALFANLNMQQKEKLNELISAIHEKDELLDSXEDFLIKENKKHVKVKNAYAQEIEKCEKLTSELSICHDTISNLRNENAKLIAKVEKLSVCDDSLVNLKNDNASLISKIEELNISLVSLRNDNEKLIAKAKDLDVCNASISDLRNKNDILRAKIVELNSCKPSTSTIEHVSICTRCRDINVDAIHDHLALIKKQNDHIAQLNAKINEHDLENEKFKFARSMLYGGRRPGIKDGIGFQKGDNVKLNAPPKRLYNFVKDKAPMPPHNEGYILYPAGYPESKIRRIHSRKSHSGPNHAFMYKGETSSSRQSTHARLPKKKTPTASNDHNISFKTFDASYVLTNKSGKVCASGGSSWIIDSGCTNHMTGEKKMFSSYEKNQDPQRAITFGDGNQGVTVFRRSDDSIAFKGVLEGQLYLVDFDRAKLDTCLIAKTNMVWLWHRRLAHVGMKNLHKLLKGEHILGLTNVHFEKDRICSAC

SEQ ID NO: 192789 - protein, 413 aa, Zea mays
  unsure (1)..(413): unsure at all Xaa locations
  Clone ID: MRT4577_10740C.1.pep
VPGALRVVVLPLPQVMILLVVPKVGLSAANYAKNLLRVTVLLQYVPRIIRFVPLLDGQSTNGFIFESAWANFVINLLMFILAGHVVGSCWYLFGLQXVDFFVRLFAKIGNAHWFKCSNVDNRTNISSFLTCFNNEXCFTYLNWKMFRSKYLCTKLICDMXMLNLYIQSQTYHFLLFTVLSQRVNQCLRDACSISTIPYCDSFIDCGRGIGSGLYRQQWFNDSGAEACCXGNDATFQYGNYEQAVLLTTEDSAVKRYIYSLFWGGQQISTLXGNLVPSYFIWEVLCTMAIIGLGLWLFALLIXGNMXNFLQAXLGKKNIRRALSMHTYIDAVDRGIEIIKCVSWALIQRGGHLIYXDRGSIMRWEMQLRRRDVEKWMSHRRLPEDLRRRGRRAQRCTWAATQGVNEEELLSNLP

SEQ ID NO: 192790 - protein, 103 aa, Zea mays
  unsure (1)..(103): unsure at all Xaa locations
  Clone ID: MRT4577_107410C.1.pep
GNRAGGGTWVTWSWSSGEGAXHXGNQHGQSKPNLDNHDATSMFYVCFCLLSIVHASVIKCSSMLRGVEYDSNILFAFSLLAXLFLHFPSDIYQLLTLAEFLAS

SEQ ID NO: 192791 - protein, 48 aa, Zea mays
  unsure (1)..(48): unsure at all Xaa locations
  Clone ID: MRT4577_107411C.1.pep
KPKHLYHAKXFGPTTHDRGSFLLGGPYIEREGRIKPISHISGIIRGAE

SEQ ID NO: 192792 - protein, 162 aa, Zea mays
  Clone ID: MRT4577_107412C.1.pep
PRPPRVRPRVRRARASQEAYRQLGEAMGSLDCIFDAASAGPGTCRDGDATCQGLRLLMRHFAACARKAAPGGCARCKRMLQLFRLHASICDRAELQDQPCRVPFCSHFTVKMQTEKADKTWRLLVKKVRRARAMASLADRQVPEVVAISWVKYNSSSKWARN

SEQ ID NO: 192793 - protein, 128 aa, Zea mays
  unsure (1)..(128): unsure at all Xaa locations
  Clone ID: MRT4577_107413C.1.pep
SDWDHVXSMHAQRILCWRYAQIGVNSYQMYXRTLGLLKEMGVDAYKFSISWPIILPKGTEEGGINPDGIKYYRNLINLLLENGIEPYVTIFHXDVPQALEEKYGGFLDKSHKSIVEDXTYFAKVXFDN

SEQ ID NO: 192794 - protein, 83 aa, Zea mays
  Clone ID: MRT4577_107414C.1.pep
QDRMGGYKDYREQGDCERLPLEAAIAQTAQGGTNKGHRLKKKNRKDCLCTSTTRDKTKCRGLYKSASRGKSNTQLHKAWFRQG

SEQ ID NO: 192795 - protein, 175 aa, Zea mays
  unsure (1)..(175): unsure at all Xaa locations
  Clone ID: MRT4577_107415C.1.pep
MEMGMTPEVMYGQNVFVPATANPYQYGYTEVGSPMEWYSHPNSSGYASQDIFYSAEGMQCVYYAAPDNGSMHPTYIPYPSDPSFVPDGSFMPQEYVADPANSTCQIGPSSYYIPAVLPYAQDSVPGSATTPLXPPMXFLPGIPVYYALSAGKSANAEIPLIGPVTTKDEIVXNPP

SEQ ID NO: 192796 - protein, 82 aa, Zea mays
  Clone ID: MRT4577_107416C.1.pep
SPIPLELHLLRGPKGIAGHYTPPPRAQGREAWGPRSCLHHRRTLNEALRNDHNRYHQPPGDPNGRAGPIPQRFTLIKLPNFV

SEQ ID NO: 192797 - protein, 47 aa, Zea mays
  Clone ID: MRT4577_107417C.1.pep
TQNVYLHLLLKQNYHQISPLNHSYPHYHPILLTDFILTHPLFSSKHS

SEQ ID NO: 192798 - protein, 205 aa, Zea mays
  unsure (1)..(205): unsure at all Xaa locations
  Clone ID: MRT4577_107418C.1.pep
DRRSDDWSIRLSNFNLXEEILHXRVRELAEQNVSFQREVTFLGATKDEALMKAASLXTQNSKLNDDLERLGHVGEKLHYSSTDLQARFAEIVEERDHIREYLKAKEGENKALHKVIARLQTTCNEQERTITGMRQGCIDELGRKFVEYSTNDKTRKLQMELIRLTGVEQKLRGEIRSCNLEVKSLRQENIALLNRLQGAGNGASF

SEQ ID NO: 192799 - protein, 62 aa, Zea mays
  unsure (1)..(62): unsure at all Xaa locations
  Clone ID: MRT4577_107419C.1.pep
VTRGRTRGRTRGLPPPGQLAPPVHLPPPVHVPSSVHLPPPXCHYPSQPPRPQPHSQPHSCRC

SEQ ID NO: 192800 - protein, 187 aa, Zea mays
  unsure (1)..(187): unsure at all Xaa locations
  Clone ID: MRT4577_10741C.1.pep
MALVSVSSSSTAXVAALPTNGQQRASSSLFSSSSSSSFLAGKTLLTQDEAARASFAVRAAGDSDRAIWIPGNTPTPWVDGKLPGDVGFDPWRLGYEPDRLRWNVHAELMRCPWAMLGAAGIFIPEFLTRIGVRTTPFCDTVGEHEYLPDTTTLFIIERILIGCAEGPRCADIIKSGTVPTDAIFTSN

SEQ ID NO: 192801 - protein, 35 aa, Zea mays
  Clone ID: MRT4577_107420C.1.pep
SQSWLQSPSALDCLLDKRPPTGISPELIVHIVRFP

SEQ ID NO: 192802 - protein, 36 aa, Zea mays
  Clone ID: MRT4577_107421C.1.pep
SHYPYSCNAIASIISIHNMIIYIHNLTQFFHELYYF

SEQ ID NO: 192803 - protein, 40 aa, Zea mays
  Clone ID: MRT4577_107422C.1.pep
PHILLRENKNRPTLRMLIGLGRNTGPKLNTESEITQIAFT

SEQ ID NO: 192804 - protein, 193 aa, Zea mays
  Clone ID: MRT4577_107423C.1.pep
AIGILEAGRGDPEGWTPGFSQTPLSPLCACLPDVRSSACGPDRCIAGESSRDLRSAASPLPGSFLWVSSLAGSCSTRHVHNSRALHLSTLSREAEQTTPRLRACKVHNTSLEGESANSGHGDAVIFLGCFGRACQSHVAGAGVPCNWRVLGSEPEVFAEMPRPVRSFLCATCASQLAVLYVPSFTFAKRKKVI

SEQ ID NO: 192805 - protein, 50 aa, Zea mays
  Clone ID: MRT4577_107424C.1.pep
PRVRLYCIELRSCLIDISCDHISFILVQMHISYYSRTMTTANMFPSIFLY

SEQ ID NO: 192806 - protein, 114 aa, Zea mays
  Clone ID: MRT4577_107425C.1.pep
SSVFALGTSAPPPARCPARFSGSPLSLAPAARAMSTTHARCTYLRSLERRNRRPHDCEPARYIAHRWKGRARTVVTETPWPRRGAGGKRAPVADFPRVLWPCLSEPRSRCRCAV

SEQ ID NO: 192807 - protein, 176 aa, Zea mays
  Clone ID: MRT4577_107427C.1.pep
MDAAQVTNPSAATDDGAPTTSVSAPAHYAYADDNACPGGPKVWVLVLLFALLLLPLLPSAMRRGGGMHWAGGGSYRRGGITFKSGWDVVNLCLVLLAILCGLLGRSGGDGESSSAATSTAPKDGHREVASAPATAAATTTSADWDWEKEGYDSMCSIYATLPRTDHAHACGGDPPD

SEQ ID NO: 192808 - protein, 522 aa, Zea mays
  unsure (1)..(522): unsure at all Xaa locations
  Clone ID: MRT4577_107428C.1.pep
WVPRGRPGNLTERDVVLNQVGKREILGTPTETAILEFGLSLGGDFLAVRKASTLVKVEPFNSAKKRMGVVIQLPEGALRAHCKGASEIILASCSKYLNEDGNVIPLDAGTIDHLKATIDSFANEALRTLCLAYIEVEDGFSVNDQIPTDGYTCIGIVGIKDPVRPAVXESAAICRSAVITVRMVTGDNINTGQAIARECGILTEGGIAIEGPDFRTKSEEELTQLIPKIQVMARSSPLDKHTLVKHLRTKLYEVVAVTGDGTNDAPALHEADIGLAMGIAGTEVAKESADVIILDDNFSTIVTVAKWGRSVYINIQKFVQFQLTVNVVALVVNFSSACLTGSAPLTAVQLLWVNMIMDTLGALALATEPPNNELMKRTPVGRKGNFISNIMWRNILGQALYQFLVIWYLQTEGKWLFGIKGDNSDLVLNTLIFNCFVFCQVFNEVSSREMERINVFEGILNNNVFIAVLGSTVIFQFIIIQFLGDFANTTPLTLNQWIACVFIGFIGMPIAAIVKMIPVGST

SEQ ID NO: 192809 - protein, 55 aa, Zea mays
  Clone ID: MRT4577_107429C.1.pep
GAENGRCRMIRLRLLPAFCHPSHSQTPDHLKLLTLWFQIFFNLLLLLSLINSGHF

SEQ ID NO: 192810 - protein, 194 aa, Zea mays
  Clone ID: MRT4577_10742C.1.pep
ASRLSFIQGFNSRRGFLWKGRKDVLGGHCLVAWGKVTRPKELGGLGISDLQKLNWALRVRWLWLERTDPSKSWADLPLQSSSILKSILSTTLITEIGDGRNTLFWRGRWLMGLRIEDLTPHIFALVPTRITNRRTVAEGIVEMAWIRDLRGTITWDVLSDFLTLSEVIADYSINVGVPDKHIWKFSPTGQYSSK

SEQ ID NO: 192811 - protein, 73 aa, Zea mays
  Clone ID: MRT4577_107430C.1.pep
MFLKVAKESADVIILDDNFSTIVTVAKWGRSVYINIQKFVQFQLTVNVVALVVNFSSACLTGSAPLTAVQLLW

SEQ ID NO: 192812 - protein, 458 aa, Zea mays
  Clone ID: MRT4577_107431C.1.pep
MALADGEADYSSWDSDDEYQKFIQNMNPPRVTIDNTSCPNATVIHVDSANKYGILLEVVQVLTDLKLIVKKAYISSDGGWFMDVFTVTNQSGHKITDESVLQGIKDYIYKSIGPDSCFLPSRRRAVGVEPSSDHTLIELTGTDRPGLLSEVSAVLTSLECNVVSAELWTHNGRAAAVMQVTDRESGLAVSDAERVGRIKGRLYNVFRGRSRDAKTAVATTGATHPERRLHQMMFEDRDYERRGKDDGRAAASGSNPGPVVSVVNWLQKYYSVVTVRCRDRPKLLFDTVCTLTDMQYVVFHGSVDTEGPEAYQDYYIRHIDGCPVNSEAERKRIIQCLEAAIERRVSEGLKLELSTGDRVGLLSDVTRIFRENGLTVTRAEVSTRGDEAVNTFYVRDAAGSAVELRTLEAIRQEIGQTVLQVKGHPEQPKPPVAAQDSPTRFLFSSLLFRPRSLCNLGP

SEQ ID NO: 192813 - protein, 689 aa, Zea mays
  unsure (1)..(689): unsure at all Xaa locations
  Clone ID: MRT4577_107432C.1.pep
MLQSKSFVKKTKQGRIQKVVREHYLRDDIYCGFVPCTACAAAAERKLGAAAAAILVVDTNVVLHQIDLLENPAIEDVVLLSVVLDEVKNKNLSVFNRIKALCINKARRFYVFANEQHRDTYVKDMVGESSNDRNDRAIRVAARWYQSHLGESVKVLLITNDRDNKRKAIEEGLNAETVESYVRSLAQPGLLDLVVVPTSGDVSMEDVDDHRPSKKKVIYNEHKPMSEITSGLRCGIYHQGKLRVNRYNPFEAYVGSESIGDEIVIRGRSNMNRAFDGDIVAVELLPQDQWHESKSFIADDDEEEEEDVHLPGNSADDAPRNTNSTQSTVGSSAPSISSRPVGRVMGIIKRNWNSYCGSLQPMPMPAGSGGVAHALFVSKDRRVPKIRIQTRQLENLVNKRIVVAVDSWDVLSRYPSGHYVRTIGDIGDKETETEVVLIENDINTRPFSTQVLACLPPLPWTLSPEDLANPNRXDLRQVRVFSVDPPGCRDIDDALHCTLLRNGNFEVGVHIADVTNFVHPGTPLDEEAAQRGTSVYLVGQRIDMLPKPLTEDVCSLRADVERVAFSVIWEMTPDADVISTRYTKSVIKSCAAMSYVEAQARMDDSRLVDPLTVDLRNLNSLAKIMRQRRCERGALTLASAEVKFEIDSETHDPFDIGIYQXREANQMIXRFMLAANVLVPRRXLKHSPM

SEQ ID NO: 192814 - protein, 111 aa, Zea mays
  Clone ID: MRT4577_107433C.1.pep
GYSLIRIRVGSTTCFNSLCFLAAAAACLPAFPAAACFSSFLAGCCTPRAPAVQFSCCTPHAPACWQLAAACFSYRRLLAASLLPTPRAASLLALRAWELSRRRRRHCLLRD

SEQ ID NO: 192815 - protein, 67 aa, Zea mays
  Clone ID: MRT4577_107434C.1.pep
ERLAIAFALLKSLSGTPIRIVKNLRVCGDCHTAIKLISKIYDREIIVRDRSRFHHFKGGSCSCNDYW

SEQ ID NO: 192816 - protein, 74 aa, Zea mays
  Clone ID: MRT4577_107435C.1.pep
PSPSCLGSAGSFVLFFPLIEMPDAQLPAKLHVVLCICLLGAKALYSARHLPRTAPILQLYLLKAALLLLFLVIR

SEQ ID NO: 192817 - protein, 143 aa, Zea mays
  Clone ID: MRT4577_107436C.1.pep
RSVAIDWITLSHRRGSPPGTDDRVGEAHDEGAGVSMEGAPQATLRRHREHCSVAYHRCRPWQSLLRSLPSTSTMVVVAPPPTIDAGHGSRCSATSCCILPLMGTLDLPVLPLPSLVSVEGASPVATTTVGQGKWRWRHWRGSQ

SEQ ID NO: 192818 - protein, 54 aa, Zea mays
  Clone ID: MRT4577_107437C.1.pep
SRVEPRVRVKACWLNGSNCCCCKKATCFDESYHLIATAHHRWCHLLDLLLQYKS

SEQ ID NO: 192819 - protein, 497 aa, Zea mays
  Clone ID: MRT4577_107438C.1.pep
PFNGGNQIQLLKNILRTCEIRFPSDCDLSHGCIDLCRKLLRLNSVERLTVEEFVHHPFLSEHAPEKTLSLTQSDIRDGFPRNNSSPTRHSNHSSQEDCMPFPLDDESSGQDEGPVPDSKSLMKSYGFPMGKRLDKTSGQKSPPKHNSLFSRYVLGNNHAPSSQHHGHSGKVTKESKIHEVQGQKVVYPEDSPIIDSLEFVDQEYVFVSGPHLEGSSSSTNASQQLNVPAKYDNSSVSPPKLTFMSAPMPINGLPINRQQLAGTGSFDSHCSPASGTSQGSADISDAMDQPPSDYLTRIRLLEQYASAIAGLVRDEIKGGRHLEAFSIQLIVLATWKQAIHIGNTFVASPARESPSQDIPMKGHIAGASHLPANSKLADDACMQIEKQFLSEVEYAEELASIVGQIADGTEMPDAIEMIFQSALLIGRRGGVDEMFGKAADAMTGYMRAVSMLRFLLVEAPSLALNPPLTLTRSDRNRLRTYIDALNTRLCQMQSQRH

SEQ ID NO: 192820 - protein, 51 aa, Zea mays
  Clone ID: MRT4577_107439C.1.pep
WAHRCGSAVSYDLLQAPTEPPELTYRHRQSKLVTRRRRAVLFRCSSAEGSG

SEQ ID NO: 192821 - protein, 51 aa, Zea mays
  unsure (1)..(51): unsure at all Xaa locations
  Clone ID: MRT4577_10743C.1.pep
RXXFFFFFWEKGQILFSGFTTVTTGVGLQXXKKYFGQGKKNRKSPSQVTPA

SEQ ID NO: 192822 - protein, 704 aa, Zea mays
  Clone ID: MRT4577_107440C.1.pep
GQAAPGAGGAGPAAASAGSGACPQVCLAPLRVRATLAAVMVSALGRRSFPLRGCLRAGGDILRRIRHDNVIALHDSVKDHGSIYLILEYCRGGDLHAYLQRHKRVSEKVAKHFIRQLASGLKMLRDNNVVHRDLKPQNILLVENNENTLLKIADFGFAKFLQPFALAETLCGSPLYMAPEVMQGQKYDAKADLWSVGVILYQLVTGIPPFNGGNQIQLLKNILRTHEIRFPSDCDLSHGCIDLCRKLLRLNSVERLTVEEFVHHPFLSEHAPEKTLSRTLSEIRDGFPINNISPTRPSSQSSQEDCMPFPLDDESSGQDEGPIPDSKSPMKSYGFPIGKRLDKTSGQSPSKHTSLFSRYVLGNNHAPSSQHHGHTDKMTKESKIHEVQGPKGVYPEDSPIIDSLEFVDQEYVFVSGPHPEGSSSSTNASQQLNLPAKYDNLSVSPPKLTFLSAPMPINGLPINRQQSAGTGSFDSHYSPASVTSQGSADISDAMDQPPSDYLTRIRLLEQYASAIAGLVRDEIKGGRHLVAFSIQLIVLATWKQAIHLCNTFVASLARESPSQDIHMKGLSADASHLLANSKLADDVCVQIEKQFLSEVEYAEELASTVGQIADGTEMPDAIEMIFQSALLTGRRGGVDEMFGKAADAMTGYTRAVSMLRFLLIEAPSLALNPPLTLTRSDRHRLRTYIEALNTRLCQMQSQRH

SEQ ID NO: 192823 - protein, 784 aa, Zea mays
  Clone ID: MRT4577_107441C.1.pep
MDFAELEAVEGLRWPWHSWPPTTPAAASLVVPTSVLCSPLQHPTAPDLLPLLPYAPLRCASPGCGAALNPFSRVHHGSARWSCAFCGAAANPFPRLLAPDALPAELFPTHSSVEYLLPPDPAEPGGPGPPALVFVIDAATAAEELTVLKDEVRRLMQGLPEGIRVALVTFAASVWVHDLGFEGCARVVVLNGERELESDKHSSFTSIHNLFLPQSALKFEYLPLAQYQWQLIQKLLGIHRSQYKNLAMPRSTEVQRFLLPVSECEFNITSAIEDLSSMPACPRGHRPLRATGAAISTAIALLEGCCSPSTGGRIMIFTSGPATVGPGCVVETDLGKTIRSHRDIFNSNAPLTDKARDFYKKVAKRLTDHALVLDLFACSLDQVGAAELRNPIEVTGGLMVHTESFEYEQFKSCFRHMFRREGTNYLNMNFNATIEIVTSKEVKICGALGPCISLRRKNNSVSDKEIGEGGSNYWKTSSLSSKTSIAFLFRVDCNHKADPPTVFFIQFMTRYRHGDGSYRLRVTTVARRWAAPRSPEIAAGFDQEAAAAVMARLAVYRAETYHVRDVIRWLDKMLIRFTAKFGNYVPEDPSTFRLSTNFSLYPQFMYYLRRSQFIDVFNSSPDETAFFRLMLNREGVVGSLIMIQPTLFQYSFDGPPIPVLLDVSSISPDVILLFDSYFYIVIHYGSKIAQWRKLGYHKDPNHENLRKLLEAPEVDAEALLVDRFPVPNRPGCDHHGSQARFLLARLNPSVTQKTQFSKGSEVIFTDDVSLQVFIEHLQELAVQG

SEQ ID NO: 192824 - protein, 205 aa, Zea mays
  Clone ID: MRT4577_107442C.1.pep
MAATMTGSTRASGGSFLVLLFVVLVGVVDVASAATTVASATVATNSGDSAAAALLTMPASASTGQLNGIIQCLLGCFTQVFSCSFGCMGKQGADLPLCIIGCDQRSVVCMIRCGLAPSPPTPSPPAPKPPSPKPPTPKPPTPKPPTPAPPTPTPAPTPKPPTPKPPTPAPPTPAPPTPMPPTPAPPGPPYTPPYAVTGRKTATFD

SEQ ID NO: 192825 - protein, 582 aa, Zea mays
  Clone ID: MRT4577_107443C.1.pep
GLVICFCNSWYFENYCGYCISHKPSFIFQIQKLLGIHRSPYKKLAMPRSTEAQRFLLPVSECEFNITSAIEDLSSMSACPRGHRPLRATGAAISTAIALLEGCCSPSTGGRIMVFTSGPATVGPGCVVETDLGKAIRSHRDIFNSNAPLTDKARDFYKKVAKRLTDHALVLDLFACSLDQVGAAELRNPIEVTGGLMVHTESFEYEQFKICFRHMFRREGTNYLNMNFNATIEIVTSKEVKICGALGPCISLRRKNNSVSDKEIGEGGTNYWKTSSLSSKTSIAFLFRVDCNHKADPPTVFFIQFMTRYRHGDGSYRLRVTTVARRWAAPRSPEIAAGFDQEAAAAVMARLAVYRAETYHVRDVIRWLDKMLIRFTAKFGNYVPEDPSTFRLSTNFSLYPQFMYYLRRSQFIDVFNSSPDETAFFRLMLNREGVVGSLIMIQPTLFQYSFDGPPIPVLLDVSSISPDVILLFDSYFYIVIHYGSKIAQWRKLGYHKDPNHENLRKLLEAPEVDAEALLVDRFPVPKLIKCDHHGSQARFLLARLNPSVTQKTQFSKGSEVIFTDDVSLQVFIEHLQELAVQG

SEQ ID NO: 192826 - protein, 103 aa, Zea mays
  unsure (1)..(103): unsure at all Xaa locations
  Clone ID: MRT4577_107444C.1.pep
PAXRPIHTATTAYLHHQSISSAASKPYRIPPRRSPDTWPASASTPARPPRPPAAAWAWRGRGRARXXXSPAGXGRTXXXXXRXPGXXXSFLXXXXRNPSCSRA

SEQ ID NO: 192827 - protein, 67 aa, Zea mays
  Clone ID: MRT4577_107445C.1.pep
RVICALVATCVVPDQSSTLARFGLIVFHPFNTCSDSFRIIPHQLIFNIGSDFWSYGRNMKHESAPRP

SEQ ID NO: 192828 - protein, 36 aa, Zea mays
  Clone ID: MRT4577_107446C.1.pep
KHLEKVFSSYRLGKKVFLFRSSVAWDQKVLVFHLYG

SEQ ID NO: 192829 - protein, 65 aa, Zea mays
  Clone ID: MRT4577_107447C.1.pep
GVHFGFWVGKFLERGMGWGFFVIGKFGKGDFFERDLIWVRQGFFRFEGVKRRAVDLILGEILKKF

SEQ ID NO: 192830 - protein, 53 aa, Zea mays
  unsure (1)..(53): unsure at all Xaa locations
  Clone ID: MRT4577_107448C.1.pep
WWWMSMARGEAGHIWWRXVRVRLRSCMSCSSVGVPREGLSGGHLSIFPFVVIS

SEQ ID NO: 192831 - protein, 154 aa, Zea mays
  Clone ID: MRT4577_107449C.1.pep
MKDVVGSPGTWSGMALRLSQCVSAGASMGAMATAYGFSNYTAFCYLIASMGLQLLWSFGLACLDVYSLKTKRDLHNPVLVSLFVVGDWVTAILSFAAASASAGVTILFERDVHFCRMYPQLSCGRYALSVVLAFITWSFIATSAVSMFWLLPSL

SEQ ID NO: 192832 - protein, 77 aa, Zea mays
  Clone ID: MRT4577_10744C.1.pep
NCGGACPRKGQSSSDPPLRLLFSVFFLVDCGAVLRRPRLHSFCVRVRSGGDFFSWACSPSHVTRFFVCFALLLFLQK

SEQ ID NO: 192833 - protein, 61 aa, Zea mays
  Clone ID: MRT4577_107450C.1.pep
MVDEEDIHPLAGDNGTCIYNAGFAGDDAPRALFPSIVGRPRHTGVMAGMGQKDAYVGDDAH

SEQ ID NO: 192834 - protein, 70 aa, Zea mays
  unsure (1)..(70): unsure at all Xaa locations
  Clone ID: MRT4577_107451C.1.pep
XPRXTSXVXMXHVCRNLVTLTSDXXXXRTQTXSXEGRFRAXMXAXLDXDLXXXRPVXYEQPXXAFVRQYQ

SEQ ID NO: 192835 - protein, 202 aa, Zea mays
  unsure (1)..(202): unsure at all Xaa locations
  Clone ID: MRT4577_107452C.1.pep
MSSRSGSTSGGSTGGGSSAGGGAAVPLALLLRREVASERTASERPELHSGLFSQAKKGEDFTFLKLECERVPGVPSSSFSAFGLFDGHNGNGAAIYTKENLLNNILNAVPADLNREDWLAALPRALVAAFVKTDKDFQTKARSSGTTVTFVMIDSLXTVSSVGASRCVLQAEGSIYHLSSDHRFDAKEGGDRLLLNPALIHD

SEQ ID NO: 192836 - protein, 46 aa, Zea mays
  Clone ID: MRT4577_107453C.1.pep
RLRILSRSGARLYFFFNFKIKIGGFLGNVGIYFFFFFRVNLNQTIL

SEQ ID NO: 192837 - protein, 101 aa, Zea mays
  unsure (1)..(101): unsure at all Xaa locations
  Clone ID: MRT4577_107454C.1.pep
HTGGHSKSRLLLSPFFNHTVSPQGSPPKWGAXTSTPHPSTTKKPPSNLPSPIPTSPTSPLSPLLTSNPIPPLSLSLPTSSSFPLKLRLSSITRTASSCLPT

SEQ ID NO: 192838 - protein, 114 aa, Zea mays
  Clone ID: MRT4577_107455C.1.pep
SERLQEKAGEAGITQVSFLLRAISKNQIRKAPASLYSHLFPDACWITERTPGTGTQLVSGGTDLPTISYQLQAVRGAPAERERERERERKIKTQREREREKELERERERERERD

SEQ ID NO: 192839 - protein, 143 aa, Zea mays
  Clone ID: MRT4577_107456C.1.pep
LGSFWWRDILKIQESYKELAWVEIGDRKTTLLCHDNWDGMCKSARFPELWSFASIKDITIHQARTATSHEMFHTPLSVEAFEQFHALQDLLANLPQHDQRGKWLCNGSSSLFSSQKAYTHMSGNQWTHMSGNQWTHLIFSVVP

SEQ ID NO: 192840 - protein, 95 aa, Zea mays
  Clone ID: MRT4577_107457C.1.pep
AKRLRGKPGYEHLSDPLHILVEAEFPASIIDARLRQAQEIIEELLKPVDESQDLYKRQQLRELAMLNSTLREDSPHPGGVSPFSNGGMKRAKTGQ

SEQ ID NO: 192841 - protein, 198 aa, Zea mays
  unsure (1)..(198): unsure at all Xaa locations
  Clone ID: MRT4577_107458C.1.pep
AFRRRSRRWGLPVTRQRSSWCRPVPVGMATSSSASGGGAAGGAPGLKTYFKTPEGRHKLQYEKTHSPSVLHYNHSSGGKTVSEMTVAYLKEKPVGQGSTPSTPSSSSGMRSAAARLLGTGNGSRTLSFAGSNGVSRAVSGSSRVXGGVGMSTGRRXSQAVANYDGKGTYIIFNTADTLFISDLNSHEXDPVKSIHFQH

SEQ ID NO: 192842 - protein, 171 aa, Zea mays
  Clone ID: MRT4577_107459C.1.pep
MLGVGEKLLEDYLVKRPPPPRAPLKFALSPPGYLAGIPKTPPGPVRGSLMDQISMVAGGFNPSVKKKGTNHLRWWGHSAFVLNFLAMSRGGDAGPSVPSPRFPYQKPPCNVFGPEFIAFCKTRILPVEVSGGCCSVCPKKKKKKKKKKKKKKKKKKKKKKKKKKKKKKLEG

SEQ ID NO: 192843 - protein, 57 aa, Zea mays
  unsure (1)..(57): unsure at all Xaa locations
  Clone ID: MRT4577_10745C.1.pep
MLLGLSSSVATETILPQCSQAPIAYRFSPYLSPTVXSMCETPIVQPYMIQHAISTCI

SEQ ID NO: 192844 - protein, 160 aa, Zea mays
  unsure (1)..(160): unsure at all Xaa locations
  Clone ID: MRT4577_107460C.1.pep
MSGLYSQGFSPARNLSPQIRSNPDVDSQYLAELLAEHQKLGPFMQVLPICNKLLSQEIMRVSSIVHNHGFGDHDRHRFRSPSPMSSPNPRANLPGNGFSPWSGLQERLGFSSXTSMDWQGAPPSPSTQVVKKILRLEVPVDSYPNFNFVGRILGPRGNSL

SEQ ID NO: 192845 - protein, 52 aa, Zea mays
  unsure (1)..(52): unsure at all Xaa locations
  Clone ID: MRT4577_107461C.1.pep
CLLSSMVILTVLGKTLHLLPRLLPSSSSIPAVLRRLXWMVRAFPSPRKFRPG

SEQ ID NO: 192846 - protein, 176 aa, Zea mays
  unsure (1)..(176): unsure at all Xaa locations
  Clone ID: MRT4577_107462C.1.pep
CRPRLLLFTSLFAPPPPSLAWSNRFTTPRAPIALALGDSRHHRLLPLFLLCSQYLAKLLAEHHKLGPFMQVLPVCNKLLSQEIMRVSSIVHNHGFGDFDRHRFRSPSPMSSPNPRANLPGNGFSPWSGLQERLGFPQGTSMDWQGAPPSPSSHVVKKILRLEVPVDXYPNFXFVGA

SEQ ID NO: 192847 - protein, 58 aa, Zea mays
  Clone ID: MRT4577_107463C.1.pep
CYSTLNLDKPVRKPKLGGADFPLSAQPWSREERWDAHCLTRRGPWVVFYVQLPLKNNR

SEQ ID NO: 192848 - protein, 279 aa, Zea mays
  Clone ID: MRT4577_107464C.1.pep
MSGLYSQGFSPARNLSPQIRSNPDADSQYLAELLAEHHKLGPFMQVLPVCNKLLSQEIMRVSSIVHNHGFGDFDRHRFRSPSPMSSPNPRANLPSNGFSPWSGLQERLGFPQGTSMDWQGAPPSPSSHVVKKILRLEVPVDSYPNFNFVGRILGPRGNSLKRVEASTGCRVFIRGKGSIKDSGKEDKLRGKPGYEHLSDPLHILIEAEFPASIIDARLRQAQEIIEELLKPVDESQDLYKRQQLRELAMLNSTLREDSPHPGSVSPFSNGGMKRAKTGQ

SEQ ID NO: 192849 - protein, 128 aa, Zea mays
  unsure (1)..(128): unsure at all Xaa locations
  Clone ID: MRT4577_107465C.1.pep
PTRNRGKLXQXAFFFLEGTCFTRSQNQTEIEDLNGRFVSSRTDDRIKQACALPLDFYEAISSILLIFISHFKIYCINSAVYNAKQCFAQPYARSAGYSLSPVCFLSGLYNPAYRLYKHLMICLWIIII

SEQ ID NO: 192850 - protein, 376 aa, Zea mays
  Clone ID: MRT4577_107466C.1.pep
GSRTHTGSQYICTYASTNVCSGSNTSTNACYDTYTVFNSDTCPDPYPSSDVCPYTSTGTYTYASTSSDSGACSHASTNTCPYLGSDTYPYSPAPLTRLSGLYSQGFSPARNLSPQIRSNPDVDSQYLAELLAEHQKLGPFMQVLPICNKLLSQEIMRVSSIVHNHGFGDHDRHRFRSPSPMSSPNPRANLPGNGFSTWSGLQERLGFPQRTSMDWQGAPPSPSTQVVKKILRLEVPVDSYPNFNFVGRILGPRGNSLKRVEASTGCRVFIRGNGSIKDPGKEDKLRGKPGYEHLSDPLHILIEAEFPASIIDARLRHAQEIIEELLKPVDESQDFYKRQQLRELALLNSTLREDSPHPGSVSPFSNGGMKRAKTGQ

SEQ ID NO: 192851 - protein, 140 aa, Zea mays
  unsure (1)..(140): unsure at all Xaa locations
  Clone ID: MRT4577_107467C.1.pep
RSDVSALSQTLEVTVWRAGRDHRQSCLWGIPAARLTSNALTGETSFSKGSRIKFXADXHIFTTTIDKDFNAIYSLIRELAYLKSELTIILTQEEGHTVQRNVYCYAGGLVEYVKCLNTDEKPLNDQIGFTXDLGGITEDV

SEQ ID NO: 192852 - protein, 132 aa, Zea mays
  unsure (1)..(132): unsure at all Xaa locations
  Clone ID: MRT4577_107468C.1.pep
MPSTPHCGWPRTEAGAASPCRQRATPTPGRGASAAVPARRGWAAAPALAAAAPGQAAGGRARTRQHAQPXGAARPSSRGGPAASRDPXLWLGHRAPGRXAAPAPPRLRPPGQGSTPRGCRRTPVEPRPRAAL

SEQ ID NO: 192853 - protein, 57 aa, Zea mays
  Clone ID: MRT4577_107469C.1.pep
RGRPGRATLLVACGIAPTFLCQSSCFYYVISLLGMLDVLSPPLGMFVHDKSGKSSNT

SEQ ID NO: 192854 - protein, 187 aa, Zea mays
  unsure (1)..(187): unsure at all Xaa locations
  Clone ID: MRT4577_10746C.1.pep
MADTLGHMSTLRTPSRSTRTREEPDHQQTLHCALLASMNSDLLGYDISLMSDTQLFMKEDLKITDTQIEILAGGINIYSLIISLVADLTSDXHGRRYFMVLATVIXFFTDALLMCLDPDYXILMAGRFLTAIGVGFTLMIAPVYTAEEWSTSARGFLTSFPEVFNNFGILLVYESNFALARLPDNLM

SEQ ID NO: 192855 - protein, 80 aa, Zea mays
  Clone ID: MRT4577_107470C.1.pep
GSFVLQATLHIDMFYFATAVIWAIFLLLPTVHIVPAYNQSVTPAQGLRRCLTTLDPRWWPPGPPQDSEPGPPRPGRHAEH

SEQ ID NO: 192856 - protein, 155 aa, Zea mays
  Clone ID: MRT4577_107471C.1.pep
GAILQASYGWMRGAVLPVRPGKMRLVGACWPCRRSARARSVSAPVWLGGAGMPSSRCWPLSSGARWRSGRDVRLGHPVAQRYPRQIPDDGYGGRARGRAPPPPLRSIAEEHERDEEAAGSQYNDIPFVPRELHCSISFHLTTPRSVHIYSIPPRR

SEQ ID NO: 192857 - protein, 63 aa, Zea mays
  Clone ID: MRT4577_107472C.1.pep
LSIKLFLPFLLYSSGENKETKKQGSSCTHAVSCPAMEFPSVCYCVILPQPLILVLQLLDFPRH

SEQ ID NO: 192858 - protein, 104 aa, Zea mays
  Clone ID: MRT4577_107473C.1.pep
LNNPSCPAGKLGFFQPPIHVGRGKPPPPCFFSLRGGGDSRSNLLGLVSNLGIRFAPPPAGVFFLSLIREAGGSLGGWHPGFHQAGGKFSWNSIGNWEGGLMIYI

SEQ ID NO: 192859 - protein, 89 aa, Zea mays
  Clone ID: MRT4577_107474C.1.pep
GRFFFFFFGQGRRDPAYNKHVYTPNREGLPLTHYRSMQGARQPTATSQSRRTETGKKIKPSTRRTVITHLMSQQLYKMDVALNTRWRQG

SEQ ID NO: 192860 - protein, 87 aa, Zea mays
  Clone ID: MRT4577_107475C.1.pep
GFTLLSRSGSHSRLQKKRRDGFPAADAVPPMGHSTALQQKLEATTQFRKLRSIERSPPIEEVISTGVVPRFYGHVMILYLTVAFTCL

SEQ ID NO: 192861 - protein, 124 aa, Zea mays
  Clone ID: MRT4577_107476C.1.pep
GNVITFSLTGSEYSTVQYILRLVPFQIISAIIVWNFRIFIIRLYWRVADGSCGLKSLQMARTRPGSDLCALSARRLCHRHLGPAAAEGEEEEEEDAASCSLGRAPAMSAFLVEETAPEPERRVT

SEQ ID NO: 192862 - protein, 389 aa, Zea mays
  Clone ID: MRT4577_107477C.1.pep
MEGRGAEQAPEAAAEVKNPRCFMDVTIGGEMEGRIVVELYASVVPRTAENFRALCTGEKGIGAASGKPLHFKGSCFHRVIKGFMIQGGDTTAGDGTGGESIYGSKFEDENFVLKHERKGMLSMANSGPNTNGSQFFITTTRTPHLDGKHVVFGRVMKGMGVVRSIEHVSVGEADCPTLEVKIVDCGELPEGADDGVVNFFKDGDTYPDWPNDLEEKPAEVSWWMDAVESAKAYGNDNFKKQDYKAALRKYRKALRYLDLCWEKEEIDEDKSTALRKTKSIILTNSSACKLKLGDSSGALLDADFALREREGNAKAFFRQGQAHIALNDIDAAVESFKQALELEPNDAGIKRELAAAKKKIADRRDQERKAFARIFQSSGKSDKSNEENN

SEQ ID NO: 192863 - protein, 68 aa, Zea mays
  unsure (1)..(68): unsure at all Xaa locations
  Clone ID: MRT4577_107478C.1.pep
LSIGGWGCFLVFYFYLKFFLVPTGGNLFGNLGDAGMGSICGEKSFGPGSDHIXQKDGFXAVLAGISII

SEQ ID NO: 192864 - protein, 207 aa, Zea mays
  unsure (1)..(207): unsure at all Xaa locations
  Clone ID: MRT4577_107479C.1.pep
GKHVVFGRVMKGMGVVRSIEHVSVGEADCPTLEVKIVDCGELPEGADDGVVNFFKDGDTYPDWPNDLEEKPAEVSWWMDAVESAKAYGNDNFKKQDYKAALRKYRKALRYLDLCWEKEEIDEDKSTALRKTKSIILTNSXYVRLPSLIAXTWACKLKLGDSSGALLDADFALREREGNAKAFFRQGQVGNFCHIICFAVDYMLPATF

SEQ ID NO: 192865 - protein, 121 aa, Zea mays
  unsure (1)..(121): unsure at all Xaa locations
  Clone ID: MRT4577_10747C.1.pep
SLLALFALLLIAAYASIISQRSLATSAFIPQFLPPFTXLGFEHANTQAFKLQLSLAASVLQQPIDQPRHQYFGHLYLQTIDSHQQQQLMTXLIHLYEVYPVAYLQKLLLAFNTIALANVTE

SEQ ID NO: 192866 - protein, 37 aa, Zea mays
  Clone ID: MRT4577_107480C.1.pep
GLLPGSGSLFVSCFVFCRGGVCFCLLVPICSFTLSAV

SEQ ID NO: 192867 - protein, 47 aa, Zea mays
  Clone ID: MRT4577_107481C.1.pep
NGVHVGYVKVSLMPIPWGTFPKKGSEIYGAMKSWFKFPWGSCFCYTK

SEQ ID NO: 192868 - protein, 126 aa, Zea mays
  Clone ID: MRT4577_107483C.1.pep
MCKRPETTFVSNPVNTANLGTAKAITVDNGTQFDAKTFKDFYDRIGTKIHFASVRHTESNGLVERANEIIMTGIMKLIFNQPRGKWPDELIKVVWSHNATISRSTGFTPFKLLFGDEAITPEEAKT

SEQ ID NO: 192869 - protein, 179 aa, Zea mays
  unsure (1)..(179): unsure at all Xaa locations
  Clone ID: MRT4577_107484C.1.pep
QVSHVEAIALVLLRSAEVAVEGDGALVAFPGPAQQFHDFGRGDDRTSAHLLLSHRHQPATRQMHLQKSLRKGVSLLIDTGSGGGICLSLSKRHRQCKSHHVPSKVLSRDADATSCYISGRVWISIRRASGGNSGSLGRGDREGCGGGHQRLTSNHRIGDVTEAARAPLALWCTPRPAXR

SEQ ID NO: 192870 - protein, 57 aa, Zea mays
  unsure (1)..(57): unsure at all Xaa locations
  Clone ID: MRT4577_107485C.1.pep
RFCVMSIRFQIPCTLLHPCQEKFSCDSGWCSIYTEKGHPLLCISSKMADDITSEIXC

SEQ ID NO: 192871 - protein, 113 aa, Zea mays
  unsure (1)..(113): unsure at all Xaa locations
  Clone ID: MRT4577_107486C.1.pep
MRECISIHIGPAGIQAGNSRRELNCLEHGIPADGQMHGDNTIEGGDDAPNTSFSETGAGKHAPRAVFVDLEPTDIDEVRTETYRQLFXPDQIIIGXKEDANNNXASGHYTIGK

SEQ ID NO: 192872 - protein, 106 aa, Zea mays
  Clone ID: MRT4577_107487C.1.pep
VANTQNGVLSETKEDDKNLLLNNEESKLEVTDAAGGDNDGEYEEGIVYNESGEDQYYEGDDQRDADYEYEQGEEGYYEYEQGEEGENQEEDYMEEEDGDDSAKKIG

SEQ ID NO: 192873 - protein, 148 aa, Zea mays
  Clone ID: MRT4577_107488C.1.pep
SHSWCSFSPLRHASRSLLSLLVLEVSLLPLIVPDHRYRRSGSNCDLHSSPHTMPAICSFLSSRRGLLPDHATPDGLYSCCGACHQGPYSTDIEAFATRATAYLERDVILLDSTCLDIEHASHAASLADDANEERHVGISYRPGLLHNV

SEQ ID NO: 192874 - protein, 71 aa, Zea mays
  Clone ID: MRT4577_107489C.1.pep
GRLDARRPASSPSPSPSPKRVSPASSLSRETLAKASEEEYYAKAKRRSPYRCSSISSSPPAPHPDPPPFLV

SEQ ID NO: 192875 - protein, 231 aa, Zea mays
  unsure (1)..(231): unsure at all Xaa locations
  Clone ID: MRT4577_10748C.1.pep
METMSALARTAPPLAGTIRRPSCALRPTASLSFAAASTTPRGRLGLGLSTAPAGSGRAARARAVPQRIVASSEVERSYIMIKPDGVQRGLVGEIISRFEKKGFLLKGLKLFQCPKDLAQEHYKDLKDKPFFPKLIDYITSGPVVCMXILLFYSVKAWEGAGVVASARKLIGATNPLQAEPGTIRGDLAVQTGRNVVHGSDSPDNGKREIELWFKEGELCXWESVQAPWLIE

SEQ ID NO: 192876 - protein, 38 aa, Zea mays
  unsure (1)..(38): unsure at all Xaa locations
  Clone ID: MRT4577_107490C.1.pep
PGRRPXFFFFFSYLSFQTYFYCXTYRAHRAGSFIHYTA

SEQ ID NO: 192877 - protein, 57 aa, Zea mays
  Clone ID: MRT4577_107491C.1.pep
MSTTQPADEMLMVYLISPYIHRSDVVLLLKSIPYELILYDLTNNIYLLLTHNPIHKL

SEQ ID NO: 192878 - protein, 54 aa, Zea mays
  Clone ID: MRT4577_107492C.1.pep
YIHHFYQFTSILYTFIFQLSSKFIQFKLIHLFNTFHYINSSSHNFSTSPITNIT

SEQ ID NO: 192879 - protein, 375 aa, Zea mays
  Clone ID: MRT4577_107493C.1.pep
MLPARPLLVAAAVFLLLLPVHVAIVAAQGFRGFSYLLNCGAASPTTDSRGLRWDPDGDYVSAGTPGVVSLSGLINPTLATLRTFPLRYGAKFCYELPVDRNRRYLIRPTFFYGALFASSSAPPPPVFDLIVDGTFWTAVNTTDDALAGAASSYEGVFPASGRNMSFCLGVNPDYTDARPFISALQVIQLDDSVYNATDFPTSAMGLIARTKFGSTGGIERYPNDSFDRYWQPFPDDKHAVSSTQNVTSADFWNLPPPDVFNTAFIAEQDAPLVLQWPPVPLQNDSYYVALYFADTLPDNSRTFDVYINDYLFFKDLNVTSAGLSVFATQWILSGLTTIILKSASPSALPPLINAGEVFGLFPVGRLTYARDVLAL

SEQ ID NO: 192880 - protein, 20 aa, Zea mays
  Clone ID: MRT4577_107494C.1.pep
LSLGPPIERLYCSMHAYVSL

SEQ ID NO: 192881 - protein, 235 aa, Zea mays
  Clone ID: MRT4577_107495C.1.pep
MGDSQYSFSLTTFSPSGKLVQIEHALTAVGSGQTSLGIKAANGVVIATEKKLPSILVDETSVQKIQALTPNIGVVYSGMGPDFRVLVRKSRKQAQQYYRLYKEHIPVTQLVRETAAVMQEFTQSGGVRPFGVSLLIAGYDDNGPQLYQVDPSGSYFSWKASAMGKNVSNAKTFLEKRYTEDMELDDAIHTAILTLKEGYEGQISSNNIEIGIIRADREFKVLSPSEIKDFLEEVE

SEQ ID NO: 192882 - protein, 52 aa, Zea mays
  Clone ID: MRT4577_107496C.1.pep
YRSMLGSVPVLFKSSYLLSSIPSVAINLFPLCKMPGVCHAQHELPTLLMNVH

SEQ ID NO: 192883 - protein, 44 aa, Zea mays
  Clone ID: MRT4577_107497C.1.pep
QGGRTPYRQRQRGYYRFGRARPRLAAMGTWPVELFRNDGIETAG

SEQ ID NO: 192884 - protein, 139 aa, Zea mays
  Clone ID: MRT4577_107498C.1.pep
PTRRGFQTQPNEMKNIPLFNNPRFLYIPLVGGGTNKQPKSGKQKKNHRVAKTKIGGTPFGTPPSPNGGKKVWKKNATPPPGEDPKRQGPQEKKTLPPLERGPPKFFFVGGEKGNPGVGGFGTIEPPQGGGKKTTLGETG

SEQ ID NO: 192885 - protein, 55 aa, Zea mays
  unsure (1)..(55): unsure at all Xaa locations
  Clone ID: MRT4577_107499C.1.pep
TVSSASCSSSFSRSCFFLQDLRRRSMXPTLVYCARSCPRSSCNSQRSNGYRFQGQ

SEQ ID NO: 192886 - protein, 52 aa, Zea mays
  Clone ID: MRT4577_10749C.1.pep
FISHGSPMLPLEPHNPTRLWLTELSKTITKPKAVLVISAHWEEREATVTSST

SEQ ID NO: 192887 - protein, 60 aa, Zea mays
  Clone ID: MRT4577_1074C.1.pep
RAWTCAEHLLFLAGLWLYQQRPSPLLLMIMNKNKGDLVGLCFYKPKICSRLHIHVRLYLD

SEQ ID NO: 192888 - protein, 60 aa, Zea mays
  Clone ID: MRT4577_107500C.1.pep
IIPSGQFLEKMSPVDHPFSSRLPPLITRLVSVTMLCAIIYETMDHLFVMQLLILNIYILP

SEQ ID NO: 192889 - protein, 75 aa, Zea mays
  Clone ID: MRT4577_107501C.1.pep
SLHCIPSTPASERDPGPGPSRLTAATPTADQHAGPAPPTSSSPAHPDRRRPPLTSPPQLLPARIPPQETPVPPLP

SEQ ID NO: 192890 - protein, 29 aa, Zea mays
  Clone ID: MRT4577_107502C.1.pep
QFQVVLKNTWKSLEFRTWLTRKIRLFLTT

SEQ ID NO: 192891 - protein, 36 aa, Zea mays
  Clone ID: MRT4577_107503C.1.pep
HAVYFYRYLINHGALHADWKTCVPLIAEHPFAVRIQ

SEQ ID NO: 192892 - protein, 60 aa, Zea mays
  Clone ID: MRT4577_107504C.1.pep
MSAYLPKNSVKLIKNADYITAPGMGILAADESTGTISMRLYRTNVLYSKENRTALLKLQY

SEQ ID NO: 192893 - protein, 98 aa, Zea mays
  Clone ID: MRT4577_107505C.1.pep
SYPSSRSTRTPSSAIQSRLIMYHAPQSSDTSSLRRLPSLVYSQLKMMRISAAPLSLALGLSAEAHQALPTSTVRVPVVSLRVCVQPFRTSARLLLSCG

SEQ ID NO: 192894 - protein, 85 aa, Zea mays
  Clone ID: MRT4577_107506C.1.pep
PKVESSSNIGATIACKVLSRLMLLALAAWVANATIFPQCSQGPVASLLPPYLASVIASVCEKPALQPYRLQQAIAASNIPLSPLL

SEQ ID NO: 192895 - protein, 53 aa, Zea mays
  Clone ID: MRT4577_107507C.1.pep
ESQDTTYLLSIVVCGDLWIVAVIRCTCVYMMCNLYMRPCSVQKRMPSSFCSFM

SEQ ID NO: 192896 - protein, 242 aa, Zea mays
  unsure (1)..(242): unsure at all Xaa locations
  Clone ID: MRT4577_107508C.1.pep
RYKDLLDDVYSDISNLLKSSGNVCSIIYCLERAACDDLSMHLSQQGVSCAAYHAGLNSKVRSSVLDDWLSSRTQVVVATVAFGMGIDRQDVRIVCHFNLPKSMESFYQESGRAGRDQRPSRSVLYYGLDDRRRMEFILRNPKTKKSQPSSSSNELSEKALADFSQIIDYCEISSCRRKKIIESFGEKVQPTLCQRSCDACKHPNLVLSRLEELRRVPNCRXNKISPVFQSSVKQAHLDTEFW

SEQ ID NO: 192897 - protein, 624 aa, Zea mays
  unsure (1)..(624): unsure at all Xaa locations
  Clone ID: MRT4577_107509C.1.pep
ELVATSSFMAKLKKLYNRGLLGLVAIDEAHCISTWGHDFRPSYRKLSSLRKQFPDIPLLALTATAVPKVQKDVVSSLCLQNPVILRASFNRPNIFYEVRYKDLLDDVYSDISNLLKSSGNVCSIIYCLERAACDDLSMHLSQQGVSCAAYHAGLNSKVRSSVLDDWLSSRTQVFVATVAFXISASIWPLAIGLWILLHRMGIDRQDVRIVCHFNLPKSMESFYQESGRAGRDQRPSRSVLYYGLDDRRRMEFILRNPKTKKSQPSSSSNELSEKALADFSPIIDYCEISSRRRKNIIESFGEKVXNQLXKRSCEACKPPNCELCGPQELRLVPNCRLNKISPVFQSSXKKHTSCCCNCSIWDGYXDKKDISDSDDGNEVVSNIAISKVPAKAGLDAKFKALERAENAYYQGKGQAKQQGGGLADKKSISETLRDACRKRLLDALGQAKLRLGNIPCGDEASATHLETECFKKYVKAGKTFYNSQIAATVRWLSSATLSQMRDRLDTLIDRTKDDGASGCPDIVPESPPASPEIVVGARSGETSNDKPQHICELKSSDESAKGAASSTGNMVLPAIPTFREFLSQKGRDRAKCYSNSNATNQPSGIRRKFSGHLDKEEASKRMKS

SEQ ID NO: 192898 - protein, 45 aa, Zea mays
  unsure (1)..(45): unsure at all Xaa locations
  Clone ID: MRT4577_10750C.1.pep
KFPSSFFPLXKVFFPKVKILRAPKFVFGKLMGVPGASKKDVGFNL

SEQ ID NO: 192899 - protein, 78 aa, Zea mays
  Clone ID: MRT4577_107510C.1.pep
RQIFKISTDHFSAPIRSPKKFQTWGVFKRKVTYKRFRISDESKTAVILYKVVPPSRESQDPLHGHKDQFCHGPCYIGA

SEQ ID NO: 192900 - protein, 56 aa, Zea mays
  Clone ID: MRT4577_107511C.1.pep
MEPLEVAITIIFDALLLVFMVKLFFAMFQMKLVVILFYLVILPFAMAFSGRAPSSF

SEQ ID NO: 192901 - protein, 82 aa, Zea mays
  Clone ID: MRT4577_107512C.1.pep
AVQGVCQSPCRVLFSFSPPSERAFFLQPHQLGAAMGFPPLNFGKPRAFPFPSVAPLRPLKFFLVPLYNLWRGTRPPPLSWFL

SEQ ID NO: 192902 - protein, 56 aa, Zea mays
  Clone ID: MRT4577_107513C.1.pep
MEPLEVAITIIFDALLLVFMVKLFFAMFQMKLVVILFYLVILLFAMAFSGRAPSSF

SEQ ID NO: 192903 - protein, 112 aa, Zea mays
  unsure (1)..(112): unsure at all Xaa locations
  Clone ID: MRT4577_107514C.1.pep
GKPPPKEGGFSKKGGKKAKKRVETSKFFFFKVFKRVPPDLGFSSKALSLLNPFFNAFFXKFPGGGAKFPPFTKKPPLPPRGIQPPVPLFFPGGLPKPPFLGGPKPVPKFPPS

SEQ ID NO: 192904 - protein, 56 aa, Zea mays; identical to SEQ ID NO: 192902
  Clone ID: MRT4577_107515C.1.pep

SEQ ID NO: 192905 - protein, 80 aa, Zea mays
  Clone ID: MRT4577_107516C.1.pep
QGHYIPVSSFGFKSFPGVTNPFPRSMGGGGPLAGRPLNNWGGGSQTPGILTFLGPLAPGGGGGGCPLLKTPMTSPVSGLF

SEQ ID NO: 192906 - protein, 208 aa, Zea mays
  Clone ID: MRT4577_107517C.1.pep
EDTDNGLSDKLNLLLRPYQITLSDKRPKLVLCDLESLMNQAMYQDFENCTFQKNGSPRCLDPKQEQQESFASFVALRNLSWNEVLKKGTKHHCEDLGRFCDQKMSCVVSILNWSWPWAEQLLQCFFVASKCVWLLHLLAFSFVPPLTILRVEEDRAFDQTYMEDVLLDKQRSRNGPPPSSSQVKLMVTPGFYVQDRLLKCRVLCRYSG

SEQ ID NO: 192907 - protein, 78 aa, Zea mays
  Clone ID: MRT4577_107518C.1.pep
PSTAKPPPLSSDTCVLVRSKLVPRSLSLSRISHDNDHMIPGPSVYGALVHPERVSLSLFYSYVFSSSHRVYRAMLGFL

SEQ ID NO: 192908 - protein, 57 aa, Zea mays
  Clone ID: MRT4577_107519C.1.pep
SYDKFPNVQIPQRRGHTYSPQFPFKPQGGSPPLKNPPQGRGGHGEFNPCVPGIRPLV

SEQ ID NO: 192909 - protein, 131 aa, Zea mays
  Clone ID: MRT4577_10751C.1.pep
MIGESRLGRCSSLELISSSEAGSSKQIPLLLSIVVVGVAGQFAWRRGGNIWCAFANRGAAGGWRRPGEDCSAAAKGFKMLACIACSAKDGGDQDGSRAATPHGRDAGKSLTSQLKDMVLKFSGSGRQYKAA

SEQ ID NO: 192910 - protein, 93 aa, Zea mays
  Clone ID: MRT4577_107520C.1.pep
YFIRPSSIRTVLYLKLEFQDRGTIHSHPIFFLSSYTSSYIVVPYFNLSHTFSTPCLMHKPYQFIIVINEPPKTYNTFDLLLFYSIYLPFQTYF

SEQ ID NO: 192911 - protein, 134 aa, Zea mays
  unsure (1)..(134): unsure at all Xaa locations
  Clone ID: MRT4577_107521C.1.pep
TWHTGKLEVLLISTNGLXDTDSLNNMGGLAILTCRTEXQKSRGSNGAGRELEWNETFTFTESDYTPQLHIKXMDSDLTNTRSVXEATMLLEAEFQEGRLPSADHPVVKXDKDCXEVKLVLTLTPSVETGRPYDN

SEQ ID NO: 192912 - protein, 154 aa, Zea mays
  unsure (1)..(154): unsure at all Xaa locations
  Clone ID: MRT4577_107522C.1.pep
MATELQSPLLPPPPLPPQRRLSPRAAAWAALAVSATVLLLPFLIGSTTRTTSSSSTRHPRXILPTIXPVELTLLTAARDKGAVCLDGSPPGYHLQAGSGAGSGSWLIHLMGGGWCDTRPQXSDRRTTYLGSSLFMQKVMDFTGILSNDPAQNPD

SEQ ID NO: 192913 - protein, 89 aa, Zea mays
  Clone ID: MRT4577_107523C.1.pep
SSPASTACSRLRASAQLVPADLARPDPLTRRHTPATPRRLTIRAPESSASSSHPRSRRPPPWLSLSLCLCSVPPPCCCGGATRLLACCL

SEQ ID NO: 192914 - protein, 79 aa, Zea mays
  Clone ID: MRT4577_107524C.1.pep
IPISGWYAPAHKSMADLVSTQETARAGRQLRHACLSLFHRSHGGTQAVPSQATNFVEHLPSRVRTASAGRRRPPIRQIR

SEQ ID NO: 192915 - protein, 78 aa, Zea mays
  unsure (1)..(78): unsure at all Xaa locations
  Clone ID: MRT4577_107525C.1.pep
XPNXTXXGSEITQDYHKHXXXQXXQGTPKTEXKEXXTKGAKXNEATKKPXTXRAXXRXXPQKQNNKXEXPNGSGGGKG

SEQ ID NO: 192916 - protein, 88 aa, Zea mays
  Clone ID: MRT4577_107526C.1.pep
VMPFGWVHLPLFWSLRNSTRLSCWESAQDSLLSTRSVPFLSSHSVEQKSSWIFCAPEAQPLSAALFFFASAACGPVWSSSARVFSSGA

SEQ ID NO: 192917 - protein, 85 aa, Zea mays
  unsure (1)..(85): unsure at all Xaa locations
  Clone ID: MRT4577_107527C.1.pep
WDLKTNHWSPAFNAITLKSFIISHRSLLPCNIITHSFRSITLITIXHPTLQSYRLQQAIAASVLQQPSPYLQQQFLAHLSVQTIV

SEQ ID NO: 192918 - protein, 47 aa, Zea mays
  Clone ID: MRT4577_107528C.1.pep
MPPKLDRSQVVVVFIRVTLGEVGAASAVGAKIGPLGVCPDNIGQDMG

SEQ ID NO: 192919 - protein, 78 aa, Zea mays
  unsure (1)..(78): unsure at all Xaa locations
  Clone ID: MRT4577_107529C.1.pep
KKFVIHHISWDATXARLRGRVQRWVRLCNGFIFVDLNGWSNVYHGSDKGDWFLGSPLKKKKYSETYKNKRNKLWRKRV

SEQ ID NO: 192920 - protein, 82 aa, Zea mays
  Clone ID: MRT4577_10752C.1.pep
LFYIKEPGTLNLTPSWNDRVITIHGNTDMELICNAKDTLRVSYVDTNENNGVLRTDDNRYEALKRLSHSDKATIDLHCHMAH

SEQ ID NO: 192921 - protein, 71 aa, Zea mays
  Clone ID: MRT4577_107530C.1.pep
RTGGALSHMFGMPLAHDSRYLSYGDDGPDRTYLSTFRVLHSVRSNRDVNALDTRRFMQGMNHGCGGLVTQL

SEQ ID NO: 192922 - protein, 149 aa, Zea mays
  Clone ID: MRT4577_107531C.1.pep
RFWGPKTPLFSPTPKFGALKVWFPLSGPGGSVPSHLKTHYFGPPSWFCSLGKAFWETMPSPPGHGLIKGGKKRPGPPLGSPFKRPRGAGPLFSWEILFFSRTGTLGDKKKVGSPPPPGYKKKGFVFCFSGGGAPFFYLKLGRFGPYFAL

SEQ ID NO: 192923 - protein, 56 aa, Zea mays
  Clone ID: MRT4577_107532C.1.pep
KKTFPPILIPHYQGGGKRSYNGGGNPHTVRMIKTDGKITGWEPLRENPRYRWGKQA

SEQ ID NO: 192924 - protein, 82 aa, Zea mays
  Clone ID: MRT4577_107533C.1.pep
ARARRRSTWSPPQMRRCRCRGMHSPSWFPAPTLSMVSRDSTSSCHSLASQGIRKDRHVKSERPPHECGDIWLWCVRYEQHEV

SEQ ID NO: 192925 - protein, 66 aa, Zea mays
  Clone ID: MRT4577_107534C.1.pep
HYMTVDTIGILNADRPYTQDYNSCCLFLLAVTQVFHLSLYCCGLIRLYTYPVPRQYYWQKNSTADN

SEQ ID NO: 192926 - protein, 91 aa, Zea mays
  unsure (1)..(91): unsure at all Xaa locations
  Clone ID: MRT4577_107535C.1.pep
SFFSSPSYLFLFRLRLLXEKFFTITSPHXNYPFFFTVFPLPPSTILFKIPSPPTFISSTPISSPTFILLHLPSSTSLPSPPTTPFSTLSIT

SEQ ID NO: 192927 - protein, 67 aa, Zea mays
  Clone ID: MRT4577_107536C.1.pep
GIGLLLFNKPKTTGRPTQKNPNTQPKISKMTHLPPKRGLPNEQFQCNLTRAPKGWAGPAPRKKLGRA

SEQ ID NO: 192928 - protein, 80 aa, Zea mays
  unsure (1)..(80): unsure at all Xaa locations
  Clone ID: MRT4577_107537C.1.pep
LGIVSMILLTVTGYMTGALAXLHLAAEHHDSHYXSYTFGGSTESLQYCYWLIYYYARSDISTSMHTCLLIEYIVWLCYAF

SEQ ID NO: 192929 - protein, 113 aa, Zea mays
  Clone ID: MRT4577_107538C.1.pep
WKRTAARSPNFFPHIQSPPLPSAPHSPSQHRSPSPRIIAARCRRLGCWIPHPHHRRPAGAVAPSPFVQYRAAPSLSRHSSSPPIWIRRESAWSPPYLLYPSLPTSPPSHCACL

SEQ ID NO: 192930 - protein, 98 aa, Zea mays
  unsure (1)..(98): unsure at all Xaa locations
  Clone ID: MRT4577_107539C.1.pep
RGSSRXTCISFFREQYNXQKGVIFHSILYPSPTRLPHLQLKRACIFTCHPYSMLPAPILLSTIHNIKIPHYLNLTHITINSYLIQLHIQFNPEPSTIT

SEQ ID NO: 192931 - protein, 120 aa, Zea mays
  unsure (1)..(120): unsure at all Xaa locations
  Clone ID: MRT4577_10753C.1.pep
DRRVRLAPLPHFFYRLEGKEGERVVHFNMVPNXHFKKHWQNYVKTWXNQPARKQMRRIFLSFFFFIXXFTYFFFFCPIXQFFTLKFFFXARAGRGFTLFLFKAAGIPKRLAPTIVISVDH

SEQ ID NO: 192932 - protein, 49 aa, Zea mays
  Clone ID: MRT4577_107540C.1.pep
IELLTLDGKTHKRDRGGKICLTPHFKPLWAKNCPRFGLAHALCLCLAPW

SEQ ID NO: 192933 - protein, 1645 aa, Zea mays
  unsure (1)..(1645): unsure at all Xaa locations
  Clone ID: MRT4577_107541C.1.pep
MAPKKASSKADEAAKAALLAAKKGKALALTHSTHQEATDDDVLRTCEDDVLRTCEDDALHTCGPEGQPQPPPGFAPPEGVDLTEDGEVLGVSAEEQLQLRALRLKNCNLQRQKEILEAKRQRVSALAKVAVASSEGDDAMMAKSFIIALEGPALTWFTRLPPLSIDSWRSLRDKFLLNFQGYRPDTDALAELSLCKQLEKETLREYYRKFLTLKSQLPSVDDQIAIHYAISGLRAGVLYSHCIRDPPKNLQELYQLFEKYDKSEELHQRKVESQRKPKDAPQSSRTWTRTPQRDSGRDGRSQQQVHNIANQHPAADAPRRQEYPXQGRGNGTRGRGRGRAQPPRLFYCLFHGEDCAHQTRDCPETKATKDRMXGRSQPXNPRVVAHTYQQPPPPYIHAPAPHPPHXRLPTXRNTDFDTKRQKRDHYRNINHVAITGPVVQTKWSHVPLTFDARDVDLRSAPHIDAMVINCSVAGWDLHKVLIDNGSQADIIFLHAFDRMGISHNLLKPSDNPLYGFGGKGTFPVGKIELPLSFGVAPNARSEQITFDIVDMVYPYNAIMGRGSINKFEAAIHGLYLCMKIPGPLGAIAVYGNQQTARNIERDFVPGQRNVHCLTAQREVPASVSPIDKEHDKAQLQSNDGTKTVPLDQATPKQTVTISKDLTSHEEEKLLCCLSKNKDRLRKMSDEKTEAAKAEVRRLLEAKFIEPVAYPTWLSNVVMVQKKSGKWRMCIDFTSLNKACPKDNFPLPRIDKIVDSASGCEVMSLLDCFSGYHQIYMKEEDKASTSFITPFGTYCFIRMPEGLKNAGSTFSRLTKIVLEXCVFGXAKGKYLGYLVSHRGIEANPTKIQAIINMTPPQSARDVQRLTGRLAALNRFISKSAEQSLPFLKTLRGAKDFAWGPEQAVAFASLKQYLSELAVLTSPNSSLPLLLYVVASPHAVSAALVQEQTVEGVTRQCPVYYVSEVLTPSKCNMTELEKIAYAVVMSSRKLRHYFEAFKVRVTSDRGLGELFRNPEASVRIAKWAAELSGYHINFEPRTTIKSQVLADFVVDWTGPITQPDPSAEKVWTIHCDGAWCHAGAGAAVVITSPTGVKHRYAARLSFALESDRCTNNIEEYEAVILGLRKLRALGVTTCIIRTDSKIVAGQVEKDYAAKDPALMQYLAAIQSLERQFKGFTLQHVDRAKNEEADALAKAAARGESLPSNVFYHVIGTPAVRSPEGLQITNDSEGHRIVNLIMTEDWRAPITMFLQGYYHPIDINEAKRLKHRSWDFALIEGQLYKKGVSQPMLKCVRETEGIQILREVHSGTCGSHAGPRALAAKVIHQGFYWPTMICAANRVARSCEACQKFSPRSDSPSQFTKLIAHTWPLQRWGLDIVGPLPTAQGNHKFTFVAVEYFTKWIEARAVSTITSKTAQKFFWQNIVCRFGVPSELTVDNDKQFDSQDFKDFCFSVGTKLAFASVYHPQSNGVVERANXKIFTAVKKMLLDXKKGRWADLLPEAVWALNTTECRATGFTPFRLLYGSEAMTPQEIKHGSPRTVPSAVPDVDEPTSKDLIDGDRVFALQALNKYQAQTKAWRDHAVIPREFSEGDLVLVRTARTESRGKLEPKWEGPFIVKTKASPTAYRLAMPNGEDLEHSWNIDNLRKFFV

SEQ ID NO: 192934 - protein, 1052 aa, Zea mays
  Clone ID: MRT4577_107542C.1.pep
MAPKRANPKADEAAKAALLAARKGKALALAARNIPPKAAEMELVAGAKGARSRRADSTAFFTVKTAPTKPKIAPKRRPPETEWHGRSQPTTPELSRTTTSHPLHHISTPPLRIHRTTLTNTIRKYKSYLLHPEVPAPASPTDKLHDKAQLQSQDGTKIVPLDQATPKQTVTVSKDLTSYEEEKLLCCLAKNKDVFAWSALDLVGVSRSIIEHNLGIDPSVRPKKQRLRKMSDEKTEAAKAEVHRLLEAKFIEPVAYPTWLSNVVMVQKKSGKWRMCIDFTSLNKACPKDNFPLPRIDKIVDSAAGCEVMSLLDFFSDYHQIYMKEEDKASTSFITPFGTYCFIRMPEGLKNVGSTFSRLTKTVLEGQVGRNIFTYVDDIIVASKNKEDHLADLAETFANMRDAQLRLNPEKCVFGVRQGKILGYLVSHRGIEANPTKIQAIVDMSPPQSARDVQRLTSRLAALNRFISRSAERSLPFLKTLRGAKDFAWGPEQAAAFASLKQYLSELAILTSPDSSLPLLLYVAASPHAVSAALVQEQTVEAAVRQCPVYYVSEVLTPSKCNMTELEKIAYAVVMSSRKLRHYFEAFKVRVTSDRGLGELFRNPEASVRIAKWAAELSGYHISFEPRTAIKSQVLADFVVDWTGPITQPDPSTEKGYYHPTDISEAKRLRHRSRDFALIEGQLYKKGVSQPMLKCVTETEGMQILREVHSGMCGSHAGPRALAAKVIRQGFYWPAMICAANRVTRSCEACQKFSPRSGSPSQYTKLIAHTWPLQRWGLDIVGPLPTAQGNLKFAFVAVEYFTKWIEARAVSTITSKTAQKFFWQNIVCRFGVPSELTVDNGKQFDSQDFKDFCFSIGTKLAFASVYHPQSNGVVERANGKIFTAVKKMLLDEKKGRWTELLPEAVWALNTTECRATGFTPFRLLYGSEAMTPQEIKHGSPRTVPSAVPDVDEPTSKDLIDGDRVFALQALNKYQAQTKAWRDHAVIPREFSEGDLVLVRTARTESRGKLEPKWEGPFIVKTKASPSAYRLTTPNGEDLEHSWNIDNLHKFFV

SEQ ID NO: 192935 - protein, 736 aa, Zea mays
  Clone ID: MRT4577_107543C.1.pep
SPYSPPPLGDYHEVHRLLEAKFIEPVAYPTWLANVVMVQKKSGKWRMCIDFTSLNKACLKDNFPLPRIDKIVDSAAGCEVMSLLYCFSGYHQIYMKEEDKASTIFITPFGTYCFIRMPEGLKNAGSTFSRLTKTVLEGQVGINVFTYVDDIVVASRSKEDHLADLAETFANMRDARLRLNPEKCVFGVRQGKILGYLVSHRDIEANPTKIQAIINMTPPQSARDVQRLTVVMSSRKLRHYFEAFKVRVTSDRGLSELFRNPEASVRIAKWAAELSGYHITFEPRTAIKSQVLADFVVDWTGPITQPDSSAEKVWTIHCDGAWCHAGTGAAAVITSPARVKHRYAARLSFALESDRCTNNIAEYEAVILGLRKLRALGVTTCIVRTDSKVVTGQVEKYYAAKDPALMQYLAAIRSLERQFKGFTLQHVDRAKNEEADALAKAAARGESLPSDVFYHVIGTPAVRSPEGLQITNDNEGHRIVNLIMTEDWRAPITLFLQGYYHPTDINEAKCLKHRSRDFALIEGQLYKKGVSQPMLKCVTETEGVQIMREVHSGTCGSHAGPRALAAKVIRQGFYWPAMICATNRVTRFCEASQKFSPRSGSPSQFTKLITHTWPLQRWGLDIVGPLPTAQGNLKFTFVAVEYFTKWIEAMAVSTITSKAAQKFFWQNIVCRFGVPSELRVDNGKQFDSQDFKDFCFSIGTKLAFASVYHPQSNGVVERANGKIFTAVKKILLDKKG

SEQ ID NO: 192936 - protein, 724 aa, Zea mays
  Clone ID: MRT4577_107544C.1.pep
MPEGLKNAGSTFSRLTKTVLEGQVGRNIFTYVDDIVVASKNKEDHLADLAETFANMRDARLCLNPEKCVFGVRQGKILGYLVSHRGIEANPTKIQAIVDMSPPQSARDVQRLTGRLAALNRFISRSAERSLPFLKTLRGAKDFAWGPEQAAAFASLKQYLSELAILTSPDSSLSLLLYIAASPHAVSAALVQEQTVEGAVRQCPVYYVSEVLTLSKCNMTELEKIAYAVVMSSRKLCHYFEAFKVRVTSDRGLGELFRNPEASVRIAKWAAELSGYHISFEPRTAIKSQVLADFVVDWTGPITQPDPSTEKVWTIHCDGAWCHAGAGVAAVVTSPAGVKHRYAARLSFALESDRCTNNIAEYEAVILGLRKLRALVVTTCIIKTDSKIVAGQVEKDYAAKDPALMQYLAAIRSLERQFKGFTLQHVDRAKNEEADALAKAAARGEPLPSDVFFHTIGTPAVRSPEGLQITNDSEGHRIVNLIMTEDWRAPITLFLQGYYHPTDVSEAKRLRHRSRDFTLIEGQLYKKGVSQPMLKCVTETEGMQILREVHSGTCGSHAGPRALAAKVIRQGFYWPAMICAANRVTRATGFTPFRLLYGSEAMTPQEIKHGSPRTVPSAVPDVDEPTSKDLIDGDRVFALQALNKYQAQTKAWRDHAVIPREFSEGGLVLVRTARTESRGKLEPKWEGPFIVKTKASPSAYRLTTPNGEDLEHSWNIDNLRKFFV

SEQ ID NO: 192937 - protein, 63 aa, Zea mays
  Clone ID: MRT4577_107545C.1.pep
IRLEVCATFFFARLQLVKTTSIAEWMNMYSPTPLHVMQELEMDFFGKQRLSTRTTQIYSMTDN

SEQ ID NO: 192938 - protein, 328 aa, Zea mays
  unsure (1)..(328): unsure at all Xaa locations
  Clone ID: MRT4577_107546C.1.pep
RQYSPHLQRRHLPHLRARRTIAAAPRLRPTGGRGSHRGRRGPRRLNRRTVTAARPAPQEPQSPEAERDTGGQAPACVRTSQGATNDTRRGAEGPRPRARDRADAXEGHLGLQQEPPLQQRAQPEDTREGHLGLQHGPPLQHRAQPENPRFPQHDYAFQHGAPFQGVNYLDERSPLAPHLQVTPWPANFRAGAYPKYNGSTDPAQYIMSYQVAVASAGGDDATMAKSFIIALEGPALTWFTRLPPLSIDSWRSLRDKFLLNFQGYRLDTDALAELSLCKQLEKETLREYYRKFLTLKSQLPSVDDQIAIHYAISXASGRRPLQPLGVQH

SEQ ID NO: 192939 - protein, 58 aa, Zea mays
  Clone ID: MRT4577_107547C.1.pep
MAKHRTKHTWCSSYNRNVPLSYGKDTAAILRDQQFEEIEHCCITSPYDNDCWEIHEQM

SEQ ID NO: 192940 - protein, 755 aa, Zea mays
  Clone ID: MRT4577_107548C.1.pep
MAKSFIIALEGPALTWFTRLPPLSIDSWRSLRDKFLLNFQGYRPDTDALVELSLCKQLEKETLREYYRKFLTLKSQLPSVDDQIAIHYAISGLRAGVLYSHCIRDPPKNLQELYQLFEKYAKSEELHQRKVESQRKPKDAPQSSRTTDFDTKRQKRDHYRSINHVAITGPVVQTKWSHVPLTFDARDVDLRSAPHIDAMVINCSVAGWDLHKVLVDNGSQADIIFLHAFDRMGISHSLLKPSDNLLYGFGGKGTFPIGKIELPLSFGVAPNARSEQVTFDIVDMVYPYNAIMGRGSINKFEVAIHGLYLCMKIPGPLGAIAVYGNQQTARNIERDFVPGQRNVHCLMAQREVPTSVSPTDKEHDKAQLQSNDGTKTVPLDQATPKQTVTISEDLTSHEEEKLLCCLSKNKDVFAWSALDLVGVSRSIIEHSLGIDPSVRPKKQRLRKMSNEKTEAAKAEVHRLLEAKFIEPVAYPTWLSNVVMVQKKSGKWRMCIDFTSLNKARPKDNFPLPRIDKIVDSAAGCEVMSLLDCFSGYHQIYMKEEDNASTSFITPFGTYCFIRMPEGLKNVGSTFSRLTKTVLEGQVGRNIFTYVDDIVVASKSKEDHLADFAETFANMRDARLCLNPEKCVFGVRQGKILGYLVSHCGIEANPTKIQAIINMTPPQSARDVQRLTGRLAALNRFISRSAERSLPFLKTLRGAKDFAWGPEQAAAFASLKQYLSELAVLTSPDSSLPLLLYVAASPHAVSATLVQE

SEQ ID NO: 192941 - protein, 1658 aa, Zea mays
  unsure (1)..(1658): unsure at all Xaa locations
  Clone ID: MRT4577_107549C.1.pep
MPFTFANDSIVIHQGLNSLFPFKSVPFSAIMPKLPCAQLRLCVNLRILRASHTVVLIQVRRKGKALALTQSTHQEATEDNVPRTCEDDTLCTCGPEGQSQPPSGFAPLEGADLTEDGEVLGVSAEEQLQLHALRLKNRNLQRQKEILEAKRQRVSALAKQGPPLQHRAQPEDPRFPQRDHTFPHAAPFQGINYLDERSPLAPHLQVTPWPANFRAGTYPKYNGSTDPAQYIMSYQVAVASSGGDDATMAKSFIIALEGPALTWFTRLPPLSIDSWRSLRDKFLLNFQGYRPDTDALAELSLCKQLEKETLREYYRKFLTLKSQLPSVDDQIAIHYAISGLRAGVLYSHCIRDPPKNLQELYQLFEKYTKSEELHQRKPPRRFYCLFHGEDCAHQTKDCPETKATRDMMARAQPADNPRVVAHTYQQPPPPYIHAPVPHPPHHAYQHHPEVQIVPPPPPPPHQQHQNIPHAPKQEDFADQPYRGVIHMITGGSSTDFDTKRQKRDHYRSINHVAVTGPVVQIRWSHIPLTFDAWDVDLRSAPHCDAMVINCSVAGWDLHKVLVDNGSQAGIIFLHAFDRMGISHSLPKPSDNPLYGFGGKGTFPVGKIELPLSFGVAPNARSEQVTFDIVDMVYPYNAIMGRGSINKFEAAIHGLYLCMKIPGPLGVITIYGNQQTARNIERDFVPGQRNVHCLTAQREVPAPASPTDKQHDKTQLQSNDGTKTVPLDQATPKQTVIISEDLTSHEEEKLLCCLSKNKDVFAWSALDLVGVSRSIIEHSLGIDPSVRPKKQRLRKMSDEKTEAAKAEVHRLLEAKFIEPVAYPTWLSNVVMVQKKSGKWRMCIDFTSLNKACPKDNFPLPRIDKIVDSAVGCEVMSLLDCFSGYHQIYMKEEDKASTSFITPFGTYCFIRMPEGLKNAGSTFCRLTKTVLNGQVGRNIFTYVDDIVVASKSKADHLTDLAETFANMRDARLRLNPKKCAFGVRQGKILGYLVSHRGIEANPTKIQAIINMTPPQSARDVQRLTGRLAALNRFISRSAERSLPFPKTLRGAKDFAWGPEQAAAFTSLKQYLTELAVLTSPDSSLPLLLYVAASPHAVSAALVQEQTVEGVVRQCPVYYVSEVLTPSKCNMTELEKIAYAVVMSSRKLRHYFEAFKVRVTSDRGLGELFRNPEASVRIAKWAAELSGYHISFEPRTAIKSQVLADFVVDWTGPTTQPDPPAEKVWTIHCDGARCHARAGAAAVITSPVGVKHRYAARLSFALESDRCTNNIAEYEAVILGLRKLRALGVTTCIIKTDSKVVAGQVEKDYAAKDPALMQYLVAILSLERQFKGFTLQHVDRAKNEEADALAKAAARGESLPSDVFFHVIGTPAVRSPEGLQITNDSEGHHIVNLIMTEDWRAPITLFLQGYYHPTDISEAKRLRHRSRDFALIEGQLYKKGVSQPMLKCVTETEGVRILREVHSGTCSSHAGPRALAGKVIRQGFYWPAMICAANRVTRSCEACQKFSPRSGSPSQYTKLIAHTWPLQRWGLDIVGPLPTAQGNLKFAFVVVEYFTKWIEARAVCTITSKTAQKFFWQNIVCRFGVPSELTVDNGKQFDSQDFKDFCFSIGTKLAFASVYHPQSNGVVERANGKIFTAVKKMLLDXKKGRWTDLLPEAVWAL

SEQ ID NO: 192942 - protein, 130 aa, Zea mays
  Clone ID: MRT4577_10754C.1.pep
HASAHASAHASALDLSHNHLTGIIPPGLFLLRNLTKLLLLSNDLSGPLPLEIGKAASLVRLRLGGNRIAGSIPASVSGMKSINFLDLGSNRLAGPVPAELGNCSQLQMLDLSNNSLTGPLPVSLAAVHGL

SEQ ID NO: 192943 - protein, 131 aa, Zea mays
  Clone ID: MRT4577_107550C.1.pep
LTPRCYSLPSWSTRSISSCSAIVIRRPSAPARLHNTIISTLIDAATHSPRGQPEHLPVQRRCDSLSSRPRTPPEYQHVVTAAPFPHPRLGCFLVRHTTSRNEEFAIVDDKEKSVLQVRRRSARIFTPGGHP

SEQ ID NO: 192944 - protein, 212 aa, Zea mays
  unsure (1)..(212): unsure at all Xaa locations
  Clone ID: MRT4577_107551C.1.pep
SPRRLSGRTATAARPAPQEPQSPEAERDIGGQAPARVRTSQGAANDTRRRAEGPGPRAGDRADAXEGHLGLQHGPPLQQRAQLKDTREGHLGLQHGPPLQQRAQPEDPRFPQRDHTFPHAAPFQGVNYLDERSPLAPHLQVMPWPANFRAGTYPKYNGSTDPAQYIMSYQLEKETLREYYRKFLTLKSQLPSVDDQIAIHYAISXASRRRPL

SEQ ID NO: 192945 - protein, 68 aa, Zea mays
  Clone ID: MRT4577_107552C.1.pep
PGRLIRPIRLHRMHKINQLSPLHRPIHQQSRIPEQRSWPQSCRHRSSIALLSAHGTTARIATPRTITS

SEQ ID NO: 192946 - protein, 1672 aa, Zea mays
  unsure (1)..(1672): unsure at all Xaa locations
  Clone ID: MRT4577_107553C.1.pep
MAPKRANPKTDEAAKAALLAARKGKALALTQSTHQETTEDHVPRTCEDDTLRTCGPEGQSQPPPGFAPLEGADLTEDGEVLGVSAEEQLQLRALRLKNRNLQRQKEILEAKRQRVSALAKVRQMIRDEEQKAQDLEREIALMQREGHLGLQQGPPLQQRAQLEDTREGHLGLQHGPPPQHRAQPEDPRFPQRDHTFQHAAPFQGVNYLDERSPLAPHLQVTPWPTNFRAGTYPKYNGSTDPAQYIMSYQVAVASSGGDDATMAKSFIIALEGPALTWFTRLPPLSIDSWRSLRDKFLLNFQGYRPDTDALAELSLCKQLEKETLREYYRKFLTLKSQLPSVDDQIAIHYAISGLRAGVLYSHCIRDPPKNLQELYQLFENTDFDTKRQKRDHYRSINHVAVTGPVVQTKWSHIPLTFDARDVDLRSAPHCDAMVINCSVAGWDLHKVLVDNGSQADIIFLHAFDRMGISHSLLKPSDNPLYGFGGKGTFPVGKIELPLSFGVAPNARSEQVTFDIVDMVYPYNAIMGRGSINKFEAAIHGLYLCMKISGPLGVITVHGNQQTARNIERDFVPGQRNVHCLTAQRXRSPRPPAQPISRTXAQLQSNDGTKTVPLDQATPKQTVTISEDLTSHEEEKLLCCLTKNKDVFAWSALDLVGVSRSIIEHSLGIDPSVRPKKQKLRKMSDEKTEAAKAEVHRLLEAKFIEPVAYPTWLSNVVMVQKKSGKWRMCIDFTSLNKACPKDNFPLPRIDKIVDSAAGCEVMSLLDCFSGYHQIYMKEEDKASTSFITPFGTYCFIIMPEGLKNVGSTFSRLTKTVLEGQVGRNIFTYVDDIVVASRSKEDHLADLAETFANMRDARLRLNPEKCVFDVRQGKILGYLVSHRGIEANPTKIQAIISMTPPQSARDVQRLTGRLAALNRFISRSAERSLPFLKTLSGAKDFAWGPEQAAAFASLKQYLTELAALTSPDSSLPLLLYVAASPHAVSAALVQEQTVEGVVRQCPVYYVSEVLTPSKCNMTELEKIAYAVVMSSRKLCHYFEAFKASVRIAKWAAELSGYHISFEPRTAIKSQVLADFVVDWTGPTTQPDPSAEKVWTIHCDGAWCHVGAGAAAVITSPVGFKHRYAARLSFNLESDRCTNNIAEYEAVILGLRKLRALGVTTCIIKTDSKVVAGQVEKDYAAKEPALMQYLAAIRSLERQFKGFTLQHVDRAKNEEADALAKAVARGESLPSDVFFHVIGTPAVRSPEGLQITNDSEGHRIVNLIMSEDWRAPITLFLQGYYHPADISEAKRLRHRSRDFALIEGQLYKKGVSQPMLKCVTEKEGIQILREVHSGTCDSHAGPRALAAKVIRQGFYWPAMICAANRVTRSCEACQKFSPRSGSPSQYTKLIAHTWPLQRWGLDIVGPLPTAQGNLKFAFVAVEYFTKWIEARDVSTITSKTAQRFFWQNIVCRFGVPSELTVDNGKQFDSQDFKDFCFSIGTKIAFASVYHPQSNGVVERANGKIFTAVKKMLLDEKKGRWTDLLPEAVWALNTTECRATGFTPFRLLYGSEAMTPQEIKHGSPRTVPSAVPDVDEPTSKDLIDGDRVFALQALNKYQAQTKAWRDHAVIPREFSEGDLVLVRTVRTESRGKLEPKWEGPFIVKTKASPSAYRLTTPNGEDLEHSWNIDNLRKFFV

SEQ ID NO: 192947 - protein, 126 aa, Zea mays
  unsure (1)..(126): unsure at all Xaa locations
  Clone ID: MRT4577_107554C.1.pep
MMRCTISRNSPKNVYRDYLAGQDGILQAVTNDEENVYHQGDXERKRTCSLYELPNETSEDTLPLNEEPPELTEAALRIICDRDVMLQEYCLSPSATDTEAWVLYVAIYFEYRIVNLTNMTLELSSP

SEQ ID NO: 192948 - protein, 67 aa, Zea mays
  Clone ID: MRT4577_107555C.1.pep
RSGARPPGPRKKKKNLWLRPSGLRASRFQGKKGCLWENRNAYLRKKRKSGKGGRPGNSIKPGGSRIP

SEQ ID NO: 192949 - protein, 72 aa, Zea mays
  unsure (1)..(72): unsure at all Xaa locations
  Clone ID: MRT4577_107556C.1.pep
MGGFVKTHKTNAYFKRFQVKFKRRRAGKTDYRATITLINQDXNKYNTPXYRFVVRFTNKDITAAIISASIAG

SEQ ID NO: 192950 - protein, 77 aa, Zea mays
  Clone ID: MRT4577_107557C.1.pep
MSGEHTKKELMTGENLDLWGGKNEDKALSKDGGDKHKEHKDESADAIKSHKRGDKKKNKMKKKAIIQVSRASDYEIP

SEQ ID NO: 192951 - protein, 548 aa, Zea mays
  unsure (1)..(548): unsure at all Xaa locations
  Clone ID: MRT4577_107558C.1.pep
TRPREELAEERARVRKLYEKLKADIEAAKNDETISGSWSKDKRQNHDAYVEIIEDGDGVEEIPALVYVAREKRRAWPHHFKAGALNALLRVSGVVSNAPYVLVLDCDMTCNSRASALDAMCFLLDRRPPPDSLAFVQFPQLFHNLSHKDIYANELRYIFGTRWFGLDGVRGPPLSGSGFYVRRDALYGATPTTDFMPDAAVVAELKTRFGHSDRLVASLRSPGVPPEAEAMMSLAALASCAYEAGTAWGAGVGFMYQSVVEDYFTGFQRFFARGWTSAYCYPEPRPAFLGSVPTNLNDVLVQNKRWMSGMLAVGVSRRHSPLACRPLLRASLLQAMAYAYFGFAALCAVPVLCYATLPQLCLLRGVPLFPCPAATAAAFASSLLQHMAEVCVXGGVXDLRTWWNEQRFWVLNALTAQLFGCVSAAQELLGARALDFDLTSKAAVDGSLYQDGVFDFTGCSALLLPATTLSVLNAAAIVAGTWKMSSSSSSSSGGFHFAPQLFLMCYGAALSYPLLEGMFLRRDPARVPPRITALSVALAAVLLAAMLG

SEQ ID NO: 192952 - protein, 108 aa, Zea mays
  Clone ID: MRT4577_107559C.1.pep
MAEVQVLVLDGRGHLLGRLAAIVAKQVLLGRKVVVVRCEGINISGNFYRNKLKYLAFLRKRMNTNPSRGPYHFRAPSRIFWRTVRGMLPHKTKRGQAALDRLKVSDGI

SEQ ID NO: 192953 - protein, 144 aa, Zea mays
  unsure (1)..(144): unsure at all Xaa locations
  Clone ID: MRT4577_10755C.1.pep
LSAVLALLXALFVSATNAGIITHWLLAPNGMVPQILLPVSSMGLVHLDGQAYRLQHALGVSVLQQLMNQLQQQSLXHLTIRTIVAQQQQQVLPQLIQLDGVNPVDYLQQQVLACNPLALGNVAAYQQQQQLQQFLPALIQLGMV

SEQ ID NO: 192954 - protein, 57 aa, Zea mays
  Clone ID: MRT4577_107560C.1.pep
MAGLPHILFFRSVSEPFTQLQLLISPSHILISRLTTCYSMLFYTQHLINLQFPKMSA

SEQ ID NO: 192955 - protein, 102 aa, Zea mays
  Clone ID: MRT4577_107561C.1.pep
NNYQTSSPFAFDTWSSTPTTSTPPISSSACPGPAKASPTTTCQKKPQPFVWAQTPFGRRHQKLGLRDQPSRHKPRLRPLTPHLRACQRAKCLVASHKDLQEK

SEQ ID NO: 192956 - protein, 362 aa, Zea mays
  Clone ID: MRT4577_107562C.1.pep
MEQGQGPPPPKPPATERDIGFAERAVAAAGAAVVSAVLVNPLDVAKTRLQAQAAGVVYNPIWSDFRCYPSCSTGGINGLGPCSSCSPECFQYRGTMDVFSKVTRQEGIFRLWRGTGASLALAVPTVGIYLPSYDLLRNWIEEYSDRNCPKLRPYAPLISGSIARSLACITCCPIELARTRMQAFKESNVGGKPPGMWKTLIGVLSSRQSIKSPENVRGYHLLWTGLGAQLARDAPYSAICWTVLEPIRRHVTRLFGDQSNATVILGANFSAGFIAGVISAGATCPLDVAKTRRQIEKDPERVLSMNTRRILLEVWRKEGVEGLFRGAGPRMGRAGPSVGIVVSSYEVVKHLMHKNTSNAADL

SEQ ID NO: 192957 - protein, 60 aa, Zea mays
  Clone ID: MRT4577_107563C.1.pep
VYVRESECSAIVVVQATRAAVFCVVIGRDGGVSPLGLLVRFLPLHLFDKFPICTKKNQKK

SEQ ID NO: 192958 - protein, 125 aa, Zea mays
  Clone ID: MRT4577_107564C.1.pep
LFSATSRGNLCVRTNNQVYPWQSFIMSPLAGLVYAWLIRVVLVSPRRSFSVHHCQLWSLLVKEGSPLLFGCENLCKSPCILVWHVQGSGSILKRMIWPAPVSLYDLGPGWCAWFKKNKKKKASKR

SEQ ID NO: 192959 - protein, 91 aa, Zea mays
  Clone ID: MRT4577_107565C.1.pep
TIYTTSSWAAGATDRRRVSVCLFSSSAGSVCPVRPVVLGTMTLPALYERYESEVDPLVARGVHDLRTPIADMDSGVLRRIPKGRGAAPPPK

SEQ ID NO: 192960 - protein, 61 aa, Zea mays
  Clone ID: MRT4577_107566C.1.pep
APMAGPRRLLLLLLPLLVLLGAHAGVERVLGGGERRSPWSSTTSGCSRTDYVQCATTYLGS

SEQ ID NO: 192961 - protein, 52 aa, Zea mays
  Clone ID: MRT4577_107567C.1.pep
LDFSWKVNITLVFLGLENYIPLGACPITFFLHINIHYWFFLTRQKGVYNSYG

SEQ ID NO: 192962 - protein, 83 aa, Zea mays
  Clone ID: MRT4577_107568C.1.pep
VNSNSSEMKGSKRPVRKIGIPWKNGVPKLALSIINSPVMPCKVIQFSNFQYYVQMWPANNLQQNSFLSCFKGTLDFNHSFIKL

SEQ ID NO: 192963 - protein, 127 aa, Zea mays
  unsure (1)..(127): unsure at all Xaa locations
  Clone ID: MRT4577_107569C.1.pep
RRARRPXXRALXVVRGXPPALAVRPLXXVLFCGCPGXXXVLXLXXXXRLWSXXARRVXXXXLVAXXKKKFGAPPPPCVFVFGSRRLWXXPXCLRXXGXSLFGYLCPCPGGGFXXRRVXLCSVPPPPP

SEQ ID NO: 192964 - protein, 40 aa, Zea mays
  Clone ID: MRT4577_10756C.1.pep
QTHGLLHNLIRYITNLGSDQNNSLLSTMNATTPYLHRDHL

SEQ ID NO: 192965 - protein, 77 aa, Zea mays
  Clone ID: MRT4577_107570C.1.pep
QIEGVNTKEDVAWYCGKRMGYIWEATTKSSGTHYRCIWGKVARPHGNYGVVRAKIKSNLSPESMGRNVKAFMYPSSI

SEQ ID NO: 192966 - protein, 206 aa, Zea mays
  unsure (1)..(206): unsure at all Xaa locations
  Clone ID: MRT4577_107571C.1.pep
HASGLLIGIEEVSPEKQAQFLTALLNPLCHQVESLVMDAKARGLEESSPMAISLQQIIVALNMVSKGFNERLVMVNRPAIGVMFKKTLDVVLQVLVSFPSVRPLRSKVISFLHRMIEILGISVLPCIPIALRQLLLDNEAKDMVEFLVLVNQIICKFXSSASAILEEVFPTIASHLSVILSQDAFSAGLASNTEEMRELQELQRTL

SEQ ID NO: 192967 - protein, 49 aa, Zea mays
  Clone ID: MRT4577_107572C.1.pep
PRTAGDTSEAADAASLVMECEFDQAAYAILRKFSSSSESFSDLESVDAR

SEQ ID NO: 192968 - protein, 277 aa, Zea mays
  Clone ID: MRT4577_107573C.1.pep
MPRSSCDHRALSPSGPPDGVLRCSLEGSASRSSLLATSPSESVRSWWCRRSCLLLAAVGGVQPHGSCHPSTIIRLQGFSSCSLAAVPRRWSSRRMTTSLVVGRSKPGYGLPPALSFKDVHHPCWGGGCAELGPHLRVGSGPLLPSVFGGEGRLLFMRRRRTSGTRGWLTAGVASHRVPDALAWMASTLPPTLPSTVGRGATARSPHRRQSCHVQVRHTHGFCRVAGRTGGSHMASYIAEAAAVFLDVLTPLAKTGVRTYKRVEAAVAHRCRGGCRRR

SEQ ID NO: 192969 - protein, 129 aa, Zea mays
  unsure (1)..(129): unsure at all Xaa locations
  Clone ID: MRT4577_107574C.1.pep
PPPLWLSFRGPFLLSLVVLVRCRSLACFGPWPLFSARFGLRSXPARLVVGASWCVWVRAXRGSPPPXRPFPXXLGPVRRXGRLSXXXFGRRGRPFLRLGCSRFARRXLGFXRXFLLLRFXXCLNXAGVP

SEQ ID NO: 192970 - protein, 73 aa, Zea mays
  Clone ID: MRT4577_107575C.1.pep
PTDASGRHSLFNKGPLLFGITRPTTSGWYSMRSDFTLSMASAICTHTNGDYDRQPPPPIHLPASVHLSHSVTC

SEQ ID NO: 192971 - protein, 133 aa, Zea mays
  unsure (1)..(133): unsure at all Xaa locations
  Clone ID: MRT4577_107576C.1.pep
PPRDPGPFPPPRGPQGGPPGGAHPPPGGGKGPKKWCCCGPCPQGHLKPPNEPPTPPGHFGFPKNKTASLKNCWEWGPWGPLSPQKTFLWSSPKPIPVAWVWPPFFPWVCAPKKKKEKKRKKKKKNPTKKKRLX

SEQ ID NO: 192972 - protein, 126 aa, Zea mays
  unsure (1)..(126): unsure at all Xaa locations
  Clone ID: MRT4577_107577C.1.pep
MRPSCPRPPKSTPDPLPSPQRASTSYCAFPNLEIFHRRSSPHRGDCGRARPRPMAPDLPADSDVVERCLAAVNALASYHFRERLGGRGGQNSXLMESAGPNGKLQESIPTQFFRLLLXILLFEDLG

SEQ ID NO: 192973 - protein, 360 aa, Zea mays
  Clone ID: MRT4577_107578C.1.pep
MAEAEREQRPLPEVEQSVTSIPEDHGATCWGCGLRLVFASYSPIYKCGWCGAVTQSNNQTARKPDSIWFSHWRRLRDRLFVAVLVLFMLFVICGGVWAVYPVVFSVSKFCGVFHCTVAAVLAVCTVTSYCLASLKCAGAPTDIRWGSYPVVGKGDLENYTFCTYCSKPKPPRAHHCRSCKMCVVDMDHHCPFIGNCVGASNHQVFVVFLISVVISCSYVAGMTIYASYQIWPSIEFPDLASSSRHSMSSWKTVLEMITTVAGSAFFLSARGLVLVYLAFASSSVNAGIAVLLCQQLSYIYQGNTYLSRLSSAPNALQHGERGLQNIVRFFGCPYPVSRAVLRLRYSNAAKLQDDSGSKLL

SEQ ID NO: 192974 - protein, 38 aa, Zea mays
  unsure (1)..(38): unsure at all Xaa locations
  Clone ID: MRT4577_107579C.1.pep
QMFGQTQKVSKKGKGICRTQCSXQQHAKAYXGRWXDPE

SEQ ID NO: 192975 - protein, 163 aa, Zea mays
  Clone ID: MRT4577_10757C.1.pep
PALFLGQSLVQTNRGQQVQQLVVPLINQVGLANLFPYFQQQQFFPFNQLFTLNPAGYLQQPLFPFSQLGSAYFQQQQLFSFNQLAALNPPAYLQQQKLLPFSQLAAANRASFFTQQQVLPFYQQFAANPPTLFQLQQMLPPVQPALADPTASYPQPIIGGALF

SEQ ID NO: 192976 - protein, 360 aa, Zea mays
  Clone ID: MRT4577_107580C.1.pep
MAEAEREQRPLPEVEQSVTSIPEDHEATCWGCGLRLVFASYSPIYKCGWCGAVTQSNSQTARKPDSIWFSHWRRLRDRLFVAVLVLFMLFVICGGVRAVYPVVFSVSKFCGVFHCTVAAVLAVCTVTSYCLASLKCAGAPTDIRWGSYPVVGKGDLENYTFCTYCNKPKPPRAHHCRSCKMCVVDMDHHCPFIGNCVGASNHQVFVVFLISVVISCSYVAGMTIYASYQIWPSIEFPDLASSSRHSMSSWKTVLEMITTVAGSAFFLSARGLVLVYLAFASSSVNAGIAVLLCQQLSYIYQGNTYLNRLSSAPNALQHGERGLQNIVRFFGCPYPVSRVVLRLRYSNAAKLQDDSGSKLL

SEQ ID NO: 192977 - protein, 68 aa, Zea mays
  Clone ID: MRT4577_107581C.1.pep
KLKEDISSYFSAERFSAYRINETYNNLKQNLLSRSLNLENVQRSPGAETVFFFNIRASPRETLNMILF

SEQ ID NO: 192978 - protein, 56 aa, Zea mays
  Clone ID: MRT4577_107582C.1.pep
GTVVRFRNLDLWPATVADMPAGTPLPRFGFLLFSPGRKENAAPDVRGVGRSISSLR

SEQ ID NO: 192979 - protein, 87 aa, Zea mays
  Clone ID: MRT4577_107583C.1.pep
HRQGFSAITFCIGPGVLRRARKACRGRWPLDPFFCLRGEKLVLSLRALYWLRPSGLFVCVGRQLERHIRKEKNQKSSQKTPKHSERK

SEQ ID NO: 192980 - protein, 36 aa, Zea mays
  Clone ID: MRT4577_107584C.1.pep
FIQSLASIWTIFERRVLLLFARYVPSGFLVLGQCYP

SEQ ID NO: 192981 - protein, 424 aa, Zea mays
  unsure (1)..(424): unsure at all Xaa locations
  Clone ID: MRT4577_107585C.1.pep
PRLPHSFPPSLAHPVGQPKPSRNRKDLARPPFPSSSLCRSCHPPSVHPTNNPSATTPRCGDVRRRHPLGFHPAVRGAGGGSGGQEETAAARLAFAAAVGAPRTAVDGVMTPKDGEGDMPTTANNSAANKRRRKNQYRGIRRRPWGKWAAEIRDPSKGVRVWLGTYSTAEEAARAYDAEARRIRGKKAKVNFRDEAAAAXLRSHQPQLLQLXASAARLAPPPPPPKFRADEVFGNMDGGSNDLFAMLAFSDSSSKVVRVEPGEGAAGFLPADLLPGSKRSAANMLLLSDQSSDSYGSCDLGWEWDWDDDTMTSDYASVFAPAAPSNVVPAWYTQGGPVSKRTRSSYGYGAAMPGGFDPETNYQYQPLPYVVESSPSDGASTDDMDCLQMMRAGDVPQDGASSGGGGGDGGDIWSLDELLMAAGAY

SEQ ID NO: 192982 - protein, 67 aa, Zea mays
  unsure (1)..(67): unsure at all Xaa locations
  Clone ID: MRT4577_107586C.1.pep
YQKSCHXNTQLVKSIAILDSSCLQHLPVSGRDIXFGAGAQXAVEDVGAYLLIGINDADRLGFSFNSD

SEQ ID NO: 192983 - protein, 119 aa, Zea mays
  Clone ID: MRT4577_107587C.1.pep
GNLASPHSFPPSLAHPVGQPKPSRNRKDLARPPFPSSSLCRSCHPPSVHPETNYQYHYQPLPYVVESSPSDGASTDDMDCLQMMRAGDVPQDGASSGGGGGDGGDIWSLDELLMAAGAY

SEQ ID NO: 192984 - protein, 149 aa, Zea mays
  Clone ID: MRT4577_107588C.1.pep
AARVYDEVPAVRLTWPPTAATLSCDLGWEWDWDDDTMTSDYASVFAPAAPSNVVPAWYTQGGPVSKRTRSSYGVAMPGGFDPETNYQYRPLPYVVESSPSSDGASTDDMDCLQMMRAGDVPQDGASGGGGGGAGDIWSLDELLMAAGAY

SEQ ID NO: 192985 - protein, 103 aa, Zea mays
  Clone ID: MRT4577_107589C.1.pep
MCGGAILSGFIPPSGVPAAAAKKKQQRRATADLLWPGPGKKGASREEDFEADFREFERGLGEDDVDGAGDEVQELALPEPARLAFAAAVGAPRTAVGEHRAQH

SEQ ID NO: 192986 - protein, 203 aa, Zea mays
  Clone ID: MRT4577_10758C.1.pep
MSGIVYGVRANSWDSTSWAEQRANPVLHQQQRDSSETRVRMGRQHGRADTTRRVRVRQGCELEGWRSLERNLTERRTTTDKAKLDDEVEPGMASANAHKGLPTTPRRQRGVHTTQRETTTTPRQLHGHGEDAERGDCSSMARILELEAGGSNRGAHGPGSFDGADSEGARCAQGNFMARWRTRWWPMRRKEQRPSKESACAEA

SEQ ID NO: 192987 - protein, 408 aa, Zea mays
  Clone ID: MRT4577_107590C.1.pep
MALSAEIRFGHQIPYPTTTLTPTRRRKKRKRKTRRSSRGWRAEEMDEVTVSSPLMLPATEARGGVSVVEMVMGALRRSLMLCSSSAGAGAGVREPEQEEDGVTPPGGMQIGGPTDVRHVSHVTFDRFIGFLDLPADLEPDVPRPVPSARIRGKKAKVNFRDEAAAAGAQKPAATATTPTACATAARLGPPPPKFRADEVFGNMNGGSNDLFAIMFAFSDSSSQVVRVEPGEGAAGFLPAVEVLDDEPLLPGSKRSAANMLLLSGQSSDSYGSCDLGWDWDDDTMTSDYASVFAPAAPSNVVPAWYTQGGPASKRTRSSYGYGVAMLQQGDGAQAMPGGFDPETNYQYQLLPYVVESSPSDGASTHDMDCLQMMRAGDVPQDGASSGGGGGGGGDIWSLDELLMAAGAY

SEQ ID NO: 192988 - protein, 212 aa, Zea mays
  unsure (1)..(212): unsure at all Xaa locations
  Clone ID: MRT4577_107591C.1.pep
MCGGAILSGFIPPSGVPAAAAAAKKKQQRRATADLLWPGPGKKGAPREEDFEADFREFERGLGEDDDVDGAGDEVQELPLPEPARLAFAAAVGAPRTAVDGVMTPKDGEGDMPTTATNSAANKRRRKNQYRGIRRRPWGKWAAEIRDPSKGVRVWLGTYSTAEEAARAYDAEARRIRGKKAXVNFRDEAAAAACSEATSRNYSNCLSPAQRG

SEQ ID NO: 192989 - protein, 95 aa, Zea mays
  Clone ID: MRT4577_107592C.1.pep
KGPVSHPMFITIIVFPRTMTERTSLIRLQRPLPRATPVSHLPSVAGVGSHSYVRASTVQSLQKTDHDAERDRLWMQHISLGMGAVCREKLAVTRR

SEQ ID NO: 192990 - protein, 87 aa, Zea mays
  Clone ID: MRT4577_107593C.1.pep
QATNSRIQPHAREDHTFSEPRIIDRLCSTVYLPDEDTQTDATNVRVTKMDHGMTTNHPAKCSIYINTTVRRVKALMHRVYLLHGDAA

SEQ ID NO: 192991 - protein, 200 aa, Zea mays
  unsure (1)..(200): unsure at all Xaa locations
  Clone ID: MRT4577_107594C.1.pep
MDWCLCCIRVYTLSIANSLYLGVTGILVYVLARSHSRTTSGIVVASVFLVLWVSIGAVIYASLCFAFFPWAALENARLCCVRCTAGWLRRPSGGGGSALPQYAARSRSHAMNELPGEPTVRAGEARVAAAADIPAYELRDDAWQGQPDGSSDCAVCLGEMVKRLPVCLHMFHQQCVDKWLNNNSTCPVCXXASCSRRCRR

SEQ ID NO: 192992 - protein, 192 aa, Zea mays
  unsure (1)..(192): unsure at all Xaa locations
  Clone ID: MRT4577_107595C.1.pep
VQHHGRAASEVPALALRSLRRSRVLTVASLREMARNAQAAYTYGXVKSSDLYGFRYLVGVNAVTAVYAVSSGLALSLKPLDARYDYHWVDVDMDHAXAYLLETSVLVVADLLQLTRHSNRCVSWGEASSYFGRFXTKATGSVALHAAALDWFGSLSLVCSFRAFSTMCHPPPDTDGQSTNTPRTRSNGSTTT

SEQ ID NO: 192993 - protein, 542 aa, Zea mays
  unsure (1)..(542): unsure at all Xaa locations
  Clone ID: MRT4577_107596C.1.pep
MGFQTNSSGQRVDLLNNGQFHGETASIMPNLLPNHLQRPNTFMPPQLLTVRQQHGMLPIQQSSKQSSRTQTHMFGPQHPPQMMNRFDNFGMPEFSDPRARSSMHHGRQGQHFPLHGSEFGIMKMGNGRSRFRSKYMSTEELENILRIQHAATHINDPYIDDYYHQACLASRYVDARSKHRFCPTLIRDPSSCTRSKDEPHAYLKVDALGRLPFSSVRRPRPLLDVEPASATDDDTVISKPLDQEPLLAARITIEDGLSLLLDIDDIDRLLQFSQQQDGGFELKNRRQSLLGQLAESLQLVDPLGANKNTHLSANDDLVFLRIVSLPKGRKLLSRYINLMVPGSDLARIVCMAVFRHLRFVFGNLPSDDGAAETVTKLASAVASCIRGMDLSGLSACLAAIVCSSEHPPLRPLGHAAGDGATVVIKSVLDRATELLTEQPAAPDYGAPNRALWQASFNAFFGLLTKYCMSKFDSMVHTMHKLGAAAATAIRKELPVELLRASLPHTDEQQRRLLLEFAQRTVPVSGXAPTGDGRGGGWWNHGI

SEQ ID NO: 192994 - protein, 74 aa, Zea mays
  Clone ID: MRT4577_107597C.1.pep
CPCRIWALLKYSRNYSVYTVLRRGPMDSTLDRQKLGKPEYLTSLQAKDTLRWAAMRASTIRRERIAFRPCATCS

SEQ ID NO: 192995 - protein, 146 aa, Zea mays
  unsure (1)..(146): unsure at all Xaa locations
  Clone ID: MRT4577_107598C.1.pep
TSRLACSPRNPAIAIVLQFSHLTLRCKAVFPGIVKSTSGMHARYSISQTDANSHNRSINKRWRHFEYLHRRLKQHAQYNLHLPPKHYXLSSSIEVTGDPERSKLLNIYLKNRLQXYRLKLHIXFWHFPSVDSQTYIFTDTLCTIQT

SEQ ID NO: 192996 - protein, 209 aa, Zea mays
  Clone ID: MRT4577_107599C.1.pep
MERERGASAALWGHAHLPLLARAGSKESVEYILQALWRTRRTGLDAADRTVARDALQLSSDAELDPLLVCLRILIRRCVNEDFAKDDIPKLFPEEVPPELQKLLTLLLQKFQPEWQADAAKDQEAALHSSAAECQSNQNGDTSEHRDAANAELQNGAAPVKGSLESGQKEVKKSPLAKDSLDKMLKDLFSTRDQMATDGRNTGHELTMG

SEQ ID NO: 192997 - protein, 57 aa, Zea mays
  Clone ID: MRT4577_10759C.1.pep
VIQHLRKSPYLFASTRHTQMRIPVRVVVLLFNTSEGEALYSIITNNHGRKKHCTLSF

SEQ ID NO: 192998 - protein, 63 aa, Zea mays
  unsure (1)..(63): unsure at all Xaa locations
  Clone ID: MRT4577_1075C.1.pep
FLSQAVISAGTVLHSPQQLPLLQLAAPNGGPLSLLRVSLPFIRHPLTNPXAFYQRSIIAGALF

SEQ ID NO: 192999 - protein, 77 aa, Zea mays
  Clone ID: MRT4577_107600C.1.pep
LEYKKMMSRLLYNKISISVCLLKIQVPRIQTELAVACLSKWRQGQLELCYLTFSNLTRVSLFANQYHAGGRTLRTRG

SEQ ID NO: 193000 - protein, 91 aa, Zea mays
  Clone ID: MRT4577_107601C.1.pep
GACMKAVPIHCSMISPPHMSFLVPKLVPAWCLFRVFVNQVPMCVSVYELFPVLPLFSTLISHHSWCAPHMCAHGIRLPFKHPFSNLSFLSL

SEQ ID NO: 193001 - protein, 44 aa, Zea mays
  unsure (1)..(44): unsure at all Xaa locations
  Clone ID: MRT4577_107602C.1.pep
VENRQELSISSPCTLSIMLSVSLSVICLKLSXSRADAELRRGGN

SEQ ID NO: 193002 - protein, 65 aa, Zea mays
  Clone ID: MRT4577_107603C.1.pep
SLLYSSTPTLSVKMSSCRNEYGYTLLPAELHPRRLRRRCRRQRPTRCLLTTSRTMMTSPVHNSLP

SEQ ID NO: 193003 - protein, 51 aa, Zea mays
  Clone ID: MRT4577_107604C.1.pep
GSEETPYASLLLVRLRKPPKKSDIVRTFYDGNTSFSSPILAVLSAQVGAAV

SEQ ID NO: 193004 - protein, 48 aa, Zea mays
  Clone ID: MRT4577_107605C.1.pep
RSLLLQRLIKDGHILSGGGVIRPHPLMDGIHTTQLHLKLLTSARQLVP

SEQ ID NO: 193005 - protein, 49 aa, Zea mays
  Clone ID: MRT4577_107606C.1.pep
INTILSTISSIQRQQLLLHNPFPNSSLLLYPTLKYSFLLLNKTKFTIYY

SEQ ID NO: 193006 - protein, 63 aa, Zea mays
  Clone ID: MRT4577_107607C.1.pep
KDRRWASSVGLIVPTRSGLTHNVGRTSDSDSCGISHLHRIRVFIALPSGGRPHGELYIYCFNE

SEQ ID NO: 193007 - protein, 74 aa, Zea mays
  Clone ID: MRT4577_107608C.1.pep
LIYKNTLKIMPFNLRPFDLNMTPCASSYLSLAVPLEPTYLRSPYSASSLTSLVFKLPSDANSCAECRLANYISP

SEQ ID NO: 193008 - protein, 48 aa, Zea mays
  Clone ID: MRT4577_107609C.1.pep
AYLMLVLLYILHNYMLLSYIKILDYVYVISINQTVDEPYCYKWLHLQF

SEQ ID NO: 193009 - protein, 71 aa, Zea mays
  Clone ID: MRT4577_10760C.1.pep
EKKQINSCGQSNVSVYPKTSICEYNEVLPFHLVHQAPWFKNKNGVSLHNLWGQSFEKFQHFSWLGGLILII

SEQ ID NO: 193010 - protein, 251 aa, Zea mays
  Clone ID: MRT4577_107610C.1.pep
AFQVRLVTDKDTNKPRGYAFIEYMHTRDMKNAYKQADGRKVDNKRVLVDVERGRTVPNWRPRRLGGGLGSSRICGASADQKSPAREPSSVGRPRSEEPKRGDSRVDRDREKSHERVRERDRDENPREGSHDRMRERDSREERHYHRDRDRTRDRDRARDREKDHGRDRDRDRRDRDRDRDRGRDHDREKDRGLSHDRHRERGRDRERDHERASYERKRAHLKDRDAEYNGEPKHDRSMADYGKHYGSNQHE

SEQ ID NO: 193011 - protein, 65 aa, Zea mays
  Clone ID: MRT4577_107611C.1.pep
DRSLSGHSAPIDDHSRQQLVQRTSAAHSRLTTNRLVHLLALGARTASAGRGVLVHPTTCPCRHYP

SEQ ID NO: 193012 - protein, 133 aa, Zea mays
  Clone ID: MRT4577_107612C.1.pep
MNANRTKKPRGRPKTGGGKATPPNSRHRRQNHEAAALHTEPAAARASAGTTSRPGRANPHNQHPSSRWNETSRTCGNGPRHPRPEQKRRRCRELADIPANSRSTAQSTHMDGANPPGPEPQLEGPQEDPTGSP

SEQ ID NO: 193013 - protein, 73 aa, Zea mays
  Clone ID: MRT4577_107613C.1.pep
RIVAIWIALYLMDTGSGAILTTCDSGIPYAFHYHGGYAPLPGATLEWNRYTQNLLVHKQGVTPRPIYGSLYMH

SEQ ID NO: 193014 - protein, 111 aa, Zea mays
  unsure (1)..(111): unsure at all Xaa locations
  Clone ID: MRT4577_107614C.1.pep
FIMNICRIHTEKDYGYKVTDGRRDDNRNNAKVVTIGSYKDVPSNDENSLQNAVANHHDRVANEAGDTALXLYRSEIFTGSCGTXRWTHGVTVESYGTXNGKDYCIVKNSWG

SEQ ID NO: 193015 - protein, 146 aa, Zea mays
  unsure (1)..(146): unsure at all Xaa locations
  Clone ID: MRT4577_107615C.1.pep
KPPQREEEPDRKPRGGDSKKGESQTRRGERKPPTRAEQKEDKKPRERNNRATQAAREKGRKSRARETASGKWQRRXAERNRPRPEQWXQXXQDRHKKARARDTRSQPLEKGKTTDPQKANXDDEGAGPDLKDEGGEEQTENGRQKR

SEQ ID NO: 193016 - protein, 77 aa, Zea mays
  Clone ID: MRT4577_107616C.1.pep
KNNLRSLRYLIQLKKMLFVRSRSASKSPRIKTRRVLLMPATASMIKYMAHVHKGWYRQFRYAWYIQVVKGTYTTCSH

SEQ ID NO: 193017 - protein, 193 aa, Zea mays
  unsure (1)..(193): unsure at all Xaa locations
  Clone ID: MRT4577_107617C.1.pep
CGFRRRDGLRFGGRLGAAAALVPLPRCSFLRALCRRARGAGCGCAPGRHRRSLLPYIPLIITGGPQWRRQCVFFSAGLGAPGSGQSRCVEADNSGVTWREIRLCGGLLVEEAAVWRPRLRLRRWCPLPPWSLLGACRAGGNVQVLSLLGGLLLRQFAVAVTSFSLRTVTSPCSLXLYCLLMVSIPXFCRLRSP

SEQ ID NO: 193018 - protein, 90 aa, Zea mays
  Clone ID: MRT4577_107618C.1.pep
LFFFSFTTQHTRHYNYFHTHKLKKNPPQTSPLTKPKQNKILHLIYSCQNTSHLISTKNHPHEHILYTSTTTDKTKKHSYNDHKLNTHDNP

SEQ ID NO: 193019 - protein, 235 aa, Zea mays
  Clone ID: MRT4577_107619C.1.pep
MATNGRTVASVDPDVALAYKFPEVSFAYDERDVALYALGVGACGADAVDDKELHLVHHRDGQRHIKALPTFASLFPNKNSNGRGIVNVPGIHFDASLLLHGQQYIEIYKPIPSCASVVNKVKVAGLHDKGKATILEIETTTSLKDSGEVLCMNRSTIFLRGAGGFSDSSRPYSYTTYPANQISRISIPNSAPSAVYEDQTQQSQALLYRLSGDYNPLHSDPMVAQVAGFTRPILH

SEQ ID NO: 193020 - protein, 58 aa, Zea mays
  Clone ID: MRT4577_10761C.1.pep
TTGPVWTIWLFRGGVASNLIAGTCCRSFFFKAKTVGSSPRGFIFIFKGGYMLSKSCSF

SEQ ID NO: 193021 - protein, 196 aa, Zea mays
  Clone ID: MRT4577_107620C.1.pep
ARPRGLEAVEPAPPPANGSGSGEKDRGSRRREGDEGRISKRSRSGEDRERGRHRSVREHRDRDKDDGKEKERSRDSRGKDRHRPREREVERERRSLSRSERRRIEEEEMVRELEKFRARSERHHYRDRDVRRRKDDGAEPEVDPERDQRTVFAFQLSLKADERDVYEFFSRAGKVRDVRLIMDRNSRRSKGVGITH

SEQ ID NO: 193022 - protein, 185 aa, Zea mays
  Clone ID: MRT4577_107621C.1.pep
SFLGRFDVCTKHISKFAGGAASGGARKLYVGNLHSNITEDQLRQVFEPFGQVELVQLPLDAMTGLCKGYGFIQFARLEDAKAAQSLNGRLDIAGRVIKVSAVTDHVGVQASGATTGDLDDDEGGGLVGQLIWFNMLDNLINWDFYASSKFLYFDFWANWQNRGFNLAHILQTEPSQFWEVPLHIQ

SEQ ID NO: 193023 - protein, 112 aa, Zea mays
  Clone ID: MRT4577_107622C.1.pep
TSHEHIAASSMCLILWYLFLTWHLRFQVPTCFSDDTCPRARMVVWEHGVTLRRGITATRQRRRQIPGNQLGFPAQDSHDPVSGDSTELLNGTSARWSSQRRIDGSGCAHKSL

SEQ ID NO: 193024 - protein, 328 aa, Zea mays
  Clone ID: MRT4577_107623C.1.pep
ICRYIEFYDVMSVPMAIALSGQPLLGQAVMVKPSEAEKNLVQSNATSGGAASGGARKLYVGNLHSNITEDQLRQVFEPFGQVELVQLPLDAMTGLCKGYGFIQFARLEDAKAAQSLNGQLDIAGRVIKVSAVTDHVGVQASGATTGDLDDDEGGGLALNASSRAALMLKLDRSGTATSLTGGIGAAGVAVPATSVIGAAGAASLLSPTVSAVGSVPGAPVLPITAQNVIMSTPTEFLLLKNMFDPSLETDPDFDLDIRDDVQDECSKFGAVKHIFVDKNTAGFVYLQFDSVTAAGKAQQALHGRWFAGKMITATFMSDQEYSTKFPNL

SEQ ID NO: 193025 - protein, 70 aa, Zea mays
  Clone ID: MRT4577_107624C.1.pep
QGNHFIFHFDSHSKGGLTAPGGRKDLFCSKEKHIRAGGLQSFHFLGFNFGDTGQITGGLQVVTHLKSCSR

SEQ ID NO: 193026 - protein, 537 aa, Zea mays
  Clone ID: MRT4577_107625C.1.pep
MEFDEYEYLEKAVEPAPPQANGSGSGSGEKDRGSRRREGGEDRISKRSRSGEDRDRDRHRSGREHRDRDKDDVKEERSRESRGKDRDREGREREKERGDRHRLREREVERERRSRSRSERRRAEEEEMVRELERERERSERHHYRDRDVRRRKDDGAEPEVDPERDQRTVFAFQLSLKADERDVYEFFSRAGKVRDVRLIMDRNSRRSKGVGYIEFYDVMSVPMAIALSGQPLLGQAVMVKPSEAEKNLVQSNATSGGAASGGARKLYVGNLHSNITEDQLRQVFEPFGQVELVQLPVDPMTGLCKGYGFIQFARLEDAKAAQSLNGQLDIAGRVIKVSAVTDHVGMQASGATTGDLDDDEGGGLALNASSRAALMLKLDRSGTATSLTRGIGAAGVAVPATSVIGAPGAASLLPPTVAAVGSVPGAPVLPVTTQNVTMSTPTEFLLLKNMFDPALETDPDFDLDIRDDVQDECSKFGAVKHIFVDKNTAGFVYLQFDSVTAAAKAQNALHGRWFAGKMITATFMSALEYSTKFPNL

SEQ ID NO: 193027 - protein, 438 aa, Zea mays
  unsure (1)..(438): unsure at all Xaa locations
  Clone ID: MRT4577_107626C.1.pep
PAFSDLDXKDRERLSESSCSYCLQPLPSLHYRSQKRXDIFLCSDCFHDAMNITGHSCLDFQRVDGDNDESENDSDKWTDEETLLLLEGIEKYNDNWDDIAGHVGTKSKAQCIYHFIRLPVEDCLLENVEIPNAPIPFRPQSNGYQCLDSNGSTSGAPVQNIQQGNELPFINSSNPVMSLVAFLASSIGPRVAASCAHAALSFLTRDEDSRVSSEGSHAGGLGNGANPNFQNHNGASPSISPENVKYAAMLGLSAAAMKSKLFADQEEREVQRLTATVINHQLKRLELKLKQFAEVETLLLKECEQVERVRHRISAERVRMRSALLGPTGSGLPGGSCSTMPSNPAGMSPRPVGVPGYXHRPACQPHMPTTCRXGNPQMPFLHQRPQMLSFGPRLPLSAIQTQPSPQSSNMFNSGMPNSIAPNHHQLLRSSSGNNSSAG

SEQ ID NO: 193028 - protein, 94 aa, Zea mays
  Clone ID: MRT4577_107627C.1.pep
EFLLLKNMFDPALETDPDFDLDIRDDVQDECSKFGAVKHIFVDKNTAGFVYLQFDSVTAAAKAQNALHGRWFAGKMITATFMSALEYSTKFPNL

SEQ ID NO: 193029 - protein, 536 aa, Zea mays
  Clone ID: MRT4577_107628C.1.pep
MEFDEYEYLEKAVEPAPPPANGSGSGEKDRGSRRREGDEGRISKRSRSGEDRERGRHRSVREHRDRDKDDGKEKERSRDSRGKDRDREGREREKERGDRHRPREREVERERRSRSRSERRRTEEEEMVRELEMERERSERHHYRDRDVRRRKDDGAEPEVDPERDQRTVFAFQLSLKADERDVYEFFSRAGKVRDVRLIMDRNSRRSKGVGYIEFYDVMSVPMAIALSGQPLLGQAVMVKPSEAEKNLVQSNATSGGAASGGARKLYVGNLHSNITEDQLRQVFEPFGQVELVQLPVDPMTGLCKGYGFIQFARLEDAKAAQSLNGQLDIAGRVIKVSAVTDHVGMQASGATTGDLDDDEGGGLALNASSRAALMLKLDRSGTATSLTGGIGAAGVAVPATSVIGAAGAASLLPPTVSAVGSVPGAPVLPVTTQNVIMSTPTEFLLLKNMFDPSLETDPDFDLDIRDDVQDECSKFGAVKHIFVDKNTAGFVYLQFDSVTAAGKAQQALHGRWFAGKMITATFMSDQEYSTKFPNL

SEQ ID NO: 193030 - protein, 230 aa, Zea mays
  Clone ID: MRT4577_107629C.1.pep
KHRPEIAQGIIDAKDSIDPGRFAEAYAEISMLPTTSGSFEMASNLMKKTLAILESAKEMHHIEGSISARLGWLLLYIKNVDESVQYLERAVDKLKNCFGPRHFGLGFAYRNLGQAYLEMNQHQSAVEFFKLALDIIEATFGPLHDDTIDTKQCIANAYGLMKSYKLAMEFQEQVMDAYSRCGHGALDDFKEAERLLEQIKMKAQGLRHAVFPANSLPDSALALAQRNKDD

SEQ ID NO: 193031 - protein, 121 aa, Zea mays
  Clone ID: MRT4577_10762C.1.pep
YDGLVKVGHGRSPQQRLQLVVTWSWSRGDARFLGAGSGISVCSVSSTPTQDDEALLCGQEATGAWNMQQEQAEAGRRGSYSEQETQEIPHGVLLHLSNDKTELLVECLHARPPASWVVGEI

SEQ ID NO: 193032 - protein, 106 aa, Zea mays
  Clone ID: MRT4577_107630C.1.pep
SVERAFQGVVRAEPVGVVEVCDVSQVGVVEGIVFVVLRVQDHVGHGVRAELHRCSGKQRLHGQRMRLRGVLSCQILVLLRVSNDGWSESEYVGGVIIGNGEALRII

SEQ ID NO: 193033 - protein, 121 aa, Zea mays
  Clone ID: MRT4577_107631C.1.pep
SRDLLLLFLFTHLFLPVPLTCSPVRPSSSTVKALRPCFLGSVYCVFFFFGKGKIRHTFGLVPVFHFAYLGCICKLKDSLPLCSGGGLVAYADSAAESAPDPSQDAPRKKVVVLETGWAWTS

SEQ ID NO: 193034 - protein, 48 aa, Zea mays
  Clone ID: MRT4577_107632C.1.pep
LHWSFPCGNNGSCCCRDSIELPFNVRRSVPCNVCRFYMLICSLDGDEP

SEQ ID NO: 193035 - protein, 137 aa, Zea mays
  Clone ID: MRT4577_107633C.1.pep
RLGRAPWLGCRGPNVAAPASAARASRPVEGTGGRLLGHGAQSRLAARACCPDACGGESRRVLPALAPVATRERAAPTRPRGRGCHRSGAGAADPTAEACAQPIWRTWHVAKRVSASAAWHASVQPKVDGKITFLCPE

SEQ ID NO: 193036 - protein, 64 aa, Zea mays
  unsure (1)..(64): unsure at all Xaa locations
  Clone ID: MRT4577_107634C.1.pep
RFCKIFFLFHFXAEXLEIIYVAFLDHELLVKRRSVVSPSLNTCVAFCWMVVTKVKKKKNSTIQL

SEQ ID NO: 193037 - protein, 93 aa, Zea mays
  Clone ID: MRT4577_107635C.1.pep
LLRAPPPLQGVLGGEKTRPARVGNPIKLGSQSRLTTPPLFFWWEKNWGRGPARKNTKGYPRFFLSSHDSPCESSGMSKKNQKTEKKKKKGKTH

SEQ ID NO: 193038 - protein, 80 aa, Zea mays
  Clone ID: MRT4577_107636C.1.pep
GTHMYLHVCSVYHIVSDIMVTLVILGEGDYLGSATCGERAAMAVGGHAHALQSHQYAPHGGGPLLLCSVHDGVCESISHL

SEQ ID NO: 193039 - protein, 44 aa, Zea mays
  Clone ID: MRT4577_107637C.1.pep
SDSCGPPYLLSAAGHPHSPRSLCATYVLLVHHGVASCRVLVVDG

SEQ ID NO: 193040 - protein, 137 aa, Zea mays
  Clone ID: MRT4577_107638C.1.pep
MAQNQQPIFQTKPPEQFAQIPINIERDSSTTRMNQTGNTIRKPNHWPTITISIIFVIIGQSIAKLLENFYYDKTNRSEYNEHRQNDGVWTQSLLQTGGCPLLILPFLIFITKNKRNHHQQPPITCDSIHLKSLAVIY

SEQ ID NO: 193041 - protein, 121 aa, Zea mays
  Clone ID: MRT4577_107639C.1.pep
VSLPRSPHFPRIPSVVLWDKTVRLFDADANVLKREFMPPGAILDWWFPDDSSGFRAGAAPPIWRLVLSSSKENVLGGHDGPVRCVENSYAAETFISMDLLLDFFSRVFFFFARDFCSLMQL

SEQ ID NO: 193042 - protein, 87 aa, Zea mays
  Clone ID: MRT4577_10763C.1.pep
PFYKLAKKTITFGSSKQLALAFLGKRSFRAPTFNDHITQGKANPHFPKFKRGGCLSFSNKKKAHKATGRPSLLKTAPGMTTSTRGGV

SEQ ID NO: 193043 - protein, 57 aa, Zea mays
  Clone ID: MRT4577_107640C.1.pep
SGPQFYNTSTRGAPFVFFITVPRNATAFVVIRSVYPWVIIMSPIKNSPIVAGSSARV

SEQ ID NO: 193044 - protein, 65 aa, Zea mays
  Clone ID: MRT4577_107641C.1.pep
MFYTADCFTYKGRLIHPGNTVGVNTRNGLKPAARAPDLGIELCRSAKMGKARCAYSQGLTRHRAY

SEQ ID NO: 193045 - protein, 50 aa, Zea mays
  Clone ID: MRT4577_107642C.1.pep
FEFTKTHPFLLRVLTFFTHLISVFFLGAGFMVFGFFEEKFIKICVLIVIL

SEQ ID NO: 193046 - protein, 42 aa, Zea mays
  Clone ID: MRT4577_107643C.1.pep
LVVTWPHKLGEGNRINCNFLTWNRTRQKNNEGGLQLQEITNY

SEQ ID NO: 193047 - protein, 197 aa, Zea mays
  unsure (1)..(197): unsure at all Xaa locations
  Clone ID: MRT4577_107644C.1.pep
AHVIANCPPHRRHKHDGRPNETEVHYPGPEEKQPAQDPGHHTKDEEEDGHRAGRRDEQPAADTEATETEGVPTGDKHHQQHQKEDKXRTHRPDPGEAGAIDAGAAAPDQNDEAEKDPEHAHRHKNQDEGAGEGDNGYSRSAFHKPHETNTDHNDAEEDGGEKSNTAAADGHVTHETRHRGQRRQMRKRNPDRDARST

SEQ ID NO: 193048 - protein, 49 aa, Zea mays
  Clone ID: MRT4577_107645C.1.pep
TNLTYSCILLHSSTIFVTYTQFTDHRFTTFRLVKPLLYLTYSPYNTFPF

SEQ ID NO: 193049 - protein, 38 aa, Zea mays
  unsure (1)..(38): unsure at all Xaa locations
  Clone ID: MRT4577_107646C.1.pep
IIKSELKRPSRLALVSGIFPFHVMHXHTKRTTCXLELR

SEQ ID NO: 193050 - protein, 64 aa, Zea mays
  Clone ID: MRT4577_107647C.1.pep
VSSLSHDPSTLGEVKNKLKLGKRVSHQNSQVLLNGPHPFNCLFGWVHRGPGGPKSGVFPFGSFG

SEQ ID NO: 193051 - protein, 33 aa, Zea mays
  Clone ID: MRT4577_107648C.1.pep
TSMENTCLPLGSGPKAEETRIIPGTLHVKVDYV

SEQ ID NO: 193052 - protein, 100 aa, Zea mays
  Clone ID: MRT4577_107649C.1.pep
PVCGRTEPHCWVDLPWHDSALELQLGVRDDLIEGVPDNRSPSELKKPVLLKKPTTYERRIMFIYAIKLVPIVVAICKACFAANVALQRASSSTLPPHAHV

SEQ ID NO: 193053 - protein, 112 aa, Zea mays
  Clone ID: MRT4577_10764C.1.pep
NRGCKKPNTTDVGTKDTLTMYSYRRKETLTQTCESKIKIPKMRCPKKLQKGKGLSTPDKPRGEMKAHPNKGGPSNDGTNFTGQEKDHQVHALKKPHPPAVKMDTTARFNWCI

SEQ ID NO: 193054 - protein, 60 aa, Zea mays
  Clone ID: MRT4577_107650C.1.pep
FRSFRGTQTFVWRYEIAQRVVAPRTGARPLKTGDQSPCMHAVKNVATYLQLANKKAGISR

SEQ ID NO: 193055 - protein, 63 aa, Zea mays
  Clone ID: MRT4577_107651C.1.pep
SAGCRCRRLRVLSRPCAWALSPVLASFARSSWDSAGCGLPLVGARPRVCTSGAGRGSTSYSVF

SEQ ID NO: 193056 - protein, 62 aa, Zea mays
  Clone ID: MRT4577_107652C.1.pep
NPQKATKKHTISTSYSLPQPPLKLNPISLSNPLECQCKLINRTLHSTSYMPTTPTYHPNLLL

SEQ ID NO: 193057 - protein, 34 aa, Zea mays
  Clone ID: MRT4577_107653C.1.pep
RSLYKKPSLHTHDVQINGRSYLGIQVHLPVHAIT

SEQ ID NO: 193058 - protein, 95 aa, Zea mays
  Clone ID: MRT4577_107654C.1.pep
QKFFSQKTKGGPSLKFKILKRAPNLIPSKGFQKIKGAGFFGPGIPRARPPWGAPKIGPGPSWGEKPGPCPFLGNGPLFPGPKRNLEGFNPRPRGA

SEQ ID NO: 193059 - protein, 109 aa, Zea mays
  Clone ID: MRT4577_107655C.1.pep
PMCPCSKCANQLVLGGGKSPFFPAPIIEVIRAFFFLLIPKEAPQKIKKAPIVFGLCGVVNGLGNQICSFSLKGLGKFFSGFLSFWSASPIVKKVRFWVWRQDGKVVFSP

SEQ ID NO: 193060 - protein, 190 aa, Zea mays
  unsure (1)..(190): unsure at all Xaa locations
  Clone ID: MRT4577_107656C.1.pep
MRGPNAATATSKGGAMAGFKQDLLRNLLLGIRACRPWAPLSRXDRKRAVKRSADVAMAAARAAAGGGRARWPKAILAAAAASGHSPGGIRKARKSACKRVVRRPRRATASCDVVARRLVRSRTMALRKVIPGADATAAMDDEAVLLRETIDYAVHLRAQVDVLRRVSAAVQRSTFLRDGPAQTWEEDRSG

SEQ ID NO: 193061 - protein, 217 aa, Zea mays
  unsure (1)..(217): unsure at all Xaa locations
  Clone ID: MRT4577_107657C.1.pep
VRATFWFSPVXPPMGXASPPALVSLXPPAXXPGXXPXLLXSXXPXXPPAPRPQXPPXXPXPTXPHXXPRXRXTXXSAPRPPXXSSPIAPXRXXRXXRPKARXXXPLTEPPPLXPXXPXXXXXAXPSXRPAPXXPTPXWPXAXLVPPXXRXSSPSPXNRXRXGPRXPAXPRQPPXPXXSSPQVPXPXXPPPGLRARPRLPRWGFLTRPAPPRGARQTA

SEQ ID NO: 193062 - protein, 341 aa, Zea mays
  Clone ID: MRT4577_107658C.1.pep
MAAPSGTMRAVQYDRYGGGARGLKHVEVPIPSPKKGEVLIRMEATSINVVDWKFQNGFARPFMPRRFPFISGFDLAGEVVELGAGVSSFKPGDKVIAINFPNGGGLAEYAVASASRTAARPPEVSAVEGVCVPIAAVTALGSLRTAGVTVTLDDPARAPATPKNVLVTAASGAVGHFAVQLARMGGHNVTATCGARNLGLVRSLGADEALDYKTPEGAKLRSPSGRKYDAAVHCAAKGLPWSVFRPVLAASGTVVDITPGFVAVVTAILQVATFSKKRLVPLMVTPKKEEMELLLGMLKQGRLKTVIDSRHPLGSAHEGWAKSMSGHATGKVVIEIGAAQP

SEQ ID NO: 193063 - protein, 55 aa, Zea mays
  Clone ID: MRT4577_107659C.1.pep
RVFVFGRINQVVCVIMYSVDSIRLDSNGTVQSFLYVLDYVVERNKFILKLMLVSF

SEQ ID NO: 193064 - protein, 77 aa, Zea mays
  unsure (1)..(77): unsure at all Xaa locations
  Clone ID: MRT4577_10765C.1.pep
MFAPELRTITLRGCWSLKRLPATATXXGDRPXVVDCEKNLWAKLEWDGKEAGHHPCLFEPRHSKYHKKRVLRTTLLR

SEQ ID NO: 193065 - protein, 236 aa, Zea mays
  unsure (1)..(236): unsure at all Xaa locations
  Clone ID: MRT4577_107660C.1.pep
MAAPSGTMRAVQYDRYGGGARGLKHVEPPIPSPKKGEVLIRMEATSINVVDWKFQNGFARPFMPRRFPFISGTXSTQSRAMACCWPRPPTPSLLFNRWPFQFWLLTCRTSRVRVRTGDLHRRVIVFAFWRTGFDLAGEVVELGAGVSSFKPGDKVIAINFPNGGGLAEYAVASASRTAARPPEVSAVEGVCVPIAAVTALGSLRTAGVTVTLDDPVRAPATPKNVLVTAVSGAVGH

SEQ ID NO: 193066 - protein, 141 aa, Zea mays
  unsure (1)..(141): unsure at all Xaa locations
  Clone ID: MRT4577_107661C.1.pep
FKEIFWLDLFALKKPIQKGRAKLVIEKLFFLFVPSIRGGPFKNVTPFFFFFAPWPFPGGFGLYPDIFAPNLINLPVVVGVLIFFGKGVFKDFFDNRNPGVFSSIPNLEEFGKGALLPLPKACIXFPKVELEADWFRMNGSF

SEQ ID NO: 193067 - protein, 108 aa, Zea mays
  Clone ID: MRT4577_107662C.1.pep
PAGKKNLNAESICSECLTTVREGGEKRSRRHRQKPEFSWVARNLYAKESGAVKTLYPGNCSTEQDLRPGAAIRRDSKPPRHQTSKQPRTPVPSRWKILSRCSLKVKSR

SEQ ID NO: 193068 - protein, 71 aa, Zea mays
  Clone ID: MRT4577_107663C.1.pep
ESPPPRAGYLSLWTGGAQPPKTSKRGGPLGPFLKTGRGGGKKYCNTFFNPQGFLVFKRQGGTPLARSLWGF

SEQ ID NO: 193069 - protein, 116 aa, Zea mays
  Clone ID: MRT4577_107664C.1.pep
KPFPTPALSFPCQRGPYDGRGNNGFLSSFHPLAGLFLGFGLPQPSGGYKIFLGFALFFFQNGFFFFPPLQCAKSRTFCFLKKKTPVFFFGWVFVPPSNPSKKYSMIKKENIRFSLI

SEQ ID NO: 193070 - protein, 150 aa, Zea mays
  Clone ID: MRT4577_107665C.1.pep
LEAGRAGKNFLPGSTCICVCFCRYRPIAPRISLRAPRISSCSSLLPLPSPTLPQLRPAAASRSLDLERALTSAPSDDKQHLEGSYPEGVFLLASSHGVWRMSESLENLFVRGLISSFEVARGSWYAYCRIPRYMRTEYADVCYVLLSHDQ

SEQ ID NO: 193071 - protein, 358 aa, Zea mays
  Clone ID: MRT4577_107666C.1.pep
MIGDELDSDVVVRYFRGKSILITGSTGFLGKVLVEKILRVQPDVKKLFLLVRAADDESAKQRVETEVTGKEIFQVLKEKHGNGFEGFVQEKICPLPGDVMHENLGLGPAKLRQVCKEIDIVVNGAATTNFYERYDVAFDTNVMGAKHICEFAKRCSKLKMLLHVSTAYVAGEQEGVVLEKPFRLGETLREGTHLDIESELNLIKETRRELKASRCSEKAERRSMKELGLKRAREFGWPNTYVFTKAMGEMLLGAHLRGDVPVVIVRPSIITSILKEPLPGWMEGIRTIDSFIIGYAKQALSIFLVDLDLIMDVIPGDMVVNAMMVAMAAHSEERGQQTSIYHLTSSVRHPAPYAVLAE

SEQ ID NO: 193072 - protein, 317 aa, Zea mays
  unsure (1)..(317): unsure at all Xaa locations
  Clone ID: MRT4577_107667C.1.pep
MEEKASSPLVPPPSEIDLEAGGGGEQLQCRICLETXDGRDFIAPCKCKGTSKYVHRDCLDHWRAVKEGFAFSHCTTCKAPYYLRVHSHTDRKWRTLKFRFFVTRDILFIFALVQIIISALAYLVHFLDGYQQYWLRTAWGFDNEVSFYYICGALLFFALLGLSGCFITCYDRRVRNDLAQPCRELCLCCCQPGMCADCHLPGTLCMWTDCTTCFEGCATTAGECGGCLGGAGEAGLPLLLIMGVIVLGLFTVIGIFYSVLVATMVGQRIWQRHYHILAKRLLTKEYVVEDVDGERTDWCPPPLPAEHISQLKSLGLL

SEQ ID NO: 193073 - protein, 42 aa, Zea mays
  Clone ID: MRT4577_107668C.1.pep
VNEDSMTLCMLLVIGNGSSRRALVVCQSCSSSSNMTSSGRVS

SEQ ID NO: 193074 - protein, 206 aa, Zea mays
  unsure (1)..(206): unsure at all Xaa locations
  Clone ID: MRT4577_107669C.1.pep
MEEKASSPLIPPPSEIDLEAGGGGEQLQCRICLETDGRDFIAPCKCKGTSKYVHRDCLDHWRAVKEGFAFSHCTTCKAPYYLRVHSHTDRKWRTLKFRFFVTRDILFIFALVQIIISALAYLVHFIDGCQQYWLRXPGLLIMKLVFIIXCGALMFFALLGLSGCFITCYDRRVRNDLAQPCRELCLCCCHQGCVRIAPTWHAVHVD

SEQ ID NO: 193075 - protein, 515 aa, Zea mays
  Clone ID: MRT4577_10766C.1.pep
MGRIARGPPSRTRPHATSDELLGPYSKAEDNALSAAFRSRKKKRLNRVFDAIGFMYPDYRYPPRGQKRKSATSGKDAASAAPSEPAPKRKKTSSATKAKEPALTQRIEEPTAKPKVSLVKLAEPKANKIEEIVVEGTKILEVTSPSAEVTVPKAQKGLTATPKRKRMINVLDALETIKTSSTPRKTAEAPKTQSETRLTEAEAAKSKVETEDGPSEPAKEKSLEIGEKETEKEATEQILPEKIATPTPEASSEGLILSNALRAQKSAEYEGCTIALNNLRSELAEAKLKCAIAKADRDASDYWKNYWEKTVVELRSSKERCYEKSIECVGKIKTRFANVGAYSSEDNFVRDDPEGPIEWISSEGEAFEEVLSGCGDVCAFSGARGIATILEKSGCDHVKALTQSEATLSIDDTKDPSAEASLVGRKFFTDIWENGGRGMAHEIIKKSKKDTHDAREATKAAEKAAELERLIAELSPPPEPFEPLAEAEAKESSEIISMAETIMDEAANKVLREEE

SEQ ID NO: 193076 - protein, 56 aa, Zea mays
  Clone ID: MRT4577_107670C.1.pep
NQVYAQLLTVVKILFFRSTTERVKRSPRQDASMVFYMVPKGGAHSSTLLIENGWRL

SEQ ID NO: 193077 - protein, 69 aa, Zea mays
  Clone ID: MRT4577_107671C.1.pep
FVFNHSFSRNMVMMGNLLPTRRITHPSISTICKPAKLCMPHVASERRPDTLASTTTSWSRAVAGASCRI

SEQ ID NO: 193078 - protein, 207 aa, Zea mays
  unsure (1)..(207): unsure at all Xaa locations
  Clone ID: MRT4577_107672C.1.pep
DRPCATCQAGKQVGTSHPSKNVMTTSRPLELLHMDLFGPFAYLSIEGSKYGLFIFDDYTLFTWVFFLQDKSETQGTIKHFLRRAQNEFELGIKKIRRDNRSEFKNLQMEEFLKEEGIKHVFSXPYTPQQNNVAERNNRTLIDMARTMLGEYKTLERFWLEAVNTACHAINHMYLHCLLKKATYELLTGYKPNVSYFLVFGSKSYILV

SEQ ID NO: 193079 - protein, 50 aa, Zea mays
  Clone ID: MRT4577_107673C.1.pep
FDSFQPHLASIWIGPSMAAKAVEKPRLVVLKSIHSTNGFLNRLEPNSELT

SEQ ID NO: 193080 - protein, 34 aa, Zea mays
  Clone ID: MRT4577_107674C.1.pep
LSGRSPCSTIFPLSRLARENHRSLPYVCCPLCYR

SEQ ID NO: 193081 - protein, 57 aa, Zea mays
  Clone ID: MRT4577_107675C.1.pep
CVCFVWIEQHSCASQSLASGAAIYLFHRYDDDCIWSAGRRMNSFFSVPLLLQLLPLA

SEQ ID NO: 193082 - protein, 59 aa, Zea mays
  Clone ID: MRT4577_107676C.1.pep
LDSRRDRAYGLIMLTRRPVASESIESYGGDDYGGGGSYGGAEESSRYSGGHYGRGGGSV

SEQ ID NO: 193083 - protein, 35 aa, Zea mays
  Clone ID: MRT4577_107677C.1.pep
CYFIFFYISLQFFKLDLPYLIFFFTQSAHESADAW

SEQ ID NO: 193084 - protein, 41 aa, Zea mays
  Clone ID: MRT4577_107678C.1.pep
VYNRYFLVDPQMFLYKFKCLRGNNGQGYRSRNCMVQYECLT

SEQ ID NO: 193085 - protein, 63 aa, Zea mays
  Clone ID: MRT4577_107679C.1.pep
AIVVCRGVRSDGPGPSSLVRDDWQVESLERRAACRLSRRRQRVGMFGRFRTHRTVGALSSVQG

SEQ ID NO: 193086 - protein, 159 aa, Zea mays
  unsure (1)..(159): unsure at all Xaa locations
  Clone ID: MRT4577_10767C.1.pep
PKVFSQMPGPRWVXSMGSCAPGGGSSPFSSFFVGGCARIVPVDIXVPGCPPLFWAFLLGVFXLQKKFPGGRVFLSWWPKLSMLLFFFGRFVFFAFALLFPFEIRPPFVGFCKFFFFFFGGFGRIFFPVFFLTFYSCPPRPSLNFFFWASRFPLLSRQSP

SEQ ID NO: 193087 - protein, 81 aa, Zea mays
  Clone ID: MRT4577_107680C.1.pep
GWGIPPRGLFMGVPFVGKLNFLPEMFPRVREPFSSLFRGKGFFPWVPGEGMGQMGFPQGQSNIKDLVLGVPPVPDWASFYH

SEQ ID NO: 193088 - protein, 56 aa, Zea mays
  Clone ID: MRT4577_107681C.1.pep
PVRPTLPQRDSPDACLFSFIRTTIFSGAALFDTGGGLPTISSSHTPTSELKQYFPD

SEQ ID NO: 193089 - protein, 100 aa, Zea mays
  Clone ID: MRT4577_107682C.1.pep
HSIQTPPHHPHDADPPHPDAYTNPHDYHRSPPTAPSHSTPQASPEPTPQKAQPPPQPPLKTPAQHQHPNKPYHQANKLTPTIINGLMFFLGSQLTRISST

SEQ ID NO: 193090 - protein, 88 aa, Zea mays
  Clone ID: MRT4577_107683C.1.pep
SSEGLYCSALLYSHFSSLSTCSILSLLRIFSTLTPSYLISYPLTSNSPLTISSTFFSIYLYLFYITTLLRFLLSTFSINYQYYLSYFY

SEQ ID NO: 193091 - protein, 75 aa, Zea mays
  unsure (1)..(75): unsure at all Xaa locations
  Clone ID: MRT4577_107684C.1.pep
SSPPTHSPQIPTGARRGQGRRRPEALPPGGRAGAHLGAPATPRPARAVRRXPSSPSGAVGRQGCGGGGADAXCPG

SEQ ID NO: 193092 - protein, 80 aa, Zea mays
  Clone ID: MRT4577_107685C.1.pep
KKYINYKKLKKIIREGDFIKQKIKTMPLLYDYLLFNYPCAFLICSIWKNPSLCQLYYNNDSIVGKYEDLLDSLTCNDYLL

SEQ ID NO: 193093 - protein, 54 aa, Zea mays
  Clone ID: MRT4577_107686C.1.pep
MEGKEEGRIFVGGLSWQTDERKLQDAFGRFGKVVDVQVPVPPRPSPLVLMPAPG

SEQ ID NO: 193094 - protein, 220 aa, Zea mays
  Clone ID: MRT4577_107687C.1.pep
MAHHLALLLLLLASPAATRLASAACGSEKFPAGRAYASCEDLPKLGASIHWTYDASKSSLSVAFVAAPAAAGGWVAWGLNPTGEGMAGTQALVALAGSGSAAPTVRTYNITGYVPLGKASTPLDFPATDLAADAAAGGKIRVYGTLQLREGMRAVNQVWQVGASSTAGAPDKHAFQPDNLGAKSKLVLAGKSPAAASPSPAPAPHASGGGAASSKSPNAA

SEQ ID NO: 193095 - protein, 60 aa, Zea mays
  Clone ID: MRT4577_107688C.1.pep
RGGIRRPLVPKGFVFGGLCNRGLSQRSERMMVPDRPGGPSVKSNVTWGHYAWIPSVLLFL

SEQ ID NO: 193096 - protein, 98 aa, Zea mays
  unsure (1)..(98): unsure at all Xaa locations
  Clone ID: MRT4577_107689C.1.pep
XXXXXXXXXXXXXXYFDREKFAQNLYIILSLSIDTCTNIREKFIRPVFWNGKSNSYENVYEVWKNSSHYNPDVYSCLRACCFWPNSSFLRRQYLLNNL

SEQ ID NO: 193097 - protein, 52 aa, Zea mays
  Clone ID: MRT4577_10768C.1.pep
KPQHTGLALQSRPTARLAALVDLELKKKPHGHNPPRDVIPQENSGLYPKNPG

SEQ ID NO: 193098 - protein, 108 aa, Zea mays
  unsure (1)..(108): unsure at all Xaa locations
  Clone ID: MRT4577_107690C.1.pep
CLLFFVPRGGSAAGGSCIWCPSVGLRSCATSGVSAVGPFRFCSCLPSVPPFGSFSALLLRSAVASVCLRSSCFFCLVGGVLFLFLPSQXVFSLWLVXYGRVGRPGRSG

SEQ ID NO: 193099 - protein, 65 aa, Zea mays
  Clone ID: MRT4577_107691C.1.pep
RAAYLSQMKISGAAEHAGSNKIQRITGHLMPAFHTDKLHQSDAMSVHTDHAVDRTALQLPRSSIL

SEQ ID NO: 193100 - protein, 93 aa, Zea mays
  Clone ID: MRT4577_107692C.1.pep
LTPTPPPPLPPPTPPPPPPPPPPTPPPPPSTPTPSPPPPQRSRSTPRSRTTPPTTALPPQMAARAPASAAAAAWWIRWWRGGGGRTCSTRAPS

SEQ ID NO: 193101 - protein, 255 aa, Zea mays
  unsure (1)..(255): unsure at all Xaa locations
  Clone ID: MRT4577_107693C.1.pep
MSPPVKILGHYASPYSHRVEAALQLKGVPYELVQEDLGNKSELLLAKNPVHKKVPVLLHGDRAVCESLLIVEYVDEAFDGPSILPADPHDRAVARFWANFLDTKXYAAAAGHRPLTRSCDFLNVVSLGRTYXFSQPFWLAYWAEGEAQKAVVKEAKENLALLEAQLGGKSFFGGDTPGYLDIAACTLGPWIGVLEEVTGVALLDADEFPALCQWARDYSSSEALRPCLPDRDRLVAYFTENKEKYKTFAKATLHQ

SEQ ID NO: 193102 - protein, 51 aa, Zea mays
  Clone ID: MRT4577_107694C.1.pep
APCGCCSSSSRRVMLKDIGRTSTMCGVHIKDYWYVMFGSKGKMINVTQTVG

SEQ ID NO: 193103 - protein, 104 aa, Zea mays
  Clone ID: MRT4577_107695C.1.pep
AFFQQLGCLTKRKTVSTRSAFTIYGHSSASLSKIKGHLHMRAVCSIIYSIIIDFSFSYCPSDRFSSSFFSSSSNTSPSVIKVYFFVLYPSLVACIRVSLCYDGV

SEQ ID NO: 193104 - protein, 104 aa, Zea mays
  unsure (1)..(104): unsure at all Xaa locations
  Clone ID: MRT4577_107696C.1.pep
MSARAKGGKGLGKGGSXRHRKVLRDNIHGITKPAIRALAHRGGMKRICGLIYXETRSVLKIYLXENVIRDTXTYTEHARRKTVTAMDVVYALKRQGRTLYCFSR

SEQ ID NO: 193105 - protein, 86 aa, Zea mays
  Clone ID: MRT4577_107697C.1.pep
MSVLLAALALLTVAESPTSTHTSRACGLQPPPPDHIPSPVHISPPVHLPPSVHIPPPIHLPTSVHLPTTIHVPPSVHLTTPPCHYL

SEQ ID NO: 193106 - protein, 112 aa, Zea mays
  Clone ID: MRT4577_107698C.1.pep
MREILHIQGGQCGNQIGAKFWEVICDEHVDSHTGKYAGECDLQLERMNVYYNEASGCRFVPRAVLMDLEPGTMDSVRCGPYGQIFRPDNFVLCQSGAGNNWAKGHYTEGAEL

SEQ ID NO: 193107 - protein, 126 aa, Zea mays
  unsure (1)..(126): unsure at all Xaa locations
  Clone ID: MRT4577_107699C.1.pep
PTRQRAPVGSSTMALSSTAFAGKAVNVPSSSAFGEARVTRRKTAAKAXSGAVSGIPXYRHGRLLYLRSLSELVALATQSGYFTGDSYWDTNGLIAVIWEVTTQREQEVIHSRWAMLGALGCLFPEL

SEQ ID NO: 193108 - protein, 564 aa, Zea mays
  Clone ID: MRT4577_10769C.1.pep
MSQDKKTVAEAKLTEEEKLLKEKTVGFIESIAKTNTEKITKEILEGLSEDTDDSDSNDVESGGEDSEDQPWRPSSSCPVPTFRKRWSGDWMKEWFYVKNDLKAREDIKEIIMRPIWSRFGLRKPKKRKSATSGKDVASAAPSEPAPKRKKVKVLTHRSCYIEPAVVPEFGGETSSATEAKEPTLTQRTEEPAAKPKTSSVKLAEPKADNIEEIGVEGTKILEVTSPSAEVTVPKAQKGLTTTPKRKRMVNVLDALETIKTSSTPRKIAEAPKTQTETKLTEAEAAKSQIETEAGPSEPAKEKSLETGEKETEKETAEQILPEKIVTPTPEASSEVPDYIVRYASGKRVSEEEKREAQYYAQKLKYPKGALIFNDSGEEDLLYCLPDSKEISVCGEISRSFGFPILEDGLSVQSKDELADNLAYNSLKGLILSNALRAQKSAKDEGCTIALNNLRSEVIELRNEGLEKDKILNSLVNKIKEDEATSKAQAEAQKCEIEDLRKQLAEAKLKCAIAEADRDASDYWKNYWEKTVVELRSLKERCYEKSIECVGKIKTVGGLFSNAMS

SEQ ID NO: 193109 - protein, 43 aa, Zea mays
  Clone ID: MRT4577_1076C.1.pep
CKKLRARKIPFTIRRYLPDGSYEDWSVDELIVEDSWKRQVGGE

SEQ ID NO: 193110 - protein, 51 aa, Zea mays
  Clone ID: MRT4577_107700C.1.pep
SWSSSLTSKKSVTIKPSPWCLCSYMPPLTAPNQNLSTFSCLLEDVRNKVLI

SEQ ID NO: 193111 - protein, 75 aa, Zea mays
  Clone ID: MRT4577_107701C.1.pep
IFSNSALTILRNLQIISPFTISACTIVRNARLSIVRSIPQGSDPFKATIFISRVFHASARGSSRGTSFERTYRVL

SEQ ID NO: 193112 - protein, 113 aa, Zea mays
  Clone ID: MRT4577_107702C.1.pep
MKHLAAYLLLGLGGNTSPSAEDVKSVLSAVGIEADDERLNKLISELEGKDINELIASGSEKLASVPSGGSGGGAAAAAGGAAAGGAAAAEEAPAAKEEEKEESDEDMGFGLFD

SEQ ID NO: 193113 - protein, 82 aa, Zea mays
  Clone ID: MRT4577_107703C.1.pep
DQLQCLHGGLEYLYDVKVPVQHGQHEMAMAFKAFFHEMAMAINREEIFCSSSQLDPRHNSDKSLFKLHYSSFEDLPIIDPPS

SEQ ID NO: 193114 - protein, 109 aa, Zea mays
  Clone ID: MRT4577_107704C.1.pep
PPPPLKKGRGPQYPGIGPPGRNKLFQSQIFKCPLPPESAMKKIENTPPLVFIVAPKAAKKKIKAPPKKMFALPPKKVPPLFRPDGKKKASVKLTPGFNAFDVAPKIGFF

SEQ ID NO: 193115 - protein, 37 aa, Zea mays
  Clone ID: MRT4577_107705C.1.pep
SLNFTTFKNSPWPIRLKVVLLDYTHNIFFRKTNKPFI

SEQ ID NO: 193116 - protein, 87 aa, Zea mays
  Clone ID: MRT4577_107706C.1.pep
VFADALAKNAVASLLVRGKEKNLHDGDALAQDTQKAWNAINTLDNWIKKSNASRDCEKMNGHRSICALRHHEWWQIRAPLRSSIIRE

SEQ ID NO: 193117 - protein, 61 aa, Zea mays
  Clone ID: MRT4577_107707C.1.pep
RRRAPTSPDPGERWRGVTRSAGSGCDWDIVTGAGQDANSRISTSGVQGLTLYLRPECLFRA

SEQ ID NO: 193118 - protein, 193 aa, Zea mays
  unsure (1)..(193): unsure at all Xaa locations
  Clone ID: MRT4577_107708C.1.pep
MSRGSGAGYDRHITIFSPEGRLYQVEYAFKAVKSAGVTSIGVRGKDSVCVVTQKKVPDKLLDDTSITHLFSITKYTGLLATGLTADARSLVSQARNEAAEFRKKWGYEMPVDVLAKWIADKAQIYTQHAYMRPLGVVAMVLGYDEEKXNAQLFKCDPAGHFFGHKATSAGLKEQEAINFLEKKMKDSPQFTYD

SEQ ID NO: 193119 - protein, 103 aa, Zea mays
  Clone ID: MRT4577_107709C.1.pep
SHVQFHLYAPGLESSLEPAGTLLIPHLFTHQGNVRAAFIIDPLARSVCHSHTDYPHGSPDTLPFTTMRSGSVAGTLELDTKPKDRLTKEPEMHKVFHTLPAGI

SEQ ID NO: 193120 - protein, 219 aa, Zea mays
  Clone ID: MRT4577_10770C.1.pep
LGTSRPAGTLLLANSPGIMADTLAESAVVQDTTLPEIPAIVEPDVDADERGRLKRRRQSSQHSPRRASSPSRGHDRNSGSRYRTHYRKHHRPSSPTLSISPPTSVEKKLRRRSDAEPDHTFRGRARNRSIDRGRTRSPLFEDEDACVESDEDVKRFRKRSAPPSRRRVDEADLAAEIRRQRSYPNLYKVDRRDSKVEDERHMQVGDCGFYRSCSSAPHE

SEQ ID NO: 193121 - protein, 86 aa, Zea mays
  Clone ID: MRT4577_107710C.1.pep
PAGRGDLVQRGGKGKMAIWTRPPVYLDGEKANFGRVVPKPLLVKKPARARERFLNFLENRNGGLEPPPPPLFGWEPRPPQPFSPPP

SEQ ID NO: 193122 - protein, 60 aa, Zea mays
  Clone ID: MRT4577_107711C.1.pep
RGIPPKMEVHSIGCIIIINQNGPQWQARPLGACISPSIQIKCGSAWARVHVFPGPAAKIP

SEQ ID NO: 193123 - protein, 53 aa, Zea mays
  Clone ID: MRT4577_107712C.1.pep
RQCLPMCMIELSIAQKMVHLKNELSLGITGVGFTGMEASHFESSNFTFSKNQC

SEQ ID NO: 193124 - protein, 77 aa, Zea mays
  Clone ID: MRT4577_107713C.1.pep
RHTQMYVALVALTSCSGFLGVPGQKLNAHVKYRQVHVRHRQPVRERFPLRSDAHPVVLRLDLLWPGHLALIGQTPST

SEQ ID NO: 193125 - protein, 214 aa, Zea mays
  unsure (1)..(214): unsure at all Xaa locations
  Clone ID: MRT4577_107714C.1.pep
MADKATVIPPCDPWPFSTVIVEDLEALVTDGLLHPLSSRPQPEWMAPGSEADPTPSPGYVVSFTPFHERGFGMPASRFMRALPHYYGVELHNFNPNSIVQAAIFVAVCEGFLGIDPHWDLWTHLFSAEFFAASTDVKKVRMAVRAGGCTLQLRSGRAAQYIPASLVSSNKGWQNRWFYLRNDDGMLPSFSQRVVTAAGDHWRWGXPHARTRRSS

SEQ ID NO: 193126 - protein, 226 aa, Zea mays
  Clone ID: MRT4577_107715C.1.pep
MASSLVLIAAALLALASSWQQAIAYDPSPLQDFCVADKNSPVRVNGFPCKDPMAVTPDDFFNAAMIIDKRRDTNNKVGSNVTNVNVESFPGLNTLGISLARIDYAPLGVNPPHIHPRATELLTVLEGTLYLGFVTSNPNRLFSKVVKKGDVFVFPKAMIHFQMNLDHDKPAAALSSLSSQNPGVITIASAVFGSKPPISDDVLAKAFQVEKKLIDWLQSQFWDTNY

SEQ ID NO: 193127 - protein, 92 aa, Zea mays
  Clone ID: MRT4577_107716C.1.pep
KLDHRRRLKDLFIACSVMLSIHVHLVRLYGFESHPSPTSFGFFPILSYPCVLGITVPALSCIIKLEILFCLFNVVHATVICYPCVALLMCCL

SEQ ID NO: 193128 - protein, 215 aa, Zea mays
  Clone ID: MRT4577_107717C.1.pep
MAPPLAAALRPHLSRLGQTLSSRLLRLSTSHCPSDQSDFEPDPDHPILSAPDNDDGELASFLHHLSSAASNTSSPKEALSFLLSMSTGPLPASHALLVRALWDLRRDPDAAALALRYGDECSAVDGADGAGLPPPPEAWHLAVWAAGKARRFDLAWEIVRRMRNRGVLTCRVMVILMERYAAASEVNKAIKTFDVMEKFKIESDQSVFYSLLHAL

SEQ ID NO: 193129 - protein, 37 aa, Zea mays
  Clone ID: MRT4577_107718C.1.pep
STDKNRNYAVLAGTLAGLSALGWYLLSKPKKTEEVVD

SEQ ID NO: 193130 - protein, 38 aa, Zea mays
  unsure (1)..(38): unsure at all Xaa locations
  Clone ID: MRT4577_107719C.1.pep
VSXVLGLRGSXSFLSPRAVPVWAASKRRCLSLLAPCSA

SEQ ID NO: 193131 - protein, 388 aa, Zea mays
  Clone ID: MRT4577_10771C.1.pep
QAQSLKDDFFRRLKDIRNKLKNTGSELLEKVVSSYKHVLNAPMDEDTLMRKCQAALINFDELNKTYGNNSVLGSSNQSEFMQGVQEQHNILRNSIEQLKLSESLRATLISHLKEALNEQELKVEQVRSLLQAAQPRFKRAAELCVGLGSNMEMHEPSNQGLKRSSLSDPLSTVAPGAEKSLQKGQSSAVLYSQEGNGFEHIMTETKLAAGDASDNIRGGDLPSQVNGGNTKLKIEEHTSGNKRQKLEDDTDISQPQSQSPPPPPPFPHPDAFEPPPPPPPEVPPSPEPSPPPPPTSPPPNMIPPPPPAMPPQMISHVPPPAGTFVPFPAGPPGPMYSSYPPFTPVVNFPITSPPAGFPSPSPPPPFQGLVGTFYGPQFPTAPPPADRK

SEQ ID NO: 193132 - protein, 116 aa, Zea mays
  Clone ID: MRT4577_107720C.1.pep
LPLAARTNQNGVASCTTLDWILGNKQVNLLAFSCPPAPLMWPSSSLWRRRPTGYAYADCAPAVDLQPPAPVTDAPPTSLDRSSPPLRGCKYTFGPWEPTMTLCVRPTKFGRSCTLV

SEQ ID NO: 193133 - protein, 45 aa, Zea mays
  unsure (1)..(45): unsure at all Xaa locations
  Clone ID: MRT4577_107721C.1.pep
LSNNVLRIILGGSASVRNILHEHLKCKKRNIVSFYXYKKKKKKGR

SEQ ID NO: 193134 - protein, 623 aa, Zea mays
  unsure (1)..(623): unsure at all Xaa locations
  Clone ID: MRT4577_107722C.1.pep
MPATSTKPEYNVDSIDDELANGPLAKRSCRDPLCCLLFVLFMGGMVGIAIWGYTQGNPNLIGRGYDTDGRMCGVDDAVKDYPYLYFPTPVSGQLNKALCLSSCPTSDSLPATLGCKTTTEYPDCVADGNNQTLVADYASNSYVGNIYIYSTKEYVSRFCIPSEAGELLKTATATMMNSSGADILEQWIGDIRETWPVIAVSIAVAFVIGFTYMVLLRYCSGVLTWFAILAFIAGTAILGWRFYESAKKLETQNTEAGNTDDDSTTSKTVLMEKVIAYICWGVAGFTFLAVLCLYSRIKLAIAIMKAAADYVKDTPSVFLVPPVTVVILLIFYAFWAGAAVFLVSSGXYPHRRXSVFGSFTFDKTLKRLLIYHLFGLLWFNAFVIAATQFVLASSTALWYFSQGTGQAAPKTIRTSVKRFFRYHFGSIAFGSLILALIQLVRIILAYMEAQANRMKGKDNKIVKFTLKCLQCYVGCFERFIKFLNKNAYIQIALSGKSFCGAAKDAFVLIASNPLRMGVVSSIGSIFVFFGKIFIAAITALIAFIVLTNWDRYSQNIYSPFIPTLVIFIFAYVVGAIFMTVYGLAADAILACFILDEQINKKKNAPPRHCPSSLRDFLDNHKRN

SEQ ID NO: 193135 - protein, 49 aa, Zea mays
  Clone ID: MRT4577_107723C.1.pep
GFRIGIIKKHIISIQICSFLPPYLLTMCICNSPRMSDVRSFGFRVGLIR

SEQ ID NO: 193136 - protein, 77 aa, Zea mays
  unsure (1)..(77): unsure at all Xaa locations
  Clone ID: MRT4577_107724C.1.pep
XPSMLARGAFSQVWAEHHTPWIIQFSSGGCCNTSTSLCREADSKSMRWIALNGDRYLLDLYPWKRDQGFVNSYQLLF

SEQ ID NO: 193137 - protein, 69 aa, Zea mays
  Clone ID: MRT4577_107725C.1.pep
FRIWCAAYQKQRRRDDILPEESERPSCVTRSPTGAHPVMPPPCLFAEGAPPAPSPALVVHAVAQAEERA

SEQ ID NO: 193138 - protein, 80 aa, Zea mays
  Clone ID: MRT4577_107726C.1.pep
YRGGTHASWSLLSMVRITDRKVWFLGQFLVPGQLGEAFLGPVSHFKNMKVNFFCSKRNFATVKRKSEACSLLKKKKKGRP

SEQ ID NO: 193139 - protein, 59 aa, Zea mays
  Clone ID: MRT4577_107727C.1.pep
TETLLTTYKRAGISPLDPTIPSSSLFLCILLQQTSEGFFLSPISLPLHLGFCLRHFNKT

SEQ ID NO: 193140 - protein, 149 aa, Zea mays
  unsure (1)..(149): unsure at all Xaa locations
  Clone ID: MRT4577_107728C.1.pep
GSPDSRNSARGDFLQNYYVNPLLNHAYTPDQYGSFLIDTFTNFVKNLYGLGARKIGVTSLPPLGCVPLARTLFGYHEKGCISRFNTDAQQFNKKLNAAAANLQKXASXVVKDWLVFFSDIFKALYDIVKSPSNYGFGXATKRCCGTVTV

SEQ ID NO: 193141 - protein, 141 aa, Zea mays
  unsure (1)..(141): unsure at all Xaa locations
  Clone ID: MRT4577_107729C.1.pep
MSLRGIVLFLLVSGLQVVNRYVDLCRKSGGLSDEQIKVRVEIKQLLKEGDQLLTPTRFXKLAXLMLLPAAQDKELVKMLEHDLKREQSLYYXYTKFLSDTNDVIHAGLVLGFCDSPVTAVPQHLLQTFGQMVPWRCVDTAT

SEQ ID NO: 193142 - protein, 212 aa, Zea mays
  Clone ID: MRT4577_10772C.1.pep
MSAGFNKQILAQKLSKLNSSQQSIETLSHWCVFHHRYCQQVVETWDCEFHAAPGERRVSLLYLANDIMQNSRKEGNGYITEFMRVIPAALNEVLTIRDDFGRNVPKRLIDIWEDRKIFDTQAQSLKDDFFRRLKDIRNKLKNTGSELLEKVVSSYKHVLNAPMDEDTLMRKCQAALINFDELNKTYSASEFRIGIGQLDYRCLDAQEFGTGI

SEQ ID NO: 193143 - protein, 120 aa, Zea mays; identical to SEQ ID NO: 192270
  Clone ID: MRT4577_107730C.1.pep

SEQ ID NO: 193144 - protein, 120 aa, Zea mays; identical to SEQ ID NO: 192270
  Clone ID: MRT4577_107731C.1.pep

SEQ ID NO: 193145 - protein, 120 aa, Zea mays; identical to SEQ ID NO: 192270
  Clone ID: MRT4577_107732C.1.pep

SEQ ID NO: 193146 - protein, 120 aa, Zea mays; identical to SEQ ID NO: 192270
  Clone ID: MRT4577_107733C.1.pep

SEQ ID NO: 193147 - protein, 362 aa, Zea mays
  Clone ID: MRT4577_107734C.1.pep
MASVPLSSPSQAGLLGPPFPLLPPPFGACLRYRLPRLPTGLSSSVRKGGLLPLPLLVPPRAAGGKDGRAVTKEELEEEEEEFEVTKEGEEVNQETGGGSGATKEAAARGSGRFAADYVSLGVREPVYEVIEVRSNGRMSTKKISRRQLLKSSGLRLRDTRSVDPSLWLMNSMPSLLVREQAILLNLGSLRAIAMYARVLIFNYNSPGGKAFLGLLLSRLNPRNINGGPAMPFQLEVVEAALLSRIQRLEQRLMKIEPHVATLLEVLPNRLTADVLEQLRLSKQALVELGSRAGDLKQMLIDLLDDPHEIRRICIMGRNCTLDRLSDIVECTVPLEKQIAEGTAKFIIVTLHISGDYDLYLSW

SEQ ID NO: 193148 - protein, 127 aa, Zea mays
  Clone ID: MRT4577_107735C.1.pep
PRVREPPLDYADNLLDVEPLEAIQLELDEEEDAAVYEWFYDHKPLMKTKLINGPSYRKWHLSLPIMATLYRLAGQLLSDLIDRNYFYLFDMESFFTAKALNMCIPGIHDCFKCCKLWSLSCFWSPCT

SEQ ID NO: 193149 - protein, 120 aa, Zea mays; identical to SEQ ID NO: 192270
  Clone ID: MRT4577_107736C.1.pep

SEQ ID NO: 193150 - protein, 43 aa, Zea mays
  Clone ID: MRT4577_107737C.1.pep
GLVLKNIIVPPKCSATLWELWFEYYNGVVLWCSIYHGIYVWSI

SEQ ID NO: 193151 - protein, 288 aa, Zea mays
  unsure (1)..(288): unsure at all Xaa locations
  Clone ID: MRT4577_107738C.1.pep
MGSFNGHVLPGTLFLAVGLWRVWSAVARFAADPPAFRVRTWNPLPKGPRLLELYLVAGGAFLDMCLELGGGILAGGARVGPDSLIYLEHAGMLLMFFLFGALALLSQKTRYLPLTDGELSLVAATAFTSELLLFSYHSATHXGLEGYYHHLLVLLIGLCILSTVLGALSPASFPADLAAGVLLTLQGLWFYQTALTLYGPMLPAECGVDADGHVDCRSRAAEERAEQLANLQLFGVVFVAFVYVLGCYAVAAARYGHPDLAAMHDEHAAAYECRGGVGARTEVECVAV

SEQ ID NO: 193152 - protein, 59 aa, Zea mays
  Clone ID: MRT4577_107739C.1.pep
TGHTPRAQLSSTPSPIRVVATAPELATSALTMPINRIALGNHHDVYHPGALMAAFPEFI

SEQ ID NO: 193153 - protein, 43 aa, Zea mays
  Clone ID: MRT4577_10773C.1.pep
MWLQLLHALLKVCMDQIEEVFNHTLVALHIYLLIYGISIKSST

SEQ ID NO: 193154 - protein, 115 aa, Zea mays
  unsure (1)..(115): unsure at all Xaa locations
  Clone ID: MRT4577_107740C.1.pep
MGVLLVALSLLALAASATSTHTNGXMXCQPPPPGHLPPPVHLPTPXVXLTPTVHLPPPDHMPAPDHPVSYDHVPTTXNLPSXPCHYPTKXTRTKXHSQAQPCPCQQSHTSPCQLQ

SEQ ID NO: 193155 - protein, 73 aa, Zea mays
  Clone ID: MRT4577_107741C.1.pep
RHGGRYGRYDHSPSQDGPDNQMFDGIRGRPINAPFVAEYPPSPILKPVPGAGPLGPCISAPAEIAMHMLREQG

SEQ ID NO: 193156 - protein, 80 aa, Zea mays
  Clone ID: MRT4577_107742C.1.pep
SSRSRAAALFFFFWNHSIGLRFAHGTHVKLATAHSHQPCSCDHLYICHRPLITNIVHQIHLTLLVLPPYRPKHHEDDSAA

SEQ ID NO: 193157 - protein, 119 aa, Zea mays
  Clone ID: MRT4577_107743C.1.pep
SVCEKFARGRSGLCAAHGTLVASRQRRSGGGGMIGPGLFRGIVRSASAANMYSEYSSSGVSTVSDCDGSPEAATGRHELIPPQVLVPHSTPASQEVQVQRVLQGRLRLEFYFYAYASFS

SEQ ID NO: 193158 - protein, 33 aa, Zea mays
  Clone ID: MRT4577_107744C.1.pep
EQGYSLDSSKHYRKCDLNYSSCHAGATSRLRGR

SEQ ID NO: 193159 - protein, 57 aa, Zea mays
  Clone ID: MRT4577_107745C.1.pep
VCMLCPGKNPSCRTVQEFLFRTYDQPRSVTPCQLGLNDTESVGHPGPPPPRWPSCRI

SEQ ID NO: 193160 - protein, 106 aa, Zea mays
  unsure (1)..(106): unsure at all Xaa locations
  Clone ID: MRT4577_107746C.1.pep
GTTTLSRACRTPARVPYCCVSNPTLGEFCFTIIPRADIQGSKSMVLMEDCMQLVSHVCGNCSDASSFVLRMFKVSIAXTLSLLVIVLAITISRAFALLLLTRFLLS

SEQ ID NO: 193161 - protein, 59 aa, Zea mays
  unsure (1)..(59): unsure at all Xaa locations
  Clone ID: MRT4577_107747C.1.pep
RSIFFYTTGDVLHVIWRDKKHGXTVSGTESSQSQHSEQQIHVAPSSTKKLYTKLNLNLF

SEQ ID NO: 193162 - protein, 91 aa, Zea mays
  unsure (1)..(91): unsure at all Xaa locations
  Clone ID: MRT4577_107748C.1.pep
HATSLSTLQTLEAVVWKDNLDVSTSCSLKHTAVDLVNEAKLDSVIKSWISLAGHNEYEVDTLTKAFASHNDDAYNAADADAXAARKYSRRV

SEQ ID NO: 193163 - protein, 237 aa, Zea mays
  Clone ID: MRT4577_107749C.1.pep
MKKGAMASLVPLVVALLLCPSSSLAMASGAGPAQWGKKLDPHFYDQSCPHAQHIVASIVGKAHHQDPRMAASLLRLHFHDCFVKGCDASLLLDSSGSIVSEKRSNPNRDSARGFEVIDEIKAALEAACPATVSCADILALAARDSTVMTGGPGWIVPLGRRDSRGASVQGSNNDIPAPNNTLPTIITKFKLQGLDIVDLVALLGSHTIGDSRCTSFRQRLYNQTGNGLPDFTLDASY

SEQ ID NO: 193164 - protein, 40 aa, Zea mays
  Clone ID: MRT4577_10774C.1.pep
LSLLKRYFWSLDRLYPDKGLSFMTMRLATLIALPNVNREI

SEQ ID NO: 193165 - protein, 115 aa, Zea mays
  Clone ID: MRT4577_107750C.1.pep
NKCSFEWSTSTTSLASDDVLSRCSISSLQEIYLYTTCSGLYGVIPRLLMGINTALTRIKEPNLCVLKINACWVASIAALISIIGSMKITTFCRTSHNTLSAWTYLYLPGELAKHT

SEQ ID NO: 193166 - protein, 234 aa, Zea mays
  unsure (1)..(234): unsure at all Xaa locations
  Clone ID: MRT4577_107751C.1.pep
MGVPAFFRWLSRKYPSIIVNCVEEKPKECNGVKIPVDASKPNPNDVEFDNLYLDMNGIIHPCTHPEDKPAPKNEDEMMVAIFEYIDRLFNIVRPRRLLYMAIDGVAPRAKMNQQRSRRFRASKEGMEAAVEKQRVREEILAKGGFLPPEEIKERFDSNCITPGTEFMDNLAKCLRYYIXDRLNNDPXWKNLTVILSDASAPGEGEHKIMDYIRRXRAQPNHDPXTHHXLCGADA

SEQ ID NO: 193167 - protein, 98 aa, Zea mays
  unsure (1)..(98): unsure at all Xaa locations
  Clone ID: MRT4577_107752C.1.pep
VVLTRRPSFSCMQYCHNQLCTANSASNVTVKGVSITTITGTSATPEALSLLSTAKVPCTGITMADVNVEXSGTNNMTKDICTNANGSTKGCLKELACV

SEQ ID NO: 193168 - protein, 84 aa, Zea mays
  unsure (1)..(84): unsure at all Xaa locations
  Clone ID: MRT4577_107753C.1.pep
PIRKRKSVAKPRRNNRMCKVQIVFSXPLYNQGSSVXSXINIKNLIGQAFCKIGHGALSPPVNALAELRXKDIEWIHECERFLSC

SEQ ID NO: 193169 - protein, 105 aa, Zea mays
  unsure (1)..(105): unsure at all Xaa locations
  Clone ID: MRT4577_107754C.1.pep
NPNPISRRTPPPPRPMPDLPTPVSPSSASSCPRPSPTPTPCASTPPSTRCAAALPRCRSASSPSTPPPRAAVSSPPXLAPPSPSAASRPRPRPRSPSRSRRRRRR

SEQ ID NO: 193170 - protein, 105 aa, Zea mays
  Clone ID: MRT4577_107755C.1.pep
ASSLSQQSAVRPVQCSSTVCWPQNVPVARRCLGSFTRTNRPELPVVPRLLGRPGRAELRTHCSRTRSGAVTHAHRGGSLMPVGSPRPVGDRGVARGTHEARRPGP

SEQ ID NO: 193171 - protein, 180 aa, Zea mays
  unsure (1)..(180): unsure at all Xaa locations
  Clone ID: MRT4577_107756C.1.pep
MVTKVEKKSAVNITAKEEPAAEKAPAGKNSKADNRVPAGKSAVKEGXLGXRGKKKGMXSVETYKIYIFKVLKHVHPDIGISSQAMSIMNSFIIDIFEKLAADDGKLVRYNKKPTITSREIQTSVRLVLPGELAEHAVSDGTWADCEFTSDYAARSPLVGFSPVFTYLAAFRCCCLLASMH

SEQ ID NO: 193172 - protein, 53 aa, Zea mays
  Clone ID: MRT4577_107757C.1.pep
ASEVKYVSSGRTPRLRADVPRACVLVTARPPRGPVSVMPAVLGCGDGFPRPSH

SEQ ID NO: 193173 - protein, 53 aa, Zea mays
  Clone ID: MRT4577_107758C.1.pep
AVRIRWGLRDGYLFRPLLPPWVFNCLKLARGLNLVGGRPLRGARVARSTKEGP

SEQ ID NO: 193174 - protein, 83 aa, Zea mays
  Clone ID: MRT4577_107759C.1.pep
NPFYLVRKKPGSKLLMLEFLTVQTRFFPWGQTKGFPIVSLTPAFRPPSFSPSKTNFGWLVGCLVVVVVKYPPLGSISPALRVE

SEQ ID NO: 193175 - protein, 323 aa, Zea mays
  unsure (1)..(323): unsure at all Xaa locations
  Clone ID: MRT4577_10775C.1.pep
IFCCILPGSCNRSGFMQELQEQHNILRNSIEQLKVSESLRATLIFHLKEALNEQEFKVEQVRSQLQAAQPRFKRASELCVGLGSNMERRQPSNQGLKRSSLSDPLSTVAPEAVKSLQKGQSSAVLYSQEGNGFEHSVTETKLAAGDASDNIRGGDLSSQVNGGNTMLKIEEHTSGNKRQKLEDDTDISQPQSXHRRPPPPFPHPDAFQPPPPPPEYPRSPEPSPPPPPTSLPPNMIPPPPPPPPQCHXMISHLPPPAGTFVPFPAGPPGPMYCTYPSFTPVVNFPMTSPPGFRNLTPPPSFRGLAGTFYGPQFPTAPPPADRK

SEQ ID NO: 193176 - protein, 104 aa, Zea mays
  unsure (1)..(104): unsure at all Xaa locations
  Clone ID: MRT4577_107760C.1.pep
MFDFKIKIQTALNPLVEANVGNFGAEEGXKDYFNVPIQKRNGRRSLTTVQGLKKELSSSKILKXLKKEFCXNWTXVQDQKLDKVIKFQGDQRKTVWNFLVQAGM

SEQ ID NO: 193177 - protein, 53 aa, Zea mays
  Clone ID: MRT4577_107761C.1.pep
GIFIEVVTFIMAYPKSKTPLTSLIIIVFPFKGGSVICFPFHAIWFCVVSTQSS

SEQ ID NO: 193178 - protein, 112 aa, Zea mays
  Clone ID: MRT4577_107762C.1.pep
IFASWLDLKFCTVLGCYYVTRGGQKKKKKKKKKKKKKKKKKKKKKKKKKKYENKNKKSSQNNINGCLLKHWQQQGLDINCWWKIVGAKNYHQPTVRNIKCENMKKTNKRKIN

SEQ ID NO: 193179 - protein, 57 aa, Zea mays
  Clone ID: MRT4577_107763C.1.pep
HPAPIRGLTTTLYISVLLVSFRVDLRSPPASLTHERARAYIGAPLQRCRENLWATGV

SEQ ID NO: 193180 - protein, 66 aa, Zea mays
  unsure (1)..(66): unsure at all Xaa locations
  Clone ID: MRT4577_107764C.1.pep
NRLXFIIXTFHSECHSDYQKDTPLXXTLVKMGYXIELCCFFAIKKGGEKGGXXMYRDKXSKKNXXL

SEQ ID NO: 193181 - protein, 121 aa, Zea mays
  Clone ID: MRT4577_107765C.1.pep
MEQYDGLFPPAYVDSSSSLLLVPNANGTAQEERPRARRRRRRAARCGGGGGELDGGGDHKKRRLTDEQVEMLELSFREERKLETGRKVHLAAELGLDLLYVPDYAYADSSVVEWFSLYGLM

SEQ ID NO: 193182 - protein, 101 aa, Zea mays
  Clone ID: MRT4577_107766C.1.pep
RRTIVTLSKPRRPTPPPRELLGEAIVVRLEPTTTVKPVVRKMRLRAKKMVGPLAWIVVGPPRRTPRRQKKQPTGPWGPPKRPWGPPSSPIKCCFRVYSISY

SEQ ID NO: 193183 - protein, 217 aa, Zea mays
  unsure (1)..(217): unsure at all Xaa locations
  Clone ID: MRT4577_107767C.1.pep
QGERKALQQLIRARPAGSAAQXRRRAARCGGGGGELDGGGDHKKRRLTDEQVEMLELSFREERKLETGRKVHLAAELGLDPKQVAVWFQNRRARHKSKLLEEEFAKLKQAHDAAILHKCHLENEVMRLKDKLVLAEEELTRFRSAGNHAVSGDGGDVMARAVCSGSPSSSFSTGTCQQPGGGGGGGDHLGDDDLLYVPDYAYADSSVVEWFSLYGLM

SEQ ID NO: 193184 - protein, 54 aa, Zea mays
  Clone ID: MRT4577_107768C.1.pep
CMWLDERWSVCLNLNEWLEHVSAYTLLAFKYDVNGIWLCSVRFLIKALKKKRKA

SEQ ID NO: 193185 - protein, 234 aa, Zea mays
  Clone ID: MRT4577_107769C.1.pep
MEQYDGLFPPAYVDDSSSLLLVPNANGTAQEERPRARRRRRRAARCGGGGGELDGGGDHKKRRLTDEQVEMLELSFREERKLETGRKVHLAAELGLDPKQVAVWFQNRRARHKSKLLEEEFAKLKQAHDAAILHKCHLENEVMRLKDKLVLAEEELTRFRSAGNHAVSGDGGDVMARAVCSGSPSSSFSTGTCQQPGGGGGGGDHLGDDDLLYVPDYAYADSSVVEWFSLYGLM

SEQ ID NO: 193186 - protein, 109 aa, Zea mays
  unsure (1)..(109): unsure at all Xaa locations
  Clone ID: MRT4577_10776C.1.pep
ASGRFDLLXXGXXXXXXRIXTAAFDLRRAGGDARRDRTDLRRSVAQFPDKGGRRGKREDARWSPIQEGGKKEGFPWRLPSATSAVWVDSYSCGLFVLLARSLACFYRVI

SEQ ID NO: 193187 - protein, 120 aa, Zea mays
  Clone ID: MRT4577_107770C.1.pep
GLFFFVLCFNWGQVATFFPHPPPRGRAGGGGRGFPQAVVEKVRNGSQKPGPGGGRGGPPGPSRPGPAGAPPPPLVGLRGGRGGPGLRGPPGETGPRSLLPLPPSRQHYVKNRGGAWRGLW

SEQ ID NO: 193188 - protein, 185 aa, Zea mays
  Clone ID: MRT4577_107771C.1.pep
MEQYDGLFPPAYVDSSSSLLLVPNANGTAQEERPRARRRRRRAARCGGGGGELDGGGDHKKRRLTDEQVEMLELSFREERKLETGRKVHLAAELGLDPKQVAVWFQNRRARHKSKLLEEEFAKLKQAHDAAILHKCHLENEVMRLKDKLVLAEEELTRFRSAGNPRVSGDGGDVMRAVCSGSPSS

SEQ ID NO: 193189 - protein, 81 aa, Zea mays
  Clone ID: MRT4577_107772C.1.pep
CTIILGICIMLAINPRAHVKPCLTSVTWLQSYDDHITCRFLWYSYGIHFAAPGSFTLVPPAGPLIRTYSANLHLDGGRSSM

SEQ ID NO: 193190 - protein, 249 aa, Zea mays
  unsure (1)..(249): unsure at all Xaa locations
  Clone ID: MRT4577_107773C.1.pep
MEGSSGLDAAIESLLNTEKQCRLAGDVAGTRKAAVDIVELCFKDAAWKTLNDQIVVLSKRRGQLKQAITAVVQKAMEYIDVTPDVETRIELIKTLSSVAAGKIYVEIERARLIKRLAKIKEEQGKIDEAAEIMQEVAVETFGSMAKTEKLAFILEQVRLCLDRQDYVRAQILSRKISPRVFDADTSKDKKKPKEGDNMVQEAPADVPSLLELKRIYYELMIRYYSHNNDYLEICRCYKSIYXIPSIKED

SEQ ID NO: 193191 - protein, 72 aa, Zea mays
  Clone ID: MRT4577_107774C.1.pep
KKTNKEHRAPGKKNSHHGAQKISKGFSKSLATAAQEQRARHQKAHHHRQQQTVGRAALARPAEVPLVPSASH

SEQ ID NO: 193192 - protein, 65 aa, Zea mays
  Clone ID: MRT4577_107775C.1.pep
KVRLRCVARRQLIKLRTEARKASRYQVHGRRSKRLRNPKPRVKKKACEVKGDQVENSYGTSRITT

SEQ ID NO: 193193 - protein, 74 aa, Zea mays
  unsure (1)..(74): unsure at all Xaa locations
  Clone ID: MRT4577_107776C.1.pep
MSCSCGSSCGCGSXLEETSTAAQPTVVLGVAPEKKAAPEFVEAAAESGEAAHGCSCGSGSKCDPSNSSRIPSLR

SEQ ID NO: 193194 - protein, 75 aa, Zea mays
  Clone ID: MRT4577_107777C.1.pep
ARNSARAGLTTLFCYSQPVKLARCGPSRDAKEIRLVPTAQTIEASGYARPITLNGNTPAEGNEVVQFIVEDGLSS

SEQ ID NO: 193195 - protein, 211 aa, Zea mays
  Clone ID: MRT4577_107778C.1.pep
MGGASDSNLLPPGFHFFPSDEELVVHFLRRKASLLPCQPDIVPTVCMNHHDPWELNGKALEAGSQWYFFSHAKQSRATPNGYWSSVCADETVLSGGGGCSVVVGLKKTLVFSTGEPSDGAETNWIMHEYHLLDGRTGGSSSSSSASSIHSSSKKSHHPNTEFSNWVICRVFDSTGGGSQANCHDDEGMELSCLDELFLSLDDYDEVSLSSN

SEQ ID NO: 193196 - protein, 150 aa, Zea mays
  Clone ID: MRT4577_107779C.1.pep
MGMAMPFASLSPAADHRPSSLLPFCRAAPLSAVGEDAAAQAQQQQQQHAMSGRWAARPALFTAAQYEELEHQALIYKYLVAGVPVPPDLLLPLRRGFVFHQPPALGYGPYFGKKVDPEPGRCRRTDGKKWRCSKEAAPDSKYCERHMHRG

SEQ ID NO: 193197 - protein, 134 aa, Zea mays
  Clone ID: MRT4577_10777C.1.pep
VPPGSASPLFRHSSSPAGLLSRLMTDPHGAYALSLSLSLSLSLSCVSVTPSSLRLLGYVYRSSFSGFAVIREAPIREYSPQIRNHFAPKNQPDGAAPFSSRSHSHASFRSLCNQTKNRATLFQITKHRTERLRS

SEQ ID NO: 193198 - protein, 70 aa, Zea mays
  Clone ID: MRT4577_107780C.1.pep
YMVTADAIGSTNMQVDTRSYMSTKTGAKHAERDSKLKNSVSLSLTHTTQYLCLAASSALLIIVQPPPQAS

SEQ ID NO: 193199 - protein, 71 aa, Zea mays
  Clone ID: MRT4577_107782C.1.pep
GSSWGGGSSCKWGKKSPPLEETSTAAQAPVVLGVAPEKKPAPEFVEPAAESGEPAHACGWGSSCKCHPCNC

SEQ ID NO: 193200 - protein, 62 aa, Zea mays
  Clone ID: MRT4577_107784C.1.pep
SIIGLWPFLFLKKEYWSTIMGLPSRDEQIDNVKYESSYTYNALRILKRNLQHEQCLSQAFHC

SEQ ID NO: 193201 - protein, 51 aa, Zea mays
  Clone ID: MRT4577_107785C.1.pep
NSSPPAQASVVLGVAPKKKPAPQFAEPPAESAEPAHACSRGGTCKCDPCNC

SEQ ID NO: 193202 - protein, 85 aa, Zea mays
  Clone ID: MRT4577_107786C.1.pep
GIYIGSKGIIVDQLIYGYSRRNRINQHACRHTFMSTKTDAKHAERDSKLKNFVSLFLTHTPHNTYVWQPARSRLLFVNHHHKLDR

SEQ ID NO: 193203 - protein, 51 aa, Zea mays
  Clone ID: MRT4577_107787C.1.pep
FLFTSYSLNYVHPYKLCYQLSYSYLYSFLSHYPNINFAFYTCTKTNILMFF

SEQ ID NO: 193204 - protein, 65 aa, Zea mays
  unsure (1)..(65): unsure at all Xaa locations
  Clone ID: MRT4577_107788C.1.pep
APPSKSGKKSPHLKYPSLAAQSTIVLSVAPNNKSAPXPLDXVAESVKSAHACDFGISCKCNPYNC

SEQ ID NO: 193205 - protein, 156 aa, Zea mays
  unsure (1)..(156): unsure at all Xaa locations
  Clone ID: MRT4577_107789C.1.pep
MEEDKRAEEARRAKEAGNDAYRKSFLETAVEHYTRGALLDPRDISFLTNRAAAYFHMGEYKECVRDCEGAVERGRDLSAANKLIAKALLRKASALLELATCSGDYAPAIRALQQSLTEHYSEETHEKLNKAVVVKKEFEEQERLDQETVXSHRERG

SEQ ID NO: 193206 - protein, 52 aa, Zea mays
  Clone ID: MRT4577_10778C.1.pep
TSIDNVRGCLTPRRLSFFFTLLDIWWGGGEEIHEFYMLPTEIWVLDLGIFYI

SEQ ID NO: 193207 - protein, 147 aa, Zea mays
  Clone ID: MRT4577_107790C.1.pep
MSSFFPFPSAPLAVLLIVTLHASAIHAQIPASATTGAAVAATNPQPGGSGTGGGVVGAGGPDAPLELYMHDILGGSSPTARPITGLLGNIYNGQVPFARPIGFSAPRNGVAIPNANGQVPTYNGNTGIPLDTGLSRAGFLQPGTGNG

SEQ ID NO: 193208 - protein, 84 aa, Zea mays
  unsure (1)..(84): unsure at all Xaa locations
  Clone ID: MRT4577_107791C.1.pep
DILSSPQKAFSRENRAFDGSILELNTLGGESYKKSSLIMHLMRXYLGLWXTTPLKEDGFDEVKDALKENAGEGQLSWEGGAKLF

SEQ ID NO: 193209 - protein, 115 aa, Zea mays
  Clone ID: MRT4577_107792C.1.pep
MAFWQTRDFLFCGICGTLLTFDSVRSASCPLCGFKRDAKEIEGKEIQYTMTAEDIRRGLKTQTEDVVGQRPVTNKACPKCDHPKAEFYNIQMRSADEGETTFYMCKGCGCNFKDE

SEQ ID NO: 193210 - protein, 46 aa, Zea mays
  unsure (1)..(46): unsure at all Xaa locations
  Clone ID: MRT4577_107793C.1.pep
GICNCLLSQGWIDGLGNKGGSPLFIKELWMWAKEXKQKKKKINRTQ

SEQ ID NO: 193211 - protein, 63 aa, Zea mays
  Clone ID: MRT4577_107794C.1.pep
RWTESTRTTTSAPPITSHGIIYVKDPSRSSATRWSQNWRADFRVLYIKLNHRSFHNIIKRSDK

SEQ ID NO: 193212 - protein, 104 aa, Zea mays
  Clone ID: MRT4577_107795C.1.pep
RSTRGEWGSCRGCCCHHLLSARRRLRPRGSSSSTMTTCSHALQSSDSWRTSQKLLKSIIQLLTKGYLHWKPVEKQDLSLKHHISSDLRLRHRYICPYVIDCCRQ

SEQ ID NO: 193213 - protein, 83 aa, Zea mays
  Clone ID: MRT4577_107796C.1.pep
RSVGLYRLRDRTRAYLVRNYIHSLWFVDNPLNGDVLKVSDIMYARPSHRPAMTLRSSGDRSSVVVPRKLALSDELDRREHGIG

SEQ ID NO: 193214 - protein, 65 aa, Zea mays
  Clone ID: MRT4577_107797C.1.pep
IPAIAVPGRQCCRLIRSCGLRLYASAHRSRRYEGLRVTLSVVREVFTPRPRRRRFLQAHKSAQRS

SEQ ID NO: 193215 - protein, 111 aa, Zea mays
  unsure (1)..(111): unsure at all Xaa locations
  Clone ID: MRT4577_107798C.1.pep
APRAVFGRAGCVSFLTCFGLNSFTGKRXNQDLXLAWATKFATRDSIFNRNLSLLGTGDGKDTPLLFKEGQDLFKFYARGRRFCQGMLATMEMRARHDLLSRFVELVFLGKD

SEQ ID NO: 193216 - protein, 60 aa, Zea mays
  Clone ID: MRT4577_107799C.1.pep
TGTVLLLARAHRGSGPSIKAANRLSPISQVIRKELKPLKRASSLEFSTPFCAFNSSRLFG

SEQ ID NO: 193217 - protein, 78 aa, Zea mays
  Clone ID: MRT4577_10779C.1.pep
LHIFKLSILKYTHGLHSCEKISRFLAPDQARYIGDWGVIRPELAVFFFLYVTPAACFRCSNLAGLRDVGDAAPTYTAL

SEQ ID NO: 193218 - protein, 78 aa, Zea mays
  Clone ID: MRT4577_1077C.1.pep
SYHIFPPHTNQKLNVKILGSLVSELTHIISEALSVSLSDGKHEVLIKLMNLPTRENMRQAYWAHMWAFCTEVRQATVH

SEQ ID NO: 193219 - protein, 269 aa, Zea mays
  Clone ID: MRT4577_107800C.1.pep
LPKLWDCLTEFLRPVKTEDGIPEDDASIAQLGRSYEDKDPQSLINNIQVVRSISPHLAEPLRPQLLNLLPSILGCVRHPHVAVRLAAARCITSMAKSLTDDVMVLVIENVIPMLSDLSSVCARQGAGILLSLLVQGLAVELVPYAPFLVVPLLKCMSDPDGSVRQTVTHSFAALVPLLPLSRGASLPCGLSERLSSSAEDVQFLEQLLDNTQIDDFKLNIDLNVELRRYQQEGINWLAFLRRFKLHGILCDDMGLGKTLQASAIVASDI

SEQ ID NO: 193220 - protein, 67 aa, Zea mays
  Clone ID: MRT4577_107801C.1.pep
IPGRPTRRSSLASFFSLFSLGSISPGSQARYCKSNALYVLLPRPGLATPGTLYLELLNSVFLMQFNL

SEQ ID NO: 193221 - protein, 56 aa, Zea mays
  Clone ID: MRT4577_107802C.1.pep
FFVGLGLEMGATTVCSMVAGRMWDYDFPTLARWRVRRMRILELLAIVVSVRWIYLF

SEQ ID NO: 193222 - protein, 63 aa, Zea mays
  Clone ID: MRT4577_107803C.1.pep
YTTKMFSMSKNKDFPDYIYQERSEGRWSALFTVVVEKVDLLSKDEVKIDALYGKPGRQQVPGL

SEQ ID NO: 193223 - protein, 91 aa, Zea mays
  Clone ID: MRT4577_107804C.1.pep
GTKFSVPLLPRFSFFFWSPKIKLLGRGFHPFVLGKPLAFPILFALRPFPFSPVAFFVKGPLPVPLSLGLPLLMGNWAPPFFVLLTRVGLWF

SEQ ID NO: 193224 - protein, 92 aa, Zea mays
  Clone ID: MRT4577_107805C.1.pep
NGSPLGKQAVCLLWGRRPSHKQFRGGSVHRRDHLFFGPPFFGGYGYASPGPPPNMFPSGYGPVPLFGHPPLVRLRAPLPRVPFGGKQRFWFR

SEQ ID NO: 193225 - protein, 68 aa, Zea mays
  Clone ID: MRT4577_107806C.1.pep
RLPLLLEGFVLDPPKGFPLFPKFKSGKNYVNPACPLADAKKPLWPQKFTQLGCPVKIMFNGGVKNNGV

SEQ ID NO: 193226 - protein, 35 aa, Zea mays
  Clone ID: MRT4577_107807C.1.pep
PQDDCLLPRISTTKILTRYHTDDHCKRVCSQHAND

SEQ ID NO: 193227 - protein, 63 aa, Zea mays
  unsure (1)..(63): unsure at all Xaa locations
  Clone ID: MRT4577_107808C.1.pep
GRPFFGCFAHAPPFFVSGMNKFFLXLAFLFEEAPPPFXPRFNQLGFSKGRGPKSAGSFFSPDG

SEQ ID NO: 193228 - protein, 56 aa, Zea mays
  Clone ID: MRT4577_107809C.1.pep
SPDQLTPHYAPWAWGRSRRISSLETMCSLEPASSLRASYKLSPLAALDGAAVEALP

SEQ ID NO: 193229 - protein, 81 aa, Zea mays
  Clone ID: MRT4577_10780C.1.pep
QKYVLCSLSSELHIYFSCHWKFTGLLFCFFPVIMPPSALDRLASLHIEYPMLFEVHNAAAERTSHCGGLEFIAEEGMIYMP

SEQ ID NO: 193230 - protein, 66 aa, Zea mays
  Clone ID: MRT4577_107810C.1.pep
AGINVLISKVHPSISPPGLFLRKYLPLPCHVNNDLLLRLSLDCVCCTLSEHSEVKYSYGDGVPQIW

SEQ ID NO: 193231 - protein, 193 aa, Zea mays
  Clone ID: MRT4577_107811C.1.pep
MAQELQETSSSSATTTTSSCTTSCCSSTVTDSSSSPPSPAAANAAPAPRKAEAETGGDEDGCAGKAAPAKKRERSSEGKHPTYRGVRMRAWGKWVSEIREPRKKSRIWLGTFPTAEMAARAHDAAALAIKGRATRSARHKSGSCSTCRTCSSTSGTGSGASRRCGPRSMTCWRSMRRRSRCFGNSSLAITKRV

SEQ ID NO: 193232 - protein, 109 aa, Zea mays
  Clone ID: MRT4577_107812C.1.pep
AAAVLAAAFTSPSSAPSEPDAGAPAPREVPATKNGSPSEDEAGAEAPVPPAAASQPGTPSSGVDEERQLFDLPDLLLDVRDGFGRFPPMWAPFHDVLEVNAEEEPLLWD

SEQ ID NO: 193233 - protein, 111 aa, Zea mays
  Clone ID: MRT4577_107813C.1.pep
AGRACVRTANDSTPLSTPEHTSHEVPPILRLLLSFISTHAQIPEQDTLSTCLLNPEQAQTDLDQPDISRLSPTTRRQRHSRMTAERNASSLHLLKARVRDQYQRPAAKLIR

SEQ ID NO: 193234 - protein, 55 aa, Zea mays
  Clone ID: MRT4577_107814C.1.pep
ATPSTVTSTFFHGAPRRLLRGGLLPGGRALTQPSPSPMLWFVYQSSPSCITSQNL

SEQ ID NO: 193235 - protein, 124 aa, Zea mays
  unsure (1)..(124): unsure at all Xaa locations
  Clone ID: MRT4577_107815C.1.pep
NSARGSHARTPPPPPPPRTRICCPQPRRPRPDPLTRXAPSPPPPXSSAATPPPDPFPPGHPALSAATGPADRPGPGPLPPSCLPHPPPPRAGAXRRRPLGFPGLSPRXPPPADSRPSPTGARRA

SEQ ID NO: 193236 - protein, 87 aa, Zea mays
  unsure (1)..(87): unsure at all Xaa locations
  Clone ID: MRT4577_107816C.1.pep
VAALPSRAAVAGVLLARPVGLGALLRCACGGVVLPLLSPLVALARALGRIAWPLAVLWPPRACPPLCHXXAAVVLVFGRPGRPRAAA

SEQ ID NO: 193237 - protein, 95 aa, Zea mays
  unsure (1)..(95): unsure at all Xaa locations
  Clone ID: MRT4577_107817C.1.pep
FGMVNMIGTHWEENHVATGLANHVAIPIVRDXWSQNITFKXAVKLVKKXFLAFLDRCRSSISKFHMGKILTEGSPMYPPYSFETNWGFSHIENSA

SEQ ID NO: 193238 - protein, 91 aa, Zea mays
  unsure (1)..(91): unsure at all Xaa locations
  Clone ID: MRT4577_107818C.1.pep
RVKRSTLKAXCKALRPYYLLDLRLQVKLLEPRDEFMSLDNFRTCLTRYWCDDLRKXRFLEFQRALQPLAYIKMDYGYFYAAXISPHQLESL

SEQ ID NO: 193239 - protein, 1237 aa, Zea mays
  unsure (1)..(1237): unsure at all Xaa locations
  Clone ID: MRT4577_107819C.1.pep
MAPRKKKKWRSSSSCSSVDRGLPGPLSPRVVNIPSGALAVGKQTSIAAAQVPPWSPLRGEVKSSYSVLGFPSDFIGSHSFPHLASSLSRLWSLPSSFRVSFRGGWIESPIRPPLVDEEWPALSRAVPLQKMDPKGRNPNWDRWNQKENPQGSQSWNKIRNPSWRLKPIIGKAEVKEDIGASSAGEGGHTVWVVAENVPEELQNYQAICELGSTIGAIEEVDILSLDSKDMVRFKVHVKSVAMIPPIIEVGVKPYLYDIFFKIDDITEEGWNDDSINLGKRASVDRQGLDDPSCEKTGKKARNVGDKMKEELGLEKVGEITSHGKNVIQKSDFMTVNEDLNPISEDPANEDEEFHESEECLLSSQDLEEFAKDDEGVIPSSQGKKSIGMDVEYGDGIRRSSRLETTDDMKIVDKATARAMAKDAFLTKAKGRSGGLLVGLDADVFDIRQVDKGDFMIKVLLVHKESGFIWNFINVYGAAQNDYKQKILTELASFCSNCNHPMLIGGDFNILRKESDKNKPGVCLLKETSDMSCAGNFDRISKRLFGKVGPYRLNHNSAPGPDGIPAEFFQDFWEIIHNDLWNLFKDFYDGVLDIKRLNFGLITLIPKIDNPTDMRNFRPICLLNVCYKIITKVLTNRLASCITTVISSNQYGFIKGRYIMDGVVSLNEILHEVKKRKHSGVILKIDFEKAYDKVNWQFLYCMMQKKGFGDIWSDWVMKTIRGGKVAIKTNDLIGPYFATHKDXWLVSSNKLSKXFTELYADIFPCPVGSLPMKYLGVPIDNKKISKSLWCPMLEKMDKRLXLEREILESGRXLTLLNSSLSNVPLYMLSIYPXLNRLLKSWIYSEKVSFGKVVPRQKRXLVNWQTVCSSKSLGGLGVLNLGSMNDALLSKWLWNLENANGLWQRIIAEKYIKGKPLISVNQRQTDSHFWKKLLNLRESFFKHFKMAVGNGRRTSFWKNFWIGDEPLALSFPILFDLSSDKDITVFKVLSSDFEALSFRRRMTGNLQGLFDELVALCSDFNLSSHEDKPIWRLGNKGFTVNSLYKRNSLDQIKVPYRFLWKSKLPQKIKVFLWLVIRNKILTKDNLKKRNWKGSDECCFCGGMESIDHLFFKCSVARFVWRVVQIALNLDYIPKNIDEVCDSWMKNPKNKMSNLLIFGCGALFWAIWRTRNDWFFGGKSFIDPANIIFLCCFWLDSWAIRQKEKEKKMVVQGSQLIRKIISEAMSRTFGWCPRDRRISG

SEQ ID NO: 193240 - protein, 49 aa, Zea mays
  Clone ID: MRT4577_10781C.1.pep
KARCSHHQSLCTHTMLARAPIITIHVQDLSTRVLKLFSTRHAHLRTPIA

SEQ ID NO: 193241 - protein, 1116 aa, Zea mays
  Clone ID: MRT4577_107820C.1.pep
MAPRKKKKWRSSSSCSSVDRGLPGPLSPRVVNIPSGALAVGKQTSIAAAQVPPWSPLRGEVKSSYSVLGFPSDFIGSHSFPHLASSLSRLWSLPSSFRVSFRGGWIESPIRPPLVDEEWPALSRAVPLQKMDPKGRNPNWDRWNQKENPQGSQSWNKIRNPSWRLKPIIGKAEVKEDIGASSAGEGGHTVWVVAENVPEELQNYQAICELGSTIGAIEEVDILSLDSKDMVRFKVHVKSVAMIPPIIEVGVKPYLYDIFFKIDDITEEGWNDDSINLGKRASVDRQGLDDPSCEKTGKKARNVGDKMKEELGLEKVGEITSHGKNVIQKSDFMTVNEDLNPISEDPANEDEEFHESEECLLSSQDLEEFAKDDEGVIPSSQGKKSIGMDVEYGDGIRRSSRLETTDDMKIVDKATARAMAKDAFLTKDMELGNSVDESISNLELIKSLELSRNNLGLGKGIKIEFLKELIRKERIDFIGIQETNKKSFEDSWLQSISSNRNFAWLWSPAKGRSGGLLVGLDADVFDIRQVDKGDFMIKVLLVHKESGFIWNFINVYGAAQNDYKQKILTELASFCSNCNHPMLIGGDFNILRKESDKNKPGGTNCWSSLFNSIIDVNSLIELDLSGRMYTWSNNREPPTFEKLDRFLVSPEWVLQFKNVVVTGVDRTLSDHVPLYLKTDSSVSPKRDFRYELCWKLRPDFKEIVWKSWSLPVRSRSNINIWKEKIKRLKKTLKGWNINVEGKYSKLKKELSQKIDLIDKKSESFGISHEERLEKLDLEWNLKNLMIEDCCKKKQMAREKFINNGDENSKYFHLIAKGKKRRVRILSLVHEENDVKTDVNINKVATDFYKNLFGPSPVSSINMSNFHMDMLSEEDRIRLTAPFTIDEIKSVVFSLKHNSAPGPDGIPAEFFQDFWEIIHNDLWNLFKDFYDGALDIKRLNFGLVTLIPKIDNPTDMRNFRSICFLKVCYKIITKVLTNRLATCITTVISPNQYGFIKGRYIMDGVISLNEILHEVKKRKQSGVILKIDFEKAYDKVNWQFLFCMMQKKGFGDIWSDWVMKTVRGGKVAIRTNDLIGPYFATHKGVRQGDPFSPLLFNLVADGLASIIHQAQEKSLIV

SEQ ID NO: 193242 - protein, 57 aa, Zea mays
  Clone ID: MRT4577_107821C.1.pep
GFPRWFGVLDTPGMVYPRRLFSLGLPREGIFGNFGGPGFIGGGGDLFFRPGVSGGTP

SEQ ID NO: 193243 - protein, 90 aa, Zea mays
  Clone ID: MRT4577_107822C.1.pep
LHHGAPGDQGASCSGRRLVARRPLWWRTSREQPHMMSTVSAHTFRSAPSVGRFILHKSMYNPSDVHEIYPQASGSCMCTYCSLDISMSIR

SEQ ID NO: 193244 - protein, 107 aa, Zea mays
  Clone ID: MRT4577_107823C.1.pep
EQGVPANADLVPNRRSRFHGGPRSFTALLRGRSWPGKEESTTGATGIRHRARDPPHVVSGVCNFLNHGQEQVPQDKEHEGCRDEFVRDSRPSSPSQLWLLDRCLCMM

SEQ ID NO: 193245 - protein, 158 aa, Zea mays
  Clone ID: MRT4577_107824C.1.pep
EKPSTESEGGLAGWEEGLIPYRAQLKGGAAAADDDDDDEQNSRGGGKKKKEGEKGRGLLLARPIQYTVLWARPSSSPSLAGVHVQVQPGRAGGGKGNKDPPRGPRGKGRGNNNSASLHLTWAPKAAGASPWPFCRGRGGGPFVPARATPPFPSRPGPP

SEQ ID NO: 193246 - protein, 47 aa, Zea mays
  unsure (1)..(47): unsure at all Xaa locations
  Clone ID: MRT4577_107825C.1.pep
SRVLCAALAGPSLRRACALLSASCLCRGCGRLRLCGRXLLCTGASVP

SEQ ID NO: 193247 - protein, 37 aa, Zea mays
  Clone ID: MRT4577_107826C.1.pep
KKKKKKKKKKKKKKKKKKKKKKKKKKKKKKKKNGRPL

SEQ ID NO: 193248 - protein, 52 aa, Zea mays
  Clone ID: MRT4577_107827C.1.pep
RVQYRGSCHRTTLLTPMTLTTPGLIEYRLKTIDDAGPVTQAGGISAYVGTIY

SEQ ID NO: 193249 - protein, 295 aa, Zea mays
  Clone ID: MRT4577_107828C.1.pep
MGSPTRVRRTTGFTLLLVLLFLSPPVSAGQPKGVCVSPGGRFPAFSSEGKPPGRAPKGRRDLALCRIFRQKTCCDVMQTFPALVSVRNLALAGEGSQECIHLWELLECSICDPRVGIRPGPPVVCASFCDMVFKACSESYFSIDTKTQALSPCGLDDILCGKTHKWVSNGTELCRLAGFSVQISETSSGGVGHTFCYGGKASLDSISDSWTSSKDRPTLSGVASWDVQDFQRWAREMPIGERVSWAIGGMVLTAGLIFISKRKSYSHHQKQAAIARNMRLRRLDSRANPQQTKRS

SEQ ID NO: 193250 - protein, 380 aa, Zea mays
  Clone ID: MRT4577_107829C.1.pep
MSLDTKLILDAIGKLFDDFDARWERRISETQSTREQRVVPIKPCIDTSEQIPAAHFDTGVVTDNWGGLFDAEVVADDWGGLFEQPAYLVEERNFDFSAALPYVPAPRATFSSTNDEASSTEPSFDSTAVRTMSDTVATLRCHADMLAKATPTIFASRAPRLSFKYQLPQGNLYSITFDDDINIEGCFPTRTRYGDFQALASLGNHNSQVCSVGNMPCEDDLLFSDAADHLFSVELDTDQNTEFRDINGDHVDINIDILVSISSANVGYYDDDHAFRNLTLASGTALQVGVDYDGEGKRVNMASAFLRMAKPSRPLLSTAYDLSTMLTDVPCIGSLVTTASKISSASFDAQVVFDEMQQRFRPTILIDVSCIDMGTNILGF

SEQ ID NO: 193251 - protein, 76 aa, Zea mays
  unsure (1)..(76): unsure at all Xaa locations
  Clone ID: MRT4577_10782C.1.pep
KRRXCIIQIWHVDHAFFCNDSQNTXQCEVRSAAALWTSXSIGYSICRDAAEKPKNYFFIIENLLRNKCGKFCQTTC

SEQ ID NO: 193252 - protein, 30 aa, Zea mays
  Clone ID: MRT4577_107830C.1.pep
EKNSPIHKSLWVIQTLDSAILIHWNTINLV

SEQ ID NO: 193253 - protein, 130 aa, Zea mays
  Clone ID: MRT4577_107831C.1.pep
LPSHATRTLQMDRGDAYPIWHQNIYLLAQRTRDAPRPIESNSLACALEQSTSTVHAEQSPGHSANASAARCIDISLVLAKLCSCSAGSLIHVDFGQHLGDNRLKHMKLSSQQRQLALVPGYASQGLCCLS

SEQ ID NO: 193254 - protein, 65 aa, Zea mays
  Clone ID: MRT4577_107832C.1.pep
IIHHYRIALKFQFRGMLTQSAASCPPLTSEARTPRSVRQPCVAAGTTAAASQGLAHLSRPSSLAL

SEQ ID NO: 193255 - protein, 44 aa, Zea mays
  Clone ID: MRT4577_107833C.1.pep
GERLKSPREECTKVFVGFSQGKLLAPMLECLKEWEGNPLPFNVK

SEQ ID NO: 193256 - protein, 90 aa, Zea mays
  unsure (1)..(90): unsure at all Xaa locations
  Clone ID: MRT4577_107834C.1.pep
GGRTNHNXXTGFKAKNGISKDKIIQQHIPIIRKTKPRLQKEQTLKTDPTHVETPHSSLHGKLTPKTISDGITYQLPDVNNQVGHTKLLKN

SEQ ID NO: 193257 - protein, 218 aa, Zea mays
  unsure (1)..(218): unsure at all Xaa locations
  Clone ID: MRT4577_107835C.1.pep
LTREKPTSSFSAXXGNQSHELAANSRKGRIYGLQKXGIRKIPEHVRCHQKTELEKAKATLLLATLPKSLPCRDKEMEEISIFVKDAICNDQCLGRCLYIHGVPGTGKTMSVLAVMRRLRSEFDSGTLRPYCFIEINGLKLASPENIYXGGTKIGKQANQPIILLIDELDLLLTRNQSVLYNILDWPTKPYSNLVVIGIANTMDLPEKXLPRISSRMGI

SEQ ID NO: 193258 - protein, 86 aa, Zea mays
  Clone ID: MRT4577_107836C.1.pep
SSNIFFINIGDQDSGAFLMLLALSTCVANATIFPQSLTSFYSLPSNYIPFIKFCYITLKPYSLTIFASSCYRYTQHTFNALVELNN

SEQ ID NO: 193259 - protein, 364 aa, Zea mays
  unsure (1)..(364): unsure at all Xaa locations
  Clone ID: MRT4577_107837C.1.pep
ECDACLGGFHLRCVRPPLRRVREGDWACPYCXAERAGKVVERPMPPEGKRVVRTAKEKLLSSDLWAARIESLWREPDGTFWAKVRWYIIPEETAAGRQLHNLRRELYRTNDLADIEMETILRHCSIMCPKDFRDANNGGDDVFYCEYEYDIHWHNFKRLADIDDEPETKEDLSDEPYNAGDDYNSDTDEDSDYDEEEESTSSFSVRRNQSHESAANSRKGRIYGLQKIGIQKIPEHARCHQKTELEKAKATLLLATLPKSLPCRDKEMDEISIFVKDAICNNQCLGRCLYIHGVPGTGKTMSVLAVMRRLRSEFDSGTLRPYCSIEINGLKLASPENIYKVVYEQLSGHKGGWKKALHYLTEHF

SEQ ID NO: 193260 - protein, 67 aa, Zea mays
  Clone ID: MRT4577_107838C.1.pep
LFGSRVSNTTCCHPPQHVGRRFCPTLHSVPTYPRGDEPSGHDERGAEGTLTLAAAGLELTHASAHGP

SEQ ID NO: 193261 - protein, 74 aa, Zea mays
  Clone ID: MRT4577_107839C.1.pep
KMAEGLKVDPAIEKWAHLRENTHLYFSFNKRNTRRSLFWGIAIPVGLTILAYQTDRKWNFSGAQTKEDLSPKKD

SEQ ID NO: 193262 - protein, 87 aa, Zea mays
  Clone ID: MRT4577_10783C.1.pep
RHDIGKPIQGAESAKRPWSKQMVDGLKLRAPEEKHAQNTGSTTAGTATGSNYYYISCPTLARQFTSEGTLAQNPADCKPIALSVFLE

SEQ ID NO: 193263 - protein, 586 aa, Zea mays
  unsure (1)..(586): unsure at all Xaa locations
  Clone ID: MRT4577_107840C.1.pep
ETLRYQICTLPAPLWREPDGTFWAKVRWYIIPEETAAGRQLHNLRRELYRTNDLADIEMETILRHCSIMCPKDFRDANDGGDDVFYCEYEYDIHWHNFKRLADIGDEPETKEDPSDEPYNASDDYNIXTEHFSGGTKIGRPANQXTCFADSCNXFVANSRKGRIYGLQNGLPRKIPEHVRCHQKTELEKAKATLLLATLPKSLPCRDKEMEEISIFVKDAICNDQCLGRCLYIHGVPGTGKTMSVLAVMRRLRSEFDSGTLRPYCFIEINGLKLASPENIYKVVYEQLSGHRVGWKKALHYLTEHFSGGTKIGKQANQPIVLLIDELDLLMTRNQSVLYNILDWPTKPNSNLVVIGIANTMDLPEKLLPRISSRMGIQRLCFGPYNYRQLQEIITSRLKGIDAFEEQAIEFASRKVAAMSGDARRALEICRRAAEFADYRVKQSRQSAQNTVSANKGDGVVSMGDIEAAIQEVFQAPHIQVMKNCPKFGKVILVAIVHELYKSGLGEIMFDKLATTVFSWCHAHRELLPGYDTLLKICCKLGESKIILCEEGTKHKLQKVQLNYPSDDVTFALKESPDLPWLSKYL

SEQ ID NO: 193264 - protein, 95 aa, Zea mays
  Clone ID: MRT4577_107841C.1.pep
MPPKKASTSAAASSASKKAAPSHSSYRDMIKDAIINLKDRNGSSRQSIKKYVQNNNKITVVSQAAFDAQFNKAIKAGVEKGEFSQPKGPSGPVKL

SEQ ID NO: 193265 - protein, 232 aa, Zea mays
  unsure (1)..(232): unsure at all Xaa locations
  Clone ID: MRT4577_107842C.1.pep
TMLVRSDQCLPMITNWCATHAMCWEQMMDRWCSTEWDQAHNTCREXRMMMQGPFHQQGGRSLGVFLQSASHGGRPCSIFSAYAMAHKGKATSDVTYNPDDGPEAYSNPAIYSRLHDYTAMAQEVHGPEYDPSTEQIDPDVLMRVGGGKRHGRYWIDDGAIDSSSTPTLSQVRARSTGSGPAIRPRHDSSQHRIQQLENQLEEERRERQEMEVRMEAEREARLADQQRMAEMF

SEQ ID NO: 193266 - protein, 54 aa, Zea mays
  Clone ID: MRT4577_107843C.1.pep
GVSALGSPCLPRLQLVVFFFGLVPVPPFLSILYAWQFGYGMGRLNWLRSVCVFV

SEQ ID NO: 193267 - protein, 71 aa, Zea mays
  Clone ID: MRT4577_107844C.1.pep
ARLLPVWSSGIVYYIVLTNLGNYNVLQAMQTDRRVRRGGFHIPAGSFVVFNMLALTLWLPFYDVVCLPARH

SEQ ID NO: 193268 - protein, 93 aa, Zea mays
  Clone ID: MRT4577_107845C.1.pep
MTLMEQNQMERSSKLVKFENEFKETCVKDEQAALNKIAAILSELTAKKTTMVSSYMGQLNERYSEDQKNLKLEISNLQQVSDNGKNESVACVG

SEQ ID NO: 193269 - protein, 102 aa, Zea mays
  Clone ID: MRT4577_107846C.1.pep
NKGVWGLWQSPPVPEAQKAPGCPPKSAPLVPQGNQVFGPPNFEACFFLFSKNKMPLPPRACSNFFLGAGKKTQPNILGSPGLKPCICFRTHLSKGLINFGGP

SEQ ID NO: 193270 - protein, 173 aa, Zea mays
  unsure (1)..(173): unsure at all Xaa locations
  Clone ID: MRT4577_107847C.1.pep
EPVIKIPLRLQFFYGKLNIRSGGNAFQDFFGTNPKKFGGSTNCELFXSFPSLFKKGFKFPRTSPLFFPKIPGHVFRVAIXGTPLGSFKTLFLCRSILALSLGENPFFKNPKKIFFNNAVFLAFANLFPPKCCFFFFLTGFLYIRPNVEECFLNKLLGELGFVCLNISPRVSPP

SEQ ID NO: 193271 - protein, 99 aa, Zea mays
  unsure (1)..(99): unsure at all Xaa locations
  Clone ID: MRT4577_107848C.1.pep
THAFDEDRLVVRNITRLVAQDYIXIEGLYFGETILXVARLEAIWVLLAYACAYNIKLYQMDVNDXFLNAKISELVYVEQPLGSEDPQSXFHMFKLSKPS

SEQ ID NO: 193272 - protein, 242 aa, Zea mays
  Clone ID: MRT4577_107849C.1.pep
MAAAVVEKVFVALPAEVKAGQSTLAWALDRFGGGGGTTVVIAHVHVPPQMIPVMGVKFHSSKLSPEQVKLFRRIEHERVDKQLDGYVRQCSKMKVKCEKLVFEKEDVVAGLVELVVLHKVTRLVISAAADRQYSRKMDKPKCRTATEIMQRADPSCKIWFVCKGQLICTRGVEEEVAPSATPFVPDDLDHQALQLVVSHQKKDEAKSELGLYDELKEACIAAENLMKRALNESSGAKSQMEK

SEQ ID NO: 193273 - protein, 40 aa, Zea mays
  Clone ID: MRT4577_10784C.1.pep
KKVQKEQNTTAQKGIKINEKTGCLKEDTKTGQNFLLFTQP

SEQ ID NO: 193274 - protein, 86 aa, Zea mays
  Clone ID: MRT4577_107850C.1.pep
MIDTTTGGPLLGDLCLLPSAAQLEATPCSRSYKPAHLPMSDGHSDPKQSLVISDPPIDCHGDSTAPIHESSHLADPNGAPTWCSSL

SEQ ID NO: 193275 - protein, 69 aa, Zea mays
  Clone ID: MRT4577_107851C.1.pep
CGTGGNEAQQKDQLGRCPSPLIDPASGVFSWYFYIRKWDQVSISTLLVWFLARCVCKGSGLLLQRFGIV

SEQ ID NO: 193276 - protein, 98 aa, Zea mays
  Clone ID: MRT4577_107852C.1.pep
FCTLFIQNFLGILLLAFVCCVEFSQAFICFEELAQFSIASYLCKSMLPLVREVSILWHEIVCIVEQATRCCYICLFRFGGLKASNYKNMLLARSFCVR

SEQ ID NO: 193277 - protein, 53 aa, Zea mays
  Clone ID: MRT4577_107853C.1.pep
AQGITNITLHYIEYYSQRMNSTTTCCSYTTNIYNYTVPTICIYSTLQHQLMIN

SEQ ID NO: 193278 - protein, 184 aa, Zea mays
  Clone ID: MRT4577_107854C.1.pep
MEVDRAPTAAAAGGSSSGAMAVDAAGGVEKPRFDALMPSEMSGGRPQYRKVQVPPHRFAPLKKAWLEIYTPVYEHMKVDIRMNLKAKRVELKTRHDTPDVSNLQKCADFVHAFMLGFDIADAVALLRLDDLYVDSFEIKDVKTLRGEHLSRAIGRLSGKGGKTKYAIENSTRTRIVIADTKIHI

SEQ ID NO: 193279 - protein, 92 aa, Zea mays
  Clone ID: MRT4577_107855C.1.pep
RRPSPCLRGVCSKYKSSSFPFVGATAVTGSSEAPISAPKHSRRSTLLGTSPSYDEPGAGAGKNYAPCVLLRAKKKIKNGLHYLVGGRANNKR

SEQ ID NO: 193280 - protein, 115 aa, Zea mays
  Clone ID: MRT4577_107856C.1.pep
KTKGGLTGTGATTNVYRHRDFKAHMRHTQSECCSPSEVLFCPDFAESLYCHLLCGLVLADDVRTVSATFAHSLVLAFRTFERVWEELCADIRHGAPSPTRVTNPAVRRAVSALLV

SEQ ID NO: 193281 - protein, 60 aa, Zea mays
  Clone ID: MRT4577_107857C.1.pep
LSPKIHITPYPQFHTSQYTSTIPHSYHICHHITIYLSNSPSSLIIIHFINSYRTSRIHLL

SEQ ID NO: 193282 - protein, 56 aa, Zea mays
  Clone ID: MRT4577_107858C.1.pep
IHSLINLHHGSFIFSNITRAQLVPPYYSVHPGGFIYMYGDLIRRCILELRARSRTG

SEQ ID NO: 193283 - protein, 49 aa, Zea mays
  Clone ID: MRT4577_107859C.1.pep
RGFVKKPNLPYDGCSDLIWSGRVPNNNCTRLGVFNKGPLMGPNLTLYAA

SEQ ID NO: 193284 - protein, 117 aa, Zea mays
  unsure (1)..(117): unsure at all Xaa locations
  Clone ID: MRT4577_10785C.1.pep
GAAGRKANNPRKKSVKGSLKARLQLLVRHIRNYLNKERYAHRVGTYAPVYLDYLLDYLLDQVLNLAKNTXRHNMKTRILLLHLLLDIHNDIELGKLMIGHTIVHGRILPNINPDILP

SEQ ID NO: 193285 - protein, 98 aa, Zea mays
  unsure (1)..(98): unsure at all Xaa locations
  Clone ID: MRT4577_107860C.1.pep
MKLQILDLNGMLANINQDYQCAHLSHAKVRTILVFTGPYCDYFLRFCFHNFGLRISSLMKRENVVSAVYIPMSALKQWLLFXWDMFYCTVTGCKTVDN

SEQ ID NO: 193286 - protein, 79 aa, Zea mays
  Clone ID: MRT4577_107861C.1.pep
HVKGRERNKVALRVINISDLVTFSVYGVWYKVRNGSIANVRSQKKGQGPPRSKRLRFALIMGDLSTATRACVSPGIFRR

SEQ ID NO: 193287 - protein, 164 aa, Zea mays
  unsure (1)..(164): unsure at all Xaa locations
  Clone ID: MRT4577_107862C.1.pep
SRLWFFFWRNISTKLREHENSVEHFQXMNKWNELRTRMQKEETIDKDLQKQINKEKERLRQVLLRIIAIVKFLGKRNLAFRGSIEQLYSDSNGNFLACVEMIAEFDLVMQDHLRRIQNKEIHYHYLSPKIQNELIVLLSSNITRSIIKIVKEAKYFSVILDCTP

SEQ ID NO: 193288 - protein, 79 aa, Zea mays
  Clone ID: MRT4577_107863C.1.pep
QWIPTLMEPLPFWTGVATYCSLYFQQYQDRSRPYTEQSRGSTLMLYMVMAPHICHIWYLYLSILVLENLTVGATYMTGY

SEQ ID NO: 193289 - protein, 120 aa, Zea mays
  unsure (1)..(120): unsure at all Xaa locations
  Clone ID: MRT4577_107864C.1.pep
GTGYLYTGSRDKTIKAWSLGDYSLRCTITGHKTTVSCLAVARGILYSGSWDGTIRLWWLTDHTPLSVLEDDAARSIAPVLSISAETNFVASSYENGYFKVWKNDVLVKLRKXKNGAVYAV

SEQ ID NO: 193290 - protein, 238 aa, Zea mays
  unsure (1)..(238): unsure at all Xaa locations
  Clone ID: MRT4577_107865C.1.pep
MAVVPAAETLDGLKDRFDLGVFVGDLALDEEVTSDDESLEGLQQELDNCKNDQEVANILASGIKLREYTKGVENNIRQIELDSIQTEIGSISSEIKVLQEKSMDMGLKLKNRKAAESKLSKFVEDIIVPPRMIDIIVDGEVNDEYMKTLETLSKKIKFIDADPMVKSSKALKDVQPEVERLRQKAVSKIFEFVIQKFYALRKXKTNIQILQQSGLSXYKYTINFLXGHAKEIYAEVRT

SEQ ID NO: 193291 - protein, 65 aa, Zea mays
  Clone ID: MRT4577_107866C.1.pep
MRTRMSKTRVWKDWKPLFKITNDKQVRYAAICKICNVELFAKSSGGTGHLLRHVAACTGTVIAIM

SEQ ID NO: 193292 - protein, 700 aa, Zea mays
  Clone ID: MRT4577_107867C.1.pep
MAVVPAAETLDGLKDRFDLGVFVGDLALDEEVTSDDESLEGLQQELDNCKNDQEVANILASGIKLREYTKGVENNIRQIELDSIQDYIKESENLVSLHDQICDCDNILLQMETVLTGFQTEIGSISSEIKVLQEKSMDMGLKLKNRKAAESKLSKFVEDIIVPPRMIDIIVDGEVNDEYMKTLETLSKKIKFIDADPMVKSSKALKDVQPEVERLRQKAVSKIFEFVIQKFYALRKPKTNIQILQQSVLLKYKYTINFLKEHAKEIYAEVRTAYIDTMNKVLSAHFRAYIQALEKLQMDIATSTDLLGVETRSTGFIFSIGKEPLKTRPSVFALGERINILKEIDQPALIPHIAEAKSQKYSYEVLFRSLQKLLIDTATSEYLFTDDFFGEESIFHDIFAGPIQVVDEHFNTVLLNCYDAIGIMLMIRIIHQHQLIMFKRRIPCLDSYLDKVNMSLWPRFKMVFDLHLNSLRNANIKTLWEDDVHPHYVTRRYAEFTASLVHLNVEHGDGQLDLNLERLRMAIEDLLVKLAKMFSKPKLQTVFLINNYDLTISILKEAGTEGGKAQQHFEEVLKSNIAIYVEELLLEQFSSLIRFVKSRPADETAANSEKASIAEVEPLVKDFASRYKAAIELMHYDVITSFSNFLCGMEILRATLAQLLLYYTRLSECVKRINGGSALNKDLVSISSILFEIKKYSRTF

SEQ ID NO: 193293 - protein, 178 aa, Zea mays
  unsure (1)..(178): unsure at all Xaa locations
  Clone ID: MRT4577_107868C.1.pep
LEVILQAENPKRRPKDRXLLQDRIKXFGELTTNASNASITPLLXNTIPTMAVLRTATNYADHLNDSNXSKIVGCENGPSKSTSXGGATLSFDVGKQSMTCPIIAEDLDRSHXMLAEMLCEDRGVFFDIAYFIKGLDLTILLLVMAARHDDIWTRLTVEANTDVTTMEILLLLLRLLEP

SEQ ID NO: 193294 - protein, 43 aa, Zea mays
  unsure (1)..(43): unsure at all Xaa locations
  Clone ID: MRT4577_107869C.1.pep
SYCCLRMLGLFSLETSRWEWSXKAMQEECGRLAQCXKPCSCFL

SEQ ID NO: 193295 - protein, 42 aa, Zea mays
  Clone ID: MRT4577_10786C.1.pep
RTGVDGSLFLATIRFTLDPSSLLLYGQPWINRTPQLVLREYP

SEQ ID NO: 193296 - protein, 384 aa, Zea mays
  Clone ID: MRT4577_107870C.1.pep
MAGDDGSGGSGGGNREDEVHVQIAGSSKPETSSTNETSPQNSHTKHWHWWLMVTLNIFFLVAGQTASTLLGRFYYNQGGNSKWMSTFVQTAGFPVLFVALYLFRSKSPSTQTTTSNPETSVTKITLIYVVLGLIIAADDLMYSYGLLYLPVSTYSLICASQLAFNAVFSYVLNAQKFTPFIFNSVILLTFSAALLGVDEDSQGTNGLSRGKYILGFALTLGASATYSLILSLMQVAFEKVIKKETFSVVLNMQIYTALVATVASLIGLFASGEWKTLEGEMHAFSSGRVSYVMTLLWTAVSWQIASVGVVGLIFVVSSLFSNVISTLALPIIPIFAVIFFHDKMDGVKIIAMLMAIWGFVSYGYQLYISDKKARKTSVSVEENS

SEQ ID NO: 193297 - protein, 60 aa, Zea mays
  Clone ID: MRT4577_107871C.1.pep
NTSIFDTGIWAGMHTVRYFDGKTYEWVGLSRQRSIMGKVCLLQYINRSMVSSFHEWLLLS

SEQ ID NO: 193298 - protein, 173 aa, Zea mays
  Clone ID: MRT4577_107872C.1.pep
LGESRKLGWSLLNGSFLSSFSSLSSMSGAPLRRLPPAAPVFFRRSRARCLPPALPVLMRAKSPASISFSRALLWLSFQTRLRPDKKSKKSSPTSRKSTVVPAMASAGSAGVAAPSTGGGSSSHPFSVVWDGMTLGGSFASESSPTSSEWSLIGRFLYAHGEAGSVHGDRTWVC

SEQ ID NO: 193299 - protein, 194 aa, Zea mays
  Clone ID: MRT4577_107873C.1.pep
MDLLGKGGAQQKKSKKSSPTSRKSTVVPAMASAGSAGVAAPSTGGRSSSHPFSVVWDGMALGGSFASESSPTSSEWLYPPGGFVNSLRMPFPYATYPNGSQLPENSHFVGCTSNKGTPSPTNDKGTPIAEVHDSIDIDADDTLEPARTDKRLNWSHEEDVRLVSSWLQNSLDPVDGNDKKSDYYWTDVTNTYNS

SEQ ID NO: 193300 - protein, 76 aa, Zea mays
  Clone ID: MRT4577_107874C.1.pep
GEWVPRGRPGPAFPFSTVRESEAHGRSLAMGQTHLLLLTCFWVLSTMTPCYSDASYRWTVKNPPEQQHTAQRTFDC

SEQ ID NO: 193301 - protein, 105 aa, Zea mays
  Clone ID: MRT4577_107875C.1.pep
PWGPPAPPPRPPVADQGLRGASGSDSAPPPRSRVEPRPPGACGEGRPPSPPRPQQRPPLSAAPGPGGGGRSLVRCVKGRRRGCGGVFCPVPPAMTCSTHELWLAS

SEQ ID NO: 193302 - protein, 59 aa, Zea mays
  Clone ID: MRT4577_107876C.1.pep
RKGVKEQKSIAYILTALIYRPIVSIYAFSDYSLTNRRKRLIFPLIQLVFVPARMDWVFY

SEQ ID NO: 193303 - protein, 166 aa, Zea mays
  unsure (1)..(166): unsure at all Xaa locations
  Clone ID: MRT4577_107877C.1.pep
DKHLLLLPWSFSLSLLCSFGGCFLRTSLTRILAFRXNKPPVSEQRFXPSQLAPTMPSWPSSVDYISQSAEXRILHAPDLADHYYLNLLDWGSNTVLSIAVSDTDYLLDACSVSTFDLVTIHQDSATITSVNWAPNSHHIXLTLNSSNVQLWDTTSNRLIENFHECA

SEQ ID NO: 193304 - protein, 242 aa, Zea mays
  Clone ID: MRT4577_107878C.1.pep
MADPPNRGLPDEISIWEILVRLPPKALLRCRAVCRAWRSATSTRDFLLAHHGHQLTLPLLYGCTNVGVQGEVLDIIPFDHRPGLAAADQLQSVARLVLGLSYPCVEASCNGLLLLSLGRRDFSVCNPATRQYAPLRQIYGYVLLGMYPHSPTGEYRLLLYWDEDLIYPDLAPGTQDGSYVFTLGSGEPPRYTGYPDSGILMFSNSILFHGSLHWHIDKDASTSNMIMLFDTTSESFRQMRAP

SEQ ID NO: 193305 - protein, 152 aa, Zea mays
  Clone ID: MRT4577_107879C.1.pep
MSLIAGEEFQHILRVLNTNVDGKQKIMFALTSIKGVGRRFSNIVCKKADIDMNKRAGELSSEEMDRLMAVVHNPRQFKVPDWFLNRKKDYKDGRFSQVVSNAVDMKLRDDLERLKKIRNHRGLRHYWGVRVRGQHTKTTGRRGKTVGVSKKR

SEQ ID NO: 193306 - protein, 79 aa, Zea mays
  Clone ID: MRT4577_10787C.1.pep
CLMTSNVSALFIIFGPNMEKRVPHFIRTCAETAPGSKFQKVPDLYKTPPCGFIIKESLYALYFLTKELCKDLKLICCLH

SEQ ID NO: 193307 - protein, 79 aa, Zea mays
  Clone ID: MRT4577_107880C.1.pep
PSFHLSQSLSKLSTHHYNLYIITQILNLYIYLHPLSYSSSLYIFSPNLFLQNILHLLPLFLSPLPSFHLHLHIYTIYIL

SEQ ID NO: 193308 - protein, 68 aa, Zea mays
  unsure (1)..(68): unsure at all Xaa locations
  Clone ID: MRT4577_107881C.1.pep
KAPRGVNSPFSGEVVEVNSQLSKTPGLINPSPFEGGWIIKVKPTPPXEADPLLDPPKYPQPFEEENAP

SEQ ID NO: 193309 - protein, 141 aa, Zea mays
  unsure (1)..(141): unsure at all Xaa locations
  Clone ID: MRT4577_107882C.1.pep
MARKHQHVAIFTTSXLPWMTATAVNPLFRAAYLARXGDWEVRLVVPXWPSGDQDLDYPNKMRFSWPNXQENYVRWXLEERTELXVXIDIKFYTGKLKLXEKNILPDGDIKHTICYDKAAIAGLEXPKHLTWYHHGRKWKNK

SEQ ID NO: 193310 - protein, 298 aa, Zea mays
  Clone ID: MRT4577_107883C.1.pep
RSTLGSRAKQLVSHDTKSSVYNYKYTFSVEICPVCREDLIALSPQASRDMGGLGPLVLCVKVTNAIALLDPLTLRVHHLEEKKYRVYNFKAALTSKQLVEYIVLDIEPESPEICIDGSRYQLAYAQVARMSDFGKNDAIFTVRTHLGHLLNPGDHALGYDLYGANLNDDDMDMAMTRYSLPEVVLVKKSYEKRPRTRRWKLKRLPVEEDAANKAKGEEEKRLDEYEAFLRDLEVDSGMWSKMNLYKNEDYRSEMASTVGDDIPTVPIEELIEDLTLGDDEEDEGKETVEGNTHTGMVE

SEQ ID NO: 193311 - protein, 84 aa, Zea mays
  Clone ID: MRT4577_107884C.1.pep
CEKNLMSRCDNMRVCEFLRDQYRVIPKGQAQYYGPLSYSLQCVKSERRSSEAAASSQDQDTGHSGGELRRAALYASAIADTGHS

SEQ ID NO: 193312 - protein, 86 aa, Zea mays
  Clone ID: MRT4577_107885C.1.pep
QAYVCYFDTMNSQTVKANTISLPTREVAQLLGKTQTERERQTRSILRANGPLNPKGRVQLTVLLTQIPNKITNYYRLNYFSMRMMQ

SEQ ID NO: 193313 - protein, 65 aa, Zea mays
  Clone ID: MRT4577_107886C.1.pep
PTRVRPASPPRPPTRPPTRPPTRPPTRPLVLDRERRPFFFFFFFFFFFTGLLFILTVTHIVIYSS

SEQ ID NO: 193314 - protein, 103 aa, Zea mays
  Clone ID: MRT4577_107887C.1.pep
PGPPPLPPPPPLPLQRPTEKPRDEAAAEEEEAELAVLSPGVLERDDPVVPAAFVVGSGNSATDYLPMPEPFDHDSASCSLNYCKLLLCKKVSCPIYLFCDSYI

SEQ ID NO: 193315 - protein, 81 aa, Zea mays
  Clone ID: MRT4577_107888C.1.pep
DLERCISCVQDKPLLHRGRTEEGIVPTDSLITAASFAVQIRLMPDPRTMTKAYAVYIQVSIYPQTIVFTKRPEQELKSVFF

SEQ ID NO: 193316 - protein, 36 aa, Zea mays
  Clone ID: MRT4577_107889C.1.pep
VWISLMYSQTVECDKVRKFSPVSDISKSSVRVLYRV

SEQ ID NO: 193317 - protein, 60 aa, Zea mays
  Clone ID: MRT4577_10788C.1.pep
YELAAKKQLCKATGSEYPSSIGSYKPRRCNRVCFLYTEVMLSYWWEVNLGATGKCLLTAS

SEQ ID NO: 193318 - protein, 115 aa, Zea mays
  Clone ID: MRT4577_107890C.1.pep
DCPPLRGCFFGLGATLDLFFVSWLDLSRESFFGFWVLEPIKIKLAGWVFFLKIVCGPPQFAPPPPPPLCGPPHFFSQNFFPLLMGVSLKKKKKKKKKKKKKKKKKKKKKKKNPPP

SEQ ID NO: 193319 - protein, 140 aa, Zea mays
  unsure (1)..(140): unsure at all Xaa locations
  Clone ID: MRT4577_107891C.1.pep
ARDPVTRRPSATFIPDRSAMDMDMAHYLLTEPRKDEENAADMVASPSKEAYRRLLVGKLFNNRTRILAFRNKLPEPENVSFTNVASSNLQAEPTKQRRHIPXSAERTLNAPELGDDYYINLLDWGSNNVLSIALGNTVYL

SEQ ID NO: 193320 - protein, 69 aa, Zea mays
  Clone ID: MRT4577_107892C.1.pep
PQRAGGLPRRLPSIDDAWPANKHRWRLWLPRGRGLWFFAPWPARWKKKTPPPVLMGKRYFIRINERTRG

SEQ ID NO: 193321 - protein, 78 aa, Zea mays
  Clone ID: MRT4577_107893C.1.pep
ILLIHMIIWLPLVLPTRAASTAVANRPTFCRGNAAARLVGSYTTKDAAVPACETEKRISALSYAPFALLASFVGTFNG

SEQ ID NO: 193322 - protein, 367 aa, Zea mays
  unsure (1)..(367): unsure at all Xaa locations
  Clone ID: MRT4577_107894C.1.pep
ERDKAVQDLARLKQHLLDKDLEDQEKMDEDSKLIEELRVVCEQQRAHIMQLERALKVEMAKQEENKKVISEEHQRSNEQIENLNYKLASCMSALESKNVELLNLQTALGQYYAESXAQDRLGGDLAVAREELSKLSESLKVANQTIEISRREKEDMATKLSQAERMLADGKRSMQKLEDDNSRLRRALEQSMTTVNRMSLDSDNSVDRRIVIKLLVTYFQRNHSKEVLDLMVRMLGFSEEDKQRIGFAQSNAGRGVVRGVLGLPGRLVGGIVGGGPSGKSTQSSQDSQSFADLWVDFLLKETEEREKREASEAARQSQQESHTTTGPSTSSSIQQPSQHNPSNVAPGPSTMPHTAWVSQNRNPQQFR

SEQ ID NO: 193323 - protein, 60 aa, Zea mays
  Clone ID: MRT4577_107895C.1.pep
TRPADRDAGNGSGNAAPVAAGGGNEGLTRDFLGLRAFSPGDILSMAGFDPCMSSASPAAI

SEQ ID NO: 193324 - protein, 212 aa, Zea mays
  Clone ID: MRT4577_107896C.1.pep
RQVLDLMVRMLGFSEEDKQRIGFAQSNAGRGVVRGVLGLPGRLVGGIVGGGPSGKSTQSSQDSQVGSLCLTPFFSSHDPIPFTSEVEQTTRSTKLCFALCYNLTVGIGFPVPSCAVLRGPLGGLPAQGDGRKGETGSLRSCKAITAREPHHHRSKYIVEYPTAITAQPLKRCTWPIHNATHRLGRPESESSTVPLASSYSPVLAPSPRPPLK

SEQ ID NO: 193325 - protein, 130 aa, Zea mays
  Clone ID: MRT4577_107897C.1.pep
NDARRTYRRMVFLRFEPNNQTYLSLINGYVSTEKYFSVLILWTEVRRRGIEFNHELIDAFLYALVKGGFFDMAMQVIEKAQEFKIFIDKWRYKQAFMETHKKLKVAKLRKRNFRKMEALVAFRNWAGINT

SEQ ID NO: 193326 - protein, 42 aa, Zea mays
  Clone ID: MRT4577_107898C.1.pep
FVSTFPKGCHVQINQPNIPRYIILALILFLIFSFYFKFKIQV

SEQ ID NO: 193327 - protein, 83 aa, Zea mays
  Clone ID: MRT4577_107899C.1.pep
MAVKKIAIFGATGQTGLTTLAQAVQAGYEVTVLVRDSSRLPSEGPRPAHVVLGDVLQAADVDKTVAGQDAVIVLLGTRNDLSP

SEQ ID NO: 193328 - protein, 53 aa, Zea mays
  Clone ID: MRT4577_10789C.1.pep
FEHILDAADTDELTRLEIFSRSMLSGVKPSSLKRRVREMLPQCIISLSREPTP

SEQ ID NO: 193329 - protein, 180 aa, Zea mays
  Clone ID: MRT4577_1078C.1.pep
MAAHVDPLVVGRVIGDVVDLFVPTVAVSARFGAKDLTNGCEIKPSVAAAAPAVLIAGRANDLFTLVMTDPDAPSPSEPTMRELLHWLVVNIPGGADASQGGETVVPYVGPRPPVGIHRYVLVVYQQKARVTAPPSLAPATEATRARFSNRAFADRHDLGLPVAAMFFNAQKETASRRRHY

SEQ ID NO: 193330 - protein, 84 aa, Zea mays
  Clone ID: MRT4577_107900C.1.pep
LSLLFQMCPVPVVKFYASLFLCVNPAPPVMTVTVCCLRCCPTSCFLSCLAAWRGAACSPPLPGSNLPAVAVDLMPSLPLAPSLP

SEQ ID NO: 193331 - protein, 69 aa, Zea mays
  Clone ID: MRT4577_107901C.1.pep
EENVEFGEVAAKHLFELEPDNVGNYVLLGKVYAAAERWSDVQHLRRVMEGMDLPKDPGYCVVDAKSEVC

SEQ ID NO: 193332 - protein, 43 aa, Zea mays
  Clone ID: MRT4577_107902C.1.pep
SGMAIIYLSRYVCINIWCICYNFFASSMSPHFLYNTNHTCNTA

SEQ ID NO: 193333 - protein, 87 aa, Zea mays
  Clone ID: MRT4577_107903C.1.pep
HHKLCMSPLSKTASLVAVAPLQDHACFGSQRNRQRPGSGSWAFELVQCRALCNATQERCWHGKHAGFRRGGDEAQPCARVLCVVTTA

SEQ ID NO: 193334 - protein, 135 aa, Zea mays
  unsure (1)..(135): unsure at all Xaa locations
  Clone ID: MRT4577_107904C.1.pep
DPFTGHRHCSFLSLHGRLPRARANIHILCVSALKKKKKKMTAWRTPAAVRPTPGARVPSLVRASRACCVEKCLRAATRPTGSRARYTLPSSSSPPXVRLVGSRAPAAFASCPPSAYGRRHRGHLAGAFWSRCGSR

SEQ ID NO: 193335 - protein, 82 aa, Zea mays
  Clone ID: MRT4577_107905C.1.pep
MSCCGGNCACTSGCNCGSGCGGCKMFPDVETAGVASVKPTVLAAPATKASAGGFEAAAEGGGCDCNTCNCGTSCGCSCCSCN

SEQ ID NO: 193336 - protein, 125 aa, Zea mays
  unsure (1)..(125): unsure at all Xaa locations
  Clone ID: MRT4577_107906C.1.pep
ALGPGRGRERLHFQNFQRRYFXHIPSSVRXLVTGPVALFGGCLRFGSLLDSRRLGHGIIEQAQVRPDLTKSSSGRGQQERGSIDTVHVSAMLPGHRPQLTSYVASQVETLSGARRVVPGRPXEGT

SEQ ID NO: 193337 - protein, 70 aa, Zea mays
  Clone ID: MRT4577_107907C.1.pep
VREREREFLLAWAHGRARAGCIILGSELGATYLASAGRRETGPFIKGVKSLGGVKKKNRARPVFFFKPPL

SEQ ID NO: 193338 - protein, 139 aa, Zea mays
  unsure (1)..(139): unsure at all Xaa locations
  Clone ID: MRT4577_107908C.1.pep
MCKYGTIPTSSXCEGGGPEPLGGASPIRYXSRAKARGASELETRRTWSELMDEHTVVLPPSLVDVYLRVRANLGHFDMNYAIVSLVVTFLXVLWHPESIMVYLISMLAXVALYFMRDKSLGLLGRGEVDGYALTVMEHT

SEQ ID NO: 193339 - protein, 234 aa, Zea mays
  Clone ID: MRT4577_107909C.1.pep
MENQGPKPIRCKAAVCRAAGEPLAIEEVVVDTPKAHEVRIRIICTSLCHSDVTFWRMKDLPDNIPRIFGHEAFGVVESVGEQVDEFAAGDAVVPTFLGQCSECVDCRSARSNMCSKYRFAVRPGMPRDGTTRFTDGQGRPLHHFFGVSSFAEYTVVDVNQVVKLNPAVPPALACLLSCGASTGVGAAWKQAKVEPGSSVAIFGLGAVGLAVAEGARICGASKIIGVDINPEKWS

SEQ ID NO: 193340 - protein, 62 aa, Zea mays
  Clone ID: MRT4577_10790C.1.pep
GANFFTGWRHRSNIFGRFEPTKPPKSFMGNFSGRVEITNFFTIIYGHIKGGLGSPNPTTNPR

SEQ ID NO: 193341 - protein, 41 aa, Zea mays
  Clone ID: MRT4577_107910C.1.pep
QGPPRRHDTVFANHCSNLPEKSLQIFKLLCSSLLTRGRDLV

SEQ ID NO: 193342 - protein, 51 aa, Zea mays
  Clone ID: MRT4577_107911C.1.pep
SRGHFHNHSIWKTPALLTDVARGKIAPLKNRFFLRRVWLVGIPQILAPTMG

SEQ ID NO: 193343 - protein, 69 aa, Zea mays
  unsure (1)..(69): unsure at all Xaa locations
  Clone ID: MRT4577_107912C.1.pep
WTRGTSEHTRGTRCIRARGRSTLRCSSSXXCSRGGRPTFTPPAGARAGRTYRRWLPLSSPYTVRQTPST

SEQ ID NO: 193344 - protein, 160 aa, Zea mays
  unsure (1)..(160): unsure at all Xaa locations
  Clone ID: MRT4577_107913C.1.pep
HCPRQLTPELPLVAQXAPVFDSAAVFNQEPIQXNLSDYIAEEIIILLFYHLDNTXFVCPTXITAYSDIYYESEITDTEDIGDDIDKVNSHLVWVHTDRKSCDLGXDLKSQLDSDVTKXITNAFGVLIPNQSIDAXRGLLIIDQDVAIKGSTINNLDIGIN

SEQ ID NO: 193345 - protein, 84 aa, Zea mays
  Clone ID: MRT4577_107914C.1.pep
LVFFHEALGFKPLDDCTLVKDTNPDLTAHGPLHQRQTLGDSGHKILGDLRGLLPGKTYLMDMDRGTVYWLRPQLQWYKILSLLN

SEQ ID NO: 193346 - protein, 54 aa, Zea mays
  Clone ID: MRT4577_107915C.1.pep
LPDHHSCRWDLQTKPKYVNAYQFQVKQCILIVQCCNSQKIYSLRSKIYVILVWS

SEQ ID NO: 193347 - protein, 30 aa, Zea mays
  Clone ID: MRT4577_107916C.1.pep
MDAMEVEKLILYMLKIDVKKLIYLKLKALV

SEQ ID NO: 193348 - protein, 83 aa, Zea mays
  Clone ID: MRT4577_107917C.1.pep
TTRPVWFFLLFGCYYWSCMAACMHVVGHRKEALLCCTGPLRPSSFFFLIYRHTITLHHPKKKKLLVHDHSTILFLPDNITLIY

SEQ ID NO: 193349 - protein, 87 aa, Zea mays
  Clone ID: MRT4577_107918C.1.pep
QKELPAHASSTKKEQNQNKPRLITKTKTELQPSDAKHQNYETGAWRRSATDGQTRATDRGQEPLGRGSAPRATGKDGQGPNTPAPEE

SEQ ID NO: 193350 - protein, 57 aa, Zea mays
  Clone ID: MRT4577_107919C.1.pep
YISNMGLSFEFCTSSQFFLSLALQSSQSNRVRNRNHVMRHQPFDQSIEWQICWNAST

SEQ ID NO: 193351 - protein, 109 aa, Zea mays
  Clone ID: MRT4577_10791C.1.pep
GVFQGYMIRVGPHPGGKCTGVGANFSALPRGTGFPGFRPPSFSPRGGPRGFSIDPPSPRLKWLGAPLFASLGPGSEGPGVVFFWVLARCPRAFGEERNFCKFSFFKSSR

SEQ ID NO: 193352 - protein, 89 aa, Zea mays
  Clone ID: MRT4577_107920C.1.pep
GRALAPMLASHHTLRREIDLIRCSHEERAVVSLSRMPSPTLMAMPRRRLGKLTATEELYIVLKSMIHRRQACTSCKCPYPSSDEGVHAC

SEQ ID NO: 193353 - protein, 210 aa, Zea mays
  Clone ID: MRT4577_107921C.1.pep
KIHIQPLIENIGNRLAGWKGNLLNRAGQLTLVSSVLSSMPTYQLSIFPLTAWSHKRIDKICRFFLWKGKTESNGGNCLVAWPLVSKPKDLDDLGVINLDKFGHALCLRWLWKECTREHHPWKGLEVPCNQVDRLLFSASTTVTIGDGNTAMFWHDSWLDGMAPRNIAPHLFELIPRKNKSVACCWASSVIAFSVMTVCNLPLWEYSGDSP

SEQ ID NO: 193354 - protein, 127 aa, Zea mays
  unsure (1)..(127): unsure at all Xaa locations
  Clone ID: MRT4577_107922C.1.pep
MALQVLLSERQVLGRPVQSGVSRSSARKAPFVVRDSSSPPAKQGADRQLWFACKQSLSYVDDTLPGDYGFYPLGLSDPEDTCVFIDTKWVRYAESINGRYSMLXXAMMSVVPEIFGKMGIISPESTL

SEQ ID NO: 193355 - protein, 64 aa, Zea mays
  Clone ID: MRT4577_107923C.1.pep
WAQGQGYPPRGSFRFRAFSTFPPGNPRRMFTKLLPFGQKRGYPLGPDSVSSWDLLFFFFSFSRG

SEQ ID NO: 193356 - protein, 46 aa, Zea mays
  Clone ID: MRT4577_107924C.1.pep
RYEGASFFSGPHTLNAYILEPQNPATNMVSNKEVPTYFQPPDISDM

SEQ ID NO: 193357 - protein, 211 aa, Zea mays
  unsure (1)..(211): unsure at all Xaa locations
  Clone ID: MRT4577_107925C.1.pep
MPSAIPDNGTRQYNSLCDRTNDHSESTLQSDSIPPHPLGLKPLGNQYLFTGRNARRSIGAWRLLPDEVVSLVFEQFDAEALLKLGHTCKFFYAFCHSDEFWKPIFLQSXKGXKDIRWQGSWRSTVLGLPSDQQINIDCSNVFSDVLHRPFACSHVILSQFTSNIPKANQIRRLENLTYDQYAEKWTEQPFILTKCIQEWPVFSEWTIDSLL

SEQ ID NO: 193358 - protein, 80 aa, Zea mays
  Clone ID: MRT4577_107926C.1.pep
ALMQWITGKSESTQQAFIRGSVSTHARGRELTRRWGQVEARRGHSVEWRPRRTTKQHRHGQAPHLVALVEVATEQYVNLS

SEQ ID NO: 193359 - protein, 74 aa, Zea mays
  Clone ID: MRT4577_107927C.1.pep
GFTPLPPPLSPIPRFYPHPSRGCYPTLVGALLPLILKFLSLTALRMPFSLQLQKEVLFKLNPQLTLSLLSKFFF

SEQ ID NO: 193360 - protein, 63 aa, Zea mays
  unsure (1)..(63): unsure at all Xaa locations
  Clone ID: MRT4577_107928C.1.pep
GPVSCTAHLTGSXRCHGDTVNPTERIVRXLHPLMETRGLPTGLVLGSCTVLEALVQGALGPLL

SEQ ID NO: 193361 - protein, 61 aa, Zea mays
  Clone ID: MRT4577_107929C.1.pep
RTTFRRSGGGNGCIFLSTTTMQQYSSQGNQIQLTILHPQEPSYKNGAIAGDSISKDASSGS

SEQ ID NO: 193362 - protein, 46 aa, Zea mays
  Clone ID: MRT4577_10792C.1.pep
FCLSNPVNFVLLNSLIGTKLSLVLFMHSLLCKHITACPCRFRNGYM

SEQ ID NO: 193363 - protein, 85 aa, Zea mays
  unsure (1)..(85): unsure at all Xaa locations
  Clone ID: MRT4577_107930C.1.pep
LKDGYRSSSGQAVNXCIDSGSRHFLLIHGAVXIRXKIMLDWNPNGDRGPITAVSNLVTMHTPREDDEPLTSVLAPAEVEGTNCSP

SEQ ID NO: 193364 - protein, 97 aa, Zea mays
  Clone ID: MRT4577_107931C.1.pep
PFWHKPPYAFKKRDFVRQGHPPAMALMQFFARFFFLPVILPRAFKPSMVVVLNKPVWRPCPFWCYNSFYKPPVFCSPCYLEPPKSTKNFNVPELFFG

SEQ ID NO: 193365 - protein, 82 aa, Zea mays
  Clone ID: MRT4577_107932C.1.pep
AGPRLLRRGCWASVMPLVLGLSLLSWFLGPCGLVLFRPARVPLLRLRPGWALRPLFFPFPVFAGRPRYLIWGGPCVPVRSRP

SEQ ID NO: 193366 - protein, 86 aa, Zea mays
  unsure (1)..(86): unsure at all Xaa locations
  Clone ID: MRT4577_107933C.1.pep
MQVSIVLPLEGKAXMSPERGGMGGYGSERMRINCCIIRRSKALRRMCYRARGAESSTQRVLNIICGPXTLLTDEHTFXTNSAEPNE

SEQ ID NO: 193367 - protein, 211 aa, Zea mays
  Clone ID: MRT4577_107934C.1.pep
NTGPVGGKFGTRIVLYDVDKVSQNNQRLIKWIIDSSSDACKIIMTCQDESNLLDSIKSRCKIISIGVPSTREVVDILTYTSRKESFDLPTSFATTIANQSRKNLREAILALEACKANNYPFIDGQAIPLGWEEVLEELAVEILDDPAPKRLFLARGKLQKLLVEFVPPKLILQKLVELFLKGIQTGVKREVYYWHAYYDKRLPVGARALLK

SEQ ID NO: 193368 - protein, 141 aa, Zea mays
  unsure (1)..(141): unsure at all Xaa locations
  Clone ID: MRT4577_107937C.1.pep
MARTKQTARKGTGGKAPRKQLATKAARKSAPATGGVKKPHRFRPGTVALREIRKYQKSTELLIRKLPFQRLVREIAQDFKXDLRFQSSAXVSALQEXXEAYLVXXLXEDTNLCAIHXKRVTIIXKDIQLARRSRARGLDMS

SEQ ID NO: 193369 - protein, 137 aa, Zea mays
  unsure (1)..(137): unsure at all Xaa locations
  Clone ID: MRT4577_107938C.1.pep
SLYPESGYLIKDHNKQEVNIEKITRPDKRGQPRRSDQHAVDPLAQESSIMSLTLDDLHNSLCEPGRNFRSMNMDDFMAKIRNADELKAVTAGWNTQGADPEIVPVAMTTGTRENGXEXGKGLVRHGSFALPLPLSQK

SEQ ID NO: 193370 - protein, 65 aa, Zea mays
  Clone ID: MRT4577_107939C.1.pep
NVSPQTHKSPAEQVFWKGPHGRLSFVCCFGGAPGSRRVFQGRGKAHVFPHKFLKGPCCKPHSYVL

SEQ ID NO: 193371 - protein, 137 aa, Zea mays
  unsure (1)..(137): unsure at all Xaa locations
  Clone ID: MRT4577_10793C.1.pep
MLGILGPPTEATVPKIQKGSAATPKRRRMANVLDVVLETTKTLSPAPTRKVAEADTKQAEVEAASIQAETKAGPSVPTEMEHVVPKEKSTKRTATEKIEAPGPEASNKSMDYIIRHASGKYYPQKXMLEAQHYAPKF

SEQ ID NO: 193372 - protein, 124 aa, Zea mays
  Clone ID: MRT4577_107940C.1.pep
LRDSLLPALQPGRLEIGVEARDDRRTQKKPRGPTATACACTSNPMRSVSVSALTALHLHDWMKGCAWSGQRRPSRIPFQPYPCVGLGQRAHGHCTTGSNVEVWPHTHLPLPLIHTGLLGEFLIL

SEQ ID NO: 193373 - protein, 56 aa, Zea mays
  Clone ID: MRT4577_107941C.1.pep
VKGPCENARVLELPNGTHLRAMTYGDLSAAARPRTYNMGYKLLSGDPPPKIKPLLI

SEQ ID NO: 193374 - protein, 318 aa, Zea mays
  unsure (1)..(318): unsure at all Xaa locations
  Clone ID: MRT4577_107942C.1.pep
RVDPRVRPRVRGRVGHSEWRAAKKANGMKVVSLIREKTGYIVSPDAMFDVQVKRIHEYKRQLLNILGIVYRYKKMKEMSTEERAKSFVPRVCIFGGKAFATYIQAKRIVKFITDVEASGTSNXEVCIPAVLICCDNSLAGISASATXHYISTAGMEASGTSNMKFAMNGCILIGTLDGANVEIREEVGEENFFLFGAEAHEIAGLRKERAEGKFVPDPRFEEVKEFVRSGVFGTYSYDELMGSLEGNEGYGRADYFLVGKDFPSYIECQEKVDEAYRDQKLWTRMSILNTAGSSKFSSDRTIHEYAKDIWDISPAILP

SEQ ID NO: 193375 - protein, 602 aa, Zea mays
  Clone ID: MRT4577_107943C.1.pep
ESATRPPRVRMNDTHPTLCIPELMRILMDVKGLSWSEAWSITERTVAYTNHTVLPEALEKWSLDIMQKLLPRHVEIIETIDEELINNIVSKYGTTDTELLKKKLKEMRILDNVDLPASISQLFVKPKDKKESPAKSKQKLLVKSLETIVDVEEKTELEEEAEVLSEIEEEKLESEEVEAEEESSEDELDPFVKSDPKLPRVVRMANLCVVGGHSVNGVAEIHSEIVKQDVFNSFYEMWPTKFQNKTNGVTPRRWIRFCNPALSALISKWIGSDDWVLNTDKLAELKKFADNEDLHSEWRAAKKANKMKVVSLIREKTGYIVSPDAMFDVQVKRIHEYKRQLLNILGIVYRYKKMKEMSTEERAKSFVPRVCIFGGKAFATYIQAKRIVKFITDVAATVNHDSDIGDLLKVVFVPDYNVSVAEALIPASELSQHISTAGMEASGTSNMKFAMNGCILIGTLDGANVEIREEVGEENFFLFGAEAHEIAGLRKERAEGKFVPDPRFEEVKEFVRSGVFGTYSYDELMGSLEGNEGYGRADYFLVGKDFPSYIECQEKVDEAYRDQKLWTRMSILNTAGSSKFSSDRTIHEYAKDIWDISPAILP

SEQ ID NO: 193376 - protein, 588 aa, Zea mays
  unsure (1)..(588): unsure at all Xaa locations
  Clone ID: MRT4577_107944C.1.pep
MCTPMSYTGSAPEPSDPNRKPAKKQTRQWAAWXHQEEEIFFNALRQVGKXHYYYRLVRRMKKLLGPRFSLDAKNSKDTIAAMLRWWSLLEKFSCSASKLHLKPRRFKTFVEALGKQLLKDRNKSRRKHSRVDMCISSPSPVISKAPGDETPPVKFLSVDSQNGSRVASPKGQFSSGXEPISNKSGTTKGDLSATRTVKQKRKAGGAVASAAYKXERAAMAGVSLVADAAEELERNTINPGMLCNVDARTLTSLSXKDFLLVMALAQIXMKETDSQAPVKLKLQLFPINEATRKALEKDDHNPHLELTLSSRKKISSVLEHLNRKWGNSNIASGELILFPYCANQEDLATYQRWTTRDTVAVADVFLSVNSPSVFRLRYGWVSLVELGAGAGRHATGSFVFPSVTIVSMMIEILPLSPPMIVVSMLTTTGPSTPSCGSMGVPPMSLSSFPISSPPPPPTNWVADSDVSFHTIRDPRAVSLPHPPSPIFPFFFTIGNGPTMPVTSVGDMILLGPLYLNNILVALNIFQNLLSASSSSALFPEPSSVHSALADPNWSVLRRSTWPYRRTTSEIWCHDSLAPMWSPEMDLQA

SEQ ID NO: 193377 - protein, 662 aa, Zea mays
  unsure (1)..(662): unsure at all Xaa locations
  Clone ID: MRT4577_107945C.1.pep
KICHGLAHLNAKKICHILYPGDESLEGKVLRLKQQYTLCSASLQDIIARFESRAGESLNWEDFPSKVAVQMNDTHPTLCIPELMRILMDVKGLSWSEAWSITERTVAYTNHTVLPEALEKWSLDIMQKLLPRHVEIIETIDEELINNIVSKYGTTDTELLKKKLKEMRILDNVDLPASISQLFVKPKDKKESPAKSKQKLLVKSLETIVEVEEKTELEEEAEVLSEIEEEKLESEEVEAEEESSEDELDPFVKSDPKLPRVVRMANLCVVGGHSVNGVAEIHSEIVKQDVFNSFYEMWPTKFQNKTNGVTPRRWIRFCNPALSALISKWIGSDDWVLNTDKLAELKKFADNEDLHSEWRAAKKANKMKVVSLIREKTGYIVSPDAMFDVQVKRIHEYKRQLLNILGIVYRYKKMKEMSTEERAKSFVPRVCIFGGKAFATYIQAKRIVKFITDVAATVNHDSDIGDLLKVVFVPDYNVSVAEALIPASELSQHISTAGMEASGTSNMKFAMNGCILXDVAATVNHDSDXEVGEENFFLLDAEAREVAGLRKERAEGKFVPDPRFEEVKEFVRSGVFGTYSYDELMGSLEGNEGYGRADYFLVGKDFPSYIECQEKVDEAYRDQKLWTRMSILNTAGSSKFSSDRTIHEYAKDIWDISPAILP

SEQ ID NO: 193378 - protein, 100 aa, Zea mays
  unsure (1)..(100): unsure at all Xaa locations
  Clone ID: MRT4577_107946C.1.pep
MTSKRTARVKHLLMDPANSEYIFPLNLFRGAQGYFTHVRTLHLGYDCLDTTXTEFMNYANLKKLTLHKISFLGDLQCLMLPECNSSECLSISIWSLPGLS

SEQ ID NO: 193379 - protein, 59 aa, Zea mays
  Clone ID: MRT4577_107947C.1.pep
TFTFKNQNSYLVFLNIFFNTFHQHIHTYPKTTLNQIHQPPTQLSKHSSTYYLSLLPIHD

SEQ ID NO: 193380 - protein, 199 aa, Zea mays
  Clone ID: MRT4577_107948C.1.pep
MCTRMSFTGSAPESSDPNKQPAKKQTRQWAAWTHQEEENFFNALRQVGKNFDKITHRVQSKNKDQVRHYYYRLVRRMKKLLGPRFSLDAKNSKDTIAAMLRWWSLLEKFSCSASKLHLKPRRFKTFVEALGKQLLKDRNKSRKKHSRVDMCISSPSPVISKAPGDETPPVKLLSIDSQNGSRVASPKGTIFQADCRTNF

SEQ ID NO: 193381 - protein, 70 aa, Zea mays
  unsure (1)..(70): unsure at all Xaa locations
  Clone ID: MRT4577_107949C.1.pep
SLANDHGNRTTPSYVAFTDSERLIGDAVKNQVAMNPXNTVCDAKRLIGMRFSDASVQSDIKCAPSRSFLG

SEQ ID NO: 193382 - protein, 116 aa, Zea mays
  Clone ID: MRT4577_10794C.1.pep
ARARIYNDANINAAFAASLRAGCPASGGGGANAPLDASTPNAFDNAYYGDLGAQQGLLHSDQELFNGGSTDALVRSYAASSARFSSDFAAAMVRMGAIGVLTGSSGQVRRNCRKVN

SEQ ID NO: 193383 - protein, 174 aa, Zea mays
  unsure (1)..(174): unsure at all Xaa locations
  Clone ID: MRT4577_107950C.1.pep
MCTPMSYTGSAPEPSDPNRKPAKKQTRQWAAWTHQEEEIFFNALRQVGKNFDKITXRVQSKNKDQVRHYYYRLVRRMKKLLGPRFSLDAKNSKDTIAAMLRWWSLLEKFSCTASKLHLKPRRFKTFVEALGKQLLKDRNKSRRKRSRVDMCLPSSPIISAPGNENPVKFLSVDA

SEQ ID NO: 193384 - protein, 100 aa, Zea mays
  Clone ID: MRT4577_107951C.1.pep
KAKSTPSRQGRTGGPGRGSLKNPNTGGMAKTKTRALYVKKNSRARTPNRPRAPSTNRNWGTERTTKTAGRGKGKESQREGRAKKTKTKGGGGHLSPTRGG

SEQ ID NO: 193385 - protein, 79 aa, Zea mays
  Clone ID: MRT4577_107952C.1.pep
GFSGHEHVKAREVDLNYGPPWQAEGLGAEGDNSWAPQNRTPPFSISCLVFVVICFCLSFFLFLFFFCFFFVFFVFLFFR

SEQ ID NO: 193386 - protein, 77 aa, Zea mays
  Clone ID: MRT4577_107953C.1.pep
DARGKDGDVQKSTKDDRHECMSKKERGLQLIKTPPRRWAWFGCVLKEKETESRPCLLAVWFILSPTALFISMTLLPG

SEQ ID NO: 193387 - protein, 56 aa, Zea mays
  Clone ID: MRT4577_107954C.1.pep
FPGWPRSGPWPSWWPCPARGSAYRCSASSRGFSPCPGLLLASSRFCWGHRLCVWWW

SEQ ID NO: 193388 - protein, 124 aa, Zea mays
  unsure (1)..(124): unsure at all Xaa locations
  Clone ID: MRT4577_107955C.1.pep
MTRTTNTGRKSTXGKCPTTYLDTKAATNSAPTTGGWNKSHRXRPATAALRXIRNHPKTTELMISNVTFQRVVXRKLXQYFKTDSRFQSHAWFGLXKLLQAYLVALFEXDTSTRCAFHVNIETIL

SEQ ID NO: 193389 - protein, 102 aa, Zea mays
  Clone ID: MRT4577_107956C.1.pep
MEGDTTGADGGGGGGSGERSSFVIGLIENRAKEVSHALKPLRIFRLLDQSVRILLISLVTPLSSARRPPFSSFACGSRRSNCVSCYFVGLLASIGSLMQWLR

SEQ ID NO: 193390 - protein, 66 aa, Zea mays
  unsure (1)..(66): unsure at all Xaa locations
  Clone ID: MRT4577_107957C.1.pep
SRLSSGGPTRRRSPTXAXAREEPIFSLNLCFIFHRRSLRRGSRSCGFFFFISTTISPRDRASAHHN

SEQ ID NO: 193391 - protein, 101 aa, Zea mays
  Clone ID: MRT4577_107958C.1.pep
LTWARRHLQTDRIKVAARMTCTVGVSSLLIRGTPLIVMTTPCRMAPTMGLCTGARRREDERATCDQNCLLSLSGDLPAFPLAQRLAADEPSYPPVVRYALY

SEQ ID NO: 193392 - protein, 298 aa, Zea mays
  Clone ID: MRT4577_107959C.1.pep
MEHTYQYAWVIPLLPLPVIMSMGFGLFLIPTATKNLRRIWAFPSILLLSIAMVFSLHLSIQQINGSSIYQYLWSWTINNDFSLEFGYLVDPLTSIMLILITTVGILVLIYSDDYMSHDEGYLRFFVYISFFNTSMLGLVTSSNLIQIYFFWELVGMCSYLLIGFWFTRPIAASACQKAFVTNRVGDFGLLLGILGFFWITGSLEFRDLFKIANNWIPNNGINSLLTTLCAFLLFLGAVAKSAQFPLHVWLPDAMEGPTPISALIHAATMVAAGIFLLARLLPLFISLPWIMSFISLIG

SEQ ID NO: 193393 - protein, 125 aa, Zea mays
  Clone ID: MRT4577_10795C.1.pep
KTFKPGGFYNSSPKPQWTSRGKNKHNLPNFLREVGNIFFSTEKFFFTRKLGNFLKTALLFFSLTNPLEQKSFFPHLNAPALVFFWPGVFLMAKKGDPPGIPWKSKRPPFCLKGILPPKRRAIPGV

SEQ ID NO: 193394 - protein, 75 aa, Zea mays
  Clone ID: MRT4577_107960C.1.pep
MFMFFQVIKKGELLVKTIGFHRWTEIEEAGGGELVTQDSKSSRGGGVFKNGWLPVPGKAHRCPATTDQAWMPSFF

SEQ ID NO: 193395 - protein, 62 aa, Zea mays
  Clone ID: MRT4577_107961C.1.pep
GPQIFLVLGVPILWGVLPPLTQKGFLPSQILVRTVRFDFGVQFSWVLFGGEVMSIFTPPRLK

SEQ ID NO: 193396 - protein, 46 aa, Zea mays
  Clone ID: MRT4577_107962C.1.pep
SYIKMCWTRAMGGVFLPNLRMGLFVYFFGVKLVVYVEDGGVFVSRG

SEQ ID NO: 193397 - protein, 295 aa, Zea mays
  Clone ID: MRT4577_107963C.1.pep
MFRRKHASHSNSSDAEQQEAKINELKSALGPLSAHGEKYCSDTCLRRYLEARNWNVTKSRKMLEESLKWRATYKPEDIRWPDVSVEAETGKMYKANFRDREGRTVIIMRPTKENSTSHDGQIRFLVYVLENAILDQREGQEKMVWLIDFTGWTMAHATPIKTARECTSILQNHYPERLAIAFLLNPPKVFEAFYRAVKYFLDPRSIEKLNFVYLKDEESMKVLYKCIDPVVLPVEFGGKNSVVYNHEDYSKLMLQEDIETSSFWEDDAKTVNHAINGTLVPDVASQLSRIAAKAS

SEQ ID NO: 193398 - protein, 38 aa, Zea mays
  Clone ID: MRT4577_107964C.1.pep
ELSIHKVELIKSGPYTIKSPKAPYIKITRTTTCLLNIL

SEQ ID NO: 193399 - protein, 120 aa, Zea mays
  Clone ID: MRT4577_107965C.1.pep
LGALLSTLLSPRFARFFTAFGPPGFPVGNRPVCAPQFLPFSSPIRLPGLFVLGFRLRRGVALCPVSPFPQGPSLSVIPPGSQAPPHRSRGYPRGPRFGPPGFSPVSGCCFPLFFVILGLE

SEQ ID NO: 193400 - protein, 211 aa, Zea mays
  unsure (1)..(211): unsure at all Xaa locations
  Clone ID: MRT4577_107966C.1.pep
MACRPPCPCGCFCFYMVFFLGLLLVEAVHGTGRSEVAAAAPTPSLVPAEASVLRRIAARLGVSSWDFTAGAGPCDHGDSGVHCDCSFSNGTVCHVTEIFLKGQNFSGELPPDFADLHYFHLIXHQWARMKLQGLSLMANRLSGPFPMVLTKITTLTNLSIEGNEFYGPIPPGIGYLIRMEKLILSTNEVTGPLPAALSLFSNLTDLRISST

SEQ ID NO: 193401 - protein, 53 aa, Zea mays
  Clone ID: MRT4577_107967C.1.pep
VSGSYNACRMILAPQVCKSAIPSNSQSSFRVDFLSCPIRFLPIGLGLRIISVS

SEQ ID NO: 193402 - protein, 302 aa, Zea mays
  Clone ID: MRT4577_107968C.1.pep
MACRPPCPCGCFCFYMVFFLGLLLVEAVHGTGRSEVAAAAPTPSLVPAEASVLRRIAARLGVSSWDFTAGAGPCDHGDSGVHCDCSFSNGTVCHVTEIFLKGQNFSGELPPDFADLPYLLQLDLSRSLFHGGVPHQWARMKLQGLSLMANRLSGPFPMVLTKITTLTNLSIEGNEFYGPIPPEIGYLIRMEKLILSTNEFTGPLPAALSLFSNLTDLRISSTNFSGRIPDFWGNLKRLDKLQIEGSFLEGPIPSSLSELKNLSDLRISDLRGSGSSFPDLSGMTYMNKLVLRNCSISGSIPP

SEQ ID NO: 193403 - protein, 38 aa, Zea mays
  Clone ID: MRT4577_107969C.1.pep
KQNSNVRQIIICQRPGAPQPKDGMVSCGPWIHPNMRKR

SEQ ID NO: 193404 - protein, 40 aa, Zea mays
  Clone ID: MRT4577_10796C.1.pep
VSPIDGYPTTSTPSLQFYVFSPPIIPSRFILLNSTLPYSL

SEQ ID NO: 193405 - protein, 157 aa, Zea mays
  Clone ID: MRT4577_107970C.1.pep
EARNSARDLINSNLITTATKHTRAWEPTRGLRGFIHRAHVITKRELPAGRSQRTGERTKSETMGRDPIREVAPTGSDETRNTVLETDGKDKRALKRADRKLGAHKTAKKKRAETAGLPRKMRSEWTHTVQKKWRCIEAHGDGCHETCSKRMTSVHVK

SEQ ID NO: 193406 - protein, 72 aa, Zea mays
  Clone ID: MRT4577_107971C.1.pep
RQVPPSGGAITNNTIRIHRQFDHKDARMRQALTDASWTIITIRDTTTLSCQHNTSFRSVRWGHQLKLWLNAR

SEQ ID NO: 193407 - protein, 72 aa, Zea mays
  Clone ID: MRT4577_107972C.1.pep
VHVLQFCSRADLFYIGRGHDDIIFCPNIKNILTPYVLSVHFPGLQYKACFHRNTASHIKTAKEPASPTCTCL

SEQ ID NO: 193408 - protein, 116 aa, Zea mays
  Clone ID: MRT4577_107973C.1.pep
ASCRYVSQSSAARWGESNRQACGYPWSRAPYRRSAQPKDSVKLVVIVPVASQAATVGISSPLVSCMEILGRVGDLWGSVRHTHPVSLFKCVSDSSRIWQITMITRHISQILRHHES

SEQ ID NO: 193409 - protein, 79 aa, Zea mays
  Clone ID: MRT4577_107974C.1.pep
GRVVFFTLGQPEETPHQRAKKAETGTLPHPPGATETKPLFYRGLPPGGRNKTRTTPAPYRPLKEGARPELYNTPPFKIP

SEQ ID NO: 193410 - protein, 69 aa, Zea mays
  Clone ID: MRT4577_107975C.1.pep
PRNPVYMGTTGIMAYHPGVPDLKILSNLNTATKLSCVQQNFPRTNAVCQVPAMDSKSSQLASNRPSLGS

SEQ ID NO: 193411 - protein, 274 aa, Zea mays
  Clone ID: MRT4577_107977C.1.pep
AHAAFHRVRRAYRTRCRLRVVSRVRQRDEGELNRELRDSTHRNNGTLRARRKDKQDANLEESSQGASTNAKGLKRNRRRDYPGRAGNYARSRQTSLPARRDDGERRQPKGAREIQDGLTGHREPGVRRAPWINREMSAELARDAGKTGRDEQRREAGGRSLRLAGSAERALETQSATAMGTEGEQRLDAEECAGHSSTARTPGHARTGELSREEHAGTWARGVENWREHGWAGRLGVERQGDRAGRTRAGRRAEGAGASAPASRNWGAVQEKLG

SEQ ID NO: 193412 - protein, 101 aa, Zea mays
  Clone ID: MRT4577_107978C.1.pep
VNRLQICPRPRLTGGGHQIQTVSTASSKEFPMGLCRSGRGLEGCGCRFCVSLRDDRTGAARSTRGFVVWGCSPHIHKHINKQIGKHINKHINKHINQPKGP

SEQ ID NO: 193413 - protein, 191 aa, Zea mays
  Clone ID: MRT4577_107979C.1.pep
MVHGGFLSLYTSSNASSKYNKLSARDQVLEEVRRLMELYNYKDEETSISVTGHSLGASLATLNAVDMVANGVNAPGAATATGSSSSPAQPQPQPQPQRAGCPVTAIVFASPRVGGPFFKAAFDSFADLRALHVRNKGDVVPLYPPLGYVDVAVPLRIHTARSPWLRQPGTPQTLHNLECYLHGVAGEQGAA

SEQ ID NO: 193414 - protein, 112 aa, Zea mays
  Clone ID: MRT4577_10797C.1.pep
MATQDDNQLRTSDQHWRPPSVNSSTTTFVMPPKKTTVPWTILAPLDTNQDRILLREARSQKRKASSPTPQDEELDQEISNLAAIHEQVEKRREKMLHLSELQKKIDEAAEEM

SEQ ID NO: 193415 - protein, 94 aa, Zea mays
  Clone ID: MRT4577_107980C.1.pep
MFLRIKAVVDRFVKELQEALDADIQDRVMKEREMQSYIEIARQEARLKMEKENLEKEKSVLMGTASSQDNQDGALEITVSGEKYRCLRFSKAKK

SEQ ID NO: 193416 - protein, 59 aa, Zea mays
  Clone ID: MRT4577_107981C.1.pep
MESDAEEAAAAVDPGAGRLKGSPELTVDADMREVAKRAAWSVSSFKDGNGVASLRDDNL

SEQ ID NO: 193417 - protein, 117 aa, Zea mays
  Clone ID: MRT4577_107982C.1.pep
MSVRIKAVVDRFVKELQEALDADIQDRVMKEREMQSYIEEREREVAEREAAWKAELSRREAEIARQEARLKMEKENLEKEKSVLMGTASSQDNQDGALEITVSGEKYRCLRFSKAKK

SEQ ID NO: 193418 - protein, 172 aa, Zea mays
  Clone ID: MRT4577_107983C.1.pep
MPNPKVFFDMTIGGQPAGRIVMELYADVTPSTAENFRALCTGEKGAGRSGKPLHYKGSSFHRVIPNFMCQGGDFTAGNGTGGESIYGAKFADENFVKKHTGPGILSMANAGPGTNGSQFFICTTKTEWLDGKHVVFGQVVEGMDVVKEIEKVGSSSGRTAKPVVVADCGQLS

SEQ ID NO: 193419 - protein, 113 aa, Zea mays
  unsure (1)..(113): unsure at all Xaa locations
  Clone ID: MRT4577_107984C.1.pep
RRGGKRDEFRHIEQAGSKSXNACWELYCXRDGIQPDGXVSGDKTAGHHDDAFSTFFRQTGVGKHVPRAIFDDLESTGIDEVRTGTYRQLFHPEQLISEKEDADNNXARGHYPI

SEQ ID NO: 193420 - protein, 71 aa, Zea mays
  Clone ID: MRT4577_107985C.1.pep
LVQEVFLGVRVGLALFLQHDPAGLPTGARSEFHQHALARRLHCHQVLARSASNATWLLSRKRGKPRKWIIG

SEQ ID NO: 193421 - protein, 338 aa, Zea mays
  Clone ID: MRT4577_107986C.1.pep
MVELTSLSPGPPRPSRLTPRRRPPPPTPHVHTSSRRRGRILGAATATPGADDYHSTIRSLNSRGRHVPRKSLGQNYTLNSKVNEELVAAAGVEEGDVVLEIGPGTGSLTSALLQAGATVFAVEKDKHMATLVKDRFGSTEQLKVIEEDITKFHIRSHFLPFMKEKYGATKKLAKVASNLPFNVSTEVVKLLLPMGDVFSVVVLMLQDETAVRLADASIQSPEYRSINVFVDFYSEPEYKFRVDRENFFPRPKVDGAVISFKLKNAEEYPPVSSPKSFFSMVNSAFMGKRKMLRKSLQHICSSSEIEAALDNIGLPVTARPSDLILDDFVRLHNHLAKV

SEQ ID NO: 193422 - protein, 86 aa, Zea mays
  Clone ID: MRT4577_107987C.1.pep
HQGFILFSLRSQYTNPVFIKISISGTRTIHYYLFISLEYPLLIGLSTYINNLHWQKYSYSLRLHITVHSTIFSPSIIHTISPMRVS

SEQ ID NO: 193423 - protein, 468 aa, Zea mays
  Clone ID: MRT4577_107988C.1.pep
MASYDKAFESYKKALTTAASVAASMMLVRSVVNELVPPELRDLVFSGFGYLRSRTSSDHTIIVEKKNDGFANNYVYCAVKTYLATRMNTDIQQRLRVSSMDEDDKMMVSMDEGDEMLDVYQGTEFKWCLVCKDNSNDSLNSSQNESHFFELTFNKKHKDKALRSYLPFILATAKAIKAQERTLMIHMTEYGNWSPIELHHPSTFDTLAMDKKLKQSIIDDLDRFMKRKDYYRKIGKAWKRGYLLYGPPGTGKSSLIAAMANHLRFDIYDLELTAVTSNSDLRRLLVNMDNRSILVIEDIDCTIELKQRQEAEGHDESDSTEQNKGEGKVTLSGLLNFVDGLWSTSGEERIIVFTTNYKERLDPALLRPGRMDMHIHMGYCTPESFQILANNYHSIEYHDTYPEIEKLIKEVTVTPAEVAEVLMRNDDTDVVLHDLVDFLKSKIKDANEIKTEHKEADNQLDEKKNDKK

SEQ ID NO: 193424 - protein, 164 aa, Zea mays
  unsure (1)..(164): unsure at all Xaa locations
  Clone ID: MRT4577_107989C.1.pep
MTRRPASSAPSAAPLLLLLLLLLLLHCQCHRAGAATDAERRALLDFKAAVTADPGGVLASWTPTGDPCGFVGITCDASTGAVKRLRAHGRGGWAGALPPSLARLPALESVSLFGNPSTGXVPPSLRLLAPTLRKLNLSRNALGXGKIPPILGDFPRLRLLDLSH

SEQ ID NO: 193425 - protein, 73 aa, Zea mays
  Clone ID: MRT4577_10798C.1.pep
FSSSQAPTVHYASYNDSITYHPCGRRGDLISPLESESFLGGTQTQGRPCEAGGETTHGAPCSVHSMWRGWPTG

SEQ ID NO: 193426 - protein, 68 aa, Zea mays
  Clone ID: MRT4577_107990C.1.pep
SNVKGAFFRTPVGTRKMANYACSLRNHRKLLYMLEPILTCKSIVSLMYTGERLIVPSISSFPTNVPSL

SEQ ID NO: 193427 - protein, 58 aa, Zea mays
  Clone ID: MRT4577_107991C.1.pep
LLQWRCDVRIFLLDDCGLLLLADVCVNCACVILPAYLSVVRLVVLTYFANRRVSYYLD

SEQ ID NO: 193428 - protein, 134 aa, Zea mays
  unsure (1)..(134): unsure at all Xaa locations
  Clone ID: MRT4577_107992C.1.pep
MKASSATAVAPFQGLKSAASLPVAXRRSTRSLXXXSXGGRIRCMXGXPAYGXNKKSETLSYXPPLSTDXLXKQXDYLXRNGWIXCLESSKLGFVYXENXTXPCYYDGRXXTMLKLXXXGCTDATQVYKELQEXI

SEQ ID NO: 193429 - protein, 110 aa, Zea mays
  Clone ID: MRT4577_107993C.1.pep
ADAWARAPPSFCLSLSSSSCRVVLALFLFTVLSCRHVRLYRIHRLDVYAQIEFDGVSNKLGLITPRWMLPYGCGLAEMTITVSTCIKGKTPTWEDRSCPSTRLCLKLTCG

SEQ ID NO: 193430 - protein, 336 aa, Zea mays
  Clone ID: MRT4577_107994C.1.pep
MATNKPFAVNKLLPVVALLLLLAACSSPVVVAQLVAGYYSKTCPDVEEIVRDEMEKIISAAPSLAGPLLRLHFHDCFVRGCDASVLLNSTEGNLAERDAKPNKSLWGFGSVERVKARLEAACPGTVSCADVLTLMARDAVVLAKGPFWPVALGRRDGRASSATEAADHLPPAYGDVPLLTRIFSSKGLAVKDLAVLSGAHTLGTAHCPSYADRFYNFSSAYDSDPSLDTAYADRLRSRCKSVHHDDKALLSEMDPGSYKTFDTSYYRHVAKRRGLFQSDAALLADATTREYVHRIATGKFDDVFFKDFAESMTKMANVAVLTGAEGEIRKKCYIVN

SEQ ID NO: 193431 - protein, 56 aa, Zea mays
  Clone ID: MRT4577_107995C.1.pep
FLPHPVYKDFYGENQWQLPRPHSMHRLPPHYPIWKLQQNIIFRIAIDLPTQISPLW

SEQ ID NO: 193432 - protein, 95 aa, Zea mays
  Clone ID: MRT4577_107996C.1.pep
AGVGLHQWIGSPGRPREGEARWGVGRIPIPRRFAESVLCRGPENGLWGPRLDGERLMGSDPTPSTPPVSPAPILQLSWEHHSPALYIGCGPWTVA

SEQ ID NO: 193433 - protein, 56 aa, Zea mays
  Clone ID: MRT4577_107997C.1.pep
NDNISRLDINIKCNANCSILYTDLLDKVMINEFGVVPGLITTADAITITNKTIDMP

SEQ ID NO: 193434 - protein, 61 aa, Zea mays
  Clone ID: MRT4577_107998C.1.pep
TRRFRSRPDDTCCSPFLVGLGQPPRSPFLFVKLFGPPGPGPVNVVHCACLGFPFSRFLSSN

SEQ ID NO: 193435 - protein, 106 aa, Zea mays
  unsure (1)..(106): unsure at all Xaa locations
  Clone ID: MRT4577_107999C.1.pep
PTTPPQRLFIPPSTSTSTHTPRPACSFPQHSGLPAPLPRGSALPTRSLFCSDLSPPSVHARPTQAPIAAVTIVIVPIKKPSSTLFFSKKTTQHRXPXXEKLTTRAA

SEQ ID NO: 193436 - protein, 215 aa, Zea mays
  unsure (1)..(215): unsure at all Xaa locations
  Clone ID: MRT4577_10799C.1.pep
RFLKSASMAKIPLPFDRSTIRSILIQTVSASNCTQGSLRYWLSAGPGDFQLSSSGCTNPALYAVVIESPSLQVPSCCRVVTSSIPIKSPQFAVMKSVNYLPNALTKVEGEENGAFTGIWLDDEGFVAKGSNMNVGFVTKNKELLMPRFDKILSGCTARRVLTLAEHLVAHGKLSRVISRNVSVEEGKMADXIMLIGSGILVKPVVQPDDKIIGPG

SEQ ID NO: 193437 - protein, 109 aa, Zea mays
  Clone ID: MRT4577_1079C.1.pep
MAEAQGKAKQMAEAPSKIESMRKWVVEHKLRAVGCLWLGGISSSIAYNWSRPNMKPSVKIIHARLHAQALTLAALVGSACVEYYDQKYGSSGPKVDKYTSQYLAHSHKD

SEQ ID NO: 193438 - protein, 579 aa, Zea mays
  Clone ID: MRT4577_107C.1.pep
AVITGLTGAGDLDTASELLDEMPVKDAVACNAVLHRYVRCGRVDEAFALLKRIGSQCDSDGILPWNDPFVLTTVVGACADRTQYEIGRQAHTRLVVANTGIDSILGCALIDMYCKCGDLDSAHQVLDRLEHVDEISLSALVYGYASCGQLHKALCLFDKMESPSIALWTSLISGCNPAYHGDGAFVLFVRMLRSEMLPNSTIYAIVLNMCGFLGMLKPGQQTQACALKSGAVNDLIAASALIDFYSKCGLWADACQAFSELRHHDTIVLNSMITVYSNCGQIDEARRVFRLIPSKSVISWNSMIVGFSQNGHALDALELFCEMHRLGLQLDNVAISSVLSASGSICSVSSGEQIFGLAIALGLQSDHIVASSLIDLYCKCGNLANGRRIFSGIANPDEVLWNSMLIGYASNGYGLEALKLLDLMQSRGLKPSERTFVGVLSACCHSGLVEEGLRWFYRMKEDFGVSPSAEHYACVTDLLVRAGRLDEAVEFIENMPFKADAISWTSIIGGCKAQGNEVLLDKVANKLMETGLSTHSSLYVQLSSTLAAHGDWDKSAEIRSMMHDRRISKNAGRSWVDRA

SEQ ID NO: 193439 - protein, 105 aa, Zea mays
  unsure (1)..(105): unsure at all Xaa locations
  Clone ID: MRT4577_108000C.1.pep
AGSSRRRRRRSXRFIAIPSFSSSGCRSHSSVDVVDTARHAGNGKKPHPQGAEAGAGAVPGGAWGGGKGESLVARLLRGFKNLSQIFAVYEDQEEEEEPEMVIRLP

SEQ ID NO: 193440 - protein, 99 aa, Zea mays
  unsure (1)..(99): unsure at all Xaa locations
  Clone ID: MRT4577_108001C.1.pep
AGSSRRRRXRFIAIPSFSSSGCRSHSSVDVVDTARHAGNGKKPHPQGLNGAXGGASAGGKGESLVARLLRGFKNLSQIFAVYEDXEEEEEREMVIELPT

SEQ ID NO: 193441 - protein, 110 aa, Zea mays
  unsure (1)..(110): unsure at all Xaa locations
  Clone ID: MRT4577_108002C.1.pep
HACQSPLITVLIHPLFMILGGCPXLILPTISLYLYMKGVWDYRWLHGHSPYMNTRTVPHSDAPNRTXLDEEINTLHTLSTTEWLQMXVDKLLIEARRIQILYCDLNKQCE

SEQ ID NO: 193442 - protein, 170 aa, Zea mays
  Clone ID: MRT4577_108003C.1.pep
TPRMARPFAAKSRASRRPQDPELPTGDENDFAGSEVAAPTESIDKPLAEVLKELGKRVPDSLVKTRVEDNGFTMKYIPWHIVNKILNIHAPAWSGEVRNIVYSSDGKSVSVVYRVTLHGIDAEIYREATGTASVDDTIYGDPVQKAESMAFRRACARLGLGLHLYHEDMS

SEQ ID NO: 193443 - protein, 128 aa, Zea mays
  Clone ID: MRT4577_108004C.1.pep
LLALVTVAGLVVSVMACAVVILSLVLLHAPQHVHQVFEPLASLLASVTVLVDVVDGVLICLTLAAMHAPLHPLPIRVATAFHLAFQVAVVLAVVVVTVAAALLSRMRGRTRGRTRGRTRGRTRGRTRG

SEQ ID NO: 193444 - protein, 81 aa, Zea mays
  Clone ID: MRT4577_108005C.1.pep
HLGTNMDGATGSGEAVGDDGPSSRRVVNGDDAANRCATRRVVTDGGGMQQRRRGKAQPGHTGQGTDDGRTRCATSRDARRD

SEQ ID NO: 193445 - protein, 36 aa, Zea mays
  Clone ID: MRT4577_108006C.1.pep
TQTLRPGVKLTLSALIDGKNFSAGGHKVGLGFELEA

SEQ ID NO: 193446 - protein, 107 aa, Zea mays
  Clone ID: MRT4577_108007C.1.pep
RNPPFGKPSSPKMLSWNRLTPKMEFFGHPKLSAQPAKIQILKNCLSPPPRGFPCNKLKAPKCFICSLTWGPYHSLFSTGKFLTPHQNIQIGGSWTLNEKKNVGPAFY

SEQ ID NO: 193447 - protein, 146 aa, Zea mays
  unsure (1)..(146): unsure at all Xaa locations
  Clone ID: MRT4577_108008C.1.pep
MVAYLLSKPNGSWKASMKVWVGLPAAAAVVVVFLIFAGVAALPAAMAAVVEHTFVVSQVNLTRLCKETLVTVVNGQLPGPAIEVTEGDSVVVHVVNRSPYNMTIHWHGVKQRLNCWADGVPMVTQCPILPGRSFTYXRFNGRPDRK

SEQ ID NO: 193448 - protein, 102 aa, Zea mays
  Clone ID: MRT4577_108009C.1.pep
TLPPCFGPKFCTPKRGGALFKTKGPPLISLGKKPCHNFPVMETENFFFFPWQQKGNKRGRGGTKTKTGGDPSAPKKKYPFQGRGQQLLAPKPFVPLVRAPFG

SEQ ID NO: 193449 - protein, 141 aa, Zea mays
  Clone ID: MRT4577_10800C.1.pep
PSLVHFPRASPPSRPRPSAKRLRLRWPAAGSGPRSASSISSIALSLSLSLSLSLSLSHGGAAQVYPLFAATGVAVGICGFQLFRNITGNPEVRVNKAGRAAGVLENHEEGRRYAMHGLRSFVHDKTPEIMPAVNKFFTDPK

SEQ ID NO: 193450 - protein, 114 aa, Zea mays
  unsure (1)..(114): unsure at all Xaa locations
  Clone ID: MRT4577_108010C.1.pep
GFFPAPPPCRGFRPLCWGFVFGARAGASVFCLPVSRCGGFSLWVWSGXGVFFPPFFPCPXLVAPVPSWVVGASVFVCCCPCFGGVLXXXVSCPSPLGGCCFHTVTGGGGGGGRS

SEQ ID NO: 193451 - protein, 52 aa, Zea mays
  Clone ID: MRT4577_108011C.1.pep
TAPDPWGPCFRYVLSNSCMSGILNSFYAENCFSHVRVIPIKVILPPQKQGGS

SEQ ID NO: 193452 - protein, 40 aa, Zea mays
  Clone ID: MRT4577_108012C.1.pep
ISSEHRQMSSRWTYRDMLIGRTGGSLRARFVTHLIHSLLV

SEQ ID NO: 193453 - protein, 118 aa, Zea mays
  Clone ID: MRT4577_108013C.1.pep
IRSPLNWYSRSPDRSWTNDPRSTTSSTNLCHPNSIDRPTLKYSKGDWGSNLHHQSQDPWYPVIPLPRSTRQWRRALPQRQALTGEDPPTPSAPKPSTTMVYAMKESKRIDPKATYLRW

SEQ ID NO: 193454 - protein, 318 aa, Zea mays
  Clone ID: MRT4577_108014C.1.pep
RHSPRHSLSVVAPHQSSPPVRGQIKRWPRRFTSPPRWRRRRVPASGGRLPGRPRRRRTVRARSCPRSVGSRCGRCRATTGPFVARDPRVVALLDAASFPVLFDTSLVDKTDLFTGTFMPSTELTGGYRVLSYLDPAEPNHGPLKTLLFYLLSHRRQHVIPKFREVYGDLFGLMENELARVGKADFGHYNDAAAFSFLCQALLGRDPAESALQGDGPKLITKWVLFQLSPLLSLGLPKHVEDSLLHSFRLPPALVKKDYDRLADFFRDAARRVVDEGERLGVAREEAVHNILFAMCFNSFGGMKILFPSLVKWLGRAGG

SEQ ID NO: 193455 - protein, 128 aa, Zea mays
  Clone ID: MRT4577_108015C.1.pep
SSPSVPPPATPAVSPPSPSSTPATPSAPSPSSPSSPATPATPSPPSDTPSPPSDTPSPPSDTPSPPGGSPSPPSDTPSPPSSSGGGRSPPSSGGERSTPSSHSPPKSHSPGGEGGGSSGPSTSLVVGV

SEQ ID NO: 193456 - protein, 230 aa, Zea mays
  Clone ID: MRT4577_108016C.1.pep
MATAIYLSSPAAPSSCARQRRQTTRATASATDRPREVVSPKRRLPLRKVPGDYGPPVLGAIRDRFEYFYGPGGRDGFFTSRVRAHGSTVVRLNMPPGPFVARDPRVVALLDAASFPVLFDTSLVDKTDLFTGTFMPSTELTGGYRVLSYLDPAEPNHGPLKTLLFYLLSHRRQHVIPKFREVYGDLFGLMENELARVGKADFGHYNDAAAFSFLCQALLGRDPGESALQG

SEQ ID NO: 193457 - protein, 78 aa, Zea mays
  Clone ID: MRT4577_108017C.1.pep
QTLCRHLCAVYTHIQLQGTRVGSLELQDHVESWGQANACPNDDLQYGPLLRHDIYHQCNRAEPAVPWGGRYRWWAPEG

SEQ ID NO: 193458 - protein, 88 aa, Zea mays
  Clone ID: MRT4577_108018C.1.pep
TRPEISRGSQRAATGKILRRRVMSDRIRSSRIMRRRERRSVRSFKRFFFLLMIFFLFLLYLFFVIFFIFLIFYIFFFYFLFLYFFLFF

SEQ ID NO: 193459 - protein, 74 aa, Zea mays
  unsure (1)..(74): unsure at all Xaa locations
  Clone ID: MRT4577_108019C.1.pep
HLNRLNEESHAPCLAALNAAADLVIPTVTVTLVRVLEPGPFSFFLYFFGTFVXFPRXALNWVLPLXVQFMSLLH

SEQ ID NO: 193460 - protein, 211 aa, Zea mays
  unsure (1)..(211): unsure at all Xaa locations
  Clone ID: MRT4577_10801C.1.pep
MASRRALARLPTLTARSSLVRATPLFTRMSTPINQSKVAARRLHATAQHLKPASSAAAESYPMNHEPIQSPADTQNFIDNQFVASKATQWIDLHDPATNNLVTRVPQSMDEELKAAVDSAEKAFKPWKETSLLHRQQILFKYTHLIRENWDRLAASITLEQGKTFADARGDVLRGLQVAETACGITTQMTGEVLEVXQDLETRSYREPLGV

SEQ ID NO: 193461 - protein, 50 aa, Zea mays
  Clone ID: MRT4577_108020C.1.pep
KKKKIKEQKKKKKKKIKKKGVLNIKNIFKCRLKKNDQNSLKVLYPQKLNN

SEQ ID NO: 193462 - protein, 136 aa, Zea mays
  unsure (1)..(136): unsure at all Xaa locations
  Clone ID: MRT4577_108021C.1.pep
MGRTKQTVRKSTGGKAPRKQVATKAARKSAPATGGVKKPHRLRPGTXALREIRMDQKRTELLIRKLPIQRLVREIDQDIKTDLLFQSYIVDALHEAYDGYLVGLLEDTNLCAIYAERVAIMPKDIQLARRIPGERA

SEQ ID NO: 193463 - protein, 57 aa, Zea mays
  Clone ID: MRT4577_108022C.1.pep
MKEGTANCVDILIAIILPPLGVFLKFGCKVEFWLCLLLTFLAYLPGIIYAIYAITKD

SEQ ID NO: 193464 - protein, 57 aa, Zea mays; identical to SEQ ID NO: 193463
  Clone ID: MRT4577_108023C.1.pep

SEQ ID NO: 193465 - protein, 42 aa, Zea mays
  Clone ID: MRT4577_108024C.1.pep
NVIQEVHWLQVSYKSSLCRSSKHVTCSLRNPCRPLSLKASPL

SEQ ID NO: 193466 - protein, 78 aa, Zea mays
  Clone ID: MRT4577_108025C.1.pep
TITIFIRLAVYLRKRTYNNPNQIIVRTTINKTFNTNLRKILHRKIYEFNKLQQQLYENKSYLHTLFKKNGGTNTFKSF

SEQ ID NO: 193467 - protein, 69 aa, Zea mays
  Clone ID: MRT4577_108026C.1.pep
NIFNVPTTLVVHVNRRSFHPPYKPFSAPSRMTVVYPYTQLNSKTPFCIVVCTVRKVNMSIRTSNLLEIV

SEQ ID NO: 193468 - protein, 87 aa, Zea mays
  Clone ID: MRT4577_108027C.1.pep
KKKKRDSEKTKGGRPSRKKKNPQTKNKGAGGKRNIKYKKGGNKKTTFSDGAPPRVPAKLSETSGTQETPGCHPSPKSPKMGPAPGGN

SEQ ID NO: 193469 - protein, 50 aa, Zea mays
  Clone ID: MRT4577_108028C.1.pep
MRGKLMLWAILMFCGCYGWEWLLRWVFPGKMPAWEKRQKQAVANLEKKRD

SEQ ID NO: 193470 - protein, 51 aa, Zea mays
  Clone ID: MRT4577_108029C.1.pep
RLRSQYASQTSKQNPGANQQLEIEMTAEKARRLITSDCRGGGGYSIFMAFG

SEQ ID NO: 193471 - protein, 63 aa, Zea mays
  unsure (1)..(63): unsure at all Xaa locations
  Clone ID: MRT4577_10802C.1.pep
PXPVGXXLPSXAXLRAGLRAXLRSLVVXXARXXLXSFLGCXXXAWGPASPPRLXPPVXWVAPG

SEQ ID NO: 193472 - protein, 133 aa, Zea mays
  Clone ID: MRT4577_108030C.1.pep
MASLWLLSCFSLVGAAFGCGVPAIHPVLSGLSRIVNGEDAVPGSWPWQVSLQDKTGFHFCGGSLISEDWVVTAAHCGVRTSDVVVAGEFDQGSDEENIQVLKIAKVFKNPKFSILTVNNDITQLKLATPARFS

SEQ ID NO: 193473 - protein, 78 aa, Zea mays
  Clone ID: MRT4577_108031C.1.pep
GICLSYTQIAHSSMALIFPPTRPPTWAPPKGASMQGEPRFFAPYKKSSSVNLAGPTSFKQKKTGKHTQQNFRTRISWM

SEQ ID NO: 193474 - protein, 100 aa, Zea mays
  unsure (1)..(100): unsure at all Xaa locations
  Clone ID: MRT4577_108032C.1.pep
SFFNPYRARGGAPNFILKLMVGIEDTVGIGXGTTNIYSTVDLDNARMGRTQIVFYQPVNPFWYKCFYIYFTHMAVDVVFTVKIVNPIXGAFLIGRAYLPV

SEQ ID NO: 193475 - protein, 56 aa, Zea mays
  Clone ID: MRT4577_108033C.1.pep
LENFNTIFFLGGWFVLYKAGAVPKHGGSLSGPAHNLAHRFRLQRATRITQGGLMDN

SEQ ID NO: 193476 - protein, 111 aa, Zea mays
  unsure (1)..(111): unsure at all Xaa locations
  Clone ID: MRT4577_108034C.1.pep
ARSPPAMAGPASARPHPQLLLLRERNAPHRPPRRTDLQDEQVAAVRIHDSRSQFLTRAEAGXPLLWRALLRRGPTRSCCCYEKGTLLTDIPAAPDLQDETGLGTNRVMGRR

SEQ ID NO: 193477 - protein, 46 aa, Zea mays
  Clone ID: MRT4577_108035C.1.pep
TLQMPQCTYTGVELTDAARYVRPAVTVPAYLTRIIAGQREYSARVG

SEQ ID NO: 193478 - protein, 72 aa, Zea mays
  Clone ID: MRT4577_108036C.1.pep
LARGEKNQKGGTRTGPRTLFTQGLGKKTRSVLKRTSNSQATDNHTRPRKKNQGKTNSWTVGNTSFGGRTRGT

SEQ ID NO: 193479 - protein, 232 aa, Zea mays
  unsure (1)..(232): unsure at all Xaa locations
  Clone ID: MRT4577_108037C.1.pep
RWVYPIPDRKRLDPLRSLCVFVFCCRSPSAWDEVEERLSDDIPPSXTIYLINLSDKDXREQTKRSLYALRSQNGRILDELALMSXKAERQWWATFTQIXAATGAFRXLQDFDFYSQQMPALDALTESYWIAREDGXYAPYAERKRHEDKAAEKXDEQXARQAGLDAGAAQSNVTGYQAPRLFKASQEPPAPPKXILFXQNLTDHTTSMMLQILLXVNAGFREXRMIEANQHP

SEQ ID NO: 193480 - protein, 97 aa, Zea mays
  Clone ID: MRT4577_108038C.1.pep
PPLWAPPVLPFKPPAHILWGIVRGKKFSPGNTFSHNYPKFGTKPGSPKNPPPLGGIPPFKAPPRGGPPPSKFSPNLCSTQFPFVPPPPPPQSFFIPG

SEQ ID NO: 193481 - protein, 94 aa, Zea mays
  unsure (1)..(94): unsure at all Xaa locations
  Clone ID: MRT4577_108039C.1.pep
SFGPILILLSDGILXPMGCRTNDSLYPILLLPFIQRCATQSYYRVRILASWALTCLVSNERLLYVISDILDNSPCGSSQSNGSQCTTYLSCHIS

SEQ ID NO: 193482 - protein, 55 aa, Zea mays
  Clone ID: MRT4577_10803C.1.pep
KQSRELVVPGLCVSIVRLRAPCLGPHSPTIIKPCNVITTRKYKHPRSRHALSRRI

SEQ ID NO: 193483 - protein, 111 aa, Zea mays
  Clone ID: MRT4577_108040C.1.pep
RPLESTVALFSRCSVGTLDSPVAHRTVRYIIAERLSRNPKTIGSQVEQVDLDELDDEEAPCVVLRNMSIGDVYPKESEEPTQAQDQPSSSMQASPPTLDEDQAQIDEDEDQ

SEQ ID NO: 193484 - protein, 153 aa, Zea mays
  Clone ID: MRT4577_108041C.1.pep
MSRLSVILLIGLLAICHAFEHKCTHDEMDHEKPDFVDIEEEFNPEGNDHSGRTLASYSNFRAYGYYGLLSKSSSSVRNYIQNELIPPIMDYFSAALKIKYPTTGSLKVTTSSVCGYSTPSVLKSGVNADWFYMVETNTATDYIAQTTTCSLAT

SEQ ID NO: 193485 - protein, 102 aa, Zea mays
  unsure (1)..(102): unsure at all Xaa locations
  Clone ID: MRT4577_108042C.1.pep
TPINTGLLMAKRLIGRRXFSDXXSSRSDIKLXWPFQGHFLGRGEKPMIXVVQHKGEEKQFAAEEISSMVLIXMRENAEAYLXSTIKKAVVTSPAYFNDSQRQ

SEQ ID NO: 193486 - protein, 118 aa, Zea mays
  Clone ID: MRT4577_108043C.1.pep
MVMEEGRSIEEGLLQLKNKNDDSECRITACVILSTFVAVCGSFSFGVATGYTSGAETGVMKDLDLSIAQFSAFGSFATLGAAIGALFCGNLAMVIGRRRTMWVSDFLCITGWLSIAFA

SEQ ID NO: 193487 - protein, 181 aa, Zea mays
  unsure (1)..(181): unsure at all Xaa locations
  Clone ID: MRT4577_108044C.1.pep
MRSIAATTIRHGKRVQRKEVVRRKSFVWRHHPRMAXRRGPRHTRSWASPKAQRPTISDTSTTSSSSTTPIRMTAKAIPQQHRPHHHTLXTPPRHSPRAIPHXSPPTSSSATPPSGACTTPTASAGPTATASRRCATLTETGATSRAPPRIMPRGRTGSTGGTLRRERPASLSSCRMERLPL

SEQ ID NO: 193488 - protein, 55 aa, Zea mays
  Clone ID: MRT4577_108045C.1.pep
FFKEDKLRGKPGYEHLSDPLHILIEAEFPASIIDARLRQAQEIIEELLKPVVSDF

SEQ ID NO: 193489 - protein, 47 aa, Zea mays
  Clone ID: MRT4577_108046C.1.pep
HCMAIAYRNLVAQPEPEMGAISTSVRIKRCIYLCWKRIRTLVLEPNS

SEQ ID NO: 193490 - protein, 281 aa, Zea mays
  Clone ID: MRT4577_108047C.1.pep
MAAKGLREVGRRRAAEVGRRCLSGGSAGPPAPAAKRKEGGKAVNLFTAVNQALHIALDTDPRAYVFGEDVGFGGVFRCTTGLADRFGKSRVFNTPLCEQGIAGFAIGLAAMIVNEAAKFRYRSGNEFNCGGLTIRTPYGAVGHGGHYHSQSPEAFFCHVPGLKWLYRLAVEEVPEEDYMLPLSEAEVIREGSDITLVGWGAQLAVLKEACEDAAKVSHEAPVTGGFGAEIAASIAERCFQRLEAPVARVCGLDTPFPLVYEPFYMPTKNKVLDAIKATVDF

SEQ ID NO: 193491 - protein, 103 aa, Zea mays
  unsure (1)..(103): unsure at all Xaa locations
  Clone ID: MRT4577_108048C.1.pep
MHSKMCWQSLVHLLKYDNXTDYGTPETVKFGRICRPLLNSDRPIFYSLCQCCFMECPKWCGMYRNSWRTTAQHNYTWSTMLDNIYLNYSYARYAKPRCWNDPD

SEQ ID NO: 193492 - protein, 369 aa, Zea mays
  unsure (1)..(369): unsure at all Xaa locations
  Clone ID: MRT4577_108049C.1.pep
MAAKGLREVGRRRAAEVGRRCLSGGSAGPPAPAAKRKEGGKAVNLFTAVNQALHIALDTDPRAYVFGEDVGFGGVFRCTTGLADRFGKSRVFNTPLCEQGIAGFAIGLAAMGNRAIAEIQFADYIFPAFDQIVNEAAKFRYRSGNEFNCGGLTIRTPYGAVGHGGHYHSQSPEAFFCHVPGLKVVIPRSPREAKGLLLASIRDPNPVVFFEPKWLYRLAVEEVPEEDYMLPLSEAEVIREGSDITLVGWGAQLAVLKEACEDAAKDGVSCELIDLKTLVPWDKETVEASVKKTGKLLVXLVSLVSHEAPVTGGFGAEIAASIAERCFQRLEAPVARVCGLDTPFPLVYEPFYMPTKNKVLDAIKATVDF

SEQ ID NO: 193493 - protein, 54 aa, Zea mays
  Clone ID: MRT4577_10804C.1.pep
YFSKCVAQISVFPTPHFLCWWGYYKENLANILGFSLRLFFKKKKKNTNPPKIIR

SEQ ID NO: 193494 - protein, 134 aa, Zea mays
  Clone ID: MRT4577_108050C.1.pep
DKCNECNKGHLDLFENAFTAVGGTDGLVQTSWRLISCDITTPLVLRNKEGTSAYWFSMQVRNSNLPVKSLEVSTNSGKTWTGTTRRDYNFFENPSGFQVDTVDVRITSSTGSTIIVKNVGAKPSTEYPASGNFA

SEQ ID NO: 193495 - protein, 35 aa, Zea mays
  Clone ID: MRT4577_108051C.1.pep
NKEKSINSIKQQVQQHNLFSTVFSVEHPIKQQDMN

SEQ ID NO: 193496 - protein, 43 aa, Zea mays
  Clone ID: MRT4577_108052C.1.pep
PCALDARCLDRRGSEGPSEAPVTRPESRPRISAGEPTCNTIHY

SEQ ID NO: 193497 - protein, 87 aa, Zea mays
  unsure (1)..(87): unsure at all Xaa locations
  Clone ID: MRT4577_108053C.1.pep
GNRRPCAALLHGACFFVRVHRIGWDIARPPQARXFHGMNNQLVKAMSSLIFTXKVQDVDCTSSMCXICLEDYIRNVIYFGTEVVVNN

SEQ ID NO: 193498 - protein, 181 aa, Zea mays
  unsure (1)..(181): unsure at all Xaa locations
  Clone ID: MRT4577_108054C.1.pep
ALTATELEQRTDTTRVMXRFRRGGVRDQDEHRQVGGRAGRGARGQHLGDGARRGASRRAGAPHRGSSGRTWRSPRAMGGRLELGPGARSSRQGDGREQGAQLARLWRRRGRAAMGAQHGSWQGAAVWEREKSRGRRELEANGGDLGELGSSLEERRQEEDMAARTEGGHARRVPTRPRTRG

SEQ ID NO: 193499 - protein, 45 aa, Zea mays
  Clone ID: MRT4577_108055C.1.pep
APRDSAYRVWKFQPRVCGSHSCDPGYSPRPVFGGRCVQSTGVRVA

SEQ ID NO: 193500 - protein, 106 aa, Zea mays
  unsure (1)..(106): unsure at all Xaa locations
  Clone ID: MRT4577_108056C.1.pep
ARWRIPGAARYQFRLVSYNILAQVYVKSTLFPHSPSACLKWKSRSGAILTELKSFDADFMCIQELDEYDTFYKKNMENSGYSSIYIQRSGDKRXDGCGIXLNLKVQ

SEQ ID NO: 193501 - protein, 397 aa, Zea mays
  Clone ID: MRT4577_108057C.1.pep
MLKPQTSWTASLPLLLIRRCSRTAASPSPAGDRPLSFVPVCKRRMSTLAHPRFAPLPTEQTESQTDGGAARYQFRLVSYNILAQVYVKSTLFPHSPSACLKWKSRSGAILTELKSFDADFMCIQELDEYDTFYKKNMENSGYSSIYIQRSGDKRDGCGIFYKPKSAELVQKEVILYNDLVEKYVPSDNVNSALENNSSAEEDKNAKPDNSKRGDPNDPRVRLKRDCVGLLAAFKLSDPCDQILIVANTHIYWDPQWIDVKLAQAKYLLSRVSQFEQLISNKYNCKPSVIIAGDFNSTPGDKVYNYLLSANLGSTDEAPIKLRSLYAANGGEPEYTNYTPGFTGTLDYIFLSDGSSIKPTSLLRLPRGDSEDVKGGLPNFRHPSDHLPIGADFLVVNI

SEQ ID NO: 193502 - protein, 29 aa, Zea mays
  Clone ID: MRT4577_108058C.1.pep
SYSKVISQPRVPYLIYDKKSQRTTVAIYN

SEQ ID NO: 193503 - protein, 41 aa, Zea mays
  Clone ID: MRT4577_108059C.1.pep
IPKQINKVQEPWEMKRDTSICFFFKNVGFFRSTNALTALAG

SEQ ID NO: 193504 - protein, 59 aa, Zea mays
  Clone ID: MRT4577_10805C.1.pep
LSSPPPPPQKGPHLHQSWSGPKLPKSRPAFTTDRPEPWSFPASDSRPPFPCFLRKILYL

SEQ ID NO: 193505 - protein, 59 aa, Zea mays
  Clone ID: MRT4577_108060C.1.pep
FCPPGSLPPPDRPPFFGCFPRHIPGFFLLNGWPCSPVYVGRTRPLNALMGCLVILFVFV

SEQ ID NO: 193506 - protein, 63 aa, Zea mays
  Clone ID: MRT4577_108061C.1.pep
AALAMVVLQVKSHRTYHASLTYFCDEQKRLDNTQVKCIMLFKTPLISSWVKKKKKKKGRLLAI

SEQ ID NO: 193507 - protein, 193 aa, Zea mays
  Clone ID: MRT4577_108062C.1.pep
EQHLWLLERSCGGYAKKPKVKSGHPCALRGAARFNVYFFFFPTGSSLKQSRLSVRLIPLKQRSICSPLSWGNFFFFFFFFFFFFFCEQHLWLLERSCGGDAKKPKVKSGQPCALRAAARSNVYLSLSPPGSSLTQSRLPVRSMPLKQRSICSPLSCCIFFFFFFFFFFFFCEQHLWLLERSCGGMPKNQKLKA

SEQ ID NO: 193508 - protein, 60 aa, Zea mays
  Clone ID: MRT4577_108063C.1.pep
TKHPLIYLKENPGYGYKNMILPFPKNQRPKTWFWENIRASLCNAWDRSQCHVPFLLKTPR

SEQ ID NO: 193509 - protein, 60 aa, Zea mays
  unsure (1)..(60): unsure at all Xaa locations
  Clone ID: MRT4577_108064C.1.pep
TQFLSTFTINSSSILLPPTNSVIYKTYGSQNXPHLTQSQIISIIPSLQNLPYLHSIITML

SEQ ID NO: 193510 - protein, 52 aa, Zea mays
  unsure (1)..(52): unsure at all Xaa locations
  Clone ID: MRT4577_108065C.1.pep
RVKGSLPFCFSAFGEKKKKLEPWVLRDQTLDLLXRMYSFLAPNTCESCGXGF

SEQ ID NO: 193511 - protein, 129 aa, Zea mays
  unsure (1)..(129): unsure at all Xaa locations
  Clone ID: MRT4577_108066C.1.pep
TSEKKAAPNARGGTKSAGTPTTEKKKXKRERADTQEQHAGHREPARDEQGPHHRGPLRHAPPTPTHPEGRKKRDDREARTTTQPEKTTRSTPTRGRGKTRTQQKKKRRSAPPPGRRKGRFQQIXTTRRP

SEQ ID NO: 193512 - protein, 39 aa, Zea mays
  Clone ID: MRT4577_108067C.1.pep
PPPIVFVWGGLLSIPISMLWVANNPPSQNQKIGGWFPFP

SEQ ID NO: 193513 - protein, 39 aa, Zea mays
  Clone ID: MRT4577_108068C.1.pep
ITSSSSYLIYRWVCRPRSKLCIINTCASHYMSIFYSFAF

SEQ ID NO: 193514 - protein, 355 aa, Zea mays
  Clone ID: MRT4577_108069C.1.pep
ARDLMNLARLTIDEFSEIPASAKDEVVQDLVDGLESIFQEYIFFVASCGSKQNYLPPLPPLTRCNQDSGFFRLWKKAALPTCQAPPDATPRGGRGSHHVPRPSISRGTQRLYVRLNTLHYVLTHLEALDSSLSSSTSHLDRARAAAQSSISAVAEVAAHRLIFLDSRHSLYQGLYARSVADARIRPALRLLKQNLSFLVSVLADRAQPVAVREVMRASFEAFLMVLLAGGNERSFVRADHATVEEDFRSLRRAFSTCGEGLVPEDVVAREAETAEAVVELMARSTDYLIDAFSVATCDSISEDGRAGAGGCTPLPPTTRRWDPADPNTILRVLCHRDDEAANQFLKRTFQLARRR

SEQ ID NO: 193515 - protein, 124 aa, Zea mays
  Clone ID: MRT4577_10806C.1.pep
PGGGKERQKPQGTGGWGKENKAPPMGGNPPPRPAESPPQGGGLARNRVGPEWERRTAAGSSSEGPPEKRGGAPKRISWAGPGEYPPPNWGSTARKLNLASPTQKSYLWIAGDGKEAPLKRAPPS

SEQ ID NO: 193516 - protein, 48 aa, Zea mays
  unsure (1)..(48): unsure at all Xaa locations
  Clone ID: MRT4577_108070C.1.pep
TSTRARKYNQDXIICRKCYSRGRPNSVSCRKKKCGHSNQLRAKKNIKI

SEQ ID NO: 193517 - protein, 93 aa, Zea mays
  unsure (1)..(93): unsure at all Xaa locations
  Clone ID: MRT4577_108071C.1.pep
RVSGSLAAYLTIHSSTKPREGEERWRADAGVGEGRCGNNRQEICEYLFHEGVLYAKKDYMLAKYPKLDVPNLXVITLMQSFKFNECGSLSLSW

SEQ ID NO: 193518 - protein, 80 aa, Zea mays
  Clone ID: MRT4577_108072C.1.pep
LDRMYVVWSSVHSTPTTISDANKCDYSALHMNGLGCNLINFFLPDWMHHSKLKKKNSNTRKKKQKKKKEKIKTIRWGALQ

SEQ ID NO: 193519 - protein, 109 aa, Zea mays
  unsure (1)..(109): unsure at all Xaa locations
  Clone ID: MRT4577_108073C.1.pep
MWTYRDEDPRLHDIKTKIRVVPNFPKPGIEARGFIFGSPIALAIRAKFVPLRKPXKKLPGKVISQEYILEYGRDCLEMHVGAVEPGERALVGDDLIATGGTLCADMDLL

SEQ ID NO: 193520 - protein, 62 aa, Zea mays
  Clone ID: MRT4577_108074C.1.pep
PKRTVPFYYFRPLKTEDVVGCVLPQLYHGGEEGSPWPLNRSPPARGFRCCKICKWRGSSGNP

SEQ ID NO: 193521 - protein, 70 aa, Zea mays
  Clone ID: MRT4577_108075C.1.pep
ANVKPLTYQPGAYLGGRARDPCIHQLQRLQVRGDGPMADMHSKNYINHLHSLRSIEQIRKRFTPRKRLQV

SEQ ID NO: 193522 - protein, 65 aa, Zea mays
  Clone ID: MRT4577_108076C.1.pep
SKAIKKRKVVCKEKLQETVGHCISWEQSRDFVQEIDPEQRLSPQHSQFVDRLCTSPNPLRLIIIL

SEQ ID NO: 193523 - protein, 64 aa, Zea mays
  Clone ID: MRT4577_108077C.1.pep
LAPTSAKSWGSGLLQWLEFTKLYGMVMQGNVIINGRGQQWWTYSDTEDEDDDDTVRAGQQVYNF

SEQ ID NO: 193524 - protein, 139 aa, Zea mays
  unsure (1)..(139): unsure at all Xaa locations
  Clone ID: MRT4577_108078C.1.pep
MFSQVNSRSQSAGKGGRTDGSRGEDNWFCPSXKNVNFAFRTIXNMGNCNQSRPENHTAMKTPPRYPTSGGYMSPGTPPPMNLGGGAPPYGSSRLNGPAMTRYGITQSXGGSXIHMEYGGRISRGSPYGPRQRVGPPHTL

SEQ ID NO: 193525 - protein, 59 aa, Zea mays
  Clone ID: MRT4577_108079C.1.pep
SHLALSYTNRGGETNIQDDMLGLTEQTLYDGTTVVEVNAGYRISIMDYGINLEHVVFCH

SEQ ID NO: 193526 - protein, 63 aa, Zea mays
  Clone ID: MRT4577_10807C.1.pep
SRSLATEQPLLSSSQLRPSACQLRPSFTPSRAARQLSLPPYCSPEKGRSPSPPLLASWSARWS

SEQ ID NO: 193527 - protein, 44 aa, Zea mays
  Clone ID: MRT4577_108080C.1.pep
VHIRFKLFALSPAAAAVPGFSQLAGSYERPPPMLCCQVTTKLVY

SEQ ID NO: 193528 - protein, 104 aa, Zea mays
  Clone ID: MRT4577_108081C.1.pep
GLGRAPPPWEKPGGFFPERFFQKPGPVDVPIKGKGPRFFPFGPGRGICPGMNFGFPPLGIMGAHFMAPFYWGGPGFPPGGALDKSFGVPLPRKEKLFLVPRNGS

SEQ ID NO: 193529 - protein, 119 aa, Zea mays
  Clone ID: MRT4577_108082C.1.pep
RVITRVDVSQEVTGTGRPPTLTPELRGREEQPSKKLRAQKPKRGEDKGGTEGGISLGKGRQTSFWVIWARPLWPGRKQEPALEGMTPVKETAHAFPSGQEDPANGLAWRWLSRRRLRGG

SEQ ID NO: 193530 - protein, 120 aa, Zea mays
  Clone ID: MRT4577_108083C.1.pep
PPPQKFIFGPLFSPPPPRKKKEMRSHRSRSVGPMPKPGINPTFIGVPCPMPTPLKAPGPCTPIVTPLWKLVIEPPPPPIIPASSPIVVKTPPRLSTSFSPPFHPFNVHVLPSHQINWVVG

SEQ ID NO: 193531 - protein, 79 aa, Zea mays
  Clone ID: MRT4577_108084C.1.pep
KPWGASTHTGERHQLTTEGMMMAVKSDHGGSRPTAQRISTERFPFLRWITSPRAPSTSFGRRMLSPPTMPAHGIAARPA

SEQ ID NO: 193532 - protein, 49 aa, Zea mays
  unsure (1)..(49): unsure at all Xaa locations
  Clone ID: MRT4577_108085C.1.pep
IHWPSFKNVXTEKTLAFPNXIPFNKIPFSPVGLITKRPQPIALPNICPT

SEQ ID NO: 193533 - protein, 81 aa, Zea mays
  Clone ID: MRT4577_108086C.1.pep
KFSSRISRQIDLKTAHAIMPLTYHLLLEYYLMWVDPHNTPTNRCVSFIKIDTGYTTCSIMMLPALSFKGAMLLEDFRECSC

SEQ ID NO: 193534 - protein, 204 aa, Zea mays
  unsure (1)..(204): unsure at all Xaa locations
  Clone ID: MRT4577_108087C.1.pep
MGQQSLIYAFVARDTVVLXLMKLPASNNKFTYNCDGHTFNYLVEDGFTYCVVAVESMGQQIPIAFMDRVKEDFTKRYGGEKAATAAANSLNREFRLKLKEHMQYCVDHPEEVSKPAGVKAQVSEVKGVMMENIEKVLDRGEKIELLVDKTENLRSQAQDFRQQGTNVRRKMWLQNMKIKLIVLGIIIALILIIILSVCHGFKCH

SEQ ID NO: 193535 - protein, 428 aa, Zea mays
  unsure (1)..(428): unsure at all Xaa locations
  Clone ID: MRT4577_108088C.1.pep
PTRALTQTVSTSRRSRLPVARHDHNHDIILRCIKXNLGYASGKPVAACIIYKCLLHWRAFESERTAIFDHVIEAINDVLKGNEADGRLPYWLSNTSALLCLLQRNLRSNGLFTTPSRRSGGALGKIAQTLRSPSKFIGRSDTLPHVDARYPAILFKQQLTACVEKIFGQLRDNLKKEISPLLNVCIQAPKSTRGQSGKASKSSGVGAHPASNSNWDNIVNFLDLLMDTLRENYVPSFFIRKLITQLFSFINIQLFNSLLLRRECCTFSNGEYVKAGLSLLEKWITDVTDEFAGTSWHELNYIRQAVGFLVIHQKRKKTLEEIKQDLCPSLSVRQIYRICSMYWDDKYGTQGISTEVVAAMREMVNKDTQNLVSNSFLLDDDLSIPFSTEDLSMAIPSIDYADVDLPESLQHYTSVQFLLRQQDPQPAQ

SEQ ID NO: 193536 - protein, 206 aa, Zea mays
  Clone ID: MRT4577_108089C.1.pep
MGQQSLIYAFVARGTVVLAEYTEFTGTSNNKFTYNCDGHTFNYLVEDGFTYCVVAVESVGQQIPIAFMDRGFHKFPKRYGGGKAATAAGNSLNREFRLKIKEHMQHCVDHPEEVSKLAKVEAQVSEVKGVMMENIEKVLDRGEKIELLVDKTENLCSQAQDFRQQGTNVRRKMWLQNMKIKLIVLGIIIALILIIILSVCHGFKCH

SEQ ID NO: 193537 - protein, 53 aa, Zea mays
  Clone ID: MRT4577_10808C.1.pep
TVWRLSLAVQFFLPGRPGGVPALRVSVVESESPTLCCFAAASPSGAAWLCFSP

SEQ ID NO: 193538 - protein, 220 aa, Zea mays
  Clone ID: MRT4577_108090C.1.pep
MGQQSLIYAFVARGTVILAEYTEFTGNFTTIASQCLMKLPASNNKFTYNCDGHTFNYLVEDGFTYCVVAVESVGQQIPIAFMDRVKEDFTKRYGGGKAATAAANSLNREFGSKLKEHMQYCVDHPEEVSKLAKVKAQVSEVKGVMMENIEKVLDRGEKIELLVDKTENLRSQAQDFRQQGTNVRRKMWLQNMKIKLIVLGIIIALILIIILSVCHGFKCH

SEQ ID NO: 193539 - protein, 220 aa, Zea mays
  Clone ID: MRT4577_108091C.1.pep
MGQQSLIYAFVARGTVVLAEYTEFTGNFTTIASQCLMKLPASNNKFTYNCDGHTFNYLVEDGFTYCVVAVESVGQQIPIAFMDRVKEDFTKRYGGGKAATAAANSLNREFRLKLKEHMQYCVDHPEEVSKLAKVKAQVSEVKGVMMENIEKVLDRGEKIELLVDKTENLRSQAQDFRQQGTNVRRKMWLQNMKIKLIVLGIIIALILIIILSVCHGFKCH

SEQ ID NO: 193540 - protein, 140 aa, Zea mays
  unsure (1)..(140): unsure at all Xaa locations
  Clone ID: MRT4577_108092C.1.pep
IGSRSAERRCGGGITTLRAIPXIFSRTQTRYHLAEWVRGPAALQLAIEDDVRNFQALTQMYNEWPFFRVLLQLQHMLFVMGEPGIAGLKDHLVVPEELKACAEPALSSYXQREWLSLQIDGHHDIHESDPVMKQDLVYDD

SEQ ID NO: 193541 - protein, 82 aa, Zea mays
  Clone ID: MRT4577_108093C.1.pep
EQVMKVLDPKLSTVPLHEVTHVLYVSLLCTEEQIVQRPTMMEVVHILSKLTKTSSTKHGEENSTKQGKEVSNYSDRSDTSPI

SEQ ID NO: 193542 - protein, 61 aa, Zea mays
  Clone ID: MRT4577_108094C.1.pep
VRKLGSCIFDARVRPILPLHVHKPHPNRPPAKPGRSPTSARPRYQERRGCEKTLTGPTVSL

SEQ ID NO: 193543 - protein, 83 aa, Zea mays
  Clone ID: MRT4577_108095C.1.pep
GRTYKPCMIHDSKPSQKKETPNVKRHCRITAVHKAACDGTLTVRLHVSSVAFCSEAVLNSKTSNQDGKKLLGKFVVQSSFLCN

SEQ ID NO: 193544 - protein, 102 aa, Zea mays
  Clone ID: MRT4577_108096C.1.pep
GRLGASSLLQRSIHYTTGGDPTRGTKMMTQGKSSMGASAFAHPKPNGGVRRHDTPMAASSTLHLTALGAEARYGSRWKEGMDRMDGEGYWCPPIYTGKGSWP

SEQ ID NO: 193545 - protein, 54 aa, Zea mays
  Clone ID: MRT4577_108097C.1.pep
PGESPSLPCEDKCVTTSPSARSLSLAVSQKRCRVSVTANGNCSPCCSRHAIYQA

SEQ ID NO: 193546 - protein, 67 aa, Zea mays
  unsure (1)..(67): unsure at all Xaa locations
  Clone ID: MRT4577_108098C.1.pep
WVDALKARKFLGGLDPTLPDXLAVFGVLRPIRHLKSGRDMLEHTRIGKWFSQMDRVVGQSSRVSEQS

SEQ ID NO: 193547 - protein, 242 aa, Zea mays
  Clone ID: MRT4577_108099C.1.pep
MRAESAGLCSSLEELEHEIKRLNHRISHESISLDEEKRLIKEIKTLEKTRPKVSSNAAKRAKMQDTVVEGDAIQDQVKIIGDGIDGVKKERQAVRSKIKVLDDEMRVVDGEIALLQEDLNAATARKDKAYESLTELRKARDLANASFHQNRIVLNRARDYSSRNEVEELQELHKTEVEKFMTQWCSSKTFREDYEKRILTSLNGRQLTRDGRMRNPDEKPIFIETQQPAAPVQQEPIPSKRP

SEQ ID NO: 193548 - protein, 57 aa, Zea mays
  Clone ID: MRT4577_10809C.1.pep
PPPPTNPKNPKKKEETIICGLAQNPCSQGVKASPCFNATPADQNCFQAAGSLPEGEP

SEQ ID NO: 193549 - protein, 125 aa, Zea mays
  Clone ID: MRT4577_1080C.1.pep
QIQQPNELEENKLGGVKTRKADEECLEQEKSRQSPIQSFALRLLEYNINASEFLPLAEAPSTPDRLNDFGILKVPDQLSEANLFYGVAPGAMQAYRESMERLLIYNNKKVGDTVLKDDYEPSTYA

SEQ ID NO: 193550 - protein, 99 aa, Zea mays
  Clone ID: MRT4577_108100C.1.pep
TRRPVRPVVLPSTPLTQHMCSHMTALFELDWPPLIAPHYSKQCASSQYASRNYSVSHEKEQAPSLRARGVALYKPGWTSRIKNLYSGNDVRSSPESQMS

SEQ ID NO: 193551 - protein, 43 aa, Zea mays
  Clone ID: MRT4577_108101C.1.pep
VCCLRKSMPCLSNGYIIVLDWLNIMEGGDLLMICSSFIFMIGS

SEQ ID NO: 193552 - protein, 39 aa, Zea mays
  Clone ID: MRT4577_108102C.1.pep
FLLNPVSSCAPLLQQGAPKPSLNFPLIPPIKLAGRQSSR

SEQ ID NO: 193553 - protein, 137 aa, Zea mays
  unsure (1)..(137): unsure at all Xaa locations
  Clone ID: MRT4577_108103C.1.pep
RGGPRGRVXXPPPPGARPPXGXPPAPPRGMLPPPPGASPSRASSSGLLFFGGPFWDSSLPVWFRRVVCSFELFFGPPKNLLPLWGEGFLFFCLLISLFAVKIRVSWSPPWGIGPLPFLFFPLCCYFGFVSAKPIFFF

SEQ ID NO: 193554 - protein, 59 aa, Zea mays
  Clone ID: MRT4577_108104C.1.pep
EDVLFRENEIGGALSSAIASPISINCHGMVINAVMDMGSADVYGMSRLQEHRQKSHTAP

SEQ ID NO: 193555 - protein, 69 aa, Zea mays
  Clone ID: MRT4577_108105C.1.pep
VCFMFFLIFLLLVLHLRKAKGFFLFFYNKGCNGKRPGLHAFGAGTKLFWVLYDNILHFKERPAYFPSWD

SEQ ID NO: 193556 - protein, 76 aa, Zea mays
  Clone ID: MRT4577_108106C.1.pep
VRCPAGRDSCMRSTMGWRAPTMIQVMQKPCTEMQGTGESIIVMDRCPRCKGEKVIEEKEDLEVHVEKETYNYQNTG

SEQ ID NO: 193557 - protein, 89 aa, Zea mays
  Clone ID: MRT4577_108107C.1.pep
LSPDPTTGAPDPGGAVPLPPNPSTGSPLYRQNWRNPVVVNPPSSLLPNVCDGSSLGTQYRMAAFYDKPDAGGLKETLGKYMADQRREDM

SEQ ID NO: 193558 - protein, 34 aa, Zea mays
  unsure (1)..(34): unsure at all Xaa locations
  Clone ID: MRT4577_108108C.1.pep
XVLFFFFCIKLMGIYFLFTKGKPKAIYKANLKLH

SEQ ID NO: 193559 - protein, 47 aa, Zea mays
  Clone ID: MRT4577_108109C.1.pep
VIEIAAQLRGIRNKLSELCNELNSNSFKFSNTPFGSFELNYILIIVI

SEQ ID NO: 193560 - protein, 47 aa, Zea mays
  Clone ID: MRT4577_10810C.1.pep
AFMEMEEYIFLPTHSKCSYKPKIKTQVDEMLSAAYYSFDLGLDSILN

SEQ ID NO: 193561 - protein, 95 aa, Zea mays
  Clone ID: MRT4577_108110C.1.pep
LLSFKRQRGRAWGPGGPWGRRSDGTSGKPRSPPSGLPGAEGQGVGVSASRPAPGPGRGLLAPGPPGHLVQCARQPKWRRVVAGDRGGGWWEQLRV

SEQ ID NO: 193562 - protein, 82 aa, Zea mays
  unsure (1)..(82): unsure at all Xaa locations
  Clone ID: MRT4577_108111C.1.pep
ASLLAQRRCYSVAAVLVKGCGRKAVAKXPSASWASRXSAAASREKSPLVPDPVTGYSRPPGGAQKVYSAELRARLLPKRVAN

SEQ ID NO: 193563 - protein, 62 aa, Zea mays
  Clone ID: MRT4577_108112C.1.pep
QNKEVSYYRSWSGSCFTIVACVDGHDGHANLFTIYTCRYVTIHAFDLISHLYLKQHFIFHFS

SEQ ID NO: 193564 - protein, 85 aa, Zea mays
  Clone ID: MRT4577_108113C.1.pep
LGLVWSGASFLVGFSGVAGVGLCVACLWSLLCVVGVAVRAVFVPRFVPSGGAAAFSGFVCVSGCCCSWGARASVCSLAFLPASGG

SEQ ID NO: 193565 - protein, 56 aa, Zea mays
  Clone ID: MRT4577_108114C.1.pep
LVHLIILLILGITESSEQTGTVSSNLEACLMTWTKERRTYWRLNCSLNSSSNGSRC

SEQ ID NO: 193566 - protein, 58 aa, Zea mays
  Clone ID: MRT4577_108115C.1.pep
MSSLGGQQQHGRGDEARARLRWTRQLHGRFVLAVAQLGGADKATPKSAMRSMAASGLT

SEQ ID NO: 193567 - protein, 72 aa, Zea mays
  Clone ID: MRT4577_108116C.1.pep
HHKQIFIIFLFGPKQICRTCTLHIINFQTVISSHMANNLNVLQNSRNITRYHPQLRSNYISLQEKDVTRLRI

SEQ ID NO: 193568 - protein, 139 aa, Zea mays
  Clone ID: MRT4577_108117C.1.pep
MRRPHAAAATALAALLLLLCLAVLTAALIHGNGGGLAGTRPARWPAAVPRKMLLAMTSFDAASSSSAAGHNHRYLLHHHHHHLHHQHHHHHHHHADRRWNRHGTLPPSAAGGEGDEAMIDPRYGVQKRLVPSGPNPLHH

SEQ ID NO: 193569 - protein, 175 aa, Zea mays
  unsure (1)..(175): unsure at all Xaa locations
  Clone ID: MRT4577_108118C.1.pep
MEDVLTPPPQPELAGEKRKREESSLDASIEDAPSAPASTCSAEDAAGSDVARHPMWKTSLCSFFRRRGAGAEGCSHGDSCRYAHTEEELRPRPDGTWDPTSDRAKELRKVAAEAQEEAEEEVTVDEQSLDKCLVGLPRGWTADRLKSLLQDQGISYATAWDKKGMTVGFXTFESG

SEQ ID NO: 193570 - protein, 230 aa, Zea mays
  unsure (1)..(230): unsure at all Xaa locations
  Clone ID: MRT4577_108119C.1.pep
MTTAGEVDSAAGGEDLEPLFDYKRVQPRMTFCFDDSDLEVADIFKYCNKRPKVHTSTEEGXKPDEEVAAAKVVVLDEEDWLQPPPPKAAFRATAEEDSAFRELRLKKQEWAKFAESAEDILQKLDEITNKEVGPKEPPEQIILDEESEPQVEKAREKIVISIQDKDGQQQMRVYKDEKFDKLLKVYAKKAKLNPSDLSFVFDGEKINPSSTPQDLDLEDEDMIEVRRKQS

SEQ ID NO: 193571 - protein, 117 aa, Zea mays
  unsure (1)..(117): unsure at all Xaa locations
  Clone ID: MRT4577_10811C.1.pep
PHNQPGGGLVFLNKIPLIPTPCPNIKNRTGGYLRPFFFFLGGGGXGXXXXPTPSRDRIRQGAFPIRGGTKSKRSFSGKTGGPTPLTPNPFERAQNLPGDRNYFLSGVQAKKPFPPPP

SEQ ID NO: 193572 - protein, 72 aa, Zea mays
  unsure (1)..(72): unsure at all Xaa locations
  Clone ID: MRT4577_108120C.1.pep
LIPLXXFFFLGGLIGPKRVFYSRSLWTNTQGGHKKKHRARKMPGVRKKKREKIRDCLLHIHTLDGGNRDKYV

SEQ ID NO: 193573 - protein, 108 aa, Zea mays
  unsure (1)..(108): unsure at all Xaa locations
  Clone ID: MRT4577_108121C.1.pep
AFTTCYHFFFNLGMFMADMVNYGTNSIPRWGWRLSLGVGLVPAAVVIAGAAVIPDTPSSLVLRGRLDEARASLRRMRGAGAASADTDAEXKDIVAQXEQDPEHKSGAF

SEQ ID NO: 193574 - protein, 46 aa, Zea mays
  Clone ID: MRT4577_108122C.1.pep
VVQPHHPTTGGHTLHYRGGTQQNLETQLQPRDIDRKCANSPSASLR

SEQ ID NO: 193575 - protein, 90 aa, Zea mays
  Clone ID: MRT4577_108123C.1.pep
KDVVQHSFHVNCSWELCMISMYKIPPHSLGTDDGVPTCMPTLASHTHTVSQNLKPDSSSMFCNLSTYVRGHISRRQHRVSYLLTTNYINC

SEQ ID NO: 193576 - protein, 138 aa, Zea mays
  unsure (1)..(138): unsure at all Xaa locations
  Clone ID: MRT4577_108124C.1.pep
SYSRGCTTAALGLHTGEACCARNMLRYVPGYRQDXQTGIGAAIEYLVRAVYVKVLXSIGHRCCTGISGLLSLEDEASVNFRFEENWSMIGLSDMSDDDRDHALMPIYDXCSIARGRRAAYLPLENLKXTEPFGQEGLD

SEQ ID NO: 193577 - protein, 77 aa, Zea mays
  Clone ID: MRT4577_108125C.1.pep
MPARRGRPRKGDRRIDAAIDHFTVMGYAARDVKAVVTDLLKVYGGPDAWPLLEEGGSYQLCRELFEIERREEKKTSS

SEQ ID NO: 193578 - protein, 283 aa, Zea mays
  Clone ID: MRT4577_108126C.1.pep
MSLVKSSFTHATESGSSSSTSDVAPQIVPTENAECHGVNPTIGPQEHDQCTTSNGHNMLAIAGQESSQVELWDITSTRKIVTLPQTCSANATDHPTKKKGLCMAVQAFIPHESAGYVNILSSYEDGSTLWWDVRKPGLPLSSVKYHSESALSIAIDGFCNGGISGGADDKVVMFTLDHPKGTFILRKEIELERPGIAGTAIRPDNKIAATAGWDHRIRVYNYNKGNALAVLKYHSASCNAVTFSSDCKLMASCSADTTVALWDLYPPKPQSKADITETDEASC

SEQ ID NO: 193579 - protein, 57 aa, Zea mays
  unsure (1)..(57): unsure at all Xaa locations
  Clone ID: MRT4577_108127C.1.pep
MDDAAENILASLGRVHLVDLMASEGLPSDSYXXMCXVSTLMQSLAQYSAAIIQLSPA

SEQ ID NO: 193580 - protein, 83 aa, Zea mays
  Clone ID: MRT4577_108128C.1.pep
IADKYGILPYPKPIRPIQYLSSSHILIYATLPPISLAVAAASASVGLGHNHPQHADHQEQQSQFQLLPLLLILVLVLNRGWGC

SEQ ID NO: 193581 - protein, 100 aa, Zea mays
  Clone ID: MRT4577_108129C.1.pep
CGAQGGRVRRGTHINLLSCAFSHHVLMSMAYHNDEQTVMDQISYKFKMRNTSSTLESIHENKNLPFSASATEAMEATTTISSAARAPSALSIEDLRPPRS

SEQ ID NO: 193582 - protein, 60 aa, Zea mays
  Clone ID: MRT4577_10812C.1.pep
LSRLISSQPISIATLTSLPRLILLVITQRRTLGININMLYAQSSKLVLQTLPQLSTQYML

SEQ ID NO: 193583 - protein, 117 aa, Zea mays
  unsure (1)..(117): unsure at all Xaa locations
  Clone ID: MRT4577_108130C.1.pep
ARGFQISAAPXEERKKRVYSTAPSKXXXIDQYSGLGFRLVRMGFEDMYLCSPGGMYAKFGKDYFLCTGMASMLVPVVVNPGEEWKAAQVIEHDNLGITESNGAQLHSRIHVDGPDLQ

SEQ ID NO: 193584 - protein, 154 aa, Zea mays
  Clone ID: MRT4577_108131C.1.pep
LLSPAVDHVVRIRKSVVIYVYMCARLEQRNPIVVWRSKSQHNFFLCLMNCLNQTSSSISRFRVGFRKWLNDSLVRLIDMMNRLIDTLVTIILCGSLTDALWYVGQIRCCAYVYCSMVMLGKNLCSPFYFVMLWLYLVLACNTQNCVQEIHGDFL

SEQ ID NO: 193585 - protein, 92 aa, Zea mays
  Clone ID: MRT4577_108132C.1.pep
MSRTRPLKRNDRAGTSFFFFFFFFFEKKKKKKNKFFLSRVVVLKGYFRGFPSHWGGFEHPFGGPNWPYRGGTITMHWPGFNNFLSGKNLGLT

SEQ ID NO: 193586 - protein, 58 aa, Zea mays
  Clone ID: MRT4577_108133C.1.pep
LEIISPLFQGPRFSFLGCAPSPLALGFVKAPGISWSYSVKTPLFGFQKMKRLFSFWGG

SEQ ID NO: 193587 - protein, 55 aa, Zea mays
  Clone ID: MRT4577_108134C.1.pep
LCTYTEYLSFSLMINNQKFFLPLHINIHPLSKKYLIHHLVLPIPCYQSLNPVQLL

SEQ ID NO: 193588 - protein, 66 aa, Zea mays
  Clone ID: MRT4577_108135C.1.pep
QKKKKLGKKKRHSLLLFFIDRPIHRRVWPKGHNDTFFFGTLRFPRREEVTPEGSVFLIAPRPLALG

SEQ ID NO: 193589 - protein, 139 aa, Zea mays
  Clone ID: MRT4577_108136C.1.pep
MAAPATTSLLSTLLNLPLAPLSGKSSPPSVVHVARRGPMVVVAAKGYNVQILVDENEGEESIFRRFRREVMRAGVLQEIKRRRRYESKTDEKKRKAREAGRRNRRRRMMDEPRFPEEDADATAKARDEDDDNWEIDGIL

SEQ ID NO: 193590 - protein, 104 aa, Zea mays
  unsure (1)..(104): unsure at all Xaa locations
  Clone ID: MRT4577_108137C.1.pep
MARMKIREYDSNRRAMEHLKRLASIDLTILSAQITQSTDFPNLXNQPPLLSTINLVVKPDMLFWKPAKSSLFGFQLDINSIXDFSRNRFGFXVEIGCFKAPITT

SEQ ID NO: 193591 - protein, 30 aa, Zea mays
  Clone ID: MRT4577_108138C.1.pep
HTYLHFNLNDIHEIRLSGGFHNRGTHHHSC

SEQ ID NO: 193592 - protein, 86 aa, Zea mays
  Clone ID: MRT4577_108139C.1.pep
HTEPGRGRSARRPRYSSPTSFHSYPGRPPRLCPNGAVYGPTVCSVEEVEPPSLLGGHPVRHSRRHGLFIPSSPIFQAFARCRASRG

SEQ ID NO: 193593 - protein, 426 aa, Zea mays
  unsure (1)..(426): unsure at all Xaa locations
  Clone ID: MRT4577_10813C.1.pep
MRLSQNTLNTKQPAKVSKDDGGGPLGEPINNFLGQALVEFFGTLSREWALECMKDLLLVNLRGNLQIVVQATKEYSEQLGVDACIKLFEQFKSYEDLYFFLGSYLSSSEDPDIHFKYIEAAARTGQIKEVERVTRESNFYDAEKIMNFLMEAKLPNARPLINVCDRFGFVPDLTHYLYTNNMLRYIEGYVQXRNRLCLLTQFLEHLXSEGSQDVHVHNALSKIIIDNNNNPEHFLTTNPFYDSRVVGKYCEKRDPTLAVVAYRRGQCDDELINVTNKNSLFKLQARYVVERMDGDLWDKVLQPENEYRRQLIDQVVSTALPESKSPEQVSAAVKAFMTADLPHELIELLEKIILQNSAFSGNFNLQNLLILTAKAQLREGLVSEAIESFIRVDDAAHFLDVIRAAEEANVYNDLVKYLDQLTCYDC

SEQ ID NO: 193594 - protein, 49 aa, Zea mays
  Clone ID: MRT4577_108140C.1.pep
PTRPGNSSGSDDWIEPAAYVLNSTALLSREHRNVVDAFRLLQKDPTVQV

SEQ ID NO: 193595 - protein, 120 aa, Zea mays
  Clone ID: MRT4577_108141C.1.pep
LTGVCQLLYLIIFVPYNLFKLFLVHKISTYNYICENGKRKKEKEFQVNRAGGGGFRPGRERAAAANWAQTAHEERGTARRTPWAWAHVPEKGGRLTALNGARGEGAGRGSVAGEIPWRFS

SEQ ID NO: 193596 - protein, 136 aa, Zea mays
  unsure (1)..(136): unsure at all Xaa locations
  Clone ID: MRT4577_108142C.1.pep
NKAAARGSRFCLVARRXTWCVGRPAPRVTDLAPPRRLSSRAFLNSASSWLMPPPXWAWXXSATDSPPAPPCYRQGSXLAYLSGPSSXVAIIISSKSGKAVSRIGHPDLFIYLFIYYIYALRSWPFPSPSMYITGVT

SEQ ID NO: 193597 - protein, 85 aa, Zea mays
  Clone ID: MRT4577_108143C.1.pep
YTTAANQLSFLPANGTTRALENLISLAGMEEVVPSLTLVEEAWLAHRQQWRGRNDSEVHQWRRHKASHAHRLPWQRHRRHRAHTT

SEQ ID NO: 193598 - protein, 123 aa, Zea mays
  Clone ID: MRT4577_108144C.1.pep
LPPPPSAMAGAAATAHCSLSRPPSPTLARTSSSPSPPHLPLAPATREVRARPLRALPARCPPARQSCSALLHLPTPPKSSQELPCVNLPLPIATSAVFITMLVTASMSSQAFLSSSSSDLSMP

SEQ ID NO: 193599 - protein, 56 aa, Zea mays
  Clone ID: MRT4577_108145C.1.pep
RNRLGGDNSRYASGERTYEVYDQPTLRSKGERYGKYAEIALPTRRMCGLNETYCYS

SEQ ID NO: 193600 - protein, 74 aa, Zea mays
  unsure (1)..(74): unsure at all Xaa locations
  Clone ID: MRT4577_108146C.1.pep
PRLRPIVRPRVPKECILCPVSEYPLYSTLITLHGGTLVPYXLNEKTGWGLENSDLKKQLENARSKSIDGKALVG

SEQ ID NO: 193601 - protein, 41 aa, Zea mays
  Clone ID: MRT4577_108147C.1.pep
FVFDTIVWMFISRQVPSSLVLCSMHVSIVFPPCPYSLVPNS

SEQ ID NO: 193602 - protein, 65 aa, Zea mays
  Clone ID: MRT4577_108148C.1.pep
ASFQPAAQREQPPINPFQASTMGFHLSSYHALSLDSDCACVYASRPKYPSRSPKADPVTSSSRFF

SEQ ID NO: 193603 - protein, 77 aa, Zea mays
  Clone ID: MRT4577_108149C.1.pep
ERPPGQVRNKKYISKKKKKKKKKKKKKKKKKKKKKKKKKKKKKKKKKKKKKKKKKKKKRKKKKKFFFLGPNPLRGNF

SEQ ID NO: 193604 - protein, 37 aa, Zea mays
  Clone ID: MRT4577_10814C.1.pep
LSKEKDQIQKKKKKKKKKKKKKKKKKKKKKKKKKKKK

SEQ ID NO: 193605 - protein, 429 aa, Zea mays
  unsure (1)..(429): unsure at all Xaa locations
  Clone ID: MRT4577_108150C.1.pep
MSSEDLFDGLPPPAAATAPAGGGAGAASLLQPPPPPPPPSLAQATAPKPALKSSLKRSKPSPSSDATPSSTPAPAAAAPESHVPEKRLRFRTTVDASETQVIEAMQKIASHIGNASKFSKASKLALQLIEAGSVKPGTIGHFFAILEAAMSSPGVCNEPSVRADYHKLFDAAQGVTELLNQEQKNRFNIWVLHAVVANDLFTDDSFVFSKAVGKIKDAISALPVATVDDDNDEAAALAAASKTDXGDGQRSRSXVPAAASDSVVDDGAHAVALEPEEESSDPFGLDGLLEHRPKKTSGRAREKXRGSEQKDGXEEAKRVLKSQREALLKCLEIAARRYRIPWTQTAIDILAKQAYDDAARFTRRQRDAIAKLWNSIKEQQIRRKQGKSVSGKLDVNAFEYLQEKYSREKMSIRHSVGGGGDRRATQWLG

SEQ ID NO: 193606 - protein, 379 aa, Zea mays
  Clone ID: MRT4577_108151C.1.pep
MGIKGLTKLLADNAPKAMKEQKFESYFGRKIAVDASMSIYQFLIVVGRTGMETLTNEAGEVTSHLQGMFNRTIRLLEAGIKPVYVFDGKPPDMKKQELAKRYSKRDDATKDLTEAVEVGDKDAIEKLSKRTVKVTRQHNEDCKRLLRLMGVPVVEAPSEAEAECAALCINDKVFAVASEDMDSLTFGAPRFLRHLMDPSSKKIPVMEFDVAKVLEELELTMDQFIDLCILCGCDYCDSIKGIGGQTALKLIRQHGSIESILENLNKDRYQIPEDWPYQEARRLFKEPNVTLDIPELKWTAPDEEGLISFLVKDNGFNEDRVTKAIEKIKSAKNKSSQGRLESFFKPTATTSAPLKRKETSDKTSKAAANKKTKAGGKKK

SEQ ID NO: 193607 - protein, 256 aa, Zea mays
  Clone ID: MRT4577_108152C.1.pep
MACYLEVVDLGVWRVTHDGMKPPKNPEKLTTNNELVRYMYSRLNLIINELNYIGIKKLGDADIMGQEEQTSSMPYAFACDEKKDKKKAATPSSSSEEEEEKERDDDDQPSTSSLKDKETIQCVGKVEDLLLNINRKKQKRYDASYARRRATSRTTVQIWSNPQRGGAKGYPDYHPKTCLTLKDVIRAHSLRMKGSGSASPEVPLRGLPKNSASLEPNLGEGVSSGGSLPHSRPSHSRAAMFTSPEPVSGDKDKTCE

SEQ ID NO: 193608 - protein, 72 aa, Zea mays
  Clone ID: MRT4577_108153C.1.pep
NISLLNYEKRGFPSPAKINVFWELVKTKKGGPFVGVKSFGKKKFSPAPKICQFFCKAPWISGEGTFFVGWSS

SEQ ID NO: 193609 - protein, 54 aa, Zea mays
  Clone ID: MRT4577_108154C.1.pep
KRPPPPPRGPLGAPGRRTPKKKKKKKKKKKKKKKKKKKKKKKKKKKKKKKKKPP

SEQ ID NO: 193610 - protein, 61 aa, Zea mays
  Clone ID: MRT4577_108155C.1.pep
PMSLVCSSLALILCLLPVPLVPTPQNHPLGDSPAIPPVIQLHNNGCCPPALSLIYIYGYMQ

SEQ ID NO: 193611 - protein, 57 aa, Zea mays
  Clone ID: MRT4577_108156C.1.pep
NHPLLPKSSQIKCPFSNMEGWRTSESKEEAEGVIGIFLLILPNTNQLLAKRYLLWII

SEQ ID NO: 193612 - protein, 111 aa, Zea mays
  Clone ID: MRT4577_108157C.1.pep
MHAYVSSEFGSSYWELLATTKASKQGAAQAVAGDVLERCCLEMEEALNSVYRQSRVADGSIGPLEIRVVRSGTFEELMDYAIFRGAFINQYKVPRCVYFPPIVELLDSRVV

SEQ ID NO: 193613 - protein, 73 aa, Zea mays
  Clone ID: MRT4577_108158C.1.pep
IPKLSRMVKYRKPRLFPGFRLFKKPGNPTLLLKSWSGLEACNWKFHHLIRVRWTCQACQAGGLAITSERGSRP

SEQ ID NO: 193614 - protein, 97 aa, Zea mays
  Clone ID: MRT4577_108159C.1.pep
NHPLLPKSSQIKCPFSNMEGWRTSESKEEAEGVIGIFLLILPNTNQLLAKRYLLWLLQFYCCFMFFLKHFSILLSFSTCDMNIVSSFFCNTIYCRII

SEQ ID NO: 193615 - protein, 275 aa, Zea mays
  Clone ID: MRT4577_10815C.1.pep
MGAWEWTTRMPGCSKIGSFWWKSLLTFVQDYKGLAAPKIGDGRTILFWEDMWNSGIPTNQFPELFSFARNSKLSIKEALQKEQLIEIFQLPLSVQAHEQFLDLDATWGQIMTQVHQIFRSLWKNKCQPKHKVFFWLWLKNRLNTRDMLKRKNMNLESYTCENCIWQKEETLYHLFLKCNFAKACWTSIGLTSPRIANPEAAAVNLMQQLNVPFSMEIVILMNWSIWKTCNAWLFQNKAPTVQHCQNEFARELHLVMLRAKGRFDSTIPAWLQLWQ

SEQ ID NO: 193616 - protein, 71 aa, Zea mays
  Clone ID: MRT4577_108160C.1.pep
AFTLLQQLPLSLNIYHLWPYAHPPIHLYTLNILHLINLPRRAVRLVTTTIIRMKRRSYISPRPRYIFGTIR

SEQ ID NO: 193617 - protein, 103 aa, Zea mays
  Clone ID: MRT4577_108161C.1.pep
SNTTSVLRFCFAEDDSAVEEKDGTVTSFTQSLPFTEYRSFASCQCNSRYALSRQDSVLKATLPWLFVSVSAGGEDDGAGKGECERQEGRSRTAPVGQRHVVNL

SEQ ID NO: 193618 - protein, 63 aa, Zea mays
  Clone ID: MRT4577_108162C.1.pep
NPRSTHAFDHTYAYPDKLNAHNTYQKNLQILNQSIPSTLPTPSFPLISLLQRSLPTIQSPVLL

SEQ ID NO: 193619 - protein, 60 aa, Zea mays
  Clone ID: MRT4577_108163C.1.pep
GLPQQKMTSTEPNKMEHFQTPFHVYRNHSPNTLGLKQSKLTSCQPPIPSPNIMRNHKPHL

SEQ ID NO: 193620 - protein, 97 aa, Zea mays
  Clone ID: MRT4577_108164C.1.pep
ENRKLSGNLLKTMGGVQGRMTMFPGILQRESQINNQILLSSMPHKASGVPFDREGKKTRSSGVNRECFFVQMGNVKQGIKRLKGGIGLTGPCLRRKG

SEQ ID NO: 193621 - protein, 109 aa, Zea mays
  unsure (1)..(109): unsure at all Xaa locations
  Clone ID: MRT4577_108165C.1.pep
GPLGGPLGGPSGGRAGGPGGRRGGRPGEXGPGPGGGPGNPRPGPERTRRNQGXKPDPGGKGKPAKMPNKKKAGTKKRKPRGAKGRKKPKGGGAKKRTQLKSGNPAPQPH

SEQ ID NO: 193622 - protein, 57 aa, Zea mays
  Clone ID: MRT4577_108166C.1.pep
KDTCNEHCNIDSVIVTVDLRADQVALQYAVMYRAKLRLEFGLAACMIACIKACQQFQ

SEQ ID NO: 193623 - protein, 78 aa, Zea mays
  unsure (1)..(78): unsure at all Xaa locations
  Clone ID: MRT4577_108167C.1.pep
RHGLSRQASRTALPPPQSLSGCPRSRIRGKRKVRVRPLSVCAVPARGGGLSADPIRDSAPHGRWWVEXWDRWGKTSPG

SEQ ID NO: 193624 - protein, 58 aa, Zea mays
  Clone ID: MRT4577_108168C.1.pep
RRRRPPPPACAHSFLLLHMRCCLSLVFLNIFSPLQPHSTDAQRQCIILCRLPSMQIFQ

SEQ ID NO: 193625 - protein, 79 aa, Zea mays
  Clone ID: MRT4577_108169C.1.pep
TTSGSSSLSVAWMVKLIPLAVERDGVVHALRFEGVVILDSSDEVQRGDLAPVELQLLHVVVVRPGVVHQDVPHGLAHEI

SEQ ID NO: 193626 - protein, 82 aa, Zea mays
  Clone ID: MRT4577_10816C.1.pep
MAYFMDLRAFILRTHVLKLYRQALRITHRAPVHARDELRQTARAEFEKYRHCDDKQKIRFLISEGKQRLKGLDELLDMTGNS

SEQ ID NO: 193627 - protein, 98 aa, Zea mays
  Clone ID: MRT4577_108170C.1.pep
KKKKKKKKKKKKKKKKKKKKKKKKKKKKKKKKKKKKKKRGANWGGPFFGSPFLPPFCLFFGSFYWNPLALFLPRFFRENPGETPFFPLFKPPPFPPLF

SEQ ID NO: 193628 - protein, 71 aa, Zea mays
  Clone ID: MRT4577_108171C.1.pep
DPHVLSSSTSACFLRDGQSHRESIFQILVRPPHSNQPDYFKLVNALLSKHNVHLVTFPSANTHIYVSYLFN

SEQ ID NO: 193629 - protein, 107 aa, Zea mays
  Clone ID: MRT4577_108172C.1.pep
VKLHAKHDEACDERDRDGVGDGPPAALRRDRRRRGASRRRRRRRYDRVVEPRRRRGIDGEKRLVKGPPLDTNAVLRRRRQQQPSYRRRNEQRSHNNFRSSRHRTALV

SEQ ID NO: 193630 - protein, 60 aa, Zea mays
  Clone ID: MRT4577_108173C.1.pep
MLPAKLRNHEQRATTLFLTKLDLILGSQRLTRTTNLTQAIFKLRQGHRSKRYPTTKKRHR

SEQ ID NO: 193631 - protein, 137 aa, Zea mays
  Clone ID: MRT4577_108174C.1.pep
HTLLGVFGRRGLGDPADLVALSGGHTVGKASCGFIRRGNDDFAQRIAAICSGKQSLDVITPDAFDNRYFVALRSTQGVLLSDQGLNGDQRTSRFVAAFASNQGAFFDQFAKSMVKLGSIRAAAPGEIRRNCFRPNGG

SEQ ID NO: 193632 - protein, 98 aa, Zea mays
  Clone ID: MRT4577_108175C.1.pep
GFEEFKYLWNNIKKWQGIYKRFDTDRSGTIGSNELPGAFEAAGFHLNQHIYSMIIRRYSDETGNMDFDNFISCLVRLDAMFRAFRSLDKNGTGQIQVN

SEQ ID NO: 193633 - protein, 109 aa, Zea mays
  Clone ID: MRT4577_108176C.1.pep
SSLHPSEIRPKSGRHAWAIGATLWRSADGVVEQQGARCGGQCLAQLCRKARVIDIREDRGEGLNFGEQASKYTTGNAPYDGAKASSSTRSVPCFGSRRRVSPKASLCCP

SEQ ID NO: 193634 - protein, 104 aa, Zea mays
  unsure (1)..(104): unsure at all Xaa locations
  Clone ID: MRT4577_108177C.1.pep
EKLPERPCEADCTYYLGTGACGFGERCRSNHPRDRPAPVYGFGTTIGMEFPXRPGQPLCEYYAXNGACKLGSFCEFDHPMECGCVPVPFISRGLPLRPGALACS

SEQ ID NO: 193635 - protein, 75 aa, Zea mays
  Clone ID: MRT4577_108178C.1.pep
NSRVSSKVKEVTWGNIFKGRSVSSMRLDSHTRSSALEPFLLGQRVYQLGVKIILAVPLRKSIPSILEISKVISDG

SEQ ID NO: 193636 - protein, 74 aa, Zea mays
  Clone ID: MRT4577_108179C.1.pep
YGLGIRGPRQVVSSVALYSLLLFTATTSSRPTNSREAQTSNSIQNNHPRIMLYMYPLLFFSLSFKLAAVICYLN

SEQ ID NO: 193637 - protein, 66 aa, Zea mays
  Clone ID: MRT4577_10817C.1.pep
MGCRSCSLRPGLGDVEAPPKPRSSLSSMAEAESEPLGRARRRSSAEARAESEPWGRAKRSSSSSGA

SEQ ID NO: 193638 - protein, 549 aa, Zea mays
  Clone ID: MRT4577_108180C.1.pep
MPNPAGRRLASPSIFRVSSETSSKSIFRYSALRLPRLLRNPIRRPAAMDPAPQTHPILSYVLSRIPNLSMTKTPTAEFDIEQPPVHTPSPRTPSSAGEFELVERMPGLRHPSVLRAMTRAVADVSAARSALQVLGPRPDHELVDSSRAIVAAAEAGDSRIPAGDVEACRAVVRLDETHDAYEALLHEAESRLERVYRSAMEGTDLDDEAAESVKDQGPVAGPEGGDAAVGEEVVAVLKQAEEGKPVESVRLVDRQLRHLPEAFGRILGLRVLDVSRNQLEVIPDAIGGLGHLEELFLTANDLVSLPDTIGLLSNLKILNVSSNRLRALPDSISKCRSLVELNVSYNGLTYLPTNIGYDLVNLRKLWIHMNKLRSLPSSVCEMRSLYLLDAHFNELCGLPSLFGKLSGLEILNLSSNFSDLKELPPSFGDLLNLRELDLSNNQIHALPDTFGRLDKLEKLNLEQNPLVMPPEDIVNKGVDAVKEYMSKRWLDILLEEEQRRIAAETPEMSSTPKAWLTRSVSWVTDVSESLAGYLGGNKSEKDAYLDQQF

SEQ ID NO: 193639 - protein, 66 aa, Zea mays
  Clone ID: MRT4577_108181C.1.pep
PPTYKFFLSHTKTQWRSINQLCKPIFYNKHIVATLLLQPKCLTATTILATFNIPNNNNRLTISNPT

SEQ ID NO: 193640 - protein, 96 aa, Zea mays
  unsure (1)..(96): unsure at all Xaa locations
  Clone ID: MRT4577_108182C.1.pep
FMHSGWFXGYPCSPYPCPIWWKTLGDKAGFFGXLNXLLGGEKLPEENRGRGQEILFQDCXKKSKSPFPWVYPQIGSCGLVHPPGIKTAPPDFFSPN

SEQ ID NO: 193641 - protein, 63 aa, Zea mays
  Clone ID: MRT4577_108183C.1.pep
RLAFSFLFIEHRPNKRGELFGPFHENLHRSQRNKILINNCINYISLVSHLGWHACVQPMPVAS

SEQ ID NO: 193642 - protein, 82 aa, Zea mays
  Clone ID: MRT4577_108184C.1.pep
KDYCAGGCMASYCTNENKTMMCRADSYLITFISRCSPIIKALAVYLADEHRQFLFSLFPCKSFPISYVFGCLLPREAIPFLT

SEQ ID NO: 193643 - protein, 166 aa, Zea mays
  Clone ID: MRT4577_108185C.1.pep
MAASTFSGDETAPFFGFLGAAAALVFSCMGAAYGTAKSGVGVASMGVMRPELVMKSIVPVVMAGVLGIYGLIIAVIISTGINPKAKPYFLFDGYAHLSSGLACGLAGLAAGMAIGIVGDAGVRANAQQPKLFVGMILILIFAEALALYGLIVGIILSSRAGQSRAD

SEQ ID NO: 193644 - protein, 117 aa, Zea mays
  unsure (1)..(117): unsure at all Xaa locations
  Clone ID: MRT4577_108186C.1.pep
ANSPITGFFRGVSIVKVLPPPHFENFLKGLGAQTLVKFTLXLEYVERKMGWDNGLKKASSRFFLRDIISGLLDLHFHNGIHGGIKPDHLLVTSTGNVKIGDFSVSQVFEDDDDMLWR

SEQ ID NO: 193645 - protein, 620 aa, Zea mays
  unsure (1)..(620): unsure at all Xaa locations
  Clone ID: MRT4577_108187C.1.pep
MTRCGRCRQCECAGASTTTSHGDARNRDNDAPDAVLEGLAMAGLVDILRQLGDLAELAAEVFDDMQDQVMAASARGRRLAARARKLLAADLDLVLDLDLPPPSTQEHRCLSSAAAXYCSRHLRWXGRLGCRSYLGGAPPMPRVVVQRIERCRGPPRLSLLDKFDAAGDGACLKRYTDPSFFFRAHSAKIDEQGTLKQHRRQAEAAAAAGAAGSMFLLMQQTAAHRVEQPNMEQKLQEGSTAQPSPSELERTSSFEAWLSPQARRFPTATAATTHHHLQEPPDDDDGGGGGGATTCSGSISSQVDTTSNAAAVSSSSTVKAVRLNSASLVKGGESNTTRSRYKGKIASRVSSLPRKLFMNTTKHHNDHSRSFRAGSSSLRVTQATDIGDCSPELEAIAVAIPTPDRCSNSNSSTPETCTAADSKNLLLLLPGSGPVLEPPDNSSAAAAEDAKVHTPLAPIPPMQWLSEKGTPPASPKHRTPCFQQQFGSSGQSDEKPSQEHEASDHSSNLLQESVFFSAAQELAKMSPPPPWVPRPKYPLLDVKALRNGPSPIHPSRNILDSRSAQIKDIAISSKLKPASRASSHVTGTGSPTNATILNRADGIRQVHDDETDQIWSDDTQ

SEQ ID NO: 193646 - protein, 68 aa, Zea mays
  Clone ID: MRT4577_108188C.1.pep
ALVRGLVFDDDHWESIPARAHSLSGGRLRHGVGGLRLGLDRDRCDQIGARLSIRGASAAPGPCTPVPL

SEQ ID NO: 193647 - protein, 217 aa, Zea mays
  Clone ID: MRT4577_108189C.1.pep
MASGGGNAAADAKHVDAEVVIVGGGIAGLATALALRRAGAARRVLVLERHAGHRATGAALTIFPNGWFALRALGVAHKLASRYDAYETSRVTNLETGATQVFRFAGNKNKKAPLLYRNPVSVLLGPAARGPVTVAGDAFHPMTPDMAQGGCSALEDAVVLARALSREATPAEGVSAYVAQRRRRAAWLVAGAYLSGVDPAGRDQRRRRARQPVEGVP

SEQ ID NO: 193648 - protein, 102 aa, Zea mays
  Clone ID: MRT4577_10818C.1.pep
ILEHHFGWGECGHTIWNSFFFSAHAKAHMETKFNGGEKKPHGFVLKHYYGSSNDSIACATNSLNRTLCCSLQGQVAIDHSALGIAPLSGIAVTRTRATSEDR

SEQ ID NO: 193649 - protein, 137 aa, Zea mays
  Clone ID: MRT4577_108190C.1.pep
DPRAAGRALCRLFVPRAAPAPPHIPISRGQAQVCGGGGGGGSASGSPFPLASTMALRLNDVALCLSPPLAARRRRGRSRGFGLFWRRCAPFLPASRALSGFRRGLHLQAGSMLRPHPKTAMPACSLNLIRKSVLLTL

SEQ ID NO: 193650 - protein, 68 aa, Zea mays
  Clone ID: MRT4577_108191C.1.pep
CITAQTIQGERLSWLICSLCYLGYSWCQDSYVLVSHCLILQLFSHSVTIFVVPRFNNTYACTQVSSLT

SEQ ID NO: 193651 - protein, 388 aa, Zea mays
  unsure (1)..(388): unsure at all Xaa locations
  Clone ID: MRT4577_108192C.1.pep
MASGGGNAAADAKHVDAEVVIVGGGIAGLATALALRRAGAARRVLVLERHAGHRATGAALTIFPNGWFALRALGVAHKLASRYDAYETSRVTNLETGATQVFRFAGNKNKGEEVRVRALDRKALLEALAEELPPGTVRFSSKVVSIDTERAAGDSSVTVVLGLDDGTVIRAKVLIGCDGVHSVXVARWLGLSEPASSGRSAVRGLSVFPGGHGVKRELRQFLSEGLRAGMVPISDTDIYWFLVNNTVAAEKEAAGDPVKTLREVTDNLARHMPAEYLDVVRHSDHGNLSWAPLLYRNPVSVLLGPAARGPVTVAGDAFHXSMTXDMAQGGCSALEDAVVLARALSREATPAEGVSAYVAQRRWRAAWLVAGAYLSGWIQQGGTNVGGV

SEQ ID NO: 193652 - protein, 76 aa, Zea mays
  unsure (1)..(76): unsure at all Xaa locations
  Clone ID: MRT4577_108193C.1.pep
KWEFPILGFEIPLFSLWVRWIRDPQGFEGVPPGEEVYIILCLDGRVKKFGIGLPNWNDIFQELPXPLXDLMSQLER

SEQ ID NO: 193653 - protein, 75 aa, Zea mays
  unsure (1)..(75): unsure at all Xaa locations
  Clone ID: MRT4577_108194C.1.pep
TRSEGHIITGDKNLILTFSITHAFLWMMTAFKFGIYLFIAERITNMTVNVYFFXMPKTKGVPIXEIVLLWRKHWI

SEQ ID NO: 193654 - protein, 450 aa, Zea mays
  Clone ID: MRT4577_108195C.1.pep
MESDQGKLFIGGISWETTEEKLSEHFSAYGEVTQAAVMRDKITGRPRGFGFVVFADPAAVDRALQDPHTLDGRTVDVKRALSREEQQASKAANPSGGRNTGGGNGGGDANGARTKKIFVGGLPSTLTEDGFRQYFQTFGIVTDVVVMYDQNTQRPRGFGFITFDSEDAVDHVLQKTFHDLGGKLVEVKRALPREANPGGSGGGRSGGGGGYQSNNGHNTSSGSYDGRSDGGRYGQTQQGSGGGGYPGYGAGGYGAGAAGYGYGANPAVGYGNYGAGGYGGVPAAYGGHYGNPGAAGSGYQGGHPGSNRGPWGSQAPSAYGTGGYGGSAGYSAWNNSSGGGNALNSQAPGGPAGYGSQGYGYGGYGGDPSYASHGGYGAYGARIDSAGNPATGGSSGYNAGYGSGGANSGYSSAWSDPSQGGGFGGSVNGGAEGQSTYGTGYGSVQPRVAQ

SEQ ID NO: 193655 - protein, 177 aa, Zea mays
  Clone ID: MRT4577_108196C.1.pep
GSPSVRPASAQRPPSVRETSAAGSGYQGGPPGSNRGPWGSQAPSAYGTGGYGGSAGYSAWNNSSGGGNAPTSQAPGGPAGYGSQGFGYGGYGGDPSYGSHGGYGAYGARSDGAGNPATGGASGYGAGYGSGGANSGYSSAWSDPSQGGGFGGSVNGGSEGQSNYGTGYGSVQPRVAQ

SEQ ID NO: 193656 - protein, 295 aa, Zea mays
  unsure (1)..(295): unsure at all Xaa locations
  Clone ID: MRT4577_108197C.1.pep
NSARGRPRGFGLRTFDSEDAVDHVLQKTFHDLGGKLVEVKRALPREANPGGSGSGRSGVSGGYQSNNGHNTSSGSYDGRSDGGRYGQAQQGSGVYPGYGAGAAGYGYGANPAIGYGNYGAGGYGGAPAAYGGHYGNPGAAGSGYQGGPPGSNRGPWGSQAPSAYGTGGYGGSAGYSAWNNSSGGGNAPTSQAPGGPAGYGSQGFGYGGYGGDPSYGSHGGYGAYGARSDGAGNPATGGASGYGAGYGSGGANSGYSSAWSDPFTGGGFGGSVNGXSEGQSNYGTGYGSVQPRVAQ

SEQ ID NO: 193657 - protein, 106 aa, Zea mays
  unsure (1)..(106): unsure at all Xaa locations
  Clone ID: MRT4577_108198C.1.pep
PPPPPPAPPPPLPPPPPAPPNPPSPPPQPPRPASPGPFNGPPPSPPPXPPPPLSAPPPPPPLKNPPPPPPPPPSSQPSPVSSSHARNGNLVHREAISPSPNPGQFS

SEQ ID NO: 193658 - protein, 137 aa, Zea mays
  Clone ID: MRT4577_108199C.1.pep
TSCQQKEASSTKSSLIHWGAMLYHKHPRSPVCKQAARCTTQPSPQDLGPCSLRPSQSGSSQQVALRPLSCSTAQDPSENEALKLVSCILSEPRYWNFSPFHVNHCATCLFQMPDFIDLAWAYLKKECHPIQPVHKGR

SEQ ID NO: 193659 - protein, 508 aa, Zea mays
  Clone ID: MRT4577_10819C.1.pep
MAASGYSGSAPITDQGFEGWPPKEARGLLSQKPAPAKPLTASTYQPESLGPDRAPGLRPVRMRERPDQPKHYTSLTEGQRRLRHSDCGATRQSESNRQSGLAKGATANSAPPDPRARTRAKTRKTANSAPPDPRARTRAKTRKTANSAPPDPRARTWAKTRKTANSAPPDPRARTRAKTRKAANSAPPYPRARTRAKTRKTVNSAPPDPRARTRAKTRKTTKLRLARPQGSDSALASAKRPPPRPTPGLGLGLGNRRQTQPRLRRSPHVTLPRAQTRHINRKRHHRPTPNRLGSRRTRPASHPASSAGWAMMALHKLCDDGGPQLSYGSRATSARTRPLQQLSLRQAPSHLRQPRHHASKGLILSNALRAQKNIEDESYTMALNNLHSEVIELRNEDDIKDPSAEATMMGGKFYNDVWVNGGREMAHEIIKKSEKDTQDARTKARRAEEVAEREKRIAELSMPPEPFDPLADPKMKEALEIINMAESIVDEVVNKLLNEVAEKVLKEE

SEQ ID NO: 193660 - protein, 119 aa, Zea mays
  Clone ID: MRT4577_1081C.1.pep
MAEDQGNAKQMAEDQGNAKQMAEAPSKIESMRKWVVEHKLRAVGCLWLGGISSSIAYNWSRPNMKPSVKIIHARLHAQALTLAALVGSACVEYYDQKYGSSGPKVDKYTSQYLAHSHKD

SEQ ID NO: 193661 - protein, 36 aa, Zea mays
  Clone ID: MRT4577_108200C.1.pep
AVHYDTHLISSLKISARYTYCLRTILYFHLHIFNHS

SEQ ID NO: 193662 - protein, 61 aa, Zea mays
  Clone ID: MRT4577_108201C.1.pep
VLVLYRRKRPFLCRVNCLVGHTAHQRQLEAADLWPQVCVILIPNKRVFPGHPCLVRRKVLW

SEQ ID NO: 193663 - protein, 516 aa, Zea mays
  unsure (1)..(516): unsure at all Xaa locations
  Clone ID: MRT4577_108202C.1.pep
SLQTLSIPKDWKCAKQDPKWKDAMKEELLALQKNKTWELVHLPEGKKAVGCKWVFTVKQTPEGKIDRYKARLVAKGYSXTYGIDYDETFAPMAKMGMVRTLISCAAIGWTFHQLDMKNAFLHGDLQEEVYMEIPPGFANEQTVGKVCRLKKSLWSEIXSPHAWFDIFRRAVCDMGYYQCNGDHTVFYKHQGSCITILVVYVDDIVITGDDVKEIRKLKERLGRAFEVKDLGPLRYFLGIEIARSSKGIILLXRKYVLDLLAETGMLGCRPCGSTIDKNHQTCAELGDPMDRERYQRIVGRLIYLCHTRPDIAYAVSVVSRYMHDPRVGHMRVIYQILRYLKGTPGKGLWFRANQHLNLEGYCDADXASSRDDRRSTSGYCVFVGGNLVSWRSKKQAVVSRSTAEAEQRAMDLALCEMMWLKGLLKELQVXKNETMLLHCDNVAAINIANNLVQFDRMKHVEIDRFFIKEKIDGGALKLNYVKSRNQLADSLTKGLGPKDNELACNKMGMLNIFSPS

SEQ ID NO: 193664 - protein, 317 aa, Zea mays
  Clone ID: MRT4577_108203C.1.pep
VRPSVHGSGHFCGMAEMVGPVDFHKDMDFWCQDKWTGCFPVRWHIVKDIPNGSLQHITLQNNENKPVTHSRDTQEVPYLPGMSVINIFKDIKVRYCLFDDFMSYEAEEAQKRAHRRCKLSSNAPDFVPVSQRTKDESGTEQRESRSVLVDRTSGIQNAAEKPHDTKVIKPQDPCVSEEQASEAEKENGPQGCRCSGNQGQEEAAKTATNHPPASGLKAAGVEGKQQQQRWKKVENPKQHADSVPAQCSQEEAPEKRLNGVSGCSSAVQEGCEEQRAAAKLASLKIGSRAAVEADRKTSAVGVVTIGSMPVRVDCCDV

SEQ ID NO: 193665 - protein, 89 aa, Zea mays
  Clone ID: MRT4577_108204C.1.pep
CRHFSTIVCKSYRSDSAVVCICYKQPSISNSYKSSWFKKMSSEACTMPVSCTLRSTYSCNFSCAGLSPIYLMVVVTAYISLSVIDMNIS

SEQ ID NO: 193666 - protein, 129 aa, Zea mays
  unsure (1)..(129): unsure at all Xaa locations
  Clone ID: MRT4577_108205C.1.pep
CSLPIFSWPNPSSLLLLSSASFLSLSLSDLTHDNFFYNMKVTVLILFIHYFTLTLYPFSNIPSFFLFSYTFSFFHSHLIFLYLFFLYFIFILYFYILLFYYFFFFILIFLFFFXYYLISLYFLLNYFSI

SEQ ID NO: 193667 - protein, 65 aa, Zea mays
  Clone ID: MRT4577_108206C.1.pep
FKAFIVFVVSIKRVIRLGKQLLTLHLSLGLARHSYKRVLSVHCAGTRTSLQALFAACRWKSSSHP

SEQ ID NO: 193668 - protein, 85 aa, Zea mays
  Clone ID: MRT4577_108207C.1.pep
RVMAPRALLLLLSGGLALTETWACSHSMRYFDTAVSRPGRGEPRFISVGYVDDTQFVRFDSDAASPRGEPRAPWVEQEVAEYWDR

SEQ ID NO: 193669 - protein, 84 aa, Zea mays
  Clone ID: MRT4577_108208C.1.pep
TNNSLKKKLEEPTNQVHAQMWKPGSTLLIGYEGHFFPKKAPLNFGNGLFFYPLEISKKPTLQIGFPPQHINNFIPAWLPLKWIF

SEQ ID NO: 193670 - protein, 132 aa, Zea mays
  unsure (1)..(132): unsure at all Xaa locations
  Clone ID: MRT4577_108209C.1.pep
MAASMISSSALAVVAQGLPPLGRRASSFSDDCSKKKIKTDKTYGIVGGLTVDDDANERKGKGKGVHQIDDKYGANGDGYSPIYNEDDWAPTGDVYVXGGTTXGLLNWGGHASAXFLGRRTPILMYNTRALSG

SEQ ID NO: 193671 - protein, 166 aa, Zea mays
  Clone ID: MRT4577_10820C.1.pep
MGSEGSSGPVVVPRNFRLLEELERGEKGIGDGTVSYGMDDADDIYMRSWTGTIIGPPNTVHEGRIYQLKLFCDTDYPDKPPTVRFQTRINMTCVNQETGLVEPSLFPMLGKWEREHTMEDILSSLKREMSTPQNRRLYQPHEEAGKVARYRNQMSMAVSDLLHYAL

SEQ ID NO: 193672 - protein, 305 aa, Zea mays
  unsure (1)..(305): unsure at all Xaa locations
  Clone ID: MRT4577_108210C.1.pep
MATYFTLNTGARIPSVGLGTYKAGPGVVADAITAAVKAGYRHIDCAPLYKNEKEIGVALNKLFDDGVVKREDLFITSKIWXCSDLAPEDVPLAIDSTLNDLQLDYLDLYLIHWPFQIKRGSELSPENFVHLDMPKTWQAMERLYGSGKARAVGVSNFSTRKLADLLAVARVPPAVDQVECHPGWQQARLRAFCCSSGVHFSAYAPLGRMKAVASDPVVASVAESLGKTPAQVALRWGIQQGQSVLPKSANESRLKENIDLFGWSIPDELCAKFSEIEQVKQIRNDAFVHPQSIYKTIDELWDGEI

SEQ ID NO: 193673 - protein, 59 aa, Zea mays
  Clone ID: MRT4577_108211C.1.pep
FCSPPVKKTASNGCLERGFHQSSIFPGGTQGCKNKPLVFYTVHLAFFKRPNYLKKWPPR

SEQ ID NO: 193674 - protein, 141 aa, Zea mays
  Clone ID: MRT4577_108212C.1.pep
GREPGVPPPPRAQGWFFPFPTFGAAGPIRGNLQRGCPGWPPKTWGGFFPPPSGGFSFKKGLNFFGWAEPPFWGFPQAPPLLNIKRFRPLKAQLWLYRPGPFLIFFPWGGAGLDRPYVWLGCQKFCLPQNPFLAKGWARKCP

SEQ ID NO: 193675 - protein, 102 aa, Zea mays
  Clone ID: MRT4577_108213C.1.pep
RPGYELQWTRLVASLLPPPVALSGSGCISPLGRLFMRADRHTFWKEEREVGTDYRELPCQPLSKQRETARARRGRNAQRRERTLEMISMHIGQYGIHDGQGC

SEQ ID NO: 193676 - protein, 132 aa, Zea mays
  unsure (1)..(132): unsure at all Xaa locations
  Clone ID: MRT4577_108214C.1.pep
MRMGAPATQRQRRAIKASRQACARTSPNPPSHSATPSSPPASSPPPPPQPXAPLHPSPPRHRRPAPAPPGPRPARAQLAPPRAVPPCRAPGPPAPRAPPPPPXSPPPRPXAPRSGPPLLPFRAHLPRRQPQG

SEQ ID NO: 193677 - protein, 51 aa, Zea mays
  Clone ID: MRT4577_108215C.1.pep
GCMFLIHSTEKEVCGSESSNSDREFCLPGWTAILGKKTTKKKEGRPPGCEL

SEQ ID NO: 193678 - protein, 446 aa, Zea mays
  Clone ID: MRT4577_108216C.1.pep
MPPPRATHPLRRLLVGVAGIAVELWWGVIERHRPGEYDWAGYLELAAMARRHGLRVRAILAFHQCGAGPHDPPWIPLPQWVLEEMDKVPDLSYTNRYQKRNREYISLGCDILPVLKGRSPMQAYSDFMRSFRNTFEDYLGAIVTEVQVGMGPGGELRYPSYPTEKLNQPGSSSELGEFQCYDKFMQASLSARAQIFGLQQWGNGGSTGTDGSQQNLEETSFFRTDGGYWNTPYGHFFLKWYSGMLLLHGERLCMIADAIFSGTGVTISGKVAGIHWHYYTCSHPSELTSGYYNTLLRDGYLPIAQMFAKYKATLCCSCFDLRDAERTNSESSPEGTLRQLAGAAKMCNLPLNGENSATRLDDASLNQVIRSSRLYSGCTSGTSFSFNYVRMNKSLFEFHNWNRFTKFVRQMSDARTFLARLYVRRGQQYLSSMSVVWVVSRACAYT

SEQ ID NO: 193679 - protein, 143 aa, Zea mays
  Clone ID: MRT4577_108217C.1.pep
RRERDLAAGIADHRHRAGDRAHQVKKDATQRPIGEQPLIEYQHHRSSFELHLSSPSQVSVLSVVITALFGCVYGLSCARGLWVAPGSAPSWTAGMPWLACGERWECAVEDKHVSLIGNWMAQSFWVYRFIIRSLKRRSPIVWL

SEQ ID NO: 193680 - protein, 47 aa, Zea mays
  Clone ID: MRT4577_108218C.1.pep
SKVSLVGQLRRQEIHHGGVSFSCPILRRVTTEINGSAQSLCINNRFQ

SEQ ID NO: 193681 - protein, 537 aa, Zea mays
  Clone ID: MRT4577_108219C.1.pep
MAAITAPPAPHPASTSCRRRAPLIRFAASSSPSSRFRPSSSSSFPGAAGSSSGGGGEILHVSPLPPPAAPPGAPVYVTLPADVVGPGGRVARRRAMGASLAALAAAGVAGIAVELWWGVIERHRPGEYDWAGYLELAAMARRHGLRVRAILAFHQCGAGPHDPPWIPLPQWVLEEMDKVPDLSYTNRYQKRNREYISLGCDILPVLKGRSPMQAYSDFMRSFRNTFEDYLGAIVTEVQVGMGPGGELRYPSYPTEKLNQPGSSSELGEFQCYDKFMQASLSARAQIFGLQQWGNDGSTGTDGSQQNLEETSFFRLDGGYWNTPYGHFFLEWYSGMLLLHGERLCMIADAIFSGTGVTISGKVAGIHWHYYTCSHPSELTAGYYNTLLRDGYLPIAQMFAKYKAALCCSCFDLRDTERTDSESSPEGTLRQLAGAAKMCGLPLNGENSMTRLDDASLNQVIRSSRLYSGRTSGTSFSFNYVRMNKSLFEFHNWNRFTKFVRQMSDARTFLARLYVRRGQQCLSSMSVVWVVSRACVYT

SEQ ID NO: 193682 - protein, 60 aa, Zea mays
  Clone ID: MRT4577_10821C.1.pep
QVIGLRVDDLNALLRRAVYESGPQHLVVHDHIGMSPKELDFEHAMLPYLCCLAGSSRLSS

SEQ ID NO: 193683 - protein, 45 aa, Zea mays
  Clone ID: MRT4577_108220C.1.pep
KFEKKGVLFFFGQNNLGYGLWFNFSKRLGKHFSPPYKGPGMGSNF

SEQ ID NO: 193684 - protein, 38 aa, Zea mays
  Clone ID: MRT4577_108221C.1.pep
GANKNLLKTGIVNPGEKNESSPTLEPTHKEGGAYEDNN

SEQ ID NO: 193685 - protein, 82 aa, Zea mays
  Clone ID: MRT4577_108222C.1.pep
DGGGRLPRRSRAPQTDPEEAVEANAILSKLGLSASTSWNITANPCMGAATDDTPIDDKPAINPVIKCDCSDQNNTLCHVTIL

SEQ ID NO: 193686 - protein, 73 aa, Zea mays
  Clone ID: MRT4577_108223C.1.pep
REAARHQSTDGQPAAVVAGAGSIVKDKSDEEERGAGTACAALPCSGRPAPHLSPCPGSLLHHSNLLASFHFHL

SEQ ID NO: 193687 - protein, 113 aa, Zea mays
  unsure (1)..(113): unsure at all Xaa locations
  Clone ID: MRT4577_108224C.1.pep
METIVEDLGSPKIFARQFWHDILLXIEIRISFAEWWRKVHKKVHKTKRKGFNSLIILGAWCLWLLRNKAIFDGVNPSFXSSVKSLFLDELSCWDMAGAKQLPSLGLVAAISRV

SEQ ID NO: 193688 - protein, 69 aa, Zea mays
  Clone ID: MRT4577_108225C.1.pep
TIHTGAGDTTQGVPFIYTPLGLVGGWDSGRPLARFSRSPGSYTEKETIWFTYPHSGGDQNGWVRGFRGG

SEQ ID NO: 193689 - protein, 246 aa, Zea mays
  unsure (1)..(246): unsure at all Xaa locations
  Clone ID: MRT4577_108226C.1.pep
VPELPGFSSRTVAHALDNWRWGSDIENPLSLKGIKQXFVXLWDTFERXVLLSQDTDKYVWMHTSSGXFSSKSWWXGIFMGSISFEPWKRLWKTWAPPKCKFFLWLAIRNXCWTADRLRRXGLQHPXWSILCDQEQETIQHLLCTCSFARQFWHDILLXIEIRISFAEWWRKVHKKVHKTKRKGFNSLIILGAWCLWLLRNKAIFDGVNPSFXSSVKSLFLDELSCWDMAGAKQLPSLGLVAAISRV

SEQ ID NO: 193690 - protein, 71 aa, Zea mays
  Clone ID: MRT4577_108227C.1.pep
ASRSPLEFVSARNFLVGLGNPQTHKICEMIWFKFCAETNSKGLKHCGRCLYRLVLGGLILGFLDLQNLLHD

SEQ ID NO: 193691 - protein, 52 aa, Zea mays
  Clone ID: MRT4577_108228C.1.pep
NSLLSPKQLSNPPKINCHCCDGMGFLLVFTTHSLVFPGAGEDQQPTLFIPHD

SEQ ID NO: 193692 - protein, 220 aa, Zea mays
  Clone ID: MRT4577_108229C.1.pep
MKNVAEWKNGWGRARAREKQRRGGKLGRQAPVPGSATRDATRTPVGPGRSRPEVEGLGPRRARGARSGRRHRAAPALLRRHAREEERAESESPGETAAGGKMVQRLTYRKRHSYATKSNQTRVVKTPGGRLVYQYTKKRASGPKCPVTGKKIQGIPHLRPAEYKRSRLARNRRTVNRPYGGVLSGTAVRERIIRAFLVEEQKIVKKVLKIQKTKDKASKN

SEQ ID NO: 193693 - protein, 58 aa, Zea mays
  unsure (1)..(58): unsure at all Xaa locations
  Clone ID: MRT4577_10822C.1.pep
PPRTRARVHGAENACGVFSHLRRVGRGTDLAGXAYKSPKLLPRGALXRRGGTSSXPSA

SEQ ID NO: 193694 - protein, 114 aa, Zea mays
  Clone ID: MRT4577_108230C.1.pep
VFYIGCAATKKYIYTILYNVYGLPISAIRDQNEPSTGLRHCLVWIKFSTNLCVSIPTNHKETEMIFLHMIKTTSVVQYQECTEYSIRLEKPNRHKDYQIIVTNLGIGQLQTLSP

SEQ ID NO: 193695 - protein, 50 aa, Zea mays
  Clone ID: MRT4577_108231C.1.pep
MDFAPEKSALEDEEIRVYKETMEMLADLGMDNLSGGERQAEGCNVPAYCR

SEQ ID NO: 193696 - protein, 47 aa, Zea mays
  Clone ID: MRT4577_108232C.1.pep
LKRLSARANSIESPSEHLSHVSVPFPLGWLHNVSPPNKRLIHYQGKI

SEQ ID NO: 193697 - protein, 77 aa, Zea mays
  Clone ID: MRT4577_108233C.1.pep
PGVFFFFFFFLGVFFFFFFFFFLNPKAGDRIRSQGGGALAMVNTGDSFLHGGGGGDKIKGKGKTFGWAQDHKILKRG

SEQ ID NO: 193698 - protein, 37 aa, Zea mays
  unsure (1)..(37): unsure at all Xaa locations
  Clone ID: MRT4577_108234C.1.pep
GDPREDGIERYSPPFKAIXWLSSVAVDCKKRTGSALI

SEQ ID NO: 193699 - protein, 247 aa, Zea mays
  unsure (1)..(247): unsure at all Xaa locations
  Clone ID: MRT4577_108235C.1.pep
IGTLEAGRGAYLRCFNNNVVMNVEARIVEFKWLGLQYTGDSVGKKGNAYFHCRPDIPLYSXLEVISVATVEDSQDICDLVYSLYHLXDVHNEELFXSKVVLLVGSDPIIQTLIFMDPYEEICDLNVVCANASMDYLFRLSSIDGKFTAESHNVKIETTTFSPAVDVKLEPGQILDELLPLYLLLQIVRDLRDEHIMXLDLRMNVVSKVPDNGIEIAKNLSNIYDLLVQCTSPQEILEIYAMVLRLAV

SEQ ID NO: 193700 - protein, 84 aa, Zea mays
  Clone ID: MRT4577_108236C.1.pep
KGGLKHRLRCTIHNGEPVRGTRPTCKGPKFFTPHFPGIDWSEWDLYYLHCALGKNSDGGKNGLALMHAGTAHFFFSRIWSKPEG

SEQ ID NO: 193701 - protein, 203 aa, Zea mays
  Clone ID: MRT4577_108237C.1.pep
MAMATAYDACSIGSLGKGGAFAAVADVALDRARISRAQNGVRIKTWQGGAGYVRGVRFADVAVDGVDHPIVIDQFYCDVTRRQRDGGGGGACANQTSAVAVSDVSYRNISGTSRRAEAIRFACSDAVPCTGIVLSNINLRRADDDGEVQTVCNCAVGLDYGRVQPAADCLRSSTCGGTPDGHHHHDDDDEEQGKDDAVLHTEL

SEQ ID NO: 193702 - protein, 177 aa, Zea mays
  Clone ID: MRT4577_108238C.1.pep
MAPSTTKAWTVQGKDGFESLKFNEQAKVPEIGDKDVLVKIHAASLNYRDLIIPKGKYPFPMKDNIVPGSDGAGTVEAVGKHVTRFQPGDKVVTLFNQGHIAGSLDAQSLGTGLGGAVDGTLREYGIFDEAGLVKAPSNLNMLEASTLSCAALTAWNALYGLESRAPQPGDTVLTQGT

SEQ ID NO: 193703 - protein, 108 aa, Zea mays
  Clone ID: MRT4577_108239C.1.pep
MAETPADPKTQADQKDLHQDEDQNEELENDPNRDEKAQGSEAGQQGEDDGDDYKVNKDTAQKVKKEQEGNNAQKSCSTNIPEDKRSANATCLRKNGTYREERNHASES

SEQ ID NO: 193704 - protein, 238 aa, Zea mays
  unsure (1)..(238): unsure at all Xaa locations
  Clone ID: MRT4577_10823C.1.pep
MAVAGGRAQQSRRQPGSRLILGQQESLLPRREDGAFNAKSESDRQSGLAKGATANSAPPDPRARTRAKTRKTANSAPPDPRARPRAKTRKTVNSAPPDPRARTRAKTRKTANSAPPDPRARTRAKTRKTANSAPPDPRARTRAKTRKTXNSASPDPRARTPPWPRPNDLRLARPHGSDSASATKDRPNIGFGGAPTSPRLGHRPATSTGSIIIVLPRIDSGHGEQDRCPIRPAPPDGQ

SEQ ID NO: 193705 - protein, 99 aa, Zea mays
  Clone ID: MRT4577_108240C.1.pep
CVFFFFFFFFFFFFFFFFFFFLGLNKKPNSGGGGKYKPGSKVQRAFQLLRKPMGAKPYKLHNLREPLGNRSPMGRPKAYNGPFSLSFSFLNPTGLFILQ

SEQ ID NO: 193706 - protein, 140 aa, Zea mays
  Clone ID: MRT4577_108241C.1.pep
PGPPAPPSGRSLRVGPLRGGAPARVPAPPLPGEPSPRACRRCAPDPPPARPHAAPHAPPPPGAPRRRALPPQPQPPARAPLPRGARAPGAPLPPPHGRSGRLLRRAPRRVRAGARRSRAEAARRNARPRGADHLPGAHVA

SEQ ID NO: 193707 - protein, 176 aa, Zea mays
  Clone ID: MRT4577_108242C.1.pep
MSPAAAAARVTSFAANFTTSTAPSSGGRLLRPFRGNPRPRRAVASMAVSAPKSPAAASFLERRESERALHFVKYQGLGNDFIMVDNRDSAVPKVTPEEAAKLCDRNFGIGADGVIFVMPGVNGADYTMRIFNSDGSEPEMCGNGVRCFARFIAEVENLQGTHSFKIHTGAGLIIPE

SEQ ID NO: 193708 - protein, 52 aa, Zea mays
  Clone ID: MRT4577_108243C.1.pep
KNYMPDTMDMPVREKFLRLINSPKAFWTRKKPFGLGHGWKKKNKKKKRTHTR

SEQ ID NO: 193709 - protein, 1306 aa, Zea mays
  unsure (1)..(1306): unsure at all Xaa locations
  Clone ID: MRT4577_108244C.1.pep
MVGAAKWPDLGVKRLRGGDDSAASNSTVSHHGKEQQCRGWPGYMGEQVVRAQLKKRSRSQRGFQSHSCAGTFSLLVSSTERDPREDGHVMEKQLTIGGPHPQPRKTVSASPDPRARTQPRLRKMVSASPDPRDRTPPRLRKTVSASPDPRARTQPRLRKTVSASPNPRARTQPRPRRSHRLARPWAQTDHVTRGAFITLPLATSGYGEQDRRPIWLAPVMMERISWMYNLSRLDPSYISEVHKFIVVATNHAWRTKTKHIYCPCMDCKNAVVFDDTEQIISHLVCRGFVKDYIIWTKHGEGSSLPYTAGNPANIDDNFQFVHETQQPLPQSEHVVPNVTDLGYAGGNEHERTHVLPNVMDEEDAELLEAMLRRHTDPSMFFMKGLESLKKAAEEPLYDESKGCTKEFTTLQSVLKLLMLKARYGLSDAGFDAFLSIVADMLPKENKVPANTYYAKKLISPLTMGVEKIHACRNHCILYRGDDYKDLESCPKCGASRYKTNKDYREEECVTSVSKGTKLKKAKKKASKSTSXRKRRSRLLCAQKDSCFGDVHASDEHKNDGKLRHPADGKQWQDFNENHRDFADEPRNVXPLMEDMKILWXNGVQMLDEYRKDSFMLRAIIFVTINDYPALFTLSGQFKGKVGCTVCNDETAYVSLTASKKIVYMRHKRFLLEGHRYRMRKMDKYFDNNGELHSTAPSGNNKGHRVFEIVRNIKFVFEKKTKDGKTRKDAKPAPGAIFKKKSIFFEYLPYRKELDVRHAIDGMHVQKNVFESIIGTLLDIKGKTKEGLNSCMDLVNLGIKKELHPVLQENGKYHLPAASYNLNVDEKHAMCVWLKNLKVPSGFCSSIRSIVSMKDLIVTNYNSHDCHVMLTTFLPIAIRAINPLFLKMAITRLCYFFNKISQKEFAVETISQFEMCFPPSFFDIMVHLVVHLVPQIEALGPMYLHEMWMYERFMSILNGYVSTCAHPEASMIEGYCTEEAIESGGPFCNSILKDQVAIVLEAHHSILHQLAIIEPFIQQHINELHEQNPGHTADWVMKQHKQRFNTWLMVKDIPRGETIEEKTIKGLASGPSRQITTWQTYDISGFTFCTKSKDKKSMSQNSGVRCEAIDDETGEIITYFGFIEDIWELDYGTFQISVFRCQWVEDKHVTVENYGVRVLDLSKVGYKDDPWILANRAAQVFYAEQIISNNEKKSIDKPKHVVFPRKQQAIGVDGVSDLEDFNQFNDMSLFIDHPTKIRNIERSIPRNSMPWVQHLPSVRMQHFAHPECPFFSASFSTDSVTIASSSSSNPASSSSSTTTLAFFGVAP

SEQ ID NO: 193710 - protein, 61 aa, Zea mays
  Clone ID: MRT4577_108245C.1.pep
GLNPACNPRQMCTLSSGVFLGFNRDKAPLESFSCQASSSQGVMWFLALLGLFLKKPNFSPL

SEQ ID NO: 193711 - protein, 198 aa, Zea mays
  unsure (1)..(198): unsure at all Xaa locations
  Clone ID: MRT4577_108246C.1.pep
GKAGNPLQGAAVSLDAVRTNFPLGAAVSRYILTNSAYQTWFASRFAVATFENEMKWYSTEPAPGQEDYTVPDAMMAFAKSNGIAVRGHNVFWDQPSQQPRWVQSLPYPQLLAAASRRIRSVVSRYAGQVIGWDVVNENLHFNFYEGRFGWDAXTAFYAAARLLDAGSALMFMNEFNTVEQPGDMAALPARYMQRLQQI

SEQ ID NO: 193712 - protein, 810 aa, Zea mays
  Clone ID: MRT4577_108247C.1.pep
MERISWMYNLSRLDPSYISEVHKFIVVAKNHAWRTKTKHIYCPCMDCKNAVVFDDTEQIISHLVCRGFVKDYIIWTKHGEGSSSPYTAGNPANIDDSFQFVHETQQPLPQSEHVVPNVTDHGYAGGNERERTHVLPNVMDEEDAELLEAILCRHTDPSMFFMKGMESLKKAAEEPLYDESKGCTKEFTTLRSVLKLLMLKARYGLSDAGFDAFLSIVADMLPKESKVPANTYYAKKLISPLTMGVEKIHACRNHCILHRGDDYKDLESCPKCGASRYKTNKDYREEECVASVYKGKKRKKAKKKTSKSTSKEKEEVDYYALKKIPALVMWYLPIVDRLRSSKHSTWPVILTIYNLPSWLMQKRKYILLTMLIFGPTQPGVDMDVFLEPLMEDMKILWVTGVQMLDEYRKDSFTLRAIILVMINDYPALFTLSGQFKGKVGCTVCIDETAYVSLTASKKIVYMRHRRFLLEGHRYRMRKMDKYFDNNGELHSTPPSGNNKGHRVFEIVRNIKFVFGKKTKDGKTRKDVKPAPGAIFKKKSIFFEYLPYWKELDVRHAIDGMHVQKNVFESIIGTLLDIKGKTKEGLNSRMDLAINPLFLKMAITRLCYFFNRISQKEFAVETIAQFEMCFPPSFFDIMVHLVVHLVPQIEALGPMYLHEMWTYERFMSILNGYVSTRARPEASMIEGYCTEDAIESGGPFCNSILKDQVAIGLPPSRHEGRLYGSGRMGRKSFIPPDYNTLLEAHHSILHQLAIIEPFIQQHINELHEQNPGHTADWVMKQHKQRFNTWLMVKDIPRGETIEEKTIKRLAS

SEQ ID NO: 193713 - protein, 48 aa, Zea mays
  Clone ID: MRT4577_108248C.1.pep
RRHTYIIVHATLYLLYSVIQIQYIEHPFTYPSKWKTITLPILLILQYI

SEQ ID NO: 193714 - protein, 677 aa, Zea mays
  unsure (1)..(677): unsure at all Xaa locations
  Clone ID: MRT4577_108249C.1.pep
MERTSWMYNLSRLDPSYISEVHRFIDVATNHAWRTKTKHIYCPCMDCKNAVVFNDTEQIISHLVCRGFMKDYTIWTKHGEGSSSPYTTGNPENIDDRFQFVHETHQPLPQSEHVVQNVTDHGYAGGNEHDRPHVLPSVMDEEDAELLEAMLRRHTDQSMFLMKGMESLKKAAEEPLYDESKGCTKEFTTLRSVLKLLMLKAKYGVFDAGFDAFLSIIADMLPKENNVRANTYYAKKLISPLTMGVEKIHACRNHCILYRGDDYKDLESCPKCGASRYKTNKDYREEECVASVSKGKKRKKAQKKTSKSTSKEKEVDYYALKKIPALVMWYLPVVDRLRCLFANPEDARLMSWHASDEHKNDGKLRHPADGKQWQDFNDNHRDFADEPRNVRFALSTDGMNPFAERSSKHSTWPVILTIYNLPPWLMQKRKYILLTILISGPTQPGVDMDVFLEPLMEDMKILWETGVQMLDEYRKGSFTLRAILFVTINDYPALFTLSGQFKGKIGCTVCIDGTAYVSLAASRKIVYMRHRRFLLEGHRYRMRKMDKYFDNNGELHSTAPSGNNRGHRVFEIVRNIKFVFGKKTKDGKTRKDAKLASGAIFKKKSIFFEYLPYWKELDVRHAIDGMHVQKNVFESXKEGINSRMDLVDLGIKKELHPVLQENGKYHLPAASYNLNVD

SEQ ID NO: 193715 - protein, 191 aa, Zea mays
  unsure (1)..(191): unsure at all Xaa locations
  Clone ID: MRT4577_10824C.1.pep
MGSEGSSGPVVVPRNFRLLEELERGEKGIGDGTVSYGMDDADDIFMRSWTGTIIGPPNTVHEGRIYQLKLFCDTDYPDKPPTVRFQTRINMTCVNQETGLVXAFFLFLIACNLPRQFMNDSRPITXSTFSXEPSLFPMLGKWEREHTMEDILTSLKREMSTPQNRRLYQPHEGNEDQRVEQKGVSLRCVIM

SEQ ID NO: 193716 - protein, 154 aa, Zea mays
  Clone ID: MRT4577_108250C.1.pep
MNSNSRGQNRRIDLVFRPRARTVQPSFFDDPDYDPLWDDDLAAAAAVFGDDDDDYLVAAPAHGSSSKRPHVAAASEEAILRLQEVTGRSRLGSAGEEQCAVCRQDFRADETLRAMPCSHAFHQHCISEWLRRNADCPLCRCRLPDEEEEDKQRR

SEQ ID NO: 193717 - protein, 1045 aa, Zea mays
  Clone ID: MRT4577_108251C.1.pep
MERTSWMYNLSRLDPSYISEVHRFIDVATNHAWRTKTKHIYCPCMDCKNAAVFNDTEQIISHLVCRGFMKDYTIWTKHGEGSSSPYTIGNPENIDDRFQFVHETHQPLPQSEHVVQNVTDHGYAVLPSVGNEHDRPHVLPSVMDEEDAELLEAMLRRHTDQSMFLMKGMESLKKAAEEPLYDESKGCTKEFTTFRSVLKLLMLKAKYGVSDAGFDAFLSIIADMLPKENNVPANTYYAKKLISPLTMGVEKIHACRNHCILYRGDDYKDLESCPKCGASRYKTNKDYREDEECVASVSKGKKRKKAQKKTSKSTSKEKEEVDYYALKKIPALVMWYLPVVDRLRCLFAKFGDARLMSWHASDEHKNDGKLRHPADGKQWQDFNDNHRDFADEPRNVRFALSTDGMNPFAERSSKHSTWPVILTIYNLPPWLMQKRKYILLTILISGPTQPGVDMDVFLEPLMEDMKILWEKGVQMLDEYRKGSFTLRAILFVTINDYPALFTLSGQFKGKVGCTVCIDGTAYVSLAASRKIVYMRHRRFLLEGHRYRMRKMDKYFDNNGELHSTAPSGNNRGHRVFEIVRNIKFVFGKKTKDGKTRKDVKPASGAIFKKKSIFFEYLPYWKELDVRHAIDGMHVQKNVFESIMGTLLDIKGKTKEGLNSRMDLVDLGIKKELHPVLQENGKYHLPAASYNLNVDEKHAMCVWLKNLKVPSGFCSSIRSIVSMKDLTITNYNSHDCHVMLTTFLPIAIRAINPLFLKMAITRLCYFFNRISQKVIGRDELASLQEFAVETISQFEMCFPPSFFDIMVHLVVHLVPQIEALGPMYLHEMWTYERFMSILNGYVSTRARPEASMIEGYCTEEAIESGAPFCNSILKDQVAIGLPPSRHEGRLYGSGRMGRKSFIPPDYDIVLEAHQSILHQLTIMEPFIQQHINELREQNPGHTDDWVMKQHKQRFNTWLMVKDIPRGETIEEQTIKGLASGPSRQVTTWQTYDISGFTFCTKSKDKKSMSQNSGVRCEAIDDETGEIITYFGFIEDIWELDYALHDG

SEQ ID NO: 193718 - protein, 638 aa, Zea mays
  Clone ID: MRT4577_108252C.1.pep
KQKYILLTMLISGPTQPGVDMDVFLEPLMEDMKILWVTGVQMLDEYRKDSFTLRAIIFVTINDYPALFTLSGQFKGKVGCTVCIDETTYVSLTTSKKIVYMRHRRFLLEGHRYRMRKMDKYFDNNGELHSTAPSGNNKGHRVFEIVRNIKFVFRKKTKDGKIRKDVKPAPGAIFKKKSIFFEYLPYSKELDVRHAIDGMHVQKNLFESIIGTLLDIKGKTKEGLNSRMDLVNLGIKKELHPVLQENGKYHLPAASYNLNVDEKHAMCVWLKNLKVPSGFCSSIRSIMSMKDLIVTNYNSHDCHVMLTTFLPIAIRAINPLFLKMAITRLCYFFNKISQKEFAVETISQFEMCFPPSFFDIMVHLVVHLVPQIEALGPMYLHEMWTYGRFMSILNGYVSTRARPEASMIEGYCTKEAIESGSPFCNNYNTVLEAHHNILHQLAIIEPFIQQHINELHEQNPGHTADWVMKQHKQRFNTWLMVKDIPRGETIEEKTIKGLASGPSRQVTTWQTYDISGFTFCTKSKDKKSMPQNSGVRCEAIDDETGEIITYFGFIEDIWELDYGTFQILVFRCQWVEDKHVTVDNYGVRVLDLSKVGYKDDPWILTNRAAQVFYAEQIISNNEKKSTDKPKHVVFLGKQ

SEQ ID NO: 193719 - protein, 1762 aa, Zea mays
  Clone ID: MRT4577_108253C.1.pep
DTSKLERVLIITGPTQTGVDMDVFLEPLMEDMKILWETGVQMLDEYRKGSFTMRAILFVTINDYPALFTLSGQFKGKVGCTVCIDGTAYVSLAASKKIVYMRHRRFLLEGHRYRMRKMDKYFDNNGELHSTAPSGNNRGHRVFEIVRNIKFVFGKKTKDGKTRKDAKPAPGAIFKKKSIFFEYLPYWKELDVRHAIDGMHVQKNVFESIMGTLLDIKGKTKEGLNSRMDLVDLGIKKELHPVLQENGKYHLPAASYNLNVDEKHAMCVWLKNLKVPSGFCSSIRSIVSMKDLTITNYNSHDCHVMLTTFLPIAIRAINPLFLKMAITRLCYFFNRISQKVIGRDELASLQEFAVETISQFEMCFPPSFFDIMVHLVVHLVPQIEALGPMYLHEMWTYERFMSILNGYVSTRARPEASMIEGYCTEEAIESGGPFCNSVLKDQVAIVLEAHQSILQQLTIMEPFIQQHTNELREQNPGHTDDWVMKQHKQRFNTWLMVKDIPRGETIEEQTIKGLASGPSRQVTTWQTYDISGFTFCTKSKDKKSMSQNSGVRCEAIDDETGEIITYFGFIEDIWELDYGTFQISVFRCQWVEDKHVRVDNYGVRVLDLSKVGYKDDPWILANRAAQVFYAEQIISNNEKKSTDKPKHVVFPGKQQAIGVDGVSDLEDFNQFNDISLFIDHPTKIRNVERSIPRNSLPWDFAHPECPFLMYKSREDYSTNIYQALNEFSDQGPRISSDHMDKSVAQEQSSSEGYETPSDPFPTISIDRAALRELERDPTYDPREAEEVLSEFRAILEEAVARHEDVPEATQDAPEQTKTTTETSRKRKQSDRKRGDRGLNKFPDKTYKISDVSPKGQPLAPEEALPKFRNALGFLVRDNLDITIRQWRDVSDDVKNQIWNKLLMRFVLPRGSEELVKEYTMKQLAINFRNWRSEMNTKFAKKGLDPTKKYKISAGQWAVFLEQRSSPDFISLSEANSELSKKNKYRHHLGTGGYKRQVPKWTQEDAEKKAAGLPTLSEQLGERAANWLRARKPRETETGVSFDDPIVEEAAKNIYTMAAKQREGTFKPQRERDILTAGLGNPEHPGRVRGISSKEGWKEGFGPQWEGLYKKRDRYKEEMADYFTQEAKKEFKAMMSEMLSNPPPELMQRLASAMSVQQMTTPQIQTIPAAQPPASTDCTTLPTSVASTGNKVCYPVDDITRPAACTLVIRYGINNKRTKKVATGLAIPGRKFHGNDIPEDYCKVEVTTVAQGSEEDMLDIPGPEGIEKLGQAIKNFILWPRRDVELIDWSNSSQAQPSPPSQIAVPIVHPSPPQTSHAAPHPFSDPPSPPQASPFRAPPPSPPHPLGDPLSMPSKKSKLPISKLVSPYQKKKSKATTAGTVRFLKGIGRSLTSQTVDLAEHEESTKKAEALDAKIKKPTKADYKNVPKKYVSGRPLLPLEKLRKVPAGVKRLHDWYMRASSVGIDTISVHIPDHAFIGSDQKVVVTFEDMWLMMNLQRLDVQLVTMFALMQHDQQEILYGTKPNASASKRVGYLNPILISEESHTFRIGKDNDELRGKTDEEVEKRIKDMKKDFEARYATYIGHAMLQFQDREAIMTPYNFKDHWICFLIYPKVGKVLVLDSLNFDPSTYAEFLSTLELAYRFYKMRGGKYDLSKNGVPLDIHHHWPCHKQPQGSVLCGFYVCEFMRVNGRYITNPDKQFQRGNPENLTEAALYGIVEDLCTFILKEVIPAEGKYHDASGTLALPEFRILTEISRLSLSRDSY

SEQ ID NO: 193720 - protein, 111 aa, Zea mays
  Clone ID: MRT4577_108254C.1.pep
HDGASLSVRESSRPGSRESTVHPSDLLGSPAICPSRESRTAVPSPTPSPSLHELPSRGLPRCRPQAQASIHGRGLPSAAVAPRQLDAGHRPSQLCHAARQSTLDNNSLCSS

SEQ ID NO: 193721 - protein, 112 aa, Zea mays
  Clone ID: MRT4577_108255C.1.pep
MCQGEEPTFSRPYAFACDERKGKNRDGNGYPKPEYPMGFTRYKGGYGMISLPTGRGYSLNIERKKQRKRGCFTCMRGEGPLQGQLSNYCRTQKGEEQRQGANKCQNLGRFFK

SEQ ID NO: 193722 - protein, 90 aa, Zea mays
  unsure (1)..(90): unsure at all Xaa locations
  Clone ID: MRT4577_108256C.1.pep
NAYSRVVVTIGHRSFWHTVPFAKKVSTSIGKRAGASQRINMSQGCQEGSSGQVPIANDNXELTXSGGKRQCPTCAELAHRSASYKRPLNG

SEQ ID NO: 193723 - protein, 221 aa, Zea mays
  Clone ID: MRT4577_108257C.1.pep
MCQGEEPTFSRPYAFACDERKGKNRDGNGYPKPEYPMGFTRYKGGYGMISLPTGMLMGKNLYPLGRRVEDILLTLKGKSKEREDASHACGEKDHFRDSCPTIVEPKKERSKGKVLTSVKTWDDSSSEDEPPRMRSHRSSSRSSQSSHKCLMARGKMSIPSSNDESSSVDEGEGKPSVDELVKAVKFFQDVCTKQKAQLKTLKNKLISSQNDYKGLLEKFEL

SEQ ID NO: 193724 - protein, 84 aa, Zea mays
  Clone ID: MRT4577_108258C.1.pep
TLFTLDFPRVRKGVLCGYRKSNGIRRHRPRRPLSVGRAKYLSSCAEQGRGLTSRYRCQFPVHCSSPVQWNLGLAGALRVSPLRG

SEQ ID NO: 193725 - protein, 89 aa, Zea mays
  Clone ID: MRT4577_108259C.1.pep
FPFPYPHSYTGVPKCVFLDMLGLFCLIVSVVHGQVSFSPPLIKKRSKKTTNSCKKKKKKKKKKKKTPRGEESPPPHRSYPQNTPPPPPP

SEQ ID NO: 193726 - protein, 123 aa, Zea mays
  unsure (1)..(123): unsure at all Xaa locations
  Clone ID: MRT4577_10825C.1.pep
QQSSPVSGTIGSSASPDPRARTRPRPRKTTNSASPDPRARTRPQPRKTTNSASPDPRARTRPRPRKTTNSASPDPRARTQLWPQTMVSASPDPXARTRPRPRKTDSTSTSEEPPPRXRPRART

SEQ ID NO: 193727 - protein, 61 aa, Zea mays
  Clone ID: MRT4577_108260C.1.pep
FEDMKKRSPMIDAAGPLNEVGASFRRVMGGTGGFLFAILCKAAFAALKQSSLVIAIKWAVP

SEQ ID NO: 193728 - protein, 163 aa, Zea mays
  unsure (1)..(163): unsure at all Xaa locations
  Clone ID: MRT4577_108261C.1.pep
MTSFSWEAKRLPLLTVPMARTNLIPTKSTGGKATWKXAVHQGVMXSAPATGATKKTHXRFLHATTTLLKIRKYQKSTELLIRKLPLQRLFPDIVQDFLSELRFQSCCVDALQEESXAYLXPLFXDTNLCCIHYKSVTIMPPDIQLARRIXGQRAYETTGCTSK

SEQ ID NO: 193729 - protein, 32 aa, Zea mays
  Clone ID: MRT4577_108262C.1.pep
HWKSVGFVVCIGPLCHFAASGRHKIISKPRGF

SEQ ID NO: 193730 - protein, 92 aa, Zea mays
  Clone ID: MRT4577_108263C.1.pep
WGIVFSLLSVRPSMQPRNFMENLYKRVASYYTRVRSERSNTREKQHERSQWMSLEKDIHTLRGLIICDIFLFFFLLPDFVYCNILLDFPMNE

SEQ ID NO: 193731 - protein, 44 aa, Zea mays
  Clone ID: MRT4577_108264C.1.pep
VINHKRVSWRSYIGAQLLRVGIMEQKSESLCAHMCHKKPRCKPV

SEQ ID NO: 193732 - protein, 261 aa, Zea mays
  Clone ID: MRT4577_108265C.1.pep
MASCSSVRAAPSLLVSAPPSRRRASTAVCLQGVRRGRVASCRVRCSAGAGQGGVKVPAKLAELWSAAKGAPPLAVLAGVAAAVAIYKVGSSLLAPRHPPPRRLEAQTAPPPPVPEPVQVGEITEEELRQYDGSDPEKPLLMAIKGQIYDVSESRMFYGPGAAYALFAGKDASRALAKMSFESQDLNGDISGLTPMELGALNDWEYKFATKYAKVGTIRRAAPVEVVYGNISPEMREEVSEPVVEPELEPEPEPEPHDDDAP

SEQ ID NO: 193733 - protein, 101 aa, Zea mays
  Clone ID: MRT4577_108266C.1.pep
KGKLAISTSAQTDCPYYLLQKSFWLELLFGSFHDHFWGPRKVEVKPEASQQPRVGPGAASPVRIPLVPLNRILVQKQDQMGGHPLRRKPKGYVDILMGRRL

SEQ ID NO: 193734 - protein, 105 aa, Zea mays
  Clone ID: MRT4577_108268C.1.pep
ASALVSVADYVASVSRGPACKANRALSSSARLTTMVSRPTRACSMGCPRRPPLGIPSLLTEKAYPLFILTGPVIYVLCCDLTPSPGVVSSINCCSPVIESNHIGN

SEQ ID NO: 193735 - protein, 136 aa, Zea mays
  Clone ID: MRT4577_108269C.1.pep
PRGAGLPLPVRPPRKQHRLRGTSIELETPCSKLPLTSEASKGVGCVQLPRVFWGGPLSFHIGVHARCGVCSRACFRPYTPEASVVESDPIWAPRGLGHAQLGVQLPPPPQSVRFLKKKTLVVLLHRGCMLTVQKER

SEQ ID NO: 193736 - protein, 1217 aa, Zea mays
  unsure (1)..(1217): unsure at all Xaa locations
  Clone ID: MRT4577_10826C.1.pep
MALPIDVAGLRPRLGDVEAPPKPRSSLSSVAEAESEPLGSGGAEFTVFRDLARVRALGSGGAEFVVFRDLARVRALGSGGAEFAVFQDLARVRALGSGGAEFAVFRDLARVRALGSGGAEFAVFRDLARVRALGSGRAEFAVFRDLARVRALGSGGAELPMVPLAGPDCPSVSLSQVALQSEWRRRRCPFVRPVFATRETLAREEKTALPAPCAAIPSVLVMADRVTIISPRDPWPFSTVTASDLEELVGEGLLRPLTDEQRPEWIPPVGGAAPSPPPGYVVSFVSFHERGFGVPAGRFMRAILYHYGVELHNLTPNSISQAAIFVAVCEGYLGIAPHWDLWTHLFFAELFASPTGERKGWQRRWFYLRNDGELLPPFSQRVVTAATDAWRHGTPHERQKNLGPLLQALEALREGGLTAAGVIAAIHRRRVLPLAERRLSLWEMTPEADQEGSRMSPDPLPFDALQWRVSAALGKPDPHAFSQLQMRPDQGCVTLEVGWHKPSRPRVPEDAVDRAARRVAAEEKKKKKDAEKARARERRRAQDALEKRRRQQEREGLPREPSPETPDDDDDDEEEDDMTAHLGLSPGLGCNQEPSSQPPSGPTPSVPGVGASGSRPEARGQPERAPDPSAGGAEVTPGGQVRASAPQEPPLVPAAHGGDPQVXATVPGQSAPRVSKARVAPKLPAKRTSAAVPGAGIQETSPQARWIMARSGXKRSHGQIDLAPRKALKTVPAYAASAAPGLVVQPTLSQGVSPQGARVTPVAGEQVPEAGSSAEAAIVIGEAADADVVPSPPIVPAMLAPAATEVDAIPVGERPVAAGVETADASAPSASEEVGVEARPVQSGGSLIAVRRSPGARRQLLRFRTREASDPVLDDEQEDQSWDELRECAEATVGSLRLSLEVFCRDVPKILQDLTDRSAAKSSFIHREVDVWGSPRSLRTSLAGATARLSQQGAKVADLQLFCTDLRAEAAAARAEAQQQRLEFVQVVEERDQSRDRAAEAESRAEALAADLAAAQVAASEQRARAGGTPWPSLVLVLVCFLRLCLRSFFWLFIELESALDESAKALAEALAGAAEQREADLAAMSEAVSDVYQILGSGDVPSGSSPQSRLQALGDHARGRVREALHHGVRRAFAVLASHYVVDLERVSEGYWLPDEDEAALAEVQRLDAVAAGPSAVLATTFEAEILPPAPSPEAEMDLTEGGDGAEGAAPSQGGA

SEQ ID NO: 193737 - protein, 237 aa, Zea mays
  unsure (1)..(237): unsure at all Xaa locations
  Clone ID: MRT4577_108270C.1.pep
MGDPQFAKYPDLQLSQHIFQLTNPAASKQAKQAALKSVQDGIAENKMAPLYRYLAHPVDGVLNAQGEGSADQPSRNRRPSASLATMLATRTPTLEVPLPWDEKLYESLKAECEKELEAIQKEEEEAEEKAGETEVQAARGKRAELYNRIGDKDKAIASYEAIFEKTGILGTKIDLVLAIIRIALFFGDRILAKKSIDRASALVESGGDWXRRNRLKAYTGLHYLTVRSHSQAAPLLL

SEQ ID NO: 193738 - protein, 245 aa, Zea mays
  Clone ID: MRT4577_108271C.1.pep
AKNGTLLRAYSVFCTIQKPDLKCWNAMIGGYGNHGDSEMAFKLFGDMIRSDLQPDHVTYISLLSTCSHCGLVEKGKLYWFCMINDGIVPGFKHYTSMVSLLSRAGLLEEAVELINKSPSAKRYPELWRILLSSSVTFKNLSIGVHAAEQALELDPDDLSTHILLSNLYASIGKWDSVSEIRRKIRGLMIEKEPGLSWIEIEKMVHVFSADDECHTRIDDCRDELLRIMENMVLLDSYENEIVLNG

SEQ ID NO: 193739 - protein, 140 aa, Zea mays
  Clone ID: MRT4577_108272C.1.pep
SRHAAGGVVVGGGGGGGCPLLSDFGWSLPEAEPHAANQFMVDWWWASDRCGAQAGGKITGDRGVDGDGAELRLCSHVRCGRRETRRHEFRRCSVCGAANYCSRACQALDWKRAHKVQCVPVDRWLLAAVGDAQEEQQQPQ

SEQ ID NO: 193740 - protein, 106 aa, Zea mays
  Clone ID: MRT4577_108273C.1.pep
KNTRESPDWIGLLKPKFPRRDHWGRELSAQIKQTTAAVLLLEEEERRCSPRERQRGRVLGARRGDELKPLLLLSWSCRRSRGLGGGRGGERSGQAGGRNGRRAAFL

SEQ ID NO: 193741 - protein, 121 aa, Zea mays
  Clone ID: MRT4577_108274C.1.pep
KKLSVRPPLLGGDYFTGNKGGLGWPYNQTLKGGGACGQRIMLDSRSCCSTIRAPATVVFPALPKGETFQELTCVALAPGVPISTALLKKQCYRSGKTGLDILGPASFYRDWNLSGSHFDRN

SEQ ID NO: 193742 - protein, 62 aa, Zea mays
  unsure (1)..(62): unsure at all Xaa locations
  Clone ID: MRT4577_108275C.1.pep
SQXTGXRYTXXERFXQVXRRXXHQXXPVSTPSITTXRIDTVXRSQLLARLEXMWQQGGHPPG

SEQ ID NO: 193743 - protein, 44 aa, Zea mays
  Clone ID: MRT4577_108276C.1.pep
TQELLHLTVSPFISARCLYLSVSIHTKILNEKYTTLADCLTCLI

SEQ ID NO: 193744 - protein, 53 aa, Zea mays
  Clone ID: MRT4577_108277C.1.pep
KKERMLSRRKRKTHRKQSKLRIAHNVSFHKCSEFDNYMDAEKIHLRRARYNKE

SEQ ID NO: 193745 - protein, 78 aa, Zea mays
  Clone ID: MRT4577_108278C.1.pep
EPQSNKGEIPFPGLGQGGDINNNFTHLHHKQKLLVPNKVGVVRVETPQGVKKKKRKGMEKSFGSPKRKKDPITGRAPG

SEQ ID NO: 193746 - protein, 94 aa, Zea mays
  unsure (1)..(94): unsure at all Xaa locations
  Clone ID: MRT4577_108279C.1.pep
MACETPVLCXFWAPRSGPSRMIAPEIDELAKDYAGKITRCMVNTDDSPIEVSTYGIRSIPTELIFKGGEKIESVFGADPKSTLTTLIDKYIGSS

SEQ ID NO: 193747 - protein, 319 aa, Zea mays
  unsure (1)..(319): unsure at all Xaa locations
  Clone ID: MRT4577_10827C.1.pep
MDPKGKGIVINDKEKESFVNEPKDDKSNDSGSGHRRKDGKKKKTRRIKEIVYYDSDESSSSQKDDDNDYRKTTVLRGHKGQPSKTKTKGKRSCFKCGKIGHFIANCPDNDSDQEKGNKREKKKHYKKAKGEAHLGKEWDSDCSSSDSDNEGLAATAFNKSTLFPNERHTCLMAREKKSKSDRQSGLAKGATANSAPPDPRARTRAKTRKTANSAPPDPRARTRAKTRKTANSAPPDPRARTRAKTRKTANSAPPDPRARTRAKTRKTANSAPPDPRARTRAKTRKTANSAPPDPRARTRAKTRKTXELRSARPQGSDSG

SEQ ID NO: 193748 - protein, 40 aa, Zea mays
  unsure (1)..(40): unsure at all Xaa locations
  Clone ID: MRT4577_108280C.1.pep
SKIFHVLLAILDHIANLLGSIISPPFFCSDSPPLWXXFSF

SEQ ID NO: 193749 - protein, 155 aa, Zea mays
  Clone ID: MRT4577_108281C.1.pep
ARHGIERSREIQSGAMGEDTSRDGAGASTTASYFHEAGPRSGYGKDSSWARHQEASQPEGRGKTKSKQGGGSGPGWSKGGARVGARLGEIQTGPSAMGSYGRALRGQQGSSARGEGSSSMARVLSQQREREELGRNARVDEARGHGWSRGRLDRE

SEQ ID NO: 193750 - protein, 135 aa, Zea mays
  unsure (1)..(135): unsure at all Xaa locations
  Clone ID: MRT4577_108282C.1.pep
MGDSQYSFSLTTFSPSGKLVQIEHALTAVGSGQTSLGIKAANGVVIAAEKKLPSILVDETSVCVSKFLNFSFATFXFLHDECXRYLHEKLFXQKIQALTPNIXGVVYSGMGPEFRVLGRKSRKAGPTYYQYKEHI

SEQ ID NO: 193751 - protein, 62 aa, Zea mays
  Clone ID: MRT4577_108283C.1.pep
WPMNEKAEGTTQQSTLIASKETTSRSPNGATCRYSITEPGTSRCKRSNISYKKKKLQKFLLA

SEQ ID NO: 193752 - protein, 138 aa, Zea mays
  unsure (1)..(138): unsure at all Xaa locations
  Clone ID: MRT4577_108284C.1.pep
RGDSPPRPWVTASTPSRSPPSAANGVVIATEKKLASILVDETSXQKIQGLTANIGVDYRGMGPDFRDLVRKSRKQVQQYYRVYKEHIPVTQLVRETAAVMQEFTQSGGVRTFGVSLVIAAYDDNGPQLYQVDPSGSYF

SEQ ID NO: 193753 - protein, 107 aa, Zea mays
  unsure (1)..(107): unsure at all Xaa locations
  Clone ID: MRT4577_108285C.1.pep
MGDSQYSFSLTTFSPSGKLVQIEHALTAVGSGQTSLGIKAANGVVIATEKKLPSGRKSRXQAQQYYRXYKEHIPVTQLVRETAAVMQEFTQSGGVRPFGVSLLIAGY

SEQ ID NO: 193754 - protein, 101 aa, Zea mays
  Clone ID: MRT4577_108286C.1.pep
QKSRLPKLGTCCHKTSVLIYPENSGLLTEGLYHFFSWKILVPVKHFVSCLYEAHTFPQNFFLSEVRLLVGQLKMLYFGDFPRPVHICFFEYGVVCPWFFFL

SEQ ID NO: 193755 - protein, 354 aa, Zea mays
  unsure (1)..(354): unsure at all Xaa locations
  Clone ID: MRT4577_108287C.1.pep
MAMRQSKLRAVSARPWLLLLCLALAATAGVMQARAQPNSIGFISIDCGFPGTTSYVDDATTLPYAPDAAFTDAGENHNVSSEHVTPELPRIYRDVRSFVDGARNCYTLPSTLAVGLNKYLFRAAFMYGNYDGLNRPPVFDLYIGVNLWKTVNLSSSDPAAPVIAEAIVVVPDDFVQVCLVNTGTGTPFISGLELRPLKNSIYPQVNATQGLVLQSRRNFGPTDMTDIIRYPDDQYDRLWXTYDXLTPSXWLVLSTTEKVRNIYDDLFRGXPKKVMHTAITPCDATSIINLYWNSKGSSLGYIPIFHFSEVLKAGALVVRQINININGLAVNLTMXYTPPYLPKGYLYGISTLHQ

SEQ ID NO: 193756 - protein, 235 aa, Zea mays
  Clone ID: MRT4577_108288C.1.pep
MGDSQYSFSLTTFSPSGKLVQIEHALTAVGSGQTSLGIKAANGVVIATEKKLPSILVDETSVQKIQALTPNIGVVYSGMGPDFRVLVRKSRKQAQQYYRLYKEHIPVTQLVRETAAVMQEFTQSGGVRPFGVSLLIAGYDDNGPQLYQVDPSGSYFSWKASAMGKNVSNAKTFLEKRYTEDMELDDAIHTAILTLKEGYEGQISSNNIEIGIIRADREFKVLSPAEIKDFLEEVE

SEQ ID NO: 193757 - protein, 64 aa, Zea mays
  Clone ID: MRT4577_108289C.1.pep
MSWLSIWWQQFVDASMLVQHFDQPLSKGKIEAIKNLLEKGKQLKRKVRGTKVAPAVLACPSALV

SEQ ID NO: 193758 - protein, 92 aa, Zea mays
  unsure (1)..(92): unsure at all Xaa locations
  Clone ID: MRT4577_10828C.1.pep
PGLGXHXIIXXEDXXHEDRTXGPHXKEANXXXGPXKXKAPRGGPKKKRNHXXEGGDAGNXENXXNGRGGEENGRGEGGAGDGGGRGPGRSQA

SEQ ID NO: 193759 - protein, 40 aa, Zea mays
  Clone ID: MRT4577_108290C.1.pep
FFNIVRLCVIFVSDLYYMFLDFNITFLFFLYLYYLYLCFF

SEQ ID NO: 193760 - protein, 637 aa, Zea mays
  unsure (1)..(637): unsure at all Xaa locations
  Clone ID: MRT4577_108291C.1.pep
MACLAISLQPVNGPDILLQTRSWFPVSRALAAVSAFRLARLHLARGKQQSSSSSASSASLDAIGDDPLAAASGQLVVGVESQYRVVYRLVNSIYVLGVTTAGSDHAAPAVNAFAVADAVNQSVSVVVAACRGVDVTPEKVHRKYPEVYLALDLVLHGVGSVRLSQILATIHGDNLARMVNSSPDAEARXRGADPWPVVEHLAQDRHAAREGFSGASFELPQETLAAGDEFSSNIAPATTVATGDEPPPEEAAPVEKDPFAASDLINNKPEEALVGGFKKNKETALVVADPAAALAGLEVTTLPPAEATKPTFIGVEGFEGDYGGIEFGNDETSLAEAFEGLNAPFGGGLDASEFVTTTKKDHKDRTVTGLELLVASGQPPNAAAGTPLENLLLTKRAEMTAPELFIAEEINAEFKESILVRVGLKGTIFLRTLPLNKAAGKETEFSFRLEGTSGMKRAALQSNVLSNLQNGLFHVRTVSKEEPIPLMKYSFLPKHSPLPLRMRLVKRHSGTLLSVMIQYASNPMLPQPLSNVTFVVKLPVDPTLLNVSPKAVLNRAEKELRWHISDIPLKGPAGRLRARMPVDQDSKDGELEVVGMVKFAYQGPFTLSGIKLCPATDGIAQFNEVGHTFSSGSYLCI

SEQ ID NO: 193761 - protein, 41 aa, Zea mays
  Clone ID: MRT4577_108292C.1.pep
QINDRKYRLTIEAIEACERSTKSVALVIHVQRAPRIRNAHL

SEQ ID NO: 193762 - protein, 100 aa, Zea mays
  Clone ID: MRT4577_108293C.1.pep
MYEAMSPRRALLAILLAVALASASSAPQPPPCSRSCAALNCDSVGIRYGKYCGVGWSGCDGEEPCDDLDACCRDHDRCVERKGYVSFIPGLRLLCSLIRV

SEQ ID NO: 193763 - protein, 87 aa, Zea mays
  Clone ID: MRT4577_108294C.1.pep
AAAFKPSHLCPHAPLPWQQSEQIDNGSPGQLKACAGDAAEKLLLAVSTEGPICGVPDFKMRGKNSDELEPVDAGDEDDDGGDDGDED

SEQ ID NO: 193764 - protein, 69 aa, Zea mays
  Clone ID: MRT4577_108295C.1.pep
SAGPWRGYARVSNSQTTRSSIFPPIEQRTSSVLRLGPSSTLPMALITAGDPLSSSILRRRLTKCLPNLR

SEQ ID NO: 193765 - protein, 62 aa, Zea mays
  Clone ID: MRT4577_108296C.1.pep
ISATPMPKYDTFRTCIKTAADYTGTVLDKLDCLSTLIKVPENESYDPYQEFIKDCIGYIHVA

SEQ ID NO: 193766 - protein, 123 aa, Zea mays
  Clone ID: MRT4577_108297C.1.pep
GGAPRVRRSRDALAQRTAWGLPVFWISCGAGWGGGRAPESPAGPRRAANVAERIPNYASTTDCKMRCRHPSNITFFPVAMFNLDKISTYILRRRVVLSLNWSVGLPDLAFFSVACLRACAGAA

SEQ ID NO: 193767 - protein, 168 aa, Zea mays
  unsure (1)..(168): unsure at all Xaa locations
  Clone ID: MRT4577_108298C.1.pep
RCCRSFLEDEVSRNSCTVXIVEVGPRMTFSTAFSTNAVSICKSLSLVEVTRLERSRRYLLCLEPGSDPLDEGQLKEFTALVHDRMTECIYRNKLTSFQSDVVPEPVCIVPVIERGEEALKEINVKMGLAFDKQDIDYYTHLFRDDIKRNPTTVELFDIAQSNSEHSRH

SEQ ID NO: 193768 - protein, 234 aa, Zea mays
  Clone ID: MRT4577_108299C.1.pep
HLPFAGPVHSSRSSTTAGAAAAIPSAAPPVHSAPPLPPLRLVLLRRPRSVFRHRRCAQKSVAAIQIAPPPSAVESPSQDSNATQYRKRKPRMNTTKYGENAKVPKSRQRSENDADAAVHVDKTIFPQVEGAVHDGVVFPQVEADIHVEGGVFPQVEADVHDAEAVIPHVEGVVHVEGGVCPQVEPAVHEVGAVVPLVEGVVHLEVVVQVQSPPKSRTPKKILSKKLTPRKLKRM

SEQ ID NO: 193769 - protein, 115 aa, Zea mays
  Clone ID: MRT4577_10829C.1.pep
RRLAARDEDGTGALLGPLDSLTRVGACNPLLQAHPTWARDEHEGRGIPISLAPDSGLPAPFPPLRSPTRSTHLGWGTRHSLVGLRDPPVSKRRQFRTKYIKKTLEIHNFPILTPP

SEQ ID NO: 193770 - protein, 71 aa, Zea mays
  Clone ID: MRT4577_1082C.1.pep
GVMSLEKGKFLHPPFLLSILGPKFLCSKSFSYLTSGEPEYSGCRGAWLSALDRAPWHGALVPGRFYSPCPK

SEQ ID NO: 193771 - protein, 571 aa, Zea mays
  Clone ID: MRT4577_108300C.1.pep
MSEAVAAGESPVELLLRAAAMVPAERYALAAIIVVSVFLYRFLELHVIGDILRGFRGGRVELTFHPASEIYHRVASKCRLLHGRYLATPWLASPHLQTLFLGIYGTPPSFTYKRQLYTVRDGGTIALDWLLASDLEVADGFISKDASTPLVVVVPGLTSDSAAAYVKHLVYSMASKGWNVVVSNHRGLGGVSITSDCFYNGGWTEDVREVITHLHHRYPKTTLFCIGTSIGANIVVKYLGEEGENTPIAGAVSICSPWDLLIGDRFISRKLVQRIYDKALAIGLKGYAKLHQPVLARLANWEGIKKSRSIREFDHHATCVVSRYETVDTYYRRCSSASYVGNVSVPLLCINALDDPLCTREAIPWDECRANKNIVLATTPNGGHLAFFQGLTARRLWWVGATSEFLSALHDSSYMHRQKANDHVLLSSLESSIDKSPYVNLMEDGMVAAVTKDGPSNDGSPLNHAADEQLSNEAGGGQQNVVSALNHNENSIGVGNDSPAEPVKQQGDDIHSNKLHEIIAPVKRSMSQLTRYQGRSVWLLAYIAFVTSWPLLGSLAFITFRKKSRNPLRAK

SEQ ID NO: 193772 - protein, 66 aa, Zea mays
  Clone ID: MRT4577_108301C.1.pep
DLRIYRELRGLVTYTASACIHTFIKQLIACHLELTLWIHIDTSVIEQHVLFHNVATDLAVLTPGAV

SEQ ID NO: 193773 - protein, 162 aa, Zea mays
  unsure (1)..(162): unsure at all Xaa locations
  Clone ID: MRT4577_108302C.1.pep
VFFFLFFFFFLLVLFVFLFLLQYIKLWXNTFCECKCTIEGYLCGGXSHNGWGYCVRFFPNTFQPTLPTXTWDPPXKGWNLTNCKLCCPLAGPGGFLNPVAPSPDRSLRGFRGKDRVNLVXDMAWGLETCLLGSGSLINCFCLWPHLFWICSGTPDSPKIWDL

SEQ ID NO: 193774 - protein, 143 aa, Zea mays
  unsure (1)..(143): unsure at all Xaa locations
  Clone ID: MRT4577_108303C.1.pep
RYMRGTVKSVPQSIWYGPDRPKYLGPFSEQTLFFLTGEFPGFCGGDTXXLSAGPXTFARGRELEVIHSRWAMLGALGCVFPVXLAXXGVQFGVAVWFMAGARVLSGGGLGFLGFAVLVRALCIRAVWACXVALVGLGGGFRVW

SEQ ID NO: 193775 - protein, 95 aa, Zea mays
  unsure (1)..(95): unsure at all Xaa locations
  Clone ID: MRT4577_108304C.1.pep
SRHASEDTWVPKCAPWVRXHGNYKCLHIDLVLPAKDAVLRVDSVGTVSSALLISYSIQTRKPDLIINAGITGGINANGASIGDVIVASDLSFHDK

SEQ ID NO: 193776 - protein, 216 aa, Zea mays
  Clone ID: MRT4577_108305C.1.pep
SRATTASHGLKIHFLEGNAPTGDKFFFEHPFTFDQKVNLFFQKPDSKTKSNLDYIEQTLLPMLQQTPQEITNLLRGLNGEYIASGPAGAPSRGRPDVLPTGRNFYAVDIRAIPTETAWDIGRRAAETLIERYTQDHGEYPQTLAISIWGTSTMRTGGDDIAQVLALLGVQPVWDSPSRRIVDFEILPTTVLKRPRVDVTIRISGFFRDSFPNLVEF

SEQ ID NO: 193777 - protein, 67 aa, Zea mays
  Clone ID: MRT4577_108306C.1.pep
DPAVDGTDVRRTDYIADLSDVEEDFAECTLKLGTNHATVLHHTHRVASGSSCMRYRRLSPDAIDQAP

SEQ ID NO: 193778 - protein, 87 aa, Zea mays
  unsure (1)..(87): unsure at all Xaa locations
  Clone ID: MRT4577_108307C.1.pep
AAYGDGNERRLTGRHETADINTFVWXRVETIYSSCSRLLCRRLTKTGSSCQGVANRGASPRVGRDTEKEGKGERRKRKRFLVLSPCG

SEQ ID NO: 193779 - protein, 43 aa, Zea mays
  unsure (1)..(43): unsure at all Xaa locations
  Clone ID: MRT4577_108308C.1.pep
FLYLIQFHFYQKAHLFSKNNNILLLYLHVNILIFXSXKKPPHT

SEQ ID NO: 193780 - protein, 71 aa, Zea mays
  Clone ID: MRT4577_108309C.1.pep
MELPPGFRFHPTDEELITHYLASSSSSLVASSVRAGASSKQDEWVLCRGVKKSIEPPSVLGSKRVSSVACM

SEQ ID NO: 193781 - protein, 166 aa, Zea mays
  unsure (1)..(166): unsure at all Xaa locations
  Clone ID: MRT4577_10830C.1.pep
CECNGLPXQLTNWSSVXKDPLDPKIRFANRVVFSMFNTVLGMKIVILGFCFKKDTGDTRETSAIDVCNKLVADKGKLDIYDPQVLEEQIRTDLSMARFDWDHPVPLQQIKAEGILXQVNVVLNAYQATKDSHGLFVLTXWDEFKSFDXFKKIFWHFQKPSFXFDGW

SEQ ID NO: 193782 - protein, 79 aa, Zea mays
  Clone ID: MRT4577_108310C.1.pep
VRSKLLLKMWFRKRTRIRRCCIGSSVPPCPRSDIICPPLLLKVALEWGFPCPCVVCTSLSIFALAEDNLLIFCIFTKPL

SEQ ID NO: 193783 - protein, 57 aa, Zea mays
  Clone ID: MRT4577_108311C.1.pep
MGPPIKLSFLVKVMGRTGSRGQVTPVKVKFLDGPNRFFIRNVKGPVCEGGILPLLQF

SEQ ID NO: 193784 - protein, 48 aa, Zea mays
  Clone ID: MRT4577_108312C.1.pep
YVLSEDVLFLFYGGCFVILICKATHRRLQKAGTLCFHYEKTLKLKGCV

SEQ ID NO: 193785 - protein, 136 aa, Zea mays
  Clone ID: MRT4577_108313C.1.pep
EEAGRTKPAKTMCLSPRPDAQKASQSPRPQHQAVARTPPAPAWSAEAPQALPTTRKERRPIASCTAIPRPNKRTLKTAGTPGPARGAGAGGWAQEGRGATPRREEQPEERRTARAGGTTRPGRKEKRKKNQGRETR

SEQ ID NO: 193786 - protein, 37 aa, Zea mays
  Clone ID: MRT4577_108314C.1.pep
VKSIHLTGLRDLCQDPPPIESRKSSQYCQSLLCLDLV

SEQ ID NO: 193787 - protein, 95 aa, Zea mays
  Clone ID: MRT4577_108315C.1.pep
RATKNGFEISVWYRSMVFSTRSAWGRDIEAASNKYFFYRSMGVHQPGTTHLCSGGHWKTSVIRFGLSCHYEHGFRPKSFTCFVDATLKSSFPAMG

SEQ ID NO: 193788 - protein, 78 aa, Zea mays
  Clone ID: MRT4577_108316C.1.pep
TKHLIKESTVEVPKGCSAGPFLNPPLLFTGVYLLVTRPSNKGRSCRHCYLGIATAFPRTFPCCVYNIPCNQKRKYILI

SEQ ID NO: 193789 - protein, 74 aa, Zea mays
  Clone ID: MRT4577_108317C.1.pep
KTPPPLYGFFDPRGSPGRGGLKGFPPLKPGKPKKEVFEKMWVDGFGPKKVFKTWIGMGRPRGSVSKEGAMWVWD

SEQ ID NO: 193790 - protein, 65 aa, Zea mays
  Clone ID: MRT4577_108318C.1.pep
LWSPSPCQGGILSSPDRWESLSELGEECMGPKVLVLVTYTLAGGEGSLAPRQKICRCSNSQSMVR

SEQ ID NO: 193791 - protein, 390 aa, Zea mays
  Clone ID: MRT4577_108319C.1.pep
TYRKGSWYASPSRGCIAGPPPAPADADEDSGSRHRQEILWYESVIKHENGWSHDSEPDRNILPNKKPSCYNRPTEPGCSPELMKFTVVDTSLVQGEEPSKVRSLRNLPTDSSHGYMSSPHCGGSGSDSSEEHSDSEDSSRSCEHIITDDRSTTNAKYASDERKSKPPTADKVDSSVIQKSASSGTLVSINGHISTDQGFSTMNNVSSSNATILPVDVQMVHAPTTSTEISFQFDQRLNAESQIFLAPFSKRRRLVSSKTERTGRKNTTTIENHYWKQVDEPVHHDASGENEASGPKAFVWGATPSSSTNISFEVNNKKPYCRQLDNVLPNAETMVYKETCQNRHVIDLNIPQMPSDFESTVSYIVPPSDNAETTIRPIRTSGAEETDRVT

SEQ ID NO: 193792 - protein, 71 aa, Zea mays
  Clone ID: MRT4577_10831C.1.pep
QSHQQGAQPQSQKKNLRHTTHTIHMCSYRGPRITITPTLCVFDNMLGGENRPSRRGLFLTGKCSLARGTHS

SEQ ID NO: 193793 - protein, 49 aa, Zea mays
  Clone ID: MRT4577_108320C.1.pep
YTKDLLQKAGSMINIDRFDMLKALSKPVLSVYDIQGPPPVAFLTSPSGF

SEQ ID NO: 193794 - protein, 64 aa, Zea mays
  Clone ID: MRT4577_108321C.1.pep
CWWCLIRPSYPRQYASPVMFCAVSIRGSKYVFVATCVTSSLYSPGYGVCGNLCRFARVLTPFFF

SEQ ID NO: 193795 - protein, 103 aa, Zea mays
  unsure (1)..(103): unsure at all Xaa locations
  Clone ID: MRT4577_108322C.1.pep
LGXWGPSRRTADXPAAYIPLLLPRSRRXXGGPSXXPQXXRXXHWXXPVGPXTKGXXRLXSSTIGCSHDXXVLSCGAALTXXRPPAPXXRGPGEPXXXCRSCXP

SEQ ID NO: 193796 - protein, 110 aa, Zea mays
  Clone ID: MRT4577_108323C.1.pep
SSVLTASSQSLASFPRRHPPRKGGCLAAAATAGAAPAASAATAAAGARCSPTWRPPPAPPPWSCPPPPTRGAPAGSRRPGRPAAATAPPASAAPRAAAPAAAATEPAPRR

SEQ ID NO: 193797 - protein, 68 aa, Zea mays
  Clone ID: MRT4577_108324C.1.pep
VGVCECYGGGACVSSCAAAFAASHCSLSDAQVGEMRWVQGSYRIYDYCVDPKRLVNGQRPVECDLPQY

SEQ ID NO: 193798 - protein, 86 aa, Zea mays
  Clone ID: MRT4577_108325C.1.pep
PRVRPRVRPRVRKKKKKKKRKKKKKKKKKKKKKKKKKKKKKKKKKKKKKKKKKREKKKGHKIKMNERKKKKSNKGMKQKRKTKTQM

SEQ ID NO: 193799 - protein, 245 aa, Zea mays
  Clone ID: MRT4577_108326C.1.pep
MSLMIMERGDEELKLLGMWASPFVLRVQLALSLKGLSYEYVEVDISNKSELLLHSNPVHNKVPVLIHNGNPVCESQLILQYIDEAFAATGPCLLPADPYERAVARFWAAYIDDKVLASWMQASRGKTEEDRAEGRNQWLVVVETLEGALRDCAAGKGMMMPFFGGDSVGYVDVVLGSLLGWVSANQEVWGIECFHPRRAPLLAAWADRFAALQTVQTVVPQVSRLVELGKMLRARQSDGAAAASN

SEQ ID NO: 193800 - protein, 166 aa, Zea mays
  unsure (1)..(166): unsure at all Xaa locations
  Clone ID: MRT4577_108327C.1.pep
GPHGHVETGDITFAGMXTPLGPTXGQTTEXVKSDEMHXEALQXAFATDNDSLNEKNVFLLDLKRGLEASNSKDDXGKDAATFTSNTIMMNHPALIGSAYAPELDCHTSHIAVKVADLITKIDRRSGTELAKEPQILKNGDAGMREMTPTKPMALNTFSPNPTLCRP

SEQ ID NO: 193801 - protein, 57 aa, Zea mays
  Clone ID: MRT4577_108328C.1.pep
FAGKILIWIGPKKKKGALHGPAFVCTGVNVDPTKLDLGAGFGPNFNKNNQKCPVSTI

SEQ ID NO: 193802 - protein, 68 aa, Zea mays
  Clone ID: MRT4577_108329C.1.pep
TEAQPPKQGAGSHVSALPCHSFLAANTGRRRDSTSLQLSHLTNSQIRASTIRDSSLITCHFCLRGRET

SEQ ID NO: 193803 - protein, 240 aa, Zea mays
  unsure (1)..(240): unsure at all Xaa locations
  Clone ID: MRT4577_10832C.1.pep
MDSTGPMRVSIKAHRPDWKSELRTNCLRRVRKDRNDLLWKIRKQGLPGNVMEKVRSAVRSVISDEVEKLKQSNTGNEDQEMDVIWEYQGLHAAKPAEIESEDILLEMERLVCEDIREEVIRKQLEALDEEDAYLAQSVLDHMQLNDIEAAETAKLWCPVCKQGDLRETRNLIYCTLCNLRLDLGEDKMTLEFLRERLANAHMDHFDRGCKXHPRFCLQTMFGLTALYIQCAECSTFDIVV

SEQ ID NO: 193804 - protein, 51 aa, Zea mays
  Clone ID: MRT4577_108330C.1.pep
PLTVFLIYNCNIRATINILFNFNKNPHITLQYKLIISHQLYMPILRNYLFH

SEQ ID NO: 193805 - protein, 98 aa, Zea mays
  Clone ID: MRT4577_108331C.1.pep
VPAGAVDMPYFTRGEGMLTVIILVTRNINWWHGNGGCRCLRRSPCRGGVFAGPLCADDHRYSAKASLARRCRQSFPQIPHRATSRVADIHSCESCELN

SEQ ID NO: 193806 - protein, 229 aa, Zea mays
  Clone ID: MRT4577_108333C.1.pep
MASRFWGQGDSESEEEEVEEVESEQGSDSDDDGGRGGAGRGAQNRYLKNQEDDSDESDTGHRVIRSLRDKRNEEMRSIVDQMRNAMKINDWVSLQESFEKLNKHLEKVVRVNESTEVPKMYIKALVLLEDFLAEALANKEARKKMSSSNSKALNAMRQKLKKNNKQYEEQIQKCREHPESFEDEAADDKDVDDDDADESDAEIEDPDKIAMSESEEEQDEEDDDKDGWE

SEQ ID NO: 193807 - protein, 225 aa, Zea mays
  Clone ID: MRT4577_108334C.1.pep
HGTNRVLGRARNVGPSCYEARHVAVGRVRAGPARNSTFSPPHTQSQAHSVYRLPHAIRFSCFLSLRSTGRRNPFIYYTPSRPACCSPAPTPSGLLVRPAASGQLAAPAPSGQQWMWMSARAPDGQRISFSRTPDDQQRMSDEILRSRSAGLLETAGRWALERSRSPQRPRAGLRSRRRSVHGDTFSVCVASWTLRPLCAASLRLCVSAASQRGMSYSYVPTADAR

SEQ ID NO: 193808 - protein, 135 aa, Zea mays
  unsure (1)..(135): unsure at all Xaa locations
  Clone ID: MRT4577_108335C.1.pep
SEFGSRQFLLHLFHIRLVPQGGLLEFPDAVLNSKRLDLYNLYKEVVYRGGFYVGNGINWKGQIFSKMHNHTVTNKMTXGALGDWVNCGLCGEWAHLGCDRRKGLSTFKDYSKADGMEYICPQCSLAKYKPPLPAP

SEQ ID NO: 193809 - protein, 46 aa, Zea mays
  Clone ID: MRT4577_108336C.1.pep
LDTRDRLSTHFIISFNLTITFPVTIPFTELLILLTPCSSTLVLINT

SEQ ID NO: 193810 - protein, 749 aa, Zea mays
  Clone ID: MRT4577_108337C.1.pep
MPQIQNTMRQNCTLLAVLCGEFAEKRQTPASLAPDTKRLRLSYPFPELASSGRLEVHTLINPTLEQFREAQQAVHPVFLYLQGQQQENEEEIGTLVWGDTDLSDPQMFVSLITPPFPTMVYLEVPTGEKLAQSLHSKGIPYVVYWRNLFSSYTASHFRHALMSVIQSSCSHTWDAFQLAHASFRLYCVRNNHVQSVKLGPCLLGDAPKTDVIPAGDEVNEEQGCSEGFPDIRIYDEDVSMKFLLCGVPCTLDACLLGALEDGLNALLNIEIRASKLQNRASAHPPLQAEDLPHGFVTMRCDITTCSSAHVSFLVSCSAQTCFDDQLLGSRIKNEIIEKRQLVRVLLNNEDNKPSSYEPLPSMCVACGASTFEVWITMPKWAAQVLKHLAPEISYRSLVALGIAWVNGTPVSSFDRQDADRLLFFCSNQCGDQAIQNGSYAHVSSWSAPLTKDRTTGSLESKQMSFGAKGVVGDNTISLSSLKPRLKPATMRPLPHSRKQQMHPFMGFPQSIIHDASQVKPSLPAPPVKHNAVPVTAVTPRKSSSGSPSSWSRVQLPIPLNPLPIKKHECNRLPIHICSEEDFLKDVMQFLLQRGHIRLVPQGGLAEFPDAVLNSKRLDLYNLYKEVVYRGGFYVGNGINWKGQIFSKMHNHTVTNKMTGVGNTLKRHYETYLLEYELAHDDIDGECCLICHSGALGDWVNCGLCGEWAHLGCDRRKELGTFKDYSKADGMEYICPQCSLAKYKPPLPAP

SEQ ID NO: 193811 - protein, 61 aa, Zea mays
  unsure (1)..(61): unsure at all Xaa locations
  Clone ID: MRT4577_108338C.1.pep
LRLGQHYVGVGVQAAICGVQAARVGGFVRPEIVNSAAVQDXXAHGNKIVPWXRLRLXXRLG

SEQ ID NO: 193812 - protein, 38 aa, Zea mays
  Clone ID: MRT4577_108339C.1.pep
AGLLKKKKKKKKKKKKKKKKKKKKKKKKKKKKKLEGGP

SEQ ID NO: 193813 - protein, 122 aa, Zea mays
  Clone ID: MRT4577_10833C.1.pep
VQLMEFTFPKKKKKKKKKKKKKKKKEKKKKGEAIVKGTLPAARVACAFRASFISVLLGLQFDWRWGRGNTPGGDPACSWPNLISLVRPLASRRGGRKRAGLPRPAHPERHLPGPLGRRIRRG

SEQ ID NO: 193814 - protein, 72 aa, Zea mays
  Clone ID: MRT4577_108340C.1.pep
PKRPKPTSRGAAIPDTSIQPVAKPVPRGGHTRSTRALPPTGDPRTVATAPCIGLEPGLTKPYWIPKKAKARF

SEQ ID NO: 193815 - protein, 114 aa, Zea mays
  unsure (1)..(114): unsure at all Xaa locations
  Clone ID: MRT4577_108341C.1.pep
MRELLAGHCLLAHDASTTNTHTSRSXSCQPPTPVHLPAAVHMTPAVDVPPKMHVPPTVHVTPPVHLPQAVHVXPSAVHMATATCDYATQPARSESYPQSHACPCQQPHTSLSQL

SEQ ID NO: 193816 - protein, 122 aa, Zea mays
  unsure (1)..(122): unsure at all Xaa locations
  Clone ID: MRT4577_108342C.1.pep
GGGGKKKNFFLPGGGRWSPKPRGPLSVCLLPWASVGRSLALRVWLSRAGLRSRVVGVARALFPSLSPRSPPPFLPPFSSSPSPPFFVRKKLXSXXXSSSXSPLRIGKXPPWCRSRMGFRRLE

SEQ ID NO: 193817 - protein, 69 aa, Zea mays
  Clone ID: MRT4577_108343C.1.pep
PHSEGLGLSRGSSRSLPYLLLEGGFGKNLLRRHKYASAAGTASKARLSRSMARNKSEIWEIAMAEIWEA

SEQ ID NO: 193818 - protein, 83 aa, Zea mays
  unsure (1)..(83): unsure at all Xaa locations
  Clone ID: MRT4577_108344C.1.pep
XFXXXGXGXGXXFXCFWXXIXFFXPLWGKKTEGSLLLLYTGGTGWATPSRINQNGLGAEATVSREIYHYHFFQISGDPGNVGG

SEQ ID NO: 193819 - protein, 251 aa, Zea mays
  Clone ID: MRT4577_108345C.1.pep
HWVPRGRPVYMEKLGQIDTTKLLQVTSMDRYVQYHVREFERAFAVKFPACSISAKKHVDQSTTILDVSGVGYKNFNKAARDLIGRLQKIDGDNYPETLCRMFIINAGQGFRLLWNTVKSFLDPKTTAKIHVLGNKYQSKLLEVTDASELPEFFGGTCNCEGGCMRSDKGPWKDPEILKMVQCGMGRCGMNSGDPRDADEKLITEDEIVPVPKKQDSMRRNAVDSPKVAREKIEHPQMSPLHEMKDASDPDP

SEQ ID NO: 193820 - protein, 159 aa, Zea mays
  Clone ID: MRT4577_108346C.1.pep
RGRFRGAAFFWCGGVSLFLPPFFFFIGRLPPPTSTLWGFMFGGVGFLAGVGFFWAVGSPSVNRALYLFGRRGVFFFLALVFIQFFGVAAPLGWGAFFPWVPHLHSHGPYGSFPLWGSRAFCAPFFRLINMESIIMLFFNFLCARPPVVLVQTKSQRKNG

SEQ ID NO: 193821 - protein, 485 aa, Zea mays
  unsure (1)..(485): unsure at all Xaa locations
  Clone ID: MRT4577_108347C.1.pep
MGGSGAATCPEKVIYPKASTVSPDPHGKVPDTWIYSPDLQGSVLSPRYAGRAVIHHYSHILAINVAWTVVIKTPDDYSGVTSINYSHNVLLPLCSWAHMSGLSILIYGIHVFVMQALAVLCDHAEDLHVHILEEDDTIVTRKTKRQRVAKSFGNDFIVYLVKDTPTTISEAYSSPDADLWKEAVRSEMESVMSNGTWEXVVDRPYGCQPIGCKWIFKKKLRPDGTIERYKARLRGQGYTQKEGEDFFDTYSSVARLTTIRTLIAVAASYGLIIHQMDIKTTFLNGELDEEIYMDKPEGFIADGQENKVCKLIKSLYGLKQAPKQWHEKFDNTLTATGFAVNESDTCVNYRYGGDLGEADVILNIKLVREGDGGVTLLQSHYVKKVLSRFGFSDCDPAPTPYDPSMLLRKNQRIARDQLTYSQIIGSLMYLASATRPDISCAVSKLSRNPKVLEGYCDANSISDADELYATSGYAFLFGGGAVKVA

SEQ ID NO: 193822 - protein, 89 aa, Zea mays
  Clone ID: MRT4577_108348C.1.pep
KSHFSTPTLFSFKIFFFPPKFYSLPRFFQPPLLKNPFLPQLISLSKNSPFQHLNIKQNAPTHSPFQKFPHPKFQMTPPFIPTLNPPFFF

SEQ ID NO: 193823 - protein, 127 aa, Zea mays
  unsure (1)..(127): unsure at all Xaa locations
  Clone ID: MRT4577_108349C.1.pep
VSGTWWTNTAGGCYTHVGPRPGILERLLGSYCGRTCIAWRAIAKWXNTPYMHCNRXAQHGMTVCGHGVLVDMTLDPDRAFEAAGLEMKVRQDTAYHAGLYQTDAETEAFDALLQELSRTRLKAVTTD

SEQ ID NO: 193824 - protein, 88 aa, Zea mays
  unsure (1)..(88): unsure at all Xaa locations
  Clone ID: MRT4577_10834C.1.pep
NARPAYTGAGAGDASMTATRLLTRPYAPKRGRSPRPSGGPSGHRRRGPHRAPPPAGIRPRGGEGLXLLPRRRPRSRPRMALALRTPPP

SEQ ID NO: 193825 - protein, 87 aa, Zea mays
  Clone ID: MRT4577_108350C.1.pep
VRVQRVVQGPRLGVEKAPPLLKVWAPKKKVCLFDRFTKRDIFPPRVSVKIYMALASPGRVWVSCIGPQGSVFLSPPGCLKFFGPKKK

SEQ ID NO: 193826 - protein, 150 aa, Zea mays
  unsure (1)..(150): unsure at all Xaa locations
  Clone ID: MRT4577_108351C.1.pep
PGVRPAWXRXLAXRSPLLLSSGCGPGPPFSXXXGXAGXXXGAVAACAVPXXPPVAWARXXGXRACGRXXXXXVXXPPPXGXXXXAXXRXXXXAPVSFPGGXXXGVPPPPAARRAXXPXXXKARRXGXXLCPXPXVRXXXAGPFXLGPXXP

SEQ ID NO: 193827 - protein, 96 aa, Zea mays
  Clone ID: MRT4577_108352C.1.pep
TDHQRPGGFFFFKGSLKTPQGSPHSLGAFASFTSLQNFGGSSRGVKTPPPNEPKMWNPLFFNESHKGLGLNSNEGPSLGCSLFWGTCGGVRGLKFG

SEQ ID NO: 193828 - protein, 77 aa, Zea mays
  unsure (1)..(77): unsure at all Xaa locations
  Clone ID: MRT4577_108353C.1.pep
LFAIGLSPVLALGGVYRPVWAGFPNNPTRWRGLVVPQGPGRAGLLPFHAGGGGELGSGPALGAPFPASXSAGWAPAS

SEQ ID NO: 193829 - protein, 62 aa, Zea mays
  Clone ID: MRT4577_108354C.1.pep
GALCGCCHPEKSIGVGPNNKVGMPSHGTNCLGIKQAKNDFFPQKKKKTKNTRRNRKKKKKKK

SEQ ID NO: 193830 - protein, 48 aa, Zea mays
  Clone ID: MRT4577_108355C.1.pep
THSSADACSRLGTMLLSINNLLHVPFYLLCIGDYNFNKNMFHLINTHA

SEQ ID NO: 193831 - protein, 105 aa, Zea mays
  unsure (1)..(105): unsure at all Xaa locations
  Clone ID: MRT4577_108356C.1.pep
VXKCLKDANMDKSTVHDGRLVGSSTRIPKVHQLLQDFFNGKELCKNINPDEAVSYSATVQAAIXLSGEXGNDKVQDLSLLXDVTPLSLGLYTALXFITVLIPKNT

SEQ ID NO: 193832 - protein, 85 aa, Zea mays
  unsure (1)..(85): unsure at all Xaa locations
  Clone ID: MRT4577_108357C.1.pep
VLFVARPPLSLLGAAVVFPLLVLSFFGVALFFPCPFGLLRASRFRVPWLCSXVRAAPLLLLLSFPFFSSAALPPALAHAWSPAVG

SEQ ID NO: 193833 - protein, 80 aa, Zea mays
  Clone ID: MRT4577_108358C.1.pep
MVTLAGKGGRTSRGMVSLRRRRPFQLMVLRRLRELKKIVPAGARRRKADVDVVLRRTAEYICALELKVALLRRLSHMYGV

SEQ ID NO: 193834 - protein, 99 aa, Zea mays
  Clone ID: MRT4577_108359C.1.pep
ILNCILAYFLGFVTWRFYMFLLREFYAHVANCLPKFAICFSMYMIQLTIDSVSLHLFERCMVHVFLCGGLSITVHVRAIHVLQVLGVCVTWYMSRCAHG

SEQ ID NO: 193835 - protein, 61 aa, Zea mays
  Clone ID: MRT4577_10835C.1.pep
RDSWGKAISAALLQSAHYDQLNVVLSTACLNCKLCVLLLALFLRLWLFAYMKLSSRQSNAN

SEQ ID NO: 193836 - protein, 74 aa, Zea mays
  Clone ID: MRT4577_108360C.1.pep
LTNHVLAREKLNFNCIEPKFIQRGRLGNNPGVWRNPWRCPTYSFRQNILLSKRAVPIDIPKPVAPLQWLVQPAL

SEQ ID NO: 193837 - protein, 82 aa, Zea mays
  Clone ID: MRT4577_108361C.1.pep
TRAAGVEASASASGRWFGCSSPSSLQRCGFSWRGGSGGGGALASLSSRRSSSSSYRSSAADVSGALSVLPAVLEVSGFCPGR

SEQ ID NO: 193838 - protein, 46 aa, Zea mays
  Clone ID: MRT4577_108362C.1.pep
DQKLDVATRTKCLPPSQVSSCDLWHGHGWFISRFKNLIISHATSKF

SEQ ID NO: 193839 - protein, 41 aa, Zea mays
  Clone ID: MRT4577_108363C.1.pep
VGAALSMVYISGAPVMFVGCGPSSPDLKELTLKSIVKPLLK

SEQ ID NO: 193840 - protein, 84 aa, Zea mays
  unsure (1)..(84): unsure at all Xaa locations
  Clone ID: MRT4577_108364C.1.pep
CPWXSSRETRSSATRRRRWSTPCRRCHGKSSPSSSSGCCXACSAPSRWCTSTTPARRSSSAWSARPSPAASSAPPRTRASTTSR

SEQ ID NO: 193841 - protein, 292 aa, Zea mays
  Clone ID: MRT4577_108365C.1.pep
MAAPASSSCFHPRATASPPSSLSVGTKVFVGLRAQTKLGSSESSCPNVSAGFHTAVNRRISLRLSKKKATRARISMMPIGTPRVPYRTPGEGTWQWLDIWNALYRERIIFIGDNIDEEFSNQVLASMLYLDSIDNSKKIMLYINGPGGDLTPCMALYDTMLSLKSPIGTHCLGFAFNLAGFILAAGEKGSRTGMPLCRISLQSPAGAARGQADDIENEANELIRIKNYLYGKLAGHTGHSVEKIHEDLSRVKRFDAEGALEYGIIDRIVRPSRIKKEGSTAQRRDMRNLGLG

SEQ ID NO: 193842 - protein, 79 aa, Zea mays
  Clone ID: MRT4577_108366C.1.pep
SRKRSAPLSELHQSQSWHLPDVTISLTSRRERDVTTTHFLYRKAGGRPIGQYSSTKGRAQELSARRGSSGREYDRQKEG

SEQ ID NO: 193843 - protein, 43 aa, Zea mays
  Clone ID: MRT4577_108367C.1.pep
ALSGSYRVNVCCGSDFSVVVWFPSYVVKPLFLRIAPGFKFGVG

SEQ ID NO: 193844 - protein, 313 aa, Zea mays
  Clone ID: MRT4577_108368C.1.pep
LLLPQIIARNFSLLRRFSFIVFPHFALTVHSNKDIDESSAERLYDAVKYTTANMMLIQVPVLGTTKEFWRLSDKATRISRKLALILRSHHSVGKYLAAPLQVSNIWIGNNGSVKLRGVGFTGKGFSTERVRDDYKRMSRILMALITLSGGDRSKLPPDYKEFLLLLESDTLTMEDEFLIVNNAALLPIKNRTEVFLMLHDRIVDYLGCADKTKKKKKKRILSSLPYKEDWLDTAKANTKINQWVANVQNEYRATPHDLLRLNRNVRSHMHRYSDGDDIEEVLYCEWPELLMVMQKMLHLEGELEGTDIQNKFG

SEQ ID NO: 193845 - protein, 135 aa, Zea mays
  unsure (1)..(135): unsure at all Xaa locations
  Clone ID: MRT4577_108369C.1.pep
PTRPALSACVANATIFPEWGQAPIASLLAPYLPSMIASICENPALQPYRLQQAIATSIIPLSPLLLQQSXALSMVQTLXVHTIKAQDLQYLVLPVINQVALAHACAYSELHQCIAFNLLSTLNPTANAQQQLLPF

SEQ ID NO: 193846 - protein, 64 aa, Zea mays
  Clone ID: MRT4577_10836C.1.pep
LAATVVVLQLGTFSPASGLHSHDFNFIDYLSCTCNYAVGYGNCSFKLSSTYGDTLSHHATGLSH

SEQ ID NO: 193847 - protein, 72 aa, Zea mays
  Clone ID: MRT4577_108370C.1.pep
GSGAVGKGQRLTFLAHRYHSPNDERASVCNIRNGLSVDAVWYYIQCTILLWALPSESIPISMECAACHNSQG

SEQ ID NO: 193848 - protein, 247 aa, Zea mays
  unsure (1)..(247): unsure at all Xaa locations
  Clone ID: MRT4577_108371C.1.pep
MSVPSIPSTEPKLAYDQDAALDLQRQISSMKQQIGNSIFDTYQTSLTGRYCSKEMSQLFSQRSRHSTWRKLWLWLAESEKELGIENISDEALQQMRDHLVVSDSDFEVARVEEKRRRHDVMAHVHAFGEVAPKAAGIIHYGATSCYVTDNAELVLMRDAMSLLLPKLAKVVDNLAKFALQWKAEPTLAYTHLQPAQLITVGKRAAQWAQDLLMDLEATSTXRRSPQXRGAQGTTGTSPSFLEIFTTT

SEQ ID NO: 193849 - protein, 49 aa, Zea mays
  Clone ID: MRT4577_108372C.1.pep
RTRGFFFFFFIQTLSFVQFLVRQSGSKHYQNVRMTPTCIKFLMCPHEPV

SEQ ID NO: 193850 - protein, 95 aa, Zea mays
  unsure (1)..(95): unsure at all Xaa locations
  Clone ID: MRT4577_108373C.1.pep
RSQAPPPPGGXGGPPPXAPSAPFPKGGFLGPYPXTPPPFPLNPFPPQPPPGAGVPPSKRPSGTPPSLFSFFCLKKFFFWARRGFFNPVKTFNRPR

SEQ ID NO: 193851 - protein, 63 aa, Zea mays
  Clone ID: MRT4577_108374C.1.pep
MATGTGGARGAAAAPLLILSPTRGQAPPAEAGSRPTGAGRAGTAEAEEAAVGEEADEDEWRRR

SEQ ID NO: 193852 - protein, 87 aa, Zea mays
  unsure (1)..(87): unsure at all Xaa locations
  Clone ID: MRT4577_108375C.1.pep
FIDIFARPAAGFVAGLXTVRPYSVYLFSFSMFFNGLADLAGSTAGDYGGLVAFCIYFGISYGMVRALQFEVLHGIVCTHKFSXAIGL

SEQ ID NO: 193853 - protein, 40 aa, Zea mays
  Clone ID: MRT4577_108377C.1.pep
FIRFSQSVPLRSPMLFSESEPVSLLGSVPSSSFTSARVGH

SEQ ID NO: 193854 - protein, 129 aa, Zea mays
  Clone ID: MRT4577_108378C.1.pep
GSTHDVRPRVRFGPNSTTFIVPAEIFPARLRSTCHGISSAAGKCGAIVGSFGFLYAAQSTDPTKTDSGYPPGIGVRNSLFMLTGCNVIGFLFTFLVPESKGKSLEELSGENDEEAAPQQQQTVPTDLSE

SEQ ID NO: 193855 - protein, 96 aa, Zea mays
  Clone ID: MRT4577_108379C.1.pep
LVPNFSNINISLNLTSNNKKKDLLNQKCLQLLKSATRSTLTHNLVYHFRFRSLPCTILLILTEVVLRIHSWNVPQQARQQDPDPDYRSLNPSIHPA

SEQ ID NO: 193856 - protein, 141 aa, Zea mays
  unsure (1)..(141): unsure at all Xaa locations
  Clone ID: MRT4577_10837C.1.pep
GEERGAPPPPRQPPAPRVFXGGKKKKKGPPTXGDPPGFLKHPGGEGPPPRGPPPPKGPFFGGDFPTPGGPPKGPPXGPGPPGKNPPPQRPPAPGKKNPPRAPPGGQPWEASAKKKKKKTQPCRPRDQRNKPSPPAWATPKK

SEQ ID NO: 193857 - protein, 50 aa, Zea mays
  Clone ID: MRT4577_108380C.1.pep
TLVGILQQSYVSCITNHYIKPLINCVAQNLEYIYLDTKFRIYIYVLFSVS

SEQ ID NO: 193858 - protein, 59 aa, Zea mays
  Clone ID: MRT4577_108381C.1.pep
VRWEKPVRQLQHFFIAAFKGNSFLFRSPLFRQYARPVFFIFSGLRWCRPCPRFSILLSP

SEQ ID NO: 193859 - protein, 132 aa, Zea mays
  Clone ID: MRT4577_108382C.1.pep
MAHMKPSSPNLVVLDLEDTSFGGKIPDTIGQLKRLQELHLDYNSMYGELPPALSNCTDLITLDLRSNGFSGELSQVDFSNMPSLRTIDLMLNNFNGTIPESIYSCRNLTALRLASNKFHGQLSERARQPEVP

SEQ ID NO: 193860 - protein, 96 aa, Zea mays
  unsure (1)..(96): unsure at all Xaa locations
  Clone ID: MRT4577_108383C.1.pep
IPEENPTPWASPGNPPRYYPPRILGPFXLQTTPLLRGFHLNPAPLGPILVKGSFEKGPSKIFFCKPVGQPPQKNKGPLFFLAFPPFLFGFNPYRFF

SEQ ID NO: 193861 - protein, 104 aa, Zea mays
  Clone ID: MRT4577_108384C.1.pep
CTAAALELKAKEITGMVRRIRVAPIKSPNPTFYRVMVDVSPRPLSDGYLLRGRLLLCALPGHEVPEDRPEDIYRLKYLDVDLRRCHRILCEAFSFAPHFCDHLH

SEQ ID NO: 193862 - protein, 152 aa, Zea mays
  unsure (1)..(152): unsure at all Xaa locations
  Clone ID: MRT4577_108385C.1.pep
MAPMKLYGAVMSWNVTRCATALEEAGSDYYFFPINFATGGARAPSINFRNPXGQEPALQDGDWDLPQSRAICKYAARKNKPELIKEGNLQEAAMGDVWIEVEANQYTGALNPILFQVLIRPMLGGTTDQKGVDENLEKLNNVLEGYEAHLTK

SEQ ID NO: 193863 - protein, 59 aa, Zea mays
  Clone ID: MRT4577_108386C.1.pep
LKRNLITMGKFFICQHYDIKACGNLFKCILQNIYILITIVLVLKYVEIKFKKKIVTRMN

SEQ ID NO: 193864 - protein, 65 aa, Zea mays
  Clone ID: MRT4577_108387C.1.pep
ACSTAPTFPVLPTRPTPSDVSMLMLYDLMLPGCAIVFTVATPMLLIYSQDFLPDSNNHGLFGSHI

SEQ ID NO: 193865 - protein, 453 aa, Zea mays
  unsure (1)..(453): unsure at all Xaa locations
  Clone ID: MRT4577_108388C.1.pep
MDCVGAVDSSGTDDDLPQSYQNXRHERXGRITGNGRDSVGASLYTRVQPQTDMETQIHELEQEAYCSVLRAFKAQSDAITWEKESLITELRKELQVSDKEHRELLNKVNGDDIIRRIRKWRESTGGLMINLVNNSQRTHDPIPSPTTSARKRQKMSQPILSACVPAPSAMHSQPLTAPMQPSSSGAKKGAQPGTKVKKTKPGQKIPGGSAVKSMPSSAGPGGRGTIINRNMSAGLPPESSQLNPLIGRKVMTRWPDDNSFYEAEITDYDASKDIYTLVYDINTADETWEWVDFKEMAPEDIRWDGEEPDLNLIGRGAPVHGMKSSSRGGPMSGTGRDRGPQKNSFKKDYPSQNGIGKKSVDYIEILHTETLIKEVERVFSSANPDPLEMERAKKALKEHEQSLIDAIARLAEASDDDRVRSLEYNRGWRNQHGGRYADDMTMDGHMAGDADAM

SEQ ID NO: 193866 - protein, 76 aa, Zea mays
  unsure (1)..(76): unsure at all Xaa locations
  Clone ID: MRT4577_108389C.1.pep
PSLRRLGTPWVACRPRSTLGTLLPDGVPGSGRRDLGFFTXKKTLCTXADXPTLCAYYPVLGREESLLHRGSRXXXX

SEQ ID NO: 193867 - protein, 102 aa, Zea mays
  Clone ID: MRT4577_10838C.1.pep
KSTSLANRLGCGTIPRETRCELYSPRMRKLWLQACEENDLQGFEAAAIQRRQIQEFAQNGILQIRLRQIRQQDQQTRLFMASIQNQGLEGMSIAVGQHPSYE

SEQ ID NO: 193868 - protein, 118 aa, Zea mays
  unsure (1)..(118): unsure at all Xaa locations
  Clone ID: MRT4577_108390C.1.pep
APTRTIKHVRDNDKGKLVCGGTKTPCWVFDNSLQAYHYGFWVELTVLTNWSGHMXIVREEIFRPGMCILTYQTGAEATQRANAPVGGLAGAVFTXDLNXQHQGIGQLEAGLTQGHTWG

SEQ ID NO: 193869 - protein, 196 aa, Zea mays
  unsure (1)..(196): unsure at all Xaa locations
  Clone ID: MRT4577_108391C.1.pep
TSQSTNDEVLVTEISEKSLSKKEKKAAAKAKQFGSNAKVNNGAQSNKATLKTILGEAXLAYGPALAEHIILDAGLVPSTKVGKDPESTINDSTVQSLMESITRFEDWLVDIISGQRIPEGYILMQNKMTAKNITPLEEASINHKIYDEYCPVLLNQFKSREYNEFATFDAALDEFYSKIESQKVNQQQKAKEESAA

SEQ ID NO: 193870 - protein, 81 aa, Zea mays
  unsure (1)..(81): unsure at all Xaa locations
  Clone ID: MRT4577_108392C.1.pep
SEKKAVAADRFVLRSESVNEAHPXKLCDQVSDAVVDGCLAEDPDSNVAWHTCTETNVVMVFGEVTTKATVDXEKIVGDTCR

SEQ ID NO: 193871 - protein, 142 aa, Zea mays
  Clone ID: MRT4577_108393C.1.pep
MASNKSIALLVLALALMLTVSVHGQLSSPTPAPTPAAAAPTPTPTPSPSPAPAPAPTTTPAPAPSQNRCPPGFPNLISLIEGIKTFLQQGITLVPVPLPVTNQQGNNNSSRICLCYPSTTTVFGTRNIKGPYKCVPAGPPFI

SEQ ID NO: 193872 - protein, 224 aa, Zea mays
  unsure (1)..(224): unsure at all Xaa locations
  Clone ID: MRT4577_108394C.1.pep
NTTTSSPPPPPSAPPPNRSESPKTLGKPPAPPRLAAAPDLAAVAVAVADAMDMAAMNDPERLFFFDLACKTAKSTYDENPLDADNLTRWGGALLELSQMHNGPESLKCLEDAESKLDEALRIDPNKADALWCLGNALTSRGFFTSETVQANECFEKXTGCFQRAVDVEPANELYRKSLDLSSKAPELHMEIHRQIASQASQGAPSSSNARQSRKKKKNNDFWYD

SEQ ID NO: 193873 - protein, 83 aa, Zea mays
  Clone ID: MRT4577_108395C.1.pep
AAAAMDFVLQVLLRVVMRRSIRRLQEVVDIAVDIGTAVFVAVRVSGLVFRRRLPTPTTTSSSSTTYYYSPGTSSSIGMHVQED

SEQ ID NO: 193874 - protein, 116 aa, Zea mays
  Clone ID: MRT4577_108396C.1.pep
PPASSGTAASVWAPPWSFGSGARAPPTVGRSSLFFDPRGNIPFAPIDGAHACIGPTRIPGVFSPKGFFACMPPFALIKQERAKGCSCILPLVPCMYGPLCLVIIHIIIKLVGVFSF

SEQ ID NO: 193875 - protein, 48 aa, Zea mays
  Clone ID: MRT4577_108397C.1.pep
KKKNFYKKKKKKKKKKRKKKKKKKKKKKKKKKKKKGGSIFRDPSLERL

SEQ ID NO: 193876 - protein, 76 aa, Zea mays
  unsure (1)..(76): unsure at all Xaa locations
  Clone ID: MRT4577_108398C.1.pep
AAEVLELAGNAAKDNKKTRIVXPRHIQLDVRNDEELTKLLGGVNIASCGFMPNIHQQLVPKKAGSSKASTVDDDEN

SEQ ID NO: 193877 - protein, 190 aa, Zea mays
  unsure (1)..(190): unsure at all Xaa locations
  Clone ID: MRT4577_108399C.1.pep
XSRARPSLLGARRLPLTLSPSSSSNQQAPRNSSRSFMVELAQAPTPVLGQQPWRPSNALPWSEDEARCSSAPFFLYLQQQGLNPPWRVAFSLLHGLQQPRAHLPWKTSRLPASGKPHLFPARELAVGRPSRCSPRPHLHGRAAVLHSLSSSSPIGAARRALPLWMSARKIGAAALQFILHFPVASHRSRV

SEQ ID NO: 193878 - protein, 123 aa, Zea mays
  Clone ID: MRT4577_10839C.1.pep
GGQTPNRRRKRTKRHPGKAPGQQRQLAKGGRGPTRLSRGKPRPTQPKGPQKTANRAPHDPRKGAKRPPTTPPPNEPANGDRQQQKIALKRGHKPTNKPLFFKMNKPFFFYIIFSLFFFFFFFF

SEQ ID NO: 193879 - protein, 156 aa, Zea mays
  unsure (1)..(156): unsure at all Xaa locations
  Clone ID: MRT4577_1083C.1.pep
LPPCGPPGSGRRPVHIGXRGRARPARAWPPRPPETPPRGARPXVVEPPPAPAVGRREHLDAPXRAGPRRARPPRRPGTPRSTAARPRLGRGRWPPHGSSPXGVGQPARVPPRARAXAPASPPPPTPRRGSPGTAPPPLHRRGRRSRSRSPARTRRT

SEQ ID NO: 193880 - protein, 112 aa, Zea mays
  Clone ID: MRT4577_108400C.1.pep
MSLVSGAGGRRMSIRSISCRGVRAFVLFQKPPLYATVSLGGRREKTQPDADGGENPDWDDAVFAFDLDRDGSQQQQLVVEFEVKAQVPILGNKLVATASVPVADLAAAQGRG

SEQ ID NO: 193881 - protein, 36 aa, Zea mays
  Clone ID: MRT4577_108401C.1.pep
PYPHSRTQPSAAPLRSRAPGYRAHGNSPPLAPDAAP

SEQ ID NO: 193882 - protein, 91 aa, Zea mays
  unsure (1)..(91): unsure at all Xaa locations
  Clone ID: MRT4577_108402C.1.pep
IVVPKAIKNPSTKNPAEEELLLKCIXCTTRHKAEKRLPAAKSFGKEGGDKKGKKKAKKSVETYKIXGGGRSKGSKLTYGCMQHNNFFMGSL

SEQ ID NO: 193883 - protein, 79 aa, Zea mays
  Clone ID: MRT4577_108403C.1.pep
MAAADSDPAISISTCPHCQREIPSSNIALHSAHYARNLQKCEHCGNIVPRKLVDQHYDENHAPASLFPNSKLLLDAVNS

SEQ ID NO: 193884 - protein, 98 aa, Zea mays
  unsure (1)..(98): unsure at all Xaa locations
  Clone ID: MRT4577_108404C.1.pep
SGRQSAPSSSPTEWVNWSWGQPGAAWSRAPPGRLLPSAPTLRSSRPPALLRRPLAVLHAPVATTARAPVSRAQMSCLSSPGSRPCAXGLRLGLCWHRR

SEQ ID NO: 193885 - protein, 437 aa, Zea mays
  unsure (1)..(437): unsure at all Xaa locations
  Clone ID: MRT4577_108405C.1.pep
MARCSVAKPLCATTATPRLTRRCRQLSANATTPAMATSKARLPALNKPAKPPPPLLSRPKLPVPTNTATDTTSGKDCTKKPPPEATDSHPPSSGAGDVLRLMDALGIPPDEDIYISLLRECADAAEVASVHAHITARRASDGLPSPVANRLLLSYAACGDIEAARRVFDGMPTTNGMAWATMVSAYSDGCLHHEAMRLFAHMCHGTPVLDGDCYSHAIVAVLRSCTRAGELRLGEQVHALVVKKGRIHGDXQLASAAVLRXGGFHRSARRVLATTMQHHCQEPVPEAAWTSLITSCHRESLLSEAVDVFRDMASSGVPRSSFSMSSILAVFAESQDPGCCCGQQVHADAIKRGMDTNQFVGSGLIHMYAKQGRLADAARAFETIGGKPDAACWSALAMAYARGGRYREVTRIMYQMKAAGMNPSKEMTDAVRLACFR

SEQ ID NO: 193886 - protein, 139 aa, Zea mays
  Clone ID: MRT4577_108406C.1.pep
VEMVTTDGADLGVGLDLGKRKVKEMLFKSIDGERLIGISGMSGSGKTTLAKELARDEEVRGHFGNKVLFLTVSQSPNLEELRAHIWGFLTSYEAGVGATLPESRKLVILDDVWTRESLDQLVFENIPGTTTFVVSRSKL

SEQ ID NO: 193887 - protein, 37 aa, Zea mays
  Clone ID: MRT4577_108407C.1.pep
PGSDRDFTFAQKYTSRLTFKSSGHGAQAVQIFDSWAT

SEQ ID NO: 193888 - protein, 55 aa, Zea mays
  Clone ID: MRT4577_108408C.1.pep
NFKKKKKKKKKKKKIKKKKIACRSIIIKFTYPIIQNNNFSIISPKLNSHSLIFTK

SEQ ID NO: 193889 - protein, 67 aa, Zea mays
  Clone ID: MRT4577_108409C.1.pep
IGVSARLACFSQAIVKRFFSFLCPGFPLCYSCTLVPVQALSRWSGAGIFLETEGPPPKKNIKKKKKH

SEQ ID NO: 193890 - protein, 45 aa, Zea mays
  Clone ID: MRT4577_10840C.1.pep
LGTIEEFRYHLLWHQDRPNKTAYHSYSYMNIFASLFLENVQLEFT

SEQ ID NO: 193891 - protein, 78 aa, Zea mays
  Clone ID: MRT4577_108410C.1.pep
LWAPAGAWCPRCSRAWLLLALLVLWLAGVLCGCGEGGSGGRGVLRVSVLGHPGLGGSPLCRWLVAGVELLGSFGSCAG

SEQ ID NO: 193892 - protein, 54 aa, Zea mays
  Clone ID: MRT4577_108411C.1.pep
EPSLSIIKESPDQTVQSGRAGPGPDVYKRKSVVLEISFSRHISIHLSRRACTNV

SEQ ID NO: 193893 - protein, 45 aa, Zea mays
  Clone ID: MRT4577_108412C.1.pep
LLLLRQHRVCPSLRSNIMRFPMITVRPHPHISPLLSPDPHRPLCG

SEQ ID NO: 193894 - protein, 64 aa, Zea mays
  Clone ID: MRT4577_108413C.1.pep
LVAFAPVHRLFCLPPSSSLSVLLLFASGGVASGAFVPPLFVPRFGGSGSASTNWCVLRRGVGRP

SEQ ID NO: 193895 - protein, 77 aa, Zea mays
  Clone ID: MRT4577_108414C.1.pep
VCGLWIRHADRWGWGAERAGAQGRRDKGERLWENRRRTEHREEIGLGEENAPPDPDYDLPRIPLNVQTNDARARANA

SEQ ID NO: 193896 - protein, 48 aa, Zea mays
  Clone ID: MRT4577_108415C.1.pep
ARVRFRVRAVAVAKIAVPDVLGLRFLCCLVHSDSVIGGAGQYSSIQWD

SEQ ID NO: 193897 - protein, 78 aa, Zea mays
  Clone ID: MRT4577_108416C.1.pep
MLSGCGSKCECGSSCSCISVCNGCGMYTDVYTTVTSSVKTTVLDAPTTKVSAGSFDAVTDGDSCDCNTCKCRTSCGCF

SEQ ID NO: 193898 - protein, 47 aa, Zea mays
  Clone ID: MRT4577_108417C.1.pep
KNRLPLPPTTGHWSPNEPNTVLRVLCYRSDETATKFLKKTYNLPKKI

SEQ ID NO: 193899 - protein, 53 aa, Zea mays
  unsure (1)..(53): unsure at all Xaa locations
  Clone ID: MRT4577_108418C.1.pep
FCVHHCVCPVXVVRYPDDAADAGGDASGVTDELHTVGELEAGRDDAPEVQKEN

SEQ ID NO: 193900 - protein, 76 aa, Zea mays
  Clone ID: MRT4577_108419C.1.pep
SRAHSLPSCALRLHPDHGQEERDYSNMQQSGVENTEADLLTNLVPGQSCEHYHDASLHSSGAGTEHTSLDLTQLAR

SEQ ID NO: 193901 - protein, 58 aa, Zea mays
  Clone ID: MRT4577_10841C.1.pep
TLHIEFLRANTYTMRSVRCKVATFCIVTVTYTLCESKQVEALHIHFNSLSTGMLLLLA

SEQ ID NO: 193902 - protein, 47 aa, Zea mays
  Clone ID: MRT4577_108420C.1.pep
NGGKIKRIQDEDGVNSKLLLFPACITHLPAPIRYNYWRYRHIMTKLS

SEQ ID NO: 193903 - protein, 81 aa, Zea mays
  unsure (1)..(81): unsure at all Xaa locations
  Clone ID: MRT4577_108421C.1.pep
TDVKIDWPENAIXKAKMLRWKAQFIYVDMENVSTSYATGIXDVTEAYAAAMRSAFVDKQDYLLNQKSLQEKVKCIYIQLNF

SEQ ID NO: 193904 - protein, 78 aa, Zea mays
  Clone ID: MRT4577_108422C.1.pep
MEIVAVVQVMEQGDAAVVQNPTKPTMETIINDSPIRVTRSRLAMLLADGTTSQEGLPSASFSNKMTPPKKLTPRKLRC

SEQ ID NO: 193905 - protein, 51 aa, Zea mays
  Clone ID: MRT4577_108423C.1.pep
DHQNLFSPEPKKIPPPGRVKSFTVRGKRKFQLLLEGHGQSKVRYLPITHFP

SEQ ID NO: 193906 - protein, 100 aa, Zea mays
  unsure (1)..(100): unsure at all Xaa locations
  Clone ID: MRT4577_108424C.1.pep
GVRPSRGPLGVRRGMWSPRFGRQRPHSRRGRVQLGPALRVPVRITLVGSTASXVPSVAAASATPTGSGEIDRLGPCAQVILLATVMFTLVHRVNLRSRRY

SEQ ID NO: 193907 - protein, 189 aa, Zea mays
  unsure (1)..(189): unsure at all Xaa locations
  Clone ID: MRT4577_108425C.1.pep
MESAAPVIARPSLPKKPSPSFRLRNGSLNVLRLRRVFDLFDRNGDGEITLDXEMAAALDALGLGADRPGLQAALGAYIPAGAAGLRFDDFQCLHRALGDALFGPIPEAVPEEDVEGDMEEAFRVFDEDGDGFISAAELQAVLRKLGLSEARNLATVQEMICSVDRNCDGRVDFREFKNMMMQGVTVWGA

SEQ ID NO: 193908 - protein, 56 aa, Zea mays
  Clone ID: MRT4577_108426C.1.pep
MNKNNSSIDSSGGGGGTVLESGSGSGSFNLRNLSNVILPSLVRPFGGQNQSYGVSD

SEQ ID NO: 193909 - protein, 69 aa, Zea mays
  unsure (1)..(69): unsure at all Xaa locations
  Clone ID: MRT4577_108427C.1.pep
TPTYIAPKVLSPPDYDTKLPYKXPCLETLHIMLITSYPFXYPANPTNIHITIHQIMQEQYKIPQHVHIS

SEQ ID NO: 193910 - protein, 44 aa, Zea mays
  Clone ID: MRT4577_108428C.1.pep
LFNLLLMGVTLHDHAARRVMSGRYPILCVVVGREVPFRLLLCLV

SEQ ID NO: 193911 - protein, 79 aa, Zea mays
  Clone ID: MRT4577_108429C.1.pep
SPVFIVEVIGKNRVFPLFIHFVSNPFLERGGDLKGAFTNGFCKSLGKLNGFCCAPFSAALLGFVVLFSRKFTVFFAGVF

SEQ ID NO: 193912 - protein, 629 aa, Zea mays
  Clone ID: MRT4577_10842C.1.pep
SIPWSKRTLQYACHLIVLRINYPTRPPRVRPRVRPRVRPRVRSDVTDEMESYSLQLQEPDDKSPLEVKKMSHNALAALVKYLQKKRSGIFERATAEVTEEVVSGAVHHSLKLSEPYKSKKLSKKRAQTHTSSIAREMATVLDTCLLQALILTGQSSGAIELLKGLNYCDLKICEEFLKERREYMVLLELYKSNEMHRDALQLLNQLVEESKSEMENTYFNKKFNSQMILEYLRPLCRSDPMLVLESSLYVLERNPSETIELFLSENVPADLVNSYLKQHAPNLQSTYLELMLSMNDTGINPNLQNELVQLYLSEVLDWYKILKEEGNWTEKTYSPTRKKLISTLESNSGYNTDALLKRLPQDALFEERAILYGKINQHLRALSLYVHKLQMPERAVAYCDRVYEEREQQPSKSNIYFNLLQIHLNPRKAEKEFEQKIIPVASQYSGIQKASATKPKGGRVGKKVVEIEGADDIRFSPSGTDSGRSDGDGDDVNDRGPIMLNEALELLSQRWDRINGAQALRLLPRDTKLQDLVSFLEPLLRNSSEHRRNYLVIKNLILRANLQVKEDLYNRCQAVVKIDGDSTCSLCHKRVANSAFAIYPNGQALVHFVCFKESQQIKAVRGANSVKRR

SEQ ID NO: 193913 - protein, 122 aa, Zea mays
  unsure (1)..(122): unsure at all Xaa locations
  Clone ID: MRT4577_108430C.1.pep
ICSYCNDCRDLDFCXDSALQGREWRWSVPRPRPRGRTRGRTRGLLQVVRQRERLYHLQDLVCVRCRQVKAAHLSEQCSCGGSFRCKEEPSYFLSKMRVFLKVAVSQKFPLLQDCVQWILEAR

SEQ ID NO: 193914 - protein, 89 aa, Zea mays
  Clone ID: MRT4577_108431C.1.pep
RLRRGFLHYGKAMQGQHSKMDMTALLTGNDAFKLTPSYFRYHIREACSLLMSSTPNRVSAKPNPSRRTRAAALKTPWIELLPASLLQRL

SEQ ID NO: 193915 - protein, 56 aa, Zea mays
  Clone ID: MRT4577_108432C.1.pep
FNTMHVICIKIVLFWNNLQDVLARAQHMHLFISYCLRYFTIGCVVGFRTLIKKDAT

SEQ ID NO: 193916 - protein, 86 aa, Zea mays
  Clone ID: MRT4577_108433C.1.pep
MALRLQSISPTLFQAAAAAAGALALIVATRLLREDAVASLRREIREVLTALVADDEDGDGESASPPPPSVLITGFRAHGKSSMVNT

SEQ ID NO: 193917 - protein, 194 aa, Zea mays
  unsure (1)..(194): unsure at all Xaa locations
  Clone ID: MRT4577_108434C.1.pep
GDPRARPGTRPQLTAERKRCLATKQSYRAPSRLRTVDVGGVFCRLFWECLATGYLKISTLPRAFATVLKDLKYADTHEWAKAEGDSSTVGXTDHAEYHXGDVVCAELPXRRHXVSERRNYDADDSVKATSDINSPVAGEVGEVNDKLGEEPVLINARAYEKGWIIKVKLSNSCELSSIMDDDKDSKLCEEEDTH

SEQ ID NO: 193918 - protein, 160 aa, Zea mays
  Clone ID: MRT4577_108435C.1.pep
FRYVNKKFSNQYKATIGADFLTKEVQFEDRLFTLQIWDTAGQERFQSLGVAFYRGADCCVLVYDVNSMKSFDNLHNWREEFLIQASPSDPDNFPFVLLGNKVDVDGGNSRVVSEKKAKAWCASKGNIPYFETSAKDGTNVENPFQCIVKNALKNEPEEKL

SEQ ID NO: 193919 - protein, 53 aa, Zea mays
  Clone ID: MRT4577_108436C.1.pep
MVSGAGHGGYGGGSDDGQAVDFRGNPADKSRTGGWLAPGLILATNLPNPFSLM

SEQ ID NO: 193920 - protein, 100 aa, Zea mays
  Clone ID: MRT4577_108437C.1.pep
LLFHGVDKRWRRMILNLALGKDNNVFMTHQPEGENWSSGRARIGEHRKQPSGLAYFDGLHQHCMLLKKSTCRAYFFCLRCVSYIHCGADLLYASQHGADH

SEQ ID NO: 193921 - protein, 191 aa, Zea mays
  Clone ID: MRT4577_108438C.1.pep
MASRRRTLLKVIILGDSGVGKTSLMNQYVNKKFSNQYKATIGADFLTKEVQFEDRLFTLQIWDTAGQERFQSLGVAFYRGADCCVLVYDVNSMKSFDNLHNWREEFLIQASPSDPDNFPFVLLGNKVGVDGGNSRVVSEKKAKAWCASKGNIPYFETSAKDGTNVEDAFQCIVKNALKNEPEEELFVCRSI

SEQ ID NO: 193922 - protein, 224 aa, Zea mays
  Clone ID: MRT4577_108439C.1.pep
PAVSHICRVKSLSSNCTSLASRRRTLLKVIILGDSGVGKTSLMNQYVNKKFSNQYKATIGADFLTKEVQFEDRLFTLQIWDTAGQERFQSLGVAFYRGADCCVLVYDVNSMKSFDNLNNWREEFLIQASPSDPDNFPFVLLGNKVDVDGGNSRVVSEKKAKAWCASKGNIPYFETSAKDGTNVEDAFQCIVKNALKNEPEEELYVPDTVDVVGGNRAQRSSGCC

SEQ ID NO: 193923 - protein, 333 aa, Zea mays
  Clone ID: MRT4577_10843C.1.pep
MASASHAPTPLLKDELDIVIPTIRNLDFLEMWRPFFQPYHLIIVQDGDPSKIIRVPEGFDYELGRGNDINRMLGPKASCISFKDSACRCFGYMVSKKKYIYTIDDDCFVAKDPLGKDINALEQHIKNLLSPSTPFFFNTLYDPYHVGADFVRGYPFSLREGVPTAVSHGLWLNIPDYDAPTQLVKPLERNTRYVDAILTIPKGTLFPMCGMNLAFDRELIGPAMYFGLMGDGQPIGRYDDMWAGWCTKVITDHLGLGVKTGLPYIWHSKASNPFVNLKKEYNGIFWQEELIPFFQSVSLPKEATTVQKCYLELAKQVRGKLGKVDGYFTACRL

SEQ ID NO: 193924 - protein, 181 aa, Zea mays
  unsure (1)..(181): unsure at all Xaa locations
  Clone ID: MRT4577_108440C.1.pep
ADDDDCGYDGAAAEGSCSTAAIKKELYARLCRPTPFDGGTKEFWIEKNKGGLCMSISSKAMSITGRNDRRYWSDLSTEESRFHSVAYLRQIWWLEVDGEIDFCFPAGSYSLFFRLHLGRPRTRRARXRGGSDNDIHGWDIRPARFRLSTSDHQQHTTASEAHARLASPGRWVLYHVGDFAV

SEQ ID NO: 193925 - protein, 107 aa, Zea mays
  unsure (1)..(107): unsure at all Xaa locations
  Clone ID: MRT4577_108441C.1.pep
AATMQVTFTIRRCGIFMKVXELSVLCYTDVALILVSSTGNRSXLSNCNMDEIIDNYFTHCXSCGTTEQTSLDFNLXHSIYVNLNDQLAVPSLRLMQIKGVELDGFNV

SEQ ID NO: 193926 - protein, 97 aa, Zea mays
  unsure (1)..(97): unsure at all Xaa locations
  Clone ID: MRT4577_108442C.1.pep
FSRTKLKFRGFVFSDWEGIDGIXTPPHANYSYSIKAGVGAGIDMIMVPFKYPEFMDDLADSKKGPGHRLLHYEFLIMSYVCTLNQLCMRSHLLSLNE

SEQ ID NO: 193927 - protein, 68 aa, Zea mays
  Clone ID: MRT4577_108443C.1.pep
FILEQPFERGRSARRRGPAHSLQHSSNLHLGVQFLLSLGVRVRRTLGHGELPGQVRIEVGGRENLAHL

SEQ ID NO: 193928 - protein, 94 aa, Zea mays
  unsure (1)..(94): unsure at all Xaa locations
  Clone ID: MRT4577_108444C.1.pep
PPVRGHVRAHRLQLFVXTPPMKFTSVSCFLEVWTVARSEEKHPRPTRSEAMLDLPLLQERQDGRDHLGCQEGQAPGPDREACCACAFFCVCLKE

SEQ ID NO: 193929 - protein, 95 aa, Zea mays
  unsure (1)..(95): unsure at all Xaa locations
  Clone ID: MRT4577_108445C.1.pep
PTRPFQCPSAPPVLCIPEKPTPPPAPPHAQFSARSPEAYVYVASQRSDAGHRRRPDHPPPLRHRSGASVHFSAAGMPCRAQHHRHPLRAPGPXRV

SEQ ID NO: 193930 - protein, 80 aa, Zea mays
  Clone ID: MRT4577_108446C.1.pep
TIPHRIGAVIYKEQNLGRLPTNLTNMNCKVLGARSGGGKSGRKIGLLSRPPRPKRRTEFGAPGGFFYPPRARVKVFCPPR

SEQ ID NO: 193931 - protein, 36 aa, Zea mays
  Clone ID: MRT4577_108447C.1.pep
TTQLSVMDSGNARIGKPAPDFKATAVVAGAFKEVKL

SEQ ID NO: 193932 - protein, 125 aa, Zea mays
  unsure (1)..(125): unsure at all Xaa locations
  Clone ID: MRT4577_108448C.1.pep
FINEPTADAGGYCLDKRAPSVGEKNVVIFDLGGGTLDAYILTIAEGIGGDKVTRGNTYMGDWDFDNTKPDHXITXSKNLSMNDVNGNPRAFLMVKTSCERANITVGYTDQTINEHDFMDEGMDFY

SEQ ID NO: 193933 - protein, 131 aa, Zea mays
  Clone ID: MRT4577_108449C.1.pep
FEWRTRSALGETLYPDASPCRSHEARTAANHHSTSDGNTHIIVLRHIDLTKHVKVQLQDWSSSTWFLFTKSKRDFFYTVQGRHTLTPLHTHTHGMSLHTKFNTTECIFCTYRKISGYWCVSKKNIGLYWIL

SEQ ID NO: 193934 - protein, 407 aa, Zea mays
  Clone ID: MRT4577_10844C.1.pep
MSDSRFHFHFQPLCRSDPMLVLESSLYVLERNPSETIELFLSENVPADLVNSYLKQHAPNLQSTYLELMLSMNDTGINPNLQNELVQLYLSEVLDWYKILKEEGNWTEKTYSPTRKKLISTLESNSGYNTDALLKRLPQDALFEERAILYGKINQHLRALSLYVHKLQMPERAVAYCDRVYEEREQQPSKSNIYFNLLQIHLNPRKAEKEFEQKIIPVASQYSGIQKASATKPKGGRVGKKVVEIEGADDIRFSPSGTDSGRSDGDGDDVNDRGPIMLNEALELLSQRWDRINGAQALRLLPRDTKLQDLVSFLEPLLRNSSEHRRNYLVIKNLILRANLQVKEDLYNRCQAVVKIDGDSTCSLCHKRVANSAFAIYPNGQTLVHFVCFKESQQIKAVRGANSVKRR

SEQ ID NO: 193935 - protein, 231 aa, Zea mays
  unsure (1)..(231): unsure at all Xaa locations
  Clone ID: MRT4577_108450C.1.pep
MGRHAASGGGVQQKLRKGLWSPEEDEKLYNHIIHYGVGCWSSVPKLSGLQRCGKSCRLRWINYLRPDLKRGSFSQQEEDAIVGLHEILGNRWSQIASHLPGRTDNEIKNFWNSCLKKKLRQRGIDPSTHKPISADAAALEQPASRDRKPSLATAAAGGGLDVKQQQQQQQVFDPFPLTDSFGGGFDDAAGAALYGHMGGXRQAAGRGRHRXTCWNVSENLGYGESSSTAAH

SEQ ID NO: 193936 - protein, 191 aa, Zea mays
  Clone ID: MRT4577_108451C.1.pep
MGRHAASGGGVQQKLRKGLWSPEEDEKLYNHIIRYGVGCWSSVPKLAGLQRCGKSCRLRWINYLRPDLKRGSFSQQEEDAIVGLHQILGNRWSQIASHLPGRTDNEIKNFWNSCLKKKLRQRGIDTSTHKPAVSASVPASEQPVSQDRKPLAAAAADGGSDMKHQQVFDPFPLTDSFGGGFGAALYGHTGG

SEQ ID NO: 193937 - protein, 57 aa, Zea mays
  Clone ID: MRT4577_108452C.1.pep
CSSSYSRHVLYLFSVPLSSSRLHPLYPVALLCVARHDVVHGELGVHGHHAHVEDLHH

SEQ ID NO: 193938 - protein, 70 aa, Zea mays
  Clone ID: MRT4577_108453C.1.pep
LFSNQVSVACDSESRVIIIEVLACSMKVVHALRHLFKCCHLVVHTISLDKSWVCGPLVCALPQRSCKKNP

SEQ ID NO: 193939 - protein, 66 aa, Zea mays
  Clone ID: MRT4577_108454C.1.pep
SSGNNAEDFFFFFFFFFFFFFFFFFFFFFFFFFFPTKGGMGPGKTGKKNGPLPSKALGGGRLKGTF

SEQ ID NO: 193940 - protein, 64 aa, Zea mays
  Clone ID: MRT4577_108455C.1.pep
KNVCSCGPLYSKNVYGYLCNLVGVGGFNRTCMCVGHKLTLSCICMLFIRSWGRKKKKKKKKNPP

SEQ ID NO: 193941 - protein, 179 aa, Zea mays
  Clone ID: MRT4577_108456C.1.pep
VNVDASGDWIWGSWPRLSSPTSITLCNMPTVNFPPRIGQLHTSLQRLEISHCEQLQHIPEDWPPCTLTHFCVRHCPLLRELPEGMQRLQALEDLEIVSCGRLTDLPDMGGLDSLVRLEISDCGSIKSLPNGGLPSSVQVVSINNCPLLANSCINEGSAYRAKVKRVLVWIDGLLLDRFL

SEQ ID NO: 193942 - protein, 72 aa, Zea mays
  Clone ID: MRT4577_108457C.1.pep
QQAYKGQGTPRRSAWRSAVVHQATRRSRARAGSRSASEHGIHPASGHRSELGLEGTGDWRCRLVEVTSLVNG

SEQ ID NO: 193943 - protein, 89 aa, Zea mays
  Clone ID: MRT4577_108458C.1.pep
TVAISQDQSQPNKHKSPPREVNRPGREPAHLCHQRTPCQLRRTGGSAVGLGRIAHGTARHGMTDKRHPILPWQILRLSADAAPPPGSLY

SEQ ID NO: 193944 - protein, 64 aa, Zea mays
  unsure (1)..(64): unsure at all Xaa locations
  Clone ID: MRT4577_108459C.1.pep
KKVFVSSSKKPFTVDGKKAGFLKSPGPLSFXKVHDAGHMVPMDQPKVVLKMLKRWIFGNLWNPF

SEQ ID NO: 193945 - protein, 85 aa, Zea mays
  Clone ID: MRT4577_10845C.1.pep
NRVTMSTCSTSEEADRCYFDTDISGMLIQAGTGMDMQVKSKRCWITYCGAISIRCCKRLCLMPFRSDPRKVLSGLWYVRERKCVR

SEQ ID NO: 193946 - protein, 58 aa, Zea mays
  Clone ID: MRT4577_108460C.1.pep
YAGWEKKIEASAFVFIYGARRYLLGARDCMSARVAISLSDRCFDRSGAGMGKSQKSVR

SEQ ID NO: 193947 - protein, 83 aa, Zea mays
  Clone ID: MRT4577_108461C.1.pep
KKKKKKKKKKPPRNHTDRKGGTNVASFSVLAITRPALEPGSAGRGKGRRQLSAGSRPTSPAPRTPRPPSSSSPTFGGGGSHFH

SEQ ID NO: 193948 - protein, 275 aa, Zea mays
  unsure (1)..(275): unsure at all Xaa locations
  Clone ID: MRT4577_108462C.1.pep
GRNGFTGAMSPLIGQAQSLNQLWLQNNHLSGAIPPEIGRLGQVQKLYLSNNTFSGSIPSEIGSLSQLTALHLEDNAFSGALPDDIGRCLRLVEIDVSQNALSGPIPASLSLLSSLNSLNLSCNELSGPIPTSLQALKLSSIDFSSNQLTGNVPPGLLVLSGGTQAFARNPGLCIDGRSNLGVCNVDGGHKDSLARKSQLVLVPALVSAMLLLVAGILFISYRSFKLEELKKRDLEHGDGCGQWKLESFHPLELDADEICAVGEENLIGSGGTXRV

SEQ ID NO: 193949 - protein, 99 aa, Zea mays
  Clone ID: MRT4577_108463C.1.pep
PQKFSLKTMPVAPEEIKFHHHAKYSNRPTTETRPYPYPPRLEPTCLPECGYDASWLGPTRARDSESPGYLRSKEISADLRSARRSAIAAPRLCRFGRIG

SEQ ID NO: 193950 - protein, 127 aa, Zea mays
  Clone ID: MRT4577_108464C.1.pep
LTSFSILCLHSGTGSDRISVTYRIRIHMTCPFKSTPVLAYIPHALLHYFFSASYSPSLLASCTSTAFSLASDSEPIVSSLFFTSSNVLIWSTREALASHPTPGRRFALQRIVSNLCYGGDLSIGLGV

SEQ ID NO: 193951 - protein, 370 aa, Zea mays
  unsure (1)..(370): unsure at all Xaa locations
  Clone ID: MRT4577_108465C.1.pep
MRAPAMLRWAAAALAALLAASPAAAFCLPGVAPNDFHKKDPLLVKVNKLTSTKTQLPYSYYSLPFCKPNTIVDSAENLGEVLRGDRIENSPYVFEMGEPKMCQIICKAKINDKQAKELKEKIEDEYRVNMILDNLPLVVPLARQDRGATVYQAGYHVGVKGQYAGXFVCSAGVLLLTVCRSPFFLRGWSYLITKYMLQNNDKKSFIHNHLAFLVKYHKDETTDLSRIVGFEVKPFXSFSXLPYFVSMMPFTLTLSCLLTYTFFVKXHASINHQFEGPWNDKNTRLITCDPDASKLLVNSDTPQEVEAGKEIIFTYDVGFEESDIKWASRWDTFLLMIDDQIHWFSIVNSLMIVLFLSGMVAMIMLRTLYR

SEQ ID NO: 193952 - protein, 259 aa, Zea mays
  unsure (1)..(259): unsure at all Xaa locations
  Clone ID: MRT4577_108466C.1.pep
MRAPAMHRWAAAALAAFLVALPAAAFYLPGVAPNDFHKKDPLLVKVNKLTSTKTQLPYSYYSLPFCKPNMIVDSAENLGEVLRGDRIENSPYVFEMGEPKMCQIICKTKIDDKQTKELKEKIEDEYRVNMILDNLPLVVSIARQDRGATVYQAGYHVGVKGQYAGNKDEKSFIHNHLTFLVKYHKDETTDLSRIVXGFEVKPFSINHXFEGPWNDKTTRLITCDPHASKLVVNSDXPQEVEAGXEIIFTYDVGFEESDV

SEQ ID NO: 193953 - protein, 639 aa, Zea mays
  Clone ID: MRT4577_108467C.1.pep
MRAPAMLRWAAAALAALLAASPAAAFYLPGVAPNDFHKKDPLLVKVNKLTSTKTQLPYSYYSLPFCKPNTIVDSAENLGEVLRGDRIENSPYVFEMGEPKMCQIICKAKIDDKQAKELKEKIEDEYRVNMILDNLPLVVPIARQDRGATVYQAGYHVGVKGQYAGNNDEKSFIHNHLAFLVKYHKDETTDLSRIVGFEVKPFSINHQFEGPWNDKNTRLITCDPHASKLVVNSDTPQEVEAGKEIIFTYDVGFEESDIKWASRWDTYLLMIDDQIHWFSIVNSLMIVLFLSGMVAMIMLRTLYRDISRYNQLETEEEAQEETGWKLVHGDVFRPPANSDLLCVCVGTGVQFFGMLLVTMIFAVLGFLSPSNRGGLMTAMLLTWVLMGLFAGYASSRLYKMLKGSEWKSITLRTAFLFPGIAFGIFFILNALIWGEKSSGAVPFTTMFALVLLWFGISVPLVFVGSYLGFKQPAIEAPVKTNKIPRQVPEQAWYMNPAFTILIGGILPFGAVFIELFFILTSIWLHQFYYIFGFLFLVFIILIITCAEITIVLCYFQLCSEDYLWWWRSFLTSGSSAIYLFLYAGFYFFTKLQITKVVSGMLYFGYMLLASFAFCVLTGTIGFYACFCFTRLIYSSVKID

SEQ ID NO: 193954 - protein, 52 aa, Zea mays
  Clone ID: MRT4577_108468C.1.pep
IFISSRVSYFPFVLFLFFADFIRFPFFRFFLVFFFLKFRFIVFLSFKFKNFF

SEQ ID NO: 193955 - protein, 79 aa, Zea mays
  Clone ID: MRT4577_108469C.1.pep
TLFSLPWACSLVVAPHDAGRRAGDGNVHQQRGPRIAQPRRRVMLRIHLLLVDRRLRRVHPRPECGRRRRRVDDQRDSNS

SEQ ID NO: 193956 - protein, 253 aa, Zea mays
  unsure (1)..(253): unsure at all Xaa locations
  Clone ID: MRT4577_10846C.1.pep
MASRMSLTRLSAPLAKRALSTTAPAAVASSSAAKLTGRNALLSTPVARVHRGESRFLVGQEQRRMASSEEGGSTMTVREALNAAMEEEMTRDDSVFVMGEEVARYNGAYKITKGLMDKFGEDRVIDTPITESGFAGMAVGAALAGLRPVCEFMTWNFAMQAIDQIVNSGGKTYYMSGGNVPCPVXFRGPNGXPAAGVAAQHSQDYCAWYGSIPGXLKVVSPWSAADLQGLLKAAIRDPNPVCVLXNELMYGVS

SEQ ID NO: 193957 - protein, 233 aa, Zea mays
  Clone ID: MRT4577_108470C.1.pep
MQKFKTLAKALTGKTVTAGRNSSGRITSFHRGGGSKRSLRDIDLKRNTCSVGIVERIEYDPNRSSRIALLRWIEGVPQKDPAYKAERAPVNYIIASHQMEPGSMVVNSDSSKPSTTGSLMRPAHNANSILRFQELFRKASQEGEEGTDDQAKDAAVPAAAPLMPADLLDLNSKVGNCMPLSDIRMGTWVHSIELRHGQGAKLVRAAGAYAKVVKESATQCLVRLPSGVEKLID

SEQ ID NO: 193958 - protein, 83 aa, Zea mays
  Clone ID: MRT4577_108471C.1.pep
HMLAGSPRRSSLFPSWLQAHHNPQELLQLLQRRPVSHRTSDHGPQSSVYTTALLMRPRILQMGHVAFRFIIRVTCANLLLITP

SEQ ID NO: 193959 - protein, 328 aa, Zea mays
  Clone ID: MRT4577_108472C.1.pep
MAEQLDLPGFRFHPTEEELLEFYLKQVAHGRKLKFDIIPTVHLYRHDPWELPGLARIGEREWYFFVPRDGGRPAKQHHHQSSGARPSRTTERGFWKATGSDRAVRCAHDPKRLIGLKKTLVYYEGRAPRGTKTDWVMNEYRLPDACNNNNNNNNAVAGDSSAAAAASSTTTTNNSPKEDIVLCKVYRKAVSLKELEQRVAMEELARATPSASHNAGSPADSMSSSDQDQQTQLGQGGVEIMMTMPVGGISPQPPLPPPVMMSMKQEEEVAEPEAAPLPAVLMRPSTLSLPQLEVAKQQQEWMQDPFLTQLRSPWMESWSPYYPSVLNF

SEQ ID NO: 193960 - protein, 78 aa, Zea mays
  Clone ID: MRT4577_108473C.1.pep
LVYDWGPWALGGPVSGFPRGFGGGLTFAPVKGAGPVGPLVKTLGSPKMFLTWVSGDPLLCQFNRMAPRVFEGGSGIPF

SEQ ID NO: 193961 - protein, 148 aa, Zea mays
  unsure (1)..(148): unsure at all Xaa locations
  Clone ID: MRT4577_108474C.1.pep
PPPLPRGXGNPKKGPPPPQGKKRGNPPTRAPDIMPPPKGPGHPLEPANKQQKQANWPPPPHXGGPTEKHERTPRAPRGGRTSRSREGPPPRKKGRNPHXRPPGPSEQRPKPRSGGAPGNERXEPHTPNKEGPPPPPGGKLPPPPPRAP

SEQ ID NO: 193962 - protein, 83 aa, Zea mays
  Clone ID: MRT4577_108475C.1.pep
SGVSYPTIPKMTTTSGRTLFTVSKIAAKSFMVPALPLNISTSRITSRCSYRVDTAHWHDVSTVCVRPPTRPRKRGRTRGRTRG

SEQ ID NO: 193963 - protein, 50 aa, Zea mays
  unsure (1)..(50): unsure at all Xaa locations
  Clone ID: MRT4577_108476C.1.pep
MADTVTVPVXTTPSTQLLKDXLNIPIPSIRNLVFLEMWREXFQPYQKMIF

SEQ ID NO: 193964 - protein, 52 aa, Zea mays
  unsure (1)..(52): unsure at all Xaa locations
  Clone ID: MRT4577_108477C.1.pep
VFIRKLIEYEIKIFEYCKFFMEEILFIYICQKGFQGVXXLHNNLKNAWSDGP

SEQ ID NO: 193965 - protein, 296 aa, Zea mays
  unsure (1)..(296): unsure at all Xaa locations
  Clone ID: MRT4577_108478C.1.pep
QPACARARQKSVSFPSLVLTGSFRRHGRPLLLLPAXLLASAASAGSERCVRQGKAAYSPSLSPAPHGSSGACGYGAMAAEINGGFLAAGGPRQHRGGLGCGRCFQMRCRDARLCSAGGVRVVLTDFHRSNRTDFLLAGPAFAGLAKPGMAQELNRRDALSVEYKRIPCEYKEKNLSIRVEEAGDRSRGKLVVKLLYQGGQTDVLAVEVAPVGSSSEWRFMTRAYGPVWSTDRAPAGPLQFRAVVTGGYDGKWVWAEQEVLPADWRPGQVYDTGVRIVDVARDASRGCTAAAMDDWK

SEQ ID NO: 193966 - protein, 78 aa, Zea mays
  Clone ID: MRT4577_108479C.1.pep
FMTRAYGPVWSTDRAPAGPLQFRAVVTGGYDGKWVWAEQEVLPADWRPGQVYDTGVRIVDVARDASRGCTAAAMDDWK

SEQ ID NO: 193967 - protein, 33 aa, Zea mays
  Clone ID: MRT4577_10847C.1.pep
ATGPLNLLYVSYIFQWGLCTQRERRHPFSRVSD

SEQ ID NO: 193968 - protein, 57 aa, Zea mays
  Clone ID: MRT4577_108480C.1.pep
FKLFCLTSYNYLTLYKTLYYTGSHDLVPMYMIVNESLVMRFSKQKLSHILQVGFKFT

SEQ ID NO: 193969 - protein, 78 aa, Zea mays
  Clone ID: MRT4577_108481C.1.pep
PPVPEHSGPKETGGPAVRPDPARPRSRSPAELARRPAGQWRKRARTGAEPVCTARASLCVGEACGASRPARGSTGFSG

SEQ ID NO: 193970 - protein, 55 aa, Zea mays
  Clone ID: MRT4577_108482C.1.pep
LFVRRHLGGRMNNSNVQVGLHMTHERWTLGSYRHSSSNRRRIYFAHNLKDGMSVV

SEQ ID NO: 193971 - protein, 178 aa, Zea mays
  unsure (1)..(178): unsure at all Xaa locations
  Clone ID: MRT4577_108483C.1.pep
TSRPXGSXMQKEWADRWLTTLLHSVSPPPIKAKQGQCRNLLTSAQVSYGLRCQITRSHDLSHRRILPREQRAPYPAVFTLWQRVANPPSSADEKETPISKWSSDERPGVPPARLSNPIESGSMQMVINDASIKEIAYPIVWDPAYTAWVSSYRIVLTVQENWAILDYILNNTWKKCNR

SEQ ID NO: 193972 - protein, 79 aa, Zea mays
  Clone ID: MRT4577_108484C.1.pep
RGAEEEVELASDGGFNIDSPVHGCCGVRRRRVGSVGHDQQRAAGPALLRQGVPGGAPQHQEARGGCCCRGPRYVASLLR

SEQ ID NO: 193973 - protein, 144 aa, Zea mays
  Clone ID: MRT4577_108485C.1.pep
PPGSRLLSPMHATTSVISARLGAPDRQRASAQGPAPRDGAVGGPTGPRLTSLGTTPLRSGRAPPLRCSVLHAASPGRVALPGGCGLRTRSLATMNVISRGDGVADHQEAWTQGTERKNVDYGGPTKCSNTLLVTSAHLSIFFYS

SEQ ID NO: 193974 - protein, 54 aa, Zea mays
  Clone ID: MRT4577_108486C.1.pep
VCILSIQSAMCHVKVGLCFLDRNMFSLLLRLIHYNGTELTYRPMYRNRQAALLC

SEQ ID NO: 193975 - protein, 205 aa, Zea mays
  Clone ID: MRT4577_108487C.1.pep
PRSSRLLLSSLIPVGCSIVDPTTCSVSACHGSFIFKSPFSPWIYGSGAVLHIVMCHLSAAGHGPLLPAMLEAPSARQSVDLQGGGSCTGELLSGPLTTMDLWIGSGASYCDVPPQCRRAWAIAPSDAGGSLRPTKCGSAGRWKLHRGERSDTREERWENKERRRRSAGDLGDGGGSSVSLMAAGSCGVEVAEEARAGMRSSSGIL

SEQ ID NO: 193976 - protein, 189 aa, Zea mays
  unsure (1)..(189): unsure at all Xaa locations
  Clone ID: MRT4577_108488C.1.pep
MKVSALALALLLLAAAEASQSHHGSGLELGYYKTACPGVESVVKYHVAKAISANRGAGAAFVRLIFHDCFVRGCDASVLLDPTPANPETEKTAPINIGLAAFDVIDDIKAALEERCPGTVSCADIVVYAARDASSILSNGRVRFAAAAGRLDGVVSRAADAQRDLPDSTFHVAELXPHFRRKNFTGEEL

SEQ ID NO: 193977 - protein, 204 aa, Zea mays
  Clone ID: MRT4577_108489C.1.pep
PAGSPASALPQAAAHRSPDLDSRLELDDSQSQFLSSATAKSKTLAAGAELPRASGPARFVCFAACGHASQPAAAPESIAATTRLRATTGWLRRRLSAEGYPAVVSRGWPVRAAKRQVHLPSAAPPSEAALPLNPSSIWYLSIICRIINLKIIDYSQLKVEVYYVMLLTILCETCGLIVVSISFFLKKNCSYFPSLARVLLFVKF

SEQ ID NO: 193978 - protein, 52 aa, Zea mays
  Clone ID: MRT4577_10848C.1.pep
SSPRSGMSRIATSQMVILLMQEGSNEVSVIHSIMPDASPIVSSLEGLQPISA

SEQ ID NO: 193979 - protein, 160 aa, Zea mays
  Clone ID: MRT4577_108490C.1.pep
MGSLRAPPVLSPLVSGLIFSSDRVLNSRGLTTSSVMKSCRLSEVSSLKARPRIDSSSMSIFGTVNPIVEGVCVRGDAADKQYQVKNCRWRPTFALETDGPSNTDGQDFDEDSGFLGRTRLGRLIQAAARELLDKLNSARTIRQQGFLVLLVFHSHALAHT

SEQ ID NO: 193980 - protein, 104 aa, Zea mays
  Clone ID: MRT4577_108491C.1.pep
WVTSRTVGLCPSAYKNKMSLSGGNGTFGAGMGPPAFSFAVQPPAVRRIRGRSLLVGVPGPRGVLPGPAGFFLLEPFFWDTPPLGIKAFPVAYFGCSSLSWVVPF

SEQ ID NO: 193981 - protein, 232 aa, Zea mays
  Clone ID: MRT4577_108492C.1.pep
MGSLSAPPVLSPLVSGLIFSSDRVLKSRGLTTSSVMKSCRLSELSNAEVSSLKARPRIDSSSMSIFGTVNPIVEGVCVRGDAADKQYQVKNCRWRPTFALETDGPSNTDGQDFDEDSGFLGRTRLGRLIQAAARELLDKLNSARTNSPTKIFLVLLGFYTANALATILGQTGDWDVLVAGVVVAAIEGIGMLMYRKPIARPPGRFQSLISMVNYWKAGVCLGLFVDAFKLGS

SEQ ID NO: 193982 - protein, 74 aa, Zea mays
  Clone ID: MRT4577_108493C.1.pep
KNKDIALHNAQLLRKAAGFCTAGAKKKKNHFGGNSFNNRTKWLSQQDYPILNRHTPRPDFLTFGTSSNKLQILE

SEQ ID NO: 193983 - protein, 114 aa, Zea mays
  unsure (1)..(114): unsure at all Xaa locations
  Clone ID: MRT4577_108494C.1.pep
DFRSRGGSLFLLDIRRVFFLFDIILQPFGFNLVLFPPGDEKIPPLCFFKGFRLFGGLXQSPPPPSFSVSGVWTGRLFFFVWKVTGINTLGWFGLFKKKKKKKKKKKKKKKKKVP

SEQ ID NO: 193984 - protein, 77 aa, Zea mays
  Clone ID: MRT4577_108495C.1.pep
VVCMVCGAGILWRAWPNRSTEQWRRRGPHYSEGGMRCNTIVVRARESEDHPGTWNLKSKVKNRFHWIRRMNDDVMKS

SEQ ID NO: 193985 - protein, 47 aa, Zea mays
  Clone ID: MRT4577_108496C.1.pep
MPISYTYSHDGLTDASKIAILNANYMAKRLENHYPVLFRGVNRTIFR

SEQ ID NO: 193986 - protein, 93 aa, Zea mays
  Clone ID: MRT4577_108497C.1.pep
LGVSRGQWAAGTCTRSVARSSGLSAVVGRWLGAATESGASSGSWGATRRRPATCTARREKAQEEGGVIMAPPPPGSHHVIIESCVLVDVSRRL

SEQ ID NO: 193987 - protein, 72 aa, Zea mays
  Clone ID: MRT4577_108498C.1.pep
GGAANVPRGPKPSGSSRWHAEGSRTISTSYRYAMDQPCLDRPTHGRRHGLSPLACVNKLGDVRPPPPPNRVG

SEQ ID NO: 193988 - protein, 52 aa, Zea mays
  Clone ID: MRT4577_108499C.1.pep
RAFAQVPSHNLVLPYFIWEKDMIGCTAFSSSIQNPPMSMIYIFTCSRLSYHL

SEQ ID NO: 193989 - protein, 70 aa, Zea mays
  Clone ID: MRT4577_10849C.1.pep
YHPPALYLLLCEARQQGHGPVYLSRECIDNAGTMLLAHICLVVPWWWFLLKNPHKMKGRPPKSMLVDPRI

SEQ ID NO: 193990 - protein, 103 aa, Zea mays
  Clone ID: MRT4577_1084C.1.pep
LHNNTLKYRLKAPIVYLVHRNNAHKNPVELILWIFPCSPILMCQSSTVRSALQSRGIKERTHSTPTFFLSMLFMKHRALTGPTGLIGIHLSPQRRKAEKKPLS

SEQ ID NO: 193991 - protein, 59 aa, Zea mays
  unsure (1)..(59): unsure at all Xaa locations
  Clone ID: MRT4577_108500C.1.pep
GPLFXRPLGPRQGXRACXSRLRCSGPVSSPALAFXXEFGEPPLIRRVFCXRWPPVVFFP

SEQ ID NO: 193992 - protein, 88 aa, Zea mays
  Clone ID: MRT4577_108501C.1.pep
DRLDELDVSSARTFFETYFTPFQLANTDGTLDGLVTGYYEPLLHGSRVRRGPYQYALYRWPAGYRAGAALPVRAQLERAGVLNGNELV

SEQ ID NO: 193993 - protein, 122 aa, Zea mays
  Clone ID: MRT4577_108502C.1.pep
SQTPTRSGQGKPGQHTLIRRRTGNTCFAEGTTCYANVSELRMSKSAIIPYGYGGHQQKHLFSYGDESLRGVRTWQLPSFGMHADLCTHREPILDLRYAAETEGPGGYLGCLSEEKLQVFRVN

SEQ ID NO: 193994 - protein, 64 aa, Zea mays
  Clone ID: MRT4577_108503C.1.pep
KKKKKKKKKLKNKNNKKKKKKKVKRIKKNITMSYVEHTLKGWMFLMDCFCSPWFFKGSLLFVYL

SEQ ID NO: 193995 - protein, 38 aa, Zea mays
  Clone ID: MRT4577_108504C.1.pep
RPGQVSSYQLVKPSAIRTSRCRWDVHVPGYQARLDLSR

SEQ ID NO: 193996 - protein, 95 aa, Zea mays
  unsure (1)..(95): unsure at all Xaa locations
  Clone ID: MRT4577_108505C.1.pep
RYPRRGSIFPSLSLATHAXPRQRIVPPPWRNHLFSPPASRSAKLMADPSPYCNPCGLYQLPPRQSKPQAPYKSLVQSVVGHSLSPVAVVVTVRPV

SEQ ID NO: 193997 - protein, 238 aa, Zea mays
  unsure (1)..(238): unsure at all Xaa locations
  Clone ID: MRT4577_108506C.1.pep
MQIFVKTLTGKTITLEVESSDTVDNVKAKIQDKEGIPPDQQRLIFAGXRLKKKEIFLGVLRLHCHKVRVRHRLVRLCEGGRGEEKMQIFVKTLTGKTITLEVESSDTVDNVKAKIQDKEGIPPDQQRLIFAGKQLEDGRTLADYNIQKESTLHLVLRLRGGTMIKVKTLTGKEIEIDIEPTDSIDRIKERVEEKEGIPPVQQRLIYAGKQLADDKTAKDYNIEGGSVLHLVLALRGGY

SEQ ID NO: 193998 - protein, 153 aa, Zea mays
  Clone ID: MRT4577_108507C.1.pep
MQIFVKTLTGKTITLEVESSDTVDNVKAKIQDKEGIPPDQQRLIFAGKQLEDGRTLADYNIQKESTLHLVLRLRGGTMIKVKTLTGKEIEIDIEPTDSIDRIKERVEEKEGIPPVQQRLIYAGKQLADDKTAKDYNIEGGSVLHLVLALRGGY

SEQ ID NO: 193999 - protein, 270 aa, Zea mays
  unsure (1)..(270): unsure at all Xaa locations
  Clone ID: MRT4577_108508C.1.pep
MACSESEMMMMADGGVVSPPGLLGRFWRAVCCVVWVPHASRLAMCPAVLCHHPSIILSIPHLLCEKKKKKKKKKKRLHCHKVRVRHRLVRLCEGGRGEEKMQIFVKTLTGKTITLEVESSDTVDNVKAKIQDKEGIPPDQQRLIFAGKQLEDGRTLADYNIQKESTLHLVLRLRGGTMIKVKTLTGKEIEIDIEPTDSIDRIKERVEEKEGIPPVQQSYAFLASGADEATLVAXRLIYAGKQLADDKTAKDYNIEGGSVLHLVLALRGGY

SEQ ID NO: 194000 - protein, 153 aa, Zea mays
  Clone ID: MRT4577_108509C.1.pep
MQIFVKTLTGKTITLEVESIDTVDNVKAKIQDKERIPPDRQLLIFAGMQLGDGRTLVCYNIQKEATLHLDLKLMGGTMIDVKTLTGKEIEIDIEPTDSIDRIKERVEEKEGIPPVQQRLIYAGKQLADDKTAKDYNIEGGSVLHLVLALRGGY

SEQ ID NO: 194001 - protein, 54 aa, Zea mays
  Clone ID: MRT4577_10850C.1.pep
SDPPTACAVRHVTFLALRPGSCLLHSRACNSQSHHEPRSNFDELYITAHRTTAT

SEQ ID NO: 194002 - protein, 88 aa, Zea mays
  Clone ID: MRT4577_108510C.1.pep
VRPPCPSSRFRSWWSQAAASLDKDLRKGFNTLVILVTWILWKHRNACVFDSVQPQAQAVLSQVAAEGHMWCLAGAAGLHKLLLRREPP

SEQ ID NO: 194003 - protein, 98 aa, Zea mays
  Clone ID: MRT4577_108511C.1.pep
CIPWDSLSLLLSKWSSLLLMFCSDDATFFGDFSLQYGPQTSTHLATSNALFPTPCHYQLALSVADGGCRRGWRPPAVRSTPARMEPPRRMESTGRPLL

SEQ ID NO: 194004 - protein, 65 aa, Zea mays
  Clone ID: MRT4577_108512C.1.pep
MGKGKPRGLNAARKLRNNRREQRWSDLAYKKRALGTAFKSSPFGGSSHAKGIVLEKVGVEAKQPN

SEQ ID NO: 194005 - protein, 502 aa, Zea mays
  unsure (1)..(502): unsure at all Xaa locations
  Clone ID: MRT4577_108513C.1.pep
MSYNKAPSITAETINPRVKIIRYAPCGEIVKHAARLEQEIEENPASIPFQEIIYCNLGNPQVLGQPPLTFFREVLSLCDNPALMDRDEARALFSPCSIRRARRILNSIPSKDTGGYTDCRGIKCLRQVVADGITARDGFPSTADDIFLTDGATSAINLMMQILIRSHEDGILSPLPEYPLYSASIILHGGTMVPYNLTEDNGWGLEIFEVKRCLEEARSAGLTVRAMVVINPGNPTGQVSREFHLTYSTLTACXATGIAVVPGSGFHQASGTIHIRCTILPDERKIEAMVARLRAFHKAFMNEXGLSAGHERSPSLMVSMHGTVRPVRXHGQSRQLLSSGVVVCCSXVLASSLSXVPVCPHLCSQWSVCSLYCLKISCAFFCQRAKTLEKAFSGLEGVTCNKLEGALYLFPRLHLPSAAIRAADFEGVSPDIFYAHRLLDATGIAVVPGSGFHQASGTIHIRCTILPDERKIEAMVARLRAFHKAFMNEFRGSQQVMNDLRR

SEQ ID NO: 194006 - protein, 132 aa, Zea mays
  unsure (1)..(132): unsure at all Xaa locations
  Clone ID: MRT4577_108514C.1.pep
GLRAENRACIKLSSQAVPXRTGGPYENXLKACHSKTAKNPDWNXIEYSFLRXKASPNLASVKQELHVRLQAPRGESRTYLGGDDSLFPWXWQIHSPGFINWQILPQLVKKLKWADIMTLLGSIDIIMEEVDR

SEQ ID NO: 194007 - protein, 503 aa, Zea mays
  unsure (1)..(503): unsure at all Xaa locations
  Clone ID: MRT4577_108515C.1.pep
MSYNKAPSITAETINPRVKIIRYAPCGEIVKHAARLEQEIEENPASIPFQEIIYCNLGNPLARGLPPRTCWRQVLSLCDNPALMDRDEARALFSPCSIRRARRILNSIPSKDTGGYTDCRGIKCLRQVVADGITARDGFPSTADDIFLTDGATSAINLMMQILIRSHEDGILSPLPEYPLYSASIILHGGTMVPYNLTEDNGWGLEIFEVKRCLEEARSAGLTVRAMVVINPGNPTGQVLSVTNQEEIVEFCRKEGLVILADEVYQENIYAENKKFHSFKKVARSLAYDENDLTLVSLHSVSMSYGESGRRGGYMEVSGVAANVKDQIYKVASLTLCPNIAGQILVSLAMDPPKXSLVTCTQLGDESFESFDKEKEQIRSSFCKRAKTLEKAFSGLEGVTCNKLEGALYLFPRLHLPSAAIRAADFEGVSPDIFYAHRLLDATGIAVVPGSGFHQASGTIHIRCTILPDERKIEAMVARLRAFHKAFMNEFRGSQQVMNDLRR

SEQ ID NO: 194008 - protein, 85 aa, Zea mays
  Clone ID: MRT4577_108516C.1.pep
GVAKVSNKKVQQLGLPPSTATTAARRRLVLLEGHVRRAGPRLPPLVWRRARPGAEPQPEVARRLRRDGRRRPHVRPRRRPPPDAW

SEQ ID NO: 194009 - protein, 154 aa, Zea mays
  unsure (1)..(154): unsure at all Xaa locations
  Clone ID: MRT4577_108517C.1.pep
PGCWASLFPSXVRVRVAGGCSGXSVXVGWAGSXMAASXCLSTRCFSSAGPRLGPRDDPLPPQRPSAPTGEGPRVPXVMPRSGRRXRVPRRSAVVTLLHGRRAMAERHSRAWNGQGSCDGALTSPVQPRRHVPAAGPCEGGVLSCYPVVAPWRAA

SEQ ID NO: 194010 - protein, 125 aa, Zea mays
  Clone ID: MRT4577_108518C.1.pep
MATKSIASLLAVALLLLLLSSPAAVVVVRAQQQQRGNPCPTNAVADLKVCADVLVLLKLKINVPPSQRCCPLLGSLVNLDLAACLCATIRLNVLGIPVNLPLDVPLVLNYCGRNASAVPGSNCSF

SEQ ID NO: 194011 - protein, 71 aa, Zea mays
  Clone ID: MRT4577_108519C.1.pep
AGAQWVGFKAKGLGGDLMKKGEQGSLFRALHQLHPGTKTNSSKRNRQNPLLKLNPGQILHSSPGDLCPSGW

SEQ ID NO: 194012 - protein, 24 aa, Zea mays
  unsure (1)..(24): unsure at all Xaa locations
  Clone ID: MRT4577_10851C.1.pep
MXRAGAGLAAACLCLVSALLTMAV

SEQ ID NO: 194013 - protein, 252 aa, Zea mays
  Clone ID: MRT4577_108520C.1.pep
MRRRPGIAGLQNAAATRDQFRLVGENVAKVRTDVMKEQLATFRSQLEEFARKHKSDIRKNPVFRQQFHEMCAKVGVDPLASNKGVWAELLGIGDFYYELGVQIVDICIGTRSHNGGLIDLLDLRKLLGQKRKATLESLSEDDCLRAISKLKVLGSGFEVISVGRRKLVRSVPTELNKDHSGILGLAQADGYVTVEQVEKEFSWSTGRAIDALETLLKEGLAMIDDGHRDGKRRYWFPCVTVSSDTAAVEVKS

SEQ ID NO: 194014 - protein, 45 aa, Zea mays
  unsure (1)..(45): unsure at all Xaa locations
  Clone ID: MRT4577_108521C.1.pep
KKFYGYRXKKNKWQLPATGIRLNYSLHSVFKDINLSVHMLVMTFT

SEQ ID NO: 194015 - protein, 218 aa, Zea mays
  Clone ID: MRT4577_108522C.1.pep
MRYQHDSHSAHVPAREDVKSTRKLNGSSGDIPSAPPINDYDQDHQPVTHDDTRSCDNSNFTNGLSAKKDHREVNGGVNLADKNDRSTLNAGPTSKPSSSIPIRVPTFHASLQGPWYSVLAYDACVRLCLHAWARGCMEAPVFLENECTLLRNTFSLQNVLLQSEEELMSKRASELVSEGAASKPKKTIGKMKVQVRKVRMSVDMPAGCNFSSLPMVKL

SEQ ID NO: 194016 - protein, 51 aa, Zea mays
  unsure (1)..(51): unsure at all Xaa locations
  Clone ID: MRT4577_108523C.1.pep
MAQETFLFTSESVNEGHPYKLCDQISDAVLDACFKQDPDSKVACXTCTNTN

SEQ ID NO: 194017 - protein, 383 aa, Zea mays
  unsure (1)..(383): unsure at all Xaa locations
  Clone ID: MRT4577_108524C.1.pep
DELRRYRRVQALLKRLNKPALRSIQXSPDGDLIDCVPAHLQPAFDHPRLRGQRPLAGPPPARPKGNRLRDPIRNDTAEAAGVQQLWAASGESCPEGSVPIRRVTESDVLRASSVRRFGRAPAGRVRRDSVSGGHEHAVGYVAGDEYYGAKASINVWAPQVSTASEFSLSQIWVIAGSFGNDLNTIEAGWQVSPELYGDNAPRFFTYWTTDAYQTTGCYNLLCSGFIQTNSRIAMGAAISPTSAYNAGQFDISLLVWKDPNHGNWWLEFGSGELVGYWPSLLFSHLASHASMVQFGGEVVNTRASGSHTATQMGSGHFAGEGFGRASYFRNLEVVDWDNSLVPLAAGFHVTADHPSCYDIQGGVNAVWGNYFYYGGPGRNVRCT

SEQ ID NO: 194018 - protein, 56 aa, Zea mays
  Clone ID: MRT4577_108525C.1.pep
GHLVSFFVNDSAPFLPAAHFFFFVKSSLLPINPWKKKVLTSVFCCDFSKFNGPRGT

SEQ ID NO: 194019 - protein, 50 aa, Zea mays
  Clone ID: MRT4577_108526C.1.pep
HMSIRDVHLQPRHCQNVSSDTAVISQSLQKTRAEQEYNKRSICNLSLPQS

SEQ ID NO: 194020 - protein, 56 aa, Zea mays
  Clone ID: MRT4577_108527C.1.pep
FSASLVWFWGDKLFIGRRVQSSVRRLTVVFLIFTRRSTSSRLSSSIVLVAITYCTY

SEQ ID NO: 194021 - protein, 114 aa, Zea mays
  Clone ID: MRT4577_108528C.1.pep
GKKGPPSFLFFYFYPPLPKTQKEFPRGLIPPQKRGMLVWPPNSNPGGYSKTHILSKKPRFLLPPLFVPHCFPKPPPPGNKNFPSILKPPGLGAKFFQIFPALEKIIPWKNKWGG

SEQ ID NO: 194022 - protein, 135 aa, Zea mays
  unsure (1)..(135): unsure at all Xaa locations
  Clone ID: MRT4577_108529C.1.pep
MATKILGLLGLLALSASAANATIIPQCSLAPIAIILQLLLSPTSMGLXHNAVQELLXNYGLAQSGITQPXAQLLQQILXHITTYTLIGTHQTQXNRHMPLLEPRTTRTNAVYYXQQQLLAFKQLAQANVAAYQQQ

SEQ ID NO: 194023 - protein, 101 aa, Zea mays
  Clone ID: MRT4577_10852C.1.pep
FGPLGWGYVFPPRGELGPKFTFFFFLPTVSLFPPLAPCCLFFPGGPPPLWFSLFSVSPRSGGVCSFSCFFLIVRGVLRFCPGFGRWNIFSCFYKMKKGSKQ

SEQ ID NO: 194024 - protein, 105 aa, Zea mays
  Clone ID: MRT4577_108530C.1.pep
QTGRRPSKDARGVLSHSQRRASYPARPLRIAGSGYNLTAPVPRRIVSGASYCARCSFELIGSRRSISPKGSPAGLTISFLRQNPSSGRTGPCWLRFTRLRLSKPP

SEQ ID NO: 194025 - protein, 102 aa, Zea mays
  Clone ID: MRT4577_108531C.1.pep
AVVTTQSTFFFFFFFFFLVHNTLPRLQKLFPSRTLCQESRHTFFPTLHEQEITSLEATSLIEPLALHNSMNHKILVIDHTHAHLLYFIVRQPMFPASLNMNR

SEQ ID NO: 194026 - protein, 126 aa, Zea mays
  Clone ID: MRT4577_108532C.1.pep
CARERGLSWRRVVLCPLWWVSGFGELLSGPFLSFPSSAGLRLAPVALYMWSMVLSLCLHFLFCSLAESSAFGFLSSAWICLIACRARSSCVISRPWFLDVCLGVFGVLTAPPGLVVVALFVNGRSA

SEQ ID NO: 194027 - protein, 75 aa, Zea mays
  Clone ID: MRT4577_108533C.1.pep
FLFNRNTKRFRQSYRIIWCFLRIIQRPLLLFFARPWVKSQTLGGFGSFESSDGFGCYASFDGFGSLKSFNDVVSC

SEQ ID NO: 194028 - protein, 87 aa, Zea mays
  unsure (1)..(87): unsure at all Xaa locations
  Clone ID: MRT4577_108534C.1.pep
MAEGHGVDAKDVTISTDTTFAVYQEHEHDRYHKWLTKAEQEAYIGXEXGDGGPYIAAGDRLDAVAKKYHNVGLKXTDPTAHAKITAP

SEQ ID NO: 194029 - protein, 70 aa, Zea mays
  Clone ID: MRT4577_108535C.1.pep
GPMDGSSGGGPRHGAAAAGGCGRGGLCGGELRRGHVISGSAPSIQQGQPGIALTMVLQTVRSLNTKQSLG

SEQ ID NO: 194030 - protein, 178 aa, Zea mays
  unsure (1)..(178): unsure at all Xaa locations
  Clone ID: MRT4577_108536C.1.pep
AASVEPYAALVNLIGRYGQLEDALELIKSMPIAPDRAVWGAFLGACTVKKNEPLAEMAANALSKIDPXRSAPYVLMHNLHAHXGRWGSASLVREXLERLGIPKHPGYSWIDLQDKVHVFISGDTSHPLTPEIFSVLXNALIGHXRLELDGYVSCDLVVFGTEERFRGVETRLFLPFLA

SEQ ID NO: 194031 - protein, 107 aa, Zea mays
  Clone ID: MRT4577_108537C.1.pep
CQVTIKRVLANHNNHTKSNHKRHASPWFDKSNTCLPPRCGVPMDEGCTQHLSSDPMINLNTTVIFFLSLYPVCEESPQLGVSRPYNNYQCKALRVREGSNTHKSHPE

SEQ ID NO: 194032 - protein, 77 aa, Zea mays
  Clone ID: MRT4577_108538C.1.pep
SQDGFACINYMPGASAPPGMVILYTAAMLRCAQQDHVIPSSVSSMVLRLIRSLVGSDRLMQISGMADIDTVGVSPRG

SEQ ID NO: 194033 - protein, 57 aa, Zea mays
  unsure (1)..(57): unsure at all Xaa locations
  Clone ID: MRT4577_108539C.1.pep
PENHLFHLTSRTDRILGVGLADTPHGNAAAENNKPTTPATTGSGHDDFYPARPSXGT

SEQ ID NO: 194034 - protein, 57 aa, Zea mays
  Clone ID: MRT4577_10853C.1.pep
FPNILNIHGVYHPNIFKKILQIYNQKQPGIQKKKKHLKRKKNFSGSYTGRKTFPFKI

SEQ ID NO: 194035 - protein, 461 aa, Zea mays
  Clone ID: MRT4577_108540C.1.pep
WSGLDDAKRKLYPSAEESLKHLLWLTDTEAVFSAALGLYDRKRAAIVGLNSQKDPKEFLPFLKSLECLPPAIMRYTIDLRLGRYESALRNIVSAGDAYHEDCMKLLNDNPQLFPLGLQLFNEPDKRNQILEAWGDHLSGEKCFEDAALTYQCCSSYQKSLRAYRACGDWRGVFTVAGLLELKREEIVQLAHELCDEFQALGKPGDAARVALEYCSDAERGVSYYIMAREWEEALRVAYMLSTHDLVEAVRDAASECAASLIAEYQEGLLKIGKYAARYLAVRQRRLSLAAKLRSEDRFMDVEDDSVSETSTSFSEMSAYTTRESSASVMSSNASKSRAARRQKKGGKIRAGSPGEEMALVEHLRGMALTGGAQNELKSLLVALIQLGKAETARRVQEAADSFEVSQRAAVKLAEDTVCSDRVEERAHTLERYVRMLRDRESGHGEAGGTWRINALSPPVTG

SEQ ID NO: 194036 - protein, 42 aa, Zea mays
  Clone ID: MRT4577_108541C.1.pep
SIALFCRNTNFFIRISEYEAAWDSLKKSHLGVACTRPANKLA

SEQ ID NO: 194037 - protein, 65 aa, Zea mays
  Clone ID: MRT4577_108542C.1.pep
SQLISYKYTKTHLTNYIIHFDTIISTHVLLALLLSILLIGYNILTLTRAMIILTLYSIALFPPIF

SEQ ID NO: 194038 - protein, 81 aa, Zea mays
  unsure (1)..(81): unsure at all Xaa locations
  Clone ID: MRT4577_108543C.1.pep
YTNLIKVDQTTIYYLIMXRNYMKIKGLFDMIWQIVADMIKVKTPEEISKTFNIKNDFIPEEEXEIRREESVSHTSKEVLDL

SEQ ID NO: 194039 - protein, 105 aa, Zea mays
  Clone ID: MRT4577_108544C.1.pep
SKYKLTHIFSPSSSWLIYSWFPLKDAMHGTTVGFQGWPCPLLLNSYQASMQKFQGNPPVYLAPPVMATGNLPLVVPSPASLVQPFEAIHPIMVPAASSMVPGKYM

SEQ ID NO: 194040 - protein, 62 aa, Zea mays
  Clone ID: MRT4577_108545C.1.pep
ATKGHTNYGINAKKEGLAVCSPTKMKRLGLLYKATIMFLECGNVLSSLGETYRELSAYVLLL

SEQ ID NO: 194041 - protein, 83 aa, Zea mays
  Clone ID: MRT4577_108546C.1.pep
FLADPLAVALALYTVPHALASREALRLADVLAVAIAHAGADDTVTHETVLVASAFLAPLRQYPDVLRSGRSEPCRHGETEAAR

SEQ ID NO: 194042 - protein, 109 aa, Zea mays
  Clone ID: MRT4577_108547C.1.pep
SAPITTLYDRILDESKKKDRKNSCGLLKEIHQIELCSRHLMEITDAADFPLREDKDAVLREAAQDLVHLCESIKEGLDPLERQVRKMFHRIVRTRTEILDCLSKPHGTG

SEQ ID NO: 194043 - protein, 62 aa, Zea mays
  Clone ID: MRT4577_108548C.1.pep
RCYVAQPEPALDCWNRSWVTHSPVRHRTQVGTLLGFTEDGSGVPAVRQIAVALYILAVKAVV

SEQ ID NO: 194044 - protein, 105 aa, Zea mays
  Clone ID: MRT4577_108549C.1.pep
MARSNTNVSFKSAPTNASSRSIPNVPRVIKKPTGSTIAYHLYKKATNFSEKNILTYYLTRGTLYVTLFTTDERFSQVNASARDSHLCTYDLHNTMTYHFIQDSQT

SEQ ID NO: 194045 - protein, 92 aa, Zea mays
  Clone ID: MRT4577_10854C.1.pep
NTCVSHLRNQMHALTLSCHVMLCYFFKAQVRSSKAGAPTSNFACSLVSRPVSTPRESKKQRELGRRAANSAPRGWAGSARRGGACPRPGGGV

SEQ ID NO: 194046 - protein, 185 aa, Zea mays
  unsure (1)..(185): unsure at all Xaa locations
  Clone ID: MRT4577_108550C.1.pep
QPCPSKDEAKGDACWGAGIKLHELCALTDFLLPGQGSRKINVSTTNNSESNKDDDESFREELYEMLIPAVLRPSRCKLDSSFKLHFYYIEFIPIPADRRYQMFGLFVINRLPQESEKLDVELHLARARIVKAGIKYLGQIELNKEEMILAHNCQEMFLKAXLDRSEFTPSYILLANDGALDMDST

SEQ ID NO: 194047 - protein, 116 aa, Zea mays
  Clone ID: MRT4577_108551C.1.pep
VSATEASVAAAVTTAEASKLCWTLMVVVLMRVRVSWVYVSGGRLRRPRCVGCLDCGLCCRGRESPGAACGCCAGEVGCGKQKPQAVGEGGPSLEAERTYLWRQLAEERREANKAIA

SEQ ID NO: 194048 - protein, 202 aa, Zea mays
  unsure (1)..(202): unsure at all Xaa locations
  Clone ID: MRT4577_108552C.1.pep
SHTKLQLAATSRCRRRRXKRKLARICDLVSSSLLLHLEPAPSPPRQLTREGERQLLLALSTVNKTIRRWDQEEDEWACELFQETLSDSGEVHNCCLLPEARPYDGFGCLANIVSMLVGFLDFCSDYVKHSAGNILISVSSXLIKFESIWIQFIELAWGAIHAXSKFFITLHIQPTPNNDSTIQESQLHDTLNDIVLIQNISI

SEQ ID NO: 194049 - protein, 226 aa, Zea mays
  Clone ID: MRT4577_108553C.1.pep
TEISAAKSQKSGELPDTNDEINSESSSGRHLENNTSKKRGRNRSKQAAIEQGSEGKETTGKSAKLGLSGIRDAQTSSGKKVRKLSRRSLSSQHSPKDSESVGTSTSSADEVSWASKELINFVAHARNGDKSVINQYDVQPLLLDYIKRNNLRDPRRKSQIICDSLLQSLFGKDRVGHFEMLKLLESHFPTSEVSPIDADENHGGVVDPDPSQDADGNSEASVVMSS

SEQ ID NO: 194050 - protein, 129 aa, Zea mays
  Clone ID: MRT4577_108554C.1.pep
MADDDENEVNLDELYAATDNEKKVSELDLYMSEGLVKANESDAPFNALSWWKGQVTNFPILSTLARDVLSMQVSTRVSESFRSKLKPVIIAALVSTKPWIIASEKDLEGEIKTISEVMNDVEVDDHVAT

SEQ ID NO: 194051 - protein, 826 aa, Zea mays
  Clone ID: MRT4577_108555C.1.pep
MDAMADNIFLHAFDRMGISHSLFKPSDNPLYGFGGKGTFPVGKIELPLSFGVAPNARSEQVTFDIVDMVYSYNAIMGRGSINKFEAAIHGLYLCMKILGPQGVITVYGNQQTARNIERDFIPGQRNIHCLTMQRDRGENGSGTRTGYRIRILIRDVFSDTDTGNFISGTDTGNTRIESYRIRDGYGTCNTRAMDVDDICDIDNNVSHEDEIHRSEEDVNANNSEHMVEEDHVPAPIGSKVNVLSQQVSRGKNKSVDGDHRVVKRQLTTKSTNTPTSKFMASSFKAARSHQSMDLVPQLAKVAQDGSASANENASVAASVQISTEDELDEEQVKKKKLTSWVWEHFTRYDVEVEQTDGSIVKQKWAKCKKCAHKAKADSSNGTKAFSNHLKLRHKILKGQQHLTQNGDTISTYKFDENFSVRLLYYAIIMHEYPFSITQHKYLMKFIKSLRPSFPLKSCVTARKEIMDLYIEEKNMLYAQFKKLSCRKMFALSLDNAASNKVAVDIVIDNAKDLLVCGGKFFHVRCANHILNLVARDGLAVIAHAIGNIRHFITIIKRSPLQLEAFEKCARECDLDPKKSLSLDVATRWNSTYIMVRDAIYYKNAFDRLAKKEKDRYGHINPSANDWLNALNISKCLKKFYDVTLLFSGTSYPTANHFFRKFSEIKMAIARWCDSSDPIICTMAYSMRDKFDKYWEMNNMALAVGAFLDPRYKHRMVELYMSKMYDNEMADLEKMAFMNVINELFSCYSSTINAKPTKKGTTSKDFVPNKQVLMADDDENEVDLDELYAATDNEKKVSELDLYMSEGLVKANESDAPFNALSWWKGQ

SEQ ID NO: 194052 - protein, 992 aa, Zea mays
  Clone ID: MRT4577_108556C.1.pep
MRKCYCHTCRMFITAMATHDLHARAYASSACTETPPHWKLSHHARRIAPGRARDGNGYPLPETRWVFALLGYGFGSISLPMGLLMGSNRNPTVGMGNPLGTRNPHGYGFGQNFIPVMGMGFLAGVFFLRGPKRPAQSLWRLACGLQAERRVAATLGPGSWPPALASIVQPPDAVTAAARHSLTPDRAGEPELPSGDPRLPVVRPPEARARRAAGRTTDGRARAMDVDDICDNNVSHEDEIHGSREDVNGNNSEHMVEDHVPAPSEVNVLCQQVSRGKNKSIDGDHRVVKRQLTTKSTNTPTSKFMASSFKAARSHQSMDLVPQLAKVAQDGSASANENASVAASVQISTEDELDEEQVKKKKLTSWVWEHFTRYDVEVEQTDGSSVKQKWAKCLQCSHKAKSDASNGTKAFSNHLKLKHYLVKGQQQLIQNGNDIATYKYDEKASVRLLYYAIIMHEYPFTVAEHKYFMKFIKSLRPSFPLKSRITGRKEIMQLYKEEKNMLYAQFKKLTCRVSFTMDAWTSIQNKSYLCVTAHWIDDNWNMQKRIINFMHVEGHHGGIKLSDTFFANVLNWNLDKKMFALSLDNAAANKVAVDIVIENAKDLLICGGKFFHVRCANHILNLVARDGLAVMGNAIGNIRHFITIIKRSPLQLEAFEKCAKECDLDPKKALSLDVATRWNSTYIMVRDAIYYKNAFDRLAKKDKDRYGHINPSSNDWLNAINISKCLKKFYDVTLLFSGTSYPTANHFFRKFSEIKMAIARWCDSSDPIICTMAFSMRHKFDKYWEMNNLALAVGAFLDPRYKHRMIELYMSKMYGSDKAELEKLVFMNVINELFAYYSAVINAKSTKKGTSSEKDFVPHKQVLMADDDENEVDLDELYAATDNEKKVSELDLYMSEGLVKANESDAPFNALSWWKGQVTNFPILSTLARDVLSMQVSTVASESAFSSGGRVVDAFRSKLKPEIIEALVCTKDWKIASEKDFILLCMCSCISL

SEQ ID NO: 194053 - protein, 263 aa, Zea mays
  Clone ID: MRT4577_108557C.1.pep
APWMWIIFVILTTMCLMKMRYMVLGDVNGNDSDHMEEEDHVLTPTGSESRLPWPLRSGVQPQPPDSRRRHSRGPRRPWCLEVPRRPRRRSPGPSSHPATGHLASLPAHRPWCAGRRPSGERLSVVRPSSHPATSLPAHRAAAGRRPSSERPSSVRPSSHQPPRSWLLGASQTARRRQTAPRQTERCSQVPARSRAVARPRRRQTECCSQVPARPRMQQPHAGASGPNSGHSSAATIVGSSAAARQQQQEATHARTLDPWPRRG

SEQ ID NO: 194054 - protein, 717 aa, Zea mays
  Clone ID: MRT4577_108558C.1.pep
FNTEVMSRYTFRGRPDIAGKYVVAAVTGYFYSIACASTTKGVDDSLQDILRLLTLWFNHGDTSEVQTALQKGFSLVKIEMWLVVLPQIIARIHSNNRVVRELIQSLLVRIGKGHPQALMYPLLVACKSISILRQRAAQEVVDKIRQHSGGLVDQAQLVSKELIRVAILWHEMWHEALEEASRMYFGEHNIEGMLAVLEPLHAMLERGDETIKENAFIQAYGHELLEAHECCLKYRATGEDAELTKAWDLYYHVFRRIDKQLPSLTTLDLHSVSPELLKCRKLELAVPGTYAADSPLVTIEYFVPQLIVITSKQRPRKLTIHGSDGNDYAFLLKGHEDLRQDERVMQLFGLVNTLLENSRKTSEKDLSIQRYAVIPLSPNSGLIGWVPNCDTLHALIREYRDARKIFLNQEHRLMLAFAPDYDHLPLIAKVEVFQHALQNTEGNDLAKVLWLKSRTSEVWLERRTNYARSLAVMSMVGYLLGLGDRHPSNLMLDRYSGKILHIDFGDCFEASMNREKFPEKVPFRLTRMLVKAMEVSGIEGTFRTTCENVMQVLRTNRDSVMAMMEAFVHDPLINWRLFNFNEVPQVSNYGNVHAHTVVSSEEAVANRELMQPQRGARERELLQAVNQLGDANEVLNERAVAVMARMSDKLTGRDFSSGSALAGAGSSIQHGSEHLASGDARDAQPGLSVKVQVQKLILQATSHENLCQNYVGWCPFW

SEQ ID NO: 194055 - protein, 90 aa, Zea mays
  Clone ID: MRT4577_108559C.1.pep
MKRSMVCPSVLLIGQSCFPPPLFTWIIFSPIILLGRMYLENLTSSLCIWHKVFYCTSWTKMVLRFICRSVNQTICRGISLFGLSEGYEPP

SEQ ID NO: 194056 - protein, 554 aa, Zea mays
  Clone ID: MRT4577_10855C.1.pep
MTAPGGSNLAVLDALDSARTQMYHMKAIVIAGMGFFTDAYDLFCISTVSKLLGRIYYPDDNLYIDKPKPGTLPVSVNNMVTGVALVGTLMGQLVFGYFGDKLGRKRVYGITLVLMAACAIGSGLSFGSSAHAVIGTLCFFRFWLGFGIGGDYPLSATIMSEYSNKKTRGAFIAAVFAMQGVGIIFAGLVSMIVSGILLHYHPAPAWKENHDRSWQDQMPAADYMWRIVLMIGAFPALATFYWRMKMPETARYTALIEGNAKQAANDMQKVMDVEIQAEQDKLARYKAANDYPLLSREFARRHGLHLIGTATTWFLLDIAFYSQNLTQKDIFPAIKLTSPVDDINALKEVFEISKAMFLVALLGTFPGYWVTVALIDKMGRYLIQLIGFFMMSVFMLLMGVMYNDLKNKHTTLFALFYALTFFFANFGPNSTTFVLPAELFPTRVRSTCHAISAASGKAGAIVAAFGVQSLTLKGDVGHIKKALIILSVTNILGFFFTFLVPETMGRSLEEISGEDGNVENGPGAPAGVAMGVADVSKDDKMPVSSTEWQSSMHA

SEQ ID NO: 194057 - protein, 71 aa, Zea mays
  Clone ID: MRT4577_108560C.1.pep
ALPRTRHEFLRSPLKSLNPSCLAAPASSLDRAAFFRNRGRIFSPEGFGLLLLFSVYWLHRLARPVRHCGPF

SEQ ID NO: 194058 - protein, 66 aa, Zea mays
  unsure (1)..(66): unsure at all Xaa locations
  Clone ID: MRT4577_108561C.1.pep
STTLEVESSDTIDNVMAKIHDKXGIPPDEQRLIFAGKQLEDGRTLVDYNIKVESTLQLVLRLRGGQ

SEQ ID NO: 194059 - protein, 61 aa, Zea mays
  Clone ID: MRT4577_108562C.1.pep
CGKVHALLSCSGHPSTSPLLGPVPDAICHYLIHFPKKEIQNQKKKRKNINENYINFFFFLH

SEQ ID NO: 194060 - protein, 36 aa, Zea mays
  Clone ID: MRT4577_108563C.1.pep
FDIQLNWNSMIFRNDKAQDKIQFHIILNTSPTSSHI

SEQ ID NO: 194061 - protein, 129 aa, Zea mays
  unsure (1)..(129): unsure at all Xaa locations
  Clone ID: MRT4577_108564C.1.pep
GPPPKIGLNPFKLKKGLRXVKAPLPKSKNPAGDFLSPADLKHVFGPPGLVGTPLAFVLEPXPHFKAWWSGFIEKPSVPKVPALIKPPPLNGCPVHRGMEKPQSVLGCLPVQKRVFYYQNLGPLCGQASL

SEQ ID NO: 194062 - protein, 48 aa, Zea mays
  Clone ID: MRT4577_108565C.1.pep
GGVTSRLPPNSWICHMGPCWFTVTANDYHVFNQLPSCYVTVESIRVDF

SEQ ID NO: 194063 - protein, 74 aa, Zea mays
  unsure (1)..(74): unsure at all Xaa locations
  Clone ID: MRT4577_108566C.1.pep
EGRRCIPSMVXATSSHPNTCNRRPCVVVLATPPITRIKAFSVPFRSRWPPIRSPSFSLLLPDETKAYPALYXKA

SEQ ID NO: 194064 - protein, 112 aa, Zea mays
  unsure (1)..(112): unsure at all Xaa locations
  Clone ID: MRT4577_108567C.1.pep
IRLEANGVYATFCRIDCPGWAGIGDRNLARRDTVTSTELDNXYYINLLMHRGLYHSDQQIFNGCVTNGXASRSCPCRGGSWATWASGMTRMYNIRRLTDTHGQIRHACSRVN

SEQ ID NO: 194065 - protein, 60 aa, Zea mays
  unsure (1)..(60): unsure at all Xaa locations
  Clone ID: MRT4577_108568C.1.pep
LSNMNLVFCKHINRKPGLTWHSWHSDQLAQFFKNVNEINPTYCFNAGVGYYXTFLAPFXC

SEQ ID NO: 194066 - protein, 86 aa, Zea mays
  Clone ID: MRT4577_108569C.1.pep
ADGDCGWVVTTLGCVTNSFDAGGVIERFYILIWRHPLALGPLLGLETLPLIRPFLGVLTFFKSLGLNQLINPFGNLLLRDFIWLLY

SEQ ID NO: 194067 - protein, 152 aa, Zea mays
  Clone ID: MRT4577_10856C.1.pep
MREHWHGDGDGEDEHEPQPGCGEGAGQAAANCAAVCCCCPLALLDVLLLVTVRLPAGVMRRVRRRSRRRRGHGGAGANRKRPASAAPASPSGSSGKAMIGAAMLDIEDEARGEVESAAAAELEREIMSSHFYGAGFWRSVSSNSSSSSRRYQ

SEQ ID NO: 194068 - protein, 117 aa, Zea mays
  unsure (1)..(117): unsure at all Xaa locations
  Clone ID: MRT4577_108570C.1.pep
GVLQSRFAIVCGSARLWGEDTLHDIMMACIILHNMIVEDKRDEYGGEQVYNFDDMGQYLCNYDDMGQRVIVSHNSSPELDAFIKXYKNIKNKETHYQLKADLIEHLWQNHSELYKID

SEQ ID NO: 194069 - protein, 134 aa, Zea mays
  unsure (1)..(134): unsure at all Xaa locations
  Clone ID: MRT4577_108571C.1.pep
MGVGDDIQHIGCDIGTGMVNADYAGNDALRTILRSMLESALHTGIMHKNAHMDDYVHDKTHIKTLMLTIKHRIEHGIDNIXNNMHNILYYKLYNELHVDPEEHTEVLIEAHVNPKDNTQNMAQIMIETFNNVAM

SEQ ID NO: 194070 - protein, 73 aa, Zea mays
  Clone ID: MRT4577_108572C.1.pep
SILYRASGSNIVSSKVAFKRMWRAYTVSPSKNRFSARTRARAGGRNSNRSVLVRVNSSLPRHLRCFGMVTSPQ

SEQ ID NO: 194071 - protein, 73 aa, Zea mays
  Clone ID: MRT4577_108573C.1.pep
SCLGPGGYLFFPQIWGGYFGPVFSTKHPAREPILGNRVRGGLPVLKERKGVNVPPNLKNVVGVFKKHLVSRAF

SEQ ID NO: 194072 - protein, 73 aa, Zea mays
  Clone ID: MRT4577_108574C.1.pep
VYGISNNSLFDSTIIGFQGLADLLYFPVAMVKRPEVIDLWYYGTSRPDRHDVESRLGTPLSAQLSNPIVVRHP

SEQ ID NO: 194073 - protein, 519 aa, Zea mays
  unsure (1)..(519): unsure at all Xaa locations
  Clone ID: MRT4577_108575C.1.pep
MDTSNAFAVVTLLLLPLLLALAQLVRRGSPQYPPGPMALPVIGHLHLHLFERPLHRTLACLAARHGTVFQLWFGSRRVIVVSSADAAKECLATLDVAFANRPRLPSGRILSYDWTTMGTSNYGPYWRRVRRITVTHILSVHWVQQFADVHERETRAMVRGLYRPTARNGVRRARVELKSRLFELLMNAMMGMVCAKRYYGCDGKENETEAEVSEEARWFREMVEETMELSGASTVWDFLPAWARWLDVGGVGRRLWRLRESRTKFLQGLIEEQRKEMENGPQPQARKTMIGVLLTLQNEDPDACPDNLIRTMCISSLEAGTSTSADAVEWAMSLLLNNPGALAKAQEEIDACVGQPARLIEAADLPKLQYLWCIIMETLRLYPPTPLLLPHESANDCTVSGFHVPMGTMLLVNTFAIHRDPEIWDRPESFVPERFLGENSEGKMFNPFGMGRRRCPGENLGTQMVGLALGTMIQCFNWERVGDDLVDMTEGAGLTIPKXVPLEAFYEPRASMANLLSKI

SEQ ID NO: 194074 - protein, 116 aa, Zea mays
  Clone ID: MRT4577_108576C.1.pep
GPTQKQVGLTLEKKTWSWPYATWGSSTPRGRAGFFGFLKNQVGGLILQVNRFFFWVGGNAPPPREGFNPRARVPNYPPSINCSPGGGGGVFGAGPGTPQGGRGPCPNPPNWGRGFS

SEQ ID NO: 194075 - protein, 103 aa, Zea mays
  Clone ID: MRT4577_108577C.1.pep
GFELKAQGTPAAEAEPDIANRSKKASQARRQENKPPKEVTNELQKALSGRACFTLRVHMQPNPGWVSNKFKTHTGLLCFSFSVGMCTKAQFHPSFCKRGILQN

SEQ ID NO: 194076 - protein, 90 aa, Zea mays
  unsure (1)..(90): unsure at all Xaa locations
  Clone ID: MRT4577_108578C.1.pep
RHLFMVYKIDXRSHAVLGDKVGGXGKXYEELVAVLPGNYCRYAGFNFYCVTVDNCQKSKIFFIACSPAVSRIMANILYSTSNQGLWWMLD

SEQ ID NO: 194077 - protein, 248 aa, Zea mays
  Clone ID: MRT4577_108579C.1.pep
MAERFFLTLTHSLKRRRRRALTVATPSSLPSCPPSRPHRAAASASHGGRPCSTFSAYAMAHKGKATSDVTYNPDDGPKAYTNPAVYSRLHDYTAMAQEVHGPDCDPSTEPIDPDVLMRVGGGKRHGRYWIADGAIDSSSTPTLSQVRARSTGSSLAIRPRHDSSQHRIQQLETQLEEERRERHEMEARMMAEREAERRADHQRMAEMLQYMQSLGAAQGIAPPPPLFPPVDPALFHTPMSIKIVVRCL

SEQ ID NO: 194078 - protein, 68 aa, Zea mays
  Clone ID: MRT4577_10857C.1.pep
STKLVKENAVEVHQGRNKPPPGDFPPLLPKLRGKTGAPWRDPWFFSRGFPFGSRPQGGAKARGKPPPL

SEQ ID NO: 194079 - protein, 89 aa, Zea mays
  unsure (1)..(89): unsure at all Xaa locations
  Clone ID: MRT4577_108580C.1.pep
MACTHNAMRXLFLLVLFCIVHGEKEESEGIDAXAXSAAGASFDIDKLSASGNGXTDSTKAVAEAXASACGGTXTQTIVIXQGDFLVGQL

SEQ ID NO: 194080 - protein, 330 aa, Zea mays
  Clone ID: MRT4577_108581C.1.pep
MPSPPDAVDQDSREFNNKAERVKQELWDFFRCEAGYEARVDVVATTSCKKLVVDMHYEARIQAIVSYHGSILREKVTKQQARTMSLTRDQYLQMVDRWCSPEWDEAHNASRERRLIMQGPSHHQGSRNLGQYAEAWSASHGGRPCSIFSAYAMAHKGKATSDVTYNLDDGPEAYNNPAVYSRLHDYTAMAQEVHGPQYDPSTEQIDPDVLMRVGARKRHGRYWIADGAIDSSSTPTFSQTQLEEERRERQEMEARMMAEREARLADHQKMAEMFQYMHSLGAAQGFAPPPPLFPAVDPALFHTPGQSGAASNNPHEAHNPTQHQSNRPPQ

SEQ ID NO: 194081 - protein, 622 aa, Zea mays
  Clone ID: MRT4577_108582C.1.pep
MEDREWMYTARRERNDVTTEWIRKTDDFVEWAYGEAAKGASLVPCPCNKCANRKRKPKKVMVEHIWKNGFMSGYTRWIFHGEAHRTREEVLRQRVEDYDADVGVADMLNDYQEAQYMGGCMDDEPEPTAKAFYDMFDAAQKPLPGQTKVSQPDAIGRVMAFKSQYSMSRDAFDGLLTVIGSLLPDDHVLPKSMYEAQKLLRALKMTYEQIHACPKGCVLFRKEYAEAKYCPKCTSSRFMEVDSGDGQKRQLDIPLTILRHLPFIPRIQRLYMTEESAKQVTWHKNGKRYNPDKMVHASDGEAWKRFDAIHRDKAEEARNVRVALATDRFNPYGMSAAPYTCWPVFVIPINLPPGVCFQRQNIFVSLIIPGHPGNKMGVFMEPLIDELVRAWEEGVWTYDRATKTNFRMHVWYQYSMHDLPAYGLFCAWCVHGKFPCPVCKEALRSIWLKKGGKYSSFDKHRQFLPPDHPFRLDIKDFTKGVVVTDRPPATMTGAEIRQQIDGLVANTEGGFVGYGEQHMWTHKSGLTRLPYFGDLLLPHNIDVMHTEKNVAEALWATIMDIPDKSRDNVKARVDLAALCDRPHLEMKPPSGGKTWRRPKADFVLSRAQRKESTSVDQDVDVP

SEQ ID NO: 194082 - protein, 121 aa, Zea mays
  Clone ID: MRT4577_108583C.1.pep
ASDPHLSGQVWMPHMLAAGQTLASESAPNLPRRGIGQPKRWHKSKSGRASLSLVNGPSLAWPEGVGIDPNSASVHMQHENDRLFCTKRANLHPFYFPLNHETLASCPNHKQTITWEACYGL

SEQ ID NO: 194083 - protein, 652 aa, Zea mays
  Clone ID: MRT4577_108584C.1.pep
MEDREWMYTGHRGRNDVTPEWIRKTDDFVERAYGEAAKGASLVPCMCSKCANRKRKPKKTMEAQYTGGCMDDELEPTAKAFYDMFDTAQKPLHDQTKVSQLDVIGRVMVFKSQYSMSRDAFDSLLTVIGSLLPDDHVLPKSMKEYTEAKYCPKCKSSRFMEVDSGDGQKRIQCLYMTEEFVKQMTWHKNGKRYNPDKMVHASDGEAWKHFDAIHREKAEEARNYSMHDLPAYGLFCAWCVHGKFPCPVCKEALRFIWLKKGGKYLSFDKHRQFLPPDHPFCLDIKNFTKGVVVTDRPPATITGAEIRQQIDGLVANTEDGFVGYGEQHMWTHKSGLTRLPYYDDLLLPHNIDVMHTEKSKDNVKARVDLAALCDRPNQEMKPPSGGKTWRRPKADFVLSKAQRKEQRSRDPTPQEYDTFLRKGTRNGLLDYISWFKRKGQRDPSMSAELRQVANDFAYRVKKYSEYDVNGYRFLTTNYDQSRPNRKTTCSGVFTPSLDDVDYFGRIEEIYELNFYGSKPLTPVIFKCYWFDPQVMRRTHSNLGVSPHRRLPVPNDEDYNLDLDTYDGEFFQEDGLEGRFEIDLTEAIGMDVDIEMVVDEEDDEVQNDNDLVILEGNDINDELAPSDGVDYEMVDSDDESYDPANPDTYEDYF

SEQ ID NO: 194084 - protein, 91 aa, Zea mays
  Clone ID: MRT4577_108585C.1.pep
CIYKKGDHPPGSGKKPKAVMLRLKNFFGNPFRARAKQKEGRIFHSWAPWGPTWAGNFAKTSAQGLCPFGRWLTTDPTLLMSTQICPLLALF

SEQ ID NO: 194085 - protein, 464 aa, Zea mays
  Clone ID: MRT4577_108586C.1.pep
MEDREWMYTARRERNDVTTEWIRKTDDFVEWAYGEAAKGESLVPCPCNKCANRKRKPKKAMVEHIWKNGFMPGYTRWIFHGEAHRTREEVLRQRVEDYDANVGVADMLNDYQEAQYMGGCMDDEPEPTAKSFYDMFDAAQKPLHGQTKVSQLDAIGRVMAFKSQYNMSRDAFDGLLTVIGSLLPDDHVLPKSMYEAQKLLRALKMTYEQIHACPKGCVLFRKEYVETKYFPKCKSSRFMEVDSSDGQKRQLDIPLTILRHLSFIPRIQRLYMIEESAKQRMEDREWMYTARRERNDVTTEWIRKTDDFVEWAYGEAAKGASLVPCPCNKCANQKRKPKKAMVEHIWKNGFMSGYTRWIFHGEAHRTREEVLRQRVEDYDADVGVADMLNDYQEAQYMGGCMDDEPEPTAKSFYDMFDAAQKPLHGQTKVSQLDAIGRVMAFKSQYNMSRDAHFPFNLPLFGDLC

SEQ ID NO: 194086 - protein, 580 aa, Zea mays
  Clone ID: MRT4577_108587C.1.pep
MEQFLHEFWRRSRDPTPQEYDTLLRKGVRNGLPDFISWFKRKGQRDPSMSAELRQVANDFAYRVKKYSGYDVNGYRFHTTNYDKSRPNQKITCSRVFMPGLDNVDYFGRIEEIYELNFYGSKPLTPVIFKCHWFDPQVTRRTHSNLGIVEIRQDSTLPGDVVYIVAQQATQVYYLPYACQTKEHLKGWDVVYKVSPHGRLPIPNKEDYNLDSDTYDGEFFQADGLEGRFEIDLTEAIRMDVDIEMVVDEEDDEVQNDNDLVILEVNDINDELASSDGFWTNMVGGNWLRRRRGRRSRTADEAEQAAQQDDLVQQQAVPQDDDDQQQDDSGSGGLGSRSIYLRGPASLPQRPILRDRRPLIRLDGERSWTVVDYAGGHRRLPNGILGLLCREHFPGLVEYAGVTGPAYTFDHYAVAPDAVDRDGREFNNKAERVKQELWDFFRCEVVYEARADVVATTSCKKLVVDMHYEARIQAIVTYHGSVLGERVTKQQARTMSLTRDQYLQVIPHWCAAHPLCWEQMVDRWCSAEWDEAHNASRERLMMMQGPSHHQGSRSLGQYAEAWVLVSLVFRFVRGFVFELL

SEQ ID NO: 194087 - protein, 152 aa, Zea mays
  Clone ID: MRT4577_108588C.1.pep
DIGNILHSGSIGEITPSGSGLSKDSSVDYRGEVLDGFSMEASLERSSTRGEQNGCRLDAIENPSITLATSGYKHEGALSEEAVYTKKNYAGTCLSNPRELIMELQSHFSKENINESDPHDSLVFPTAENSADEQLVKVHHGSNLSQLGLTDL

SEQ ID NO: 194088 - protein, 73 aa, Zea mays
  Clone ID: MRT4577_108589C.1.pep
VRNIENTIEHNESTKTRLGRTTNHHRCQHDGVRSAGAARPRRHWPCPPVRQPSRRLSSTAPAACGTLREPSYT

SEQ ID NO: 194089 - protein, 218 aa, Zea mays
  Clone ID: MRT4577_10858C.1.pep
MSVGMIDHYLNKNTNNDVVKSYFNKSVGSRPANNNTTTTVKKNSAAHHDKKHKNSGNGAGVDKRFKSLPAAEALPRGEAIGGYIFVCNNDTMEENLKRRLFGLPSRYRDSVRAIRPGLPLFLYNYSTHQLHGIFEAASFGGSNIDPAAWEDKKCPGESRFPAQVRVATRKICSPLEEDAFRPILHHYDGPKFRLELSVPEALSLLDIFAEKIFDRQTA

SEQ ID NO: 194090 - protein, 48 aa, Zea mays
  Clone ID: MRT4577_108590C.1.pep
IQPKEGIPPGQQSLIFAGKQLEDGRPLTEFNILKKSPPPLVLRLRGGQ

SEQ ID NO: 194091 - protein, 89 aa, Zea mays
  Clone ID: MRT4577_108591C.1.pep
GSVGGRKPLGEKKGGKTCSFIFKIRGCSPQRGKQALKPPKKCVLYNPGGGFCRLGKVGQLVFKGFIIERNSVLKGLKCFQPPSPENGFA

SEQ ID NO: 194092 - protein, 256 aa, Zea mays
  unsure (1)..(256): unsure at all Xaa locations
  Clone ID: MRT4577_108592C.1.pep
MASDATDAPAQPVPAKRRGSYNCGRCGLPKKGHVCSVXVPPPPPPLLGAATKRGSRSHRPSRGXALHFDDPAASAVVLDAVPLAVSAPPLQAGSKKAVDVEEDGDGDNDPPAERWVEVGAGRRAPGVVLVEVLRRLSPRSVAAAAGVSRGWHECARRVWRAAEEVRLXAPPGDVDATTLACIAFSCPNLQSLDISMANSAANRXXSGDELSRFVSEKRSLSVLXLDGCSSLGVINISSSXLQDFWMSGLSSLLQAS

SEQ ID NO: 194093 - protein, 113 aa, Zea mays
  Clone ID: MRT4577_108593C.1.pep
FSLFSSWLTLPDRCFFPAAVRIPPPTGSGYHSAVDLTVLRCFRLLEQLRWRLQAVRPNASANEVKVRVKQQNGSVGWCFAHKPKKVWCCCEALHAKNGGLALNKHKVAKWIRQ

SEQ ID NO: 194094 - protein, 84 aa, Zea mays
  unsure (1)..(84): unsure at all Xaa locations
  Clone ID: MRT4577_108594C.1.pep
MNTFKRMLMRILENFPDKVRAEVHFNATLNHHIMDHIIVLADIIRFKTCFLIXLHMMLYGTPCAWAFTCGLIDTIIDSKIGFHI

SEQ ID NO: 194095 - protein, 124 aa, Zea mays
  Clone ID: MRT4577_108595C.1.pep
AAVGLSFMQFTNMNSMRNLFIIGVSLFLGLSIPEYFSRYSTSSQQGPAHTKAGWFNDYINTSFSSPPAVALIVAVLLDNTLDVRDAARDRGMPWWARFRTFRGDSRNEEFYTLPFNLNRFFPPT

SEQ ID NO: 194096 - protein, 93 aa, Zea mays
  unsure (1)..(93): unsure at all Xaa locations
  Clone ID: MRT4577_108596C.1.pep
IPGMEMDWRLTHGDRRRERCRFSSXGCARGGQGGIVASCWRAGRTGGDGGALCLPTAVILGGDDHLRMARKQRRGERSLLHLVLDGWIDISMS

SEQ ID NO: 194097 - protein, 208 aa, Zea mays
  unsure (1)..(208): unsure at all Xaa locations
  Clone ID: MRT4577_108597C.1.pep
ITTVDEAKKLYMLFVIVAXKDNGNISXGQITCIISGXTMKYFSNLRKTLGPGIDGWEISLEGMMSIVVLLGLXIYWGVSKFVLNDPSLSKSYRKKKKMSIHPSRTRCSGDLSPRRCFLAIRRWLPPPNITAAGSHLLWFCLLASTTRRCPPPPADALRDDDPRAHSLRWRSDNALVSGLHESASNPFSMPGDLTYIEPAHNPVCETRR

SEQ ID NO: 194098 - protein, 129 aa, Zea mays
  unsure (1)..(129): unsure at all Xaa locations
  Clone ID: MRT4577_108598C.1.pep
ITIVDEAKKLYMLFVLGANVSIIFSGXTMKYFSNLRKTLGPGIDGWEVSLEGMMSIVVLLGLXIYWGVSKFVLNDPSLSKSYRGKNNWATMKYFSNLRKTLGPGIDGWEISEEGKESIVVLLGLASIGE

SEQ ID NO: 194099 - protein, 193 aa, Zea mays
  unsure (1)..(193): unsure at all Xaa locations
  Clone ID: MRT4577_108599C.1.pep
MSRCCDWNCESNXGCCWGIGCDDCCVYPDENSVSARYSMITRVHSKICNVSDKCLLASSDFHGCIXDLCKSLTAXRMAVLHLHNKRISCPIMQQILYDNLYYEXTYIYNAFHEIRXLTATANNXWFIYAPLRFQEITXYSAQGXTESNVIMRXPDHHLESPSTLLLPVXDAVSPLSESEAIDLVKDEFASATE

SEQ ID NO: 194100 - protein, 106 aa, Zea mays
  Clone ID: MRT4577_10859C.1.pep
NPIFKNPAPPSTWGGTAPGSFSKKGSKPMCFKNDQSFRSGTQGPPLTNGLNFGNVGAKNGPKNVWFESFLSPTFCTNGYAPPVFGVWLVLKKKTYCPQKKFFFLAP

SEQ ID NO: 194101 - protein, 94 aa, Zea mays
  Clone ID: MRT4577_1085C.1.pep
IVQHFLLGSGRRHFPSLLCPLLVSHLPFSPLNTHRAITAKFFGKPTYLLSALFNVRINELRSTLHLLSHEFVRPYLMLHFIFIIVVLPSAFPGL

SEQ ID NO: 194102 - protein, 179 aa, Zea mays
  unsure (1)..(179): unsure at all Xaa locations
  Clone ID: MRT4577_108600C.1.pep
MTSTPTVTKSPPALIPPAGPTPCGTLPFSSIDKTVAGSGFVNLMQVFPPPSISAARKDQGAVAAVAAMRNGFARALVPYYPVAGRIASSGLAVDCTGEGIWFVEAAASCTLADVDGLDSCPLLIPGELLLPRPPPGEKLSDLILIAKXTRFTXCGGFAXGIRFSHAVFDGNGAAQFLTA

SEQ ID NO: 194103 - protein, 119 aa, Zea mays
  Clone ID: MRT4577_108601C.1.pep
TQNFEKFEESSDGSSVQGSAKAGPWRKMLSSKDLNFVGYTYKNFELVNDPDVPGMAELKKKEKAKRPSVKSLFGADSPEGDGGRGEPQPEVDDETASAEGSARKPAEPELTRSLSSPST

SEQ ID NO: 194104 - protein, 58 aa, Zea mays
  Clone ID: MRT4577_108602C.1.pep
GWLLPNCVFHERSLCVNVLGRVFIPGSTRTFRSTSMDLELIGVVTPVSLYFKDKSKGK

SEQ ID NO: 194105 - protein, 48 aa, Zea mays
  Clone ID: MRT4577_108603C.1.pep
LVCVKEKKPKFSSSNSLSACLAPVFVLRSERVSTRMWVNPIEFPVTIY

SEQ ID NO: 194106 - protein, 150 aa, Zea mays
  Clone ID: MRT4577_108604C.1.pep
MPLLGAAAPALLYSSAGAAFAAGWDVYYYSESEPSAGGGRRFSVCRSSAGARFCGQVHVSMWLALGAAVAVSVAECLTTLLWSASSDSDSADSDSDDSVCGHGCHCKHWAIAAPFCLLLNLLINQRMYACLCGSYMEYDSNKKKKKKKKK

SEQ ID NO: 194107 - protein, 69 aa, Zea mays
  Clone ID: MRT4577_108605C.1.pep
TADGSFLQTERFIQSFAKAMQRYCYERQIAARVRGQRLGLGPLGRPAAGLCPRPAIEKGFPSNLLLTFN

SEQ ID NO: 194108 - protein, 81 aa, Zea mays
  unsure (1)..(81): unsure at all Xaa locations
  Clone ID: MRT4577_108606C.1.pep
VPEVTATHKITVLYAGKDIVKSTFDMYVDXSHSDSSKVTDPSPGXEPSATIANKTTYIEIYTTXLYTAEVETVIHDPMGQK

SEQ ID NO: 194109 - protein, 51 aa, Zea mays
  unsure (1)..(51): unsure at all Xaa locations
  Clone ID: MRT4577_108607C.1.pep
THAYAREKVATTNCFQLIMVIACLGSFKMLHLNCNTGPNPVXLSVMKPLLT

SEQ ID NO: 194110 - protein, 41 aa, Zea mays
  unsure (1)..(41): unsure at all Xaa locations
  Clone ID: MRT4577_108608C.1.pep
XXTHRHPPTHXTSTLKHXDDHRYEATHSKVPHLKXQSVSLP

SEQ ID NO: 194111 - protein, 65 aa, Zea mays
  Clone ID: MRT4577_108609C.1.pep
EQTPITLYRGQLSAHHGIREAHWPDSSLSKNLSSGSHPRGHPLPDRTQPPTFLNSFSSASMSSGA

SEQ ID NO: 194112 - protein, 158 aa, Zea mays
  unsure (1)..(158): unsure at all Xaa locations
  Clone ID: MRT4577_10860C.1.pep
TDLAYHPAGRVTGKARYPPVFMHRIDSKRYDVLRVSPELAQELGVYLLSFDRPGYGESDPHPARTDKSVALDIEQLADAMELGDRFYLAGFSARTEIMWSCLKYIPHRLSGVAILGPVGXNFWWSGLPANVSLEAWNVQVAQGQWAXGVAHHAPWLTY

SEQ ID NO: 194113 - protein, 157 aa, Zea mays
  unsure (1)..(157): unsure at all Xaa locations
  Clone ID: MRT4577_108610C.1.pep
MRKGRKILTPCTLLVIQIRAVKEEAAALLXKIYPVNEVEEEIVSMXRSVEEEVLLEGSIGESAFMDQVRKPMGSKVVXRPTVRGHCPRVAQQLVGINVVMWSSGGIVQLREYRSGDPAMALCLIPSGLHAIGXIVSMILEAGQGSRPASRVPIAHRS

SEQ ID NO: 194114 - protein, 720 aa, Zea mays
  unsure (1)..(720): unsure at all Xaa locations
  Clone ID: MRT4577_108611C.1.pep
MEAQEIAAAARHFCAMVRIVGPDPKAVKMRRHAFHFHHSGSTTLSASALLLPRGALAEPPLLLDHICSAHGHAAGDVALTAASLVEPFLVAEQRNNSGEELQPRLVPETRLDVFVEYELGNAQDGKSGPPRWLPARLLAMVDVPTAAVSALSLLRHDDSFIRRPTWDVGWSLADANQKQVENDSRSSLESNRNNSSLESVDSLMLAKSATRIAILGISTSNLNXQDVSMVSVMQQRGDPLLIVGSPFGLMPPFHFFNSVSVGAVANCLPPCTARSSLLMADMHCLPGMEGAPVFDQNSCLVGLLMNPLTQKGSNIEVQLVITWDAICTEWNSKKLEEIERPPRKLPNDKNTDSKSMELRHVYNYVRVFSSTDNKTNQHCISPRSLREAISAVVLVTVGDTSWASGIVLNKRGLVLTNAHLLEPWRFGRTSPSDLQASFAGEHLNAGENKSLQPQQGKISNEDAVKHKVSSFNLGFKRGKRISVRLDHEERQIWCNASVVFISKGPLDVALLQIEKVPVELNTIRPEFVCPTAGSPVYVVGHGLFGPRSGLHSSLYSGVVSKVVQIPANQLSHLARAEADNMDIPVMLQTTAAVHPGASGGVLVNTHGLMVGIITSNAKHGGGSTIPHLNFSIPCKLLVAVFEYSANGNLVVLEQLDKPNEVLSSVWALAPSSSPFVRSSPEKGKEEKVLEFSKFLSDKQQALKSNVDLKELFRYKTPSKI

SEQ ID NO: 194115 - protein, 80 aa, Zea mays
  Clone ID: MRT4577_108612C.1.pep
ATFLSMPPFPIVLFALPYGALTFPFSLYPASTPPFPLVTSFSIYIVAFSMFTPSLLPPSGFGASISLCFSRLSCFLVDGL

SEQ ID NO: 194116 - protein, 96 aa, Zea mays
  Clone ID: MRT4577_108613C.1.pep
HKHEELREYSAKKVLHTRHSGECYMGRSMEESQAAHDCPCMARAWWNAKVTMIVGLPTPDQIAAVPGAQHVETHTEPDLHRTVDVAQLIHETCSGD

SEQ ID NO: 194117 - protein, 151 aa, Zea mays
  unsure (1)..(151): unsure at all Xaa locations
  Clone ID: MRT4577_108614C.1.pep
GACTNGEATMXYGPAKGAASXGGACEYEGGVDQPPVSSMITAXGINHIFQNSKGCSTCYHMKCTGHDACSARQKTVIITDLCPDSTWQVDPIHFNVSGXTAFGAMAKXPGQVDMLPNASRLQVQYTRLTXQLTGIXICFRMNSGSNANYLV

SEQ ID NO: 194118 - protein, 235 aa, Zea mays
  unsure (1)..(235): unsure at all Xaa locations
  Clone ID: MRT4577_108615C.1.pep
MVAARAELAALLLLVAAVCSATGFTPGGGGPPSVTEDTLEKVAASLEMYVDALPQMPKVLGYSIKHGRPTPTHLTIGMYQKKWKFHRDLPPTTVFVFGTSAESATFPGPTIEALQGVPLQVTWDNHLPDRHXXLPWDPTVPTAIPRXGGVPTAATSHGGVHPPQSDGHAYAWFTAGFRERGPAWTTPTYAYPNVQSPGGALWYHDHALGLTRAXLLXXLLXAYVVRNPXAAEAPL

SEQ ID NO: 194119 - protein, 302 aa, Zea mays
  Clone ID: MRT4577_108616C.1.pep
MKATFFMTYVMGDGWAGIANEILRVKALVIYHLKNMFIVKTERDRDRAMDPGSIGLGENLPSLQLYFLLGLVYAVVTPLLLPFIIVFFAFAFLVYRHQIINVYNQEYESAAAFWPQVHSRIIASLLISHVTLFGLMSTKEAAYSTPLLIFLPLLTIWFHKYCKSRFEPAFRKYPLEEAMAKDTMEHASEPNLNLESFLANAYLHPIFRLFEEAGKEEETVEVRIDKAEKQQHRHEEDEAHARSSSQYREEETHFRSTHETHYHHEESHISRSTQYHEGIHVRSDTDSPSPPHFVYHYDIQQP

SEQ ID NO: 194120 - protein, 46 aa, Zea mays
  Clone ID: MRT4577_108617C.1.pep
GLQDHVFGGGCEIHRNNSRPLNNKQVMPPLCRASRGGCSFTLGVWL

SEQ ID NO: 194121 - protein, 69 aa, Zea mays
  Clone ID: MRT4577_108618C.1.pep
YVSCDAAPTTGWVDRAPGLQFLIHLRGARLYSLSRHSTCEHQPRGGHLIKLSAQRDPVSTAAQPDEAEE

SEQ ID NO: 194122 - protein, 98 aa, Zea mays
  Clone ID: MRT4577_108619C.1.pep
DEDMVELVVDHDVMAAGVHATIAAMLVTAVTAASGGPATSASSVQSLASTTVEPTAAAADSRLPPSNLPAIAPCLLLAGRLMALNRRMSLYRLPGSEG

SEQ ID NO: 194123 - protein, 127 aa, Zea mays
  Clone ID: MRT4577_10861C.1.pep
RRGSPQSSLRRLIPSPRSSCRLSRHHRHSSAHQNPTPSRRRSRDPLAKPASHFVEAIPCTVRRREARCRTVCIRTPFAIRGASPEFASRLTAIESLDSPQVVDLVVKNQDLFRSTEEPQVFNKQVCR

SEQ ID NO: 194124 - protein, 74 aa, Zea mays
  Clone ID: MRT4577_108620C.1.pep
YVCRSSVNISRACLSSVESKGSIYLKCELRRSNGHLIEMSRVAARGSFHDLYKNHLKECKKLVIYKVGEIEKIS

SEQ ID NO: 194125 - protein, 163 aa, Zea mays
  unsure (1)..(163): unsure at all Xaa locations
  Clone ID: MRT4577_108621C.1.pep
TLAHWPSSSGIMTVEDAFLRILRYLEKLWGTISSSGKTELMELAFIPVANGTRLIEAKSLFARLTINMSPFAFELPSLYLPFVAILREIGMQESLTNSYAKELLXDIQKACGYQRLNPNELRAVMEILDYMCSGVSQPISDGSEGLFDSVIPDDGCRLVSATS

SEQ ID NO: 194126 - protein, 61 aa, Zea mays
  Clone ID: MRT4577_108622C.1.pep
FLPFIHHTFRILWIKNNVKLDRIQTLNPSKFTLLNYTNAYPAYYFVVNTFLISKYYFILSP

SEQ ID NO: 194127 - protein, 106 aa, Zea mays
  Clone ID: MRT4577_108623C.1.pep
CRHFGGGCPPARGAVLSAPRADPDLAVSARLGSCDFDLPRATRLSSYGLTSPPSARLRRFPPPGLDDHGQTSRDETRQDRGWACRTGWSSSVTLGLPHREVLAQVV

SEQ ID NO: 194128 - protein, 103 aa, Zea mays
  Clone ID: MRT4577_108624C.1.pep
KLIRFWYEIHAFFPWAHGVVFCVAQEFCLPTVVLLPVPRLLIMKDMVRRLQELRHTEQVQRAYALNCGEGATVSYEIQIRVLREFGLADAAAEPGIVVCASSP

SEQ ID NO: 194129 - protein, 57 aa, Zea mays
  Clone ID: MRT4577_108625C.1.pep
EGEKWRGGELGKAADTVVIHWSSGFHRIWWQETRSIQQPRRWRNDRRDPRRNSLNTR

SEQ ID NO: 194130 - protein, 56 aa, Zea mays
  Clone ID: MRT4577_108626C.1.pep
KKSSKESGVYIINNDEKPINKIFHKIFKTTRPIIHVYPHSLNSHLYPTKITFYSKH

SEQ ID NO: 194131 - protein, 158 aa, Zea mays
  unsure (1)..(158): unsure at all Xaa locations
  Clone ID: MRT4577_108627C.1.pep
ISWIYRLEGELRKDGVFVGGWPSSVEHLPPGDPAIIDCTCELPKSSTISNNAYLCVATWDTRAPQPSQIESAVRWAVRQRSQNKPGYVHCAYGHGRSVCVMCALLVALGLAEDWKAAEQMIHEERPSISMNTLHRXSLEEWSKHLLPLKEVGIRCEFC

SEQ ID NO: 194132 - protein, 74 aa, Zea mays
  Clone ID: MRT4577_108628C.1.pep
ISVSCNIMMYSYIKHGLLEYSKYLLHDILNCMIRIKAVSNQVATADMFTFNTFMDACAAAKRRNDFDYAFFEML

SEQ ID NO: 194133 - protein, 256 aa, Zea mays
  Clone ID: MRT4577_108629C.1.pep
MGWGISRLIGLKAAVLLSVACFFQGLGVILISFPLIYASVIAILVSIASHPSIDLPLLLGKASDGSFPLWSWIIFSPFLLFIHLFVLIRRFVKNEPLYTEVADGVFVGGWPSSVEHLPPGDPAIIDCTCELPKSSTISNNAYLCVATWDTRAPQPSQIESAVRWAVRQRSQNKPVYVHCAYGHGRSVCVMCALLVALGLAEDWKAAEQMIHEKRPSISMNTLHRKSLEEWSKHLLPSKRSGEADVSSVIHSDYNRK

SEQ ID NO: 194134 - protein, 78 aa, Zea mays
  Clone ID: MRT4577_10862C.1.pep
DAWGLFGEVFYSVALPSLWRERVVSSALMAPCHVRDWIMGILMVHSASSPSPSRVLYVANHGVVLFDMSIDDCHTVHF

SEQ ID NO: 194135 - protein, 99 aa, Zea mays
  Clone ID: MRT4577_108630C.1.pep
HSLTHGSSFTGVSSWSQNHTITQITPQQECHPDDIVTDNIKKMVMITQPNTWQFLHRHFHEHKADTTLTARSQVSNQQTQELINRIATPLLEMKRGLGF

SEQ ID NO: 194136 - protein, 52 aa, Zea mays
  Clone ID: MRT4577_108631C.1.pep
MTTRFKKNRKKRGHVSAGHGRIGKHRKHPARLSANAGGVHHHLILVDMYHPV

SEQ ID NO: 194137 - protein, 109 aa, Zea mays
  Clone ID: MRT4577_108632C.1.pep
MSNMGQSFQAGKAQAQGECQAERAAQCVRDGAGATACAVTDTAGAAADSAQLQEHRAAGTVQQAAEQVAQTAAGAAAAVKDTVAGAAAAVKDTVAGAAAGANDAVTGGH

SEQ ID NO: 194138 - protein, 156 aa, Zea mays
  Clone ID: MRT4577_108633C.1.pep
LTTHLDTRQHSIILYSTGRSRAVRIPWVVHSGTCMASRSGHHGVSILVCTQPSPSVILCVHADCAAPSGRLIREWCIHICFVLGYIGNIIPGVIVRRSRPRSLIHCNSSFWDFSSWSTGISKCPVIIQYLSSIDKAQVMSSIWTYIDVYLQATEGV

SEQ ID NO: 194139 - protein, 45 aa, Zea mays
  Clone ID: MRT4577_108634C.1.pep
TRCVPLLMLGLSMLVLGAMAHVVLKLLSADDYFSASIAGTAFSNR

SEQ ID NO: 194140 - protein, 88 aa, Zea mays
  Clone ID: MRT4577_108635C.1.pep
IFKGSSCMQPMPIHSYNIHIHTHTNMYILFNSQFAPLAHLETHPSYMASNSPTALIQHKSLNHSHLPLSFVDISGTTLSSMETKNSSS

SEQ ID NO: 194141 - protein, 54 aa, Zea mays
  Clone ID: MRT4577_108636C.1.pep
MAAPKLATLALAVLLAATVVAPPAAVLAAMSCSTVYSTLMPCLPFVQMGWAMPS

SEQ ID NO: 194142 - protein, 104 aa, Zea mays
  Clone ID: MRT4577_108637C.1.pep
SLFRCTLTHPIYIYWDELVWKTIEFCTSIPIDVYWSDRKGLMEAVQPATRLNILTRNKIILQDFEIPPSEYSHNTIIVPDFEIPRSGYESHNSARFRSPRSDYE

SEQ ID NO: 194143 - protein, 302 aa, Zea mays
  Clone ID: MRT4577_108638C.1.pep
MPLVLLVLLLLLSCSSPVALLAAAHEHDEYTLVAKSSLKPKATCTGYRVSPPQNITWVPLNAPHGPCSPLPGSAAPSLAALLLHDQLRVDGIERRLSDNPHDSKLVPAGGEDFQTNGNLLQVNYGNSGQPMSSEAQQSGVVNASAAGGGSRSKLPGVIQTVVLDSASDVPWVQCVPCPIPPCHPQVDSFYDPSRSPSSAPFSCSSPTCTALGPYANGCANNQCQYLVRYPDGSSTSGAYIADLLTLDAGNAVSGFKFGCSHAEQGSFDARAAGIMALGGGPESLLSQTASRYGNAFSYCIPA

SEQ ID NO: 194144 - protein, 203 aa, Zea mays
  unsure (1)..(203): unsure at all Xaa locations
  Clone ID: MRT4577_108639C.1.pep
MDVEFSHYTDYRFCEWRSLEVRGRYRDKGKFAKSNDGHFRHANHLELYSGLNNFERDKPATGFPVMSSRNRCIDNKEVCNAKMTQNNCHGYHQKNKQHDSSFCIGNIPRYALRTDTYAEKGHFVLPIKRKLYSDLGSMDQRTLADLPLLKGRLMHGQSIASDRRIYALKLHKSTKKINTEAICSSSDMRNINTXSNILCWQKT

SEQ ID NO: 194145 - protein, 44 aa, Zea mays
  Clone ID: MRT4577_10863C.1.pep
RMTLNTNLDMSGTIHLQTIHGTGIMLILTSSNNMEFSTVRSRLS

SEQ ID NO: 194146 - protein, 54 aa, Zea mays
  Clone ID: MRT4577_108640C.1.pep
MEAKQRPRHGEERRPPATDNGGGGGGGEEYDPWTAWLYKPHTISVLLVGACLLM

SEQ ID NO: 194147 - protein, 127 aa, Zea mays
  unsure (1)..(127): unsure at all Xaa locations
  Clone ID: MRT4577_108641C.1.pep
RGARCRWARRSGAGTPGASTGRRRRSPRPSIASGPPPPPGTAPRRRGARPPWRALRAPHVRQREDAPGGHAERVGPXPARRPAPPSARTPARTGSPPAPPRTAHGAAAAAPPQGRPRRPATPRPPAP

SEQ ID NO: 194148 - protein, 191 aa, Zea mays
  unsure (1)..(191): unsure at all Xaa locations
  Clone ID: MRT4577_108642C.1.pep
MEAKQRPRHGGERRPPATDNGGGGGEEYDPWTAWLYKPHTISVLLVGACLLIWASGALDPEGAAAHSSLTSIKRGVWAMIAAFLAYCTLQAPSTILIRPHPAVWRLVHGLAVVYLVALTFLLFQNRDDARQFMKHLHPDLGVELPERSYGADCRLXTLFDEFVVAHILXWFGKAVMIRNQLLLWVLSIGFE

SEQ ID NO: 194149 - protein, 54 aa, Zea mays
  Clone ID: MRT4577_108643C.1.pep
SFSGAQRVKLGWLICLNRGLISHHNQESSKKNALFQNYDSGYQDSKKTHSSKIS

SEQ ID NO: 194150 - protein, 100 aa, Zea mays
  Clone ID: MRT4577_108644C.1.pep
AAKFTTCLCRPLAGIHCKTAECTARTVNDVNPHEFVKAYSYHLKRSGKMELPEWVDIVKTARVKELPAYDPDWYYIMAAYIARKFYLRQGIGVGGFNKIY

SEQ ID NO: 194151 - protein, 71 aa, Zea mays
  unsure (1)..(71): unsure at all Xaa locations
  Clone ID: MRT4577_108645C.1.pep
PLNKSNHPHLYSXLSSPXITYVTIGPLKTLLNFHIKALYISKSNLTNTNPLTWELKPDYNLPAHDPSPFPS

SEQ ID NO: 194152 - protein, 115 aa, Zea mays
  Clone ID: MRT4577_108646C.1.pep
TSIWEHPQFFFLSESSPSGLSVPNYFSYLKIMEVSSSFLCCWRRGKVMTSFPFITLCHGHFHQGTSLTSRSLVNCLPNGSPLLTPIHGNRILTSLCPLYLMSPLSISINNNHQYF

SEQ ID NO: 194153 - protein, 82 aa, Zea mays
  Clone ID: MRT4577_108647C.1.pep
FLYIISISRNIYAVCAGFHISFDVPWYSYHHSRCVYSIVELRWWDKYARARLLAETHVMLDVSCVLEVASPADMIDGLDAPQ

SEQ ID NO: 194154 - protein, 106 aa, Zea mays
  Clone ID: MRT4577_108648C.1.pep
QTDYNELLNRSSNQQNCHAQQLTAKQVLSTNTTEILSSISTGLYGNLQRSSFPRRRSSCSSRREASAAAAHHAAGNYAAQLRRPPPTHTHSANQRRRRTSGVRPFP

SEQ ID NO: 194155 - protein, 43 aa, Zea mays
  Clone ID: MRT4577_108649C.1.pep
ASINGLSWYNSQPHEQKWPISQHQKHSRTEKSRKKRTGILVTC

SEQ ID NO: 194156 - protein, 60 aa, Zea mays
  Clone ID: MRT4577_10864C.1.pep
VARRTAALALGWVLYNEPEQTPTIASVLTESYNPHVRYGASLAVTISCSGTGLSAAICLL

SEQ ID NO: 194157 - protein, 102 aa, Zea mays
  Clone ID: MRT4577_108650C.1.pep
QLSMLYATCNLTGRHNHNDAGVLRCTRTQSPGATPHEINQAQIQPHIPSPPASPALQHSAIDVSGHHSLPHPLGPISSGHLVIALDLVTPGTIPADFPHGIL

SEQ ID NO: 194158 - protein, 77 aa, Zea mays
  unsure (1)..(77): unsure at all Xaa locations
  Clone ID: MRT4577_108651C.1.pep
QPSTTDHLLWGAHSLRXALGRXGXNPPGTXXGXPPXXRAPXAQRXXASPRRGSATAPQDEPGHPQHKRGGGGKXFFF

SEQ ID NO: 194159 - protein, 87 aa, Zea mays
  unsure (1)..(87): unsure at all Xaa locations
  Clone ID: MRT4577_108652C.1.pep
IPSSPKKNRRGCGLGSDGHGRRSSTPPPAQEGLHLRTAAAYPHPKRMRLSEEHSXRCEDNIRSLPDETSISIPHNPHARIANTPPYP

SEQ ID NO: 194160 - protein, 101 aa, Zea mays
  unsure (1)..(101): unsure at all Xaa locations
  Clone ID: MRT4577_108653C.1.pep
CISYTGAKGSHLANKKTKSWVQHKSKGATEGFSGLAAPGTVPGVPNRTCPVHQXDSKLRTARLREFLEGTPLKFTGQCPVLQGRSSSGTRQPRVFTPAAPL

SEQ ID NO: 194161 - protein, 88 aa, Zea mays
  Clone ID: MRT4577_108654C.1.pep
STLVDFFHVSNSSLIIKFRYQSAPIGIFSPLNIYVSCSSKHGGEPLRFLDDPYRIGDRNSLEYLTDNSLLFRNFIQEFMRKKGGFPQS

SEQ ID NO: 194162 - protein, 76 aa, Zea mays
  Clone ID: MRT4577_108655C.1.pep
KDLQKIFAKTKHVVQAWSKMLNKKETIHAYLVNIYIGSIPSNLCTYIIQTSSIMHFYICFGLCWHQSPKRGRLKGN

SEQ ID NO: 194163 - protein, 52 aa, Zea mays
  unsure (1)..(52): unsure at all Xaa locations
  Clone ID: MRT4577_108656C.1.pep
KDEIILLLVRNXSXXXVLPPPYQILKQFFYFFSSTLFTINFFNSSTTIFTYP

SEQ ID NO: 194164 - protein, 41 aa, Zea mays
  Clone ID: MRT4577_108657C.1.pep
KKHDTGCTPTQNLKIGLEPGPNSIIPKWGSVQRLDFSSSST

SEQ ID NO: 194165 - protein, 134 aa, Zea mays
  unsure (1)..(134): unsure at all Xaa locations
  Clone ID: MRT4577_108658C.1.pep
MLSTPRLLSFETLWGKLLLDHENRYTIYEHASRGIPRNTGAILAGSDVRMKXDIXRTISMLVAEKRLLDYALQDPEHHHSVWLSESIEPHHDFDYICTYLMETDGSHXEQLDDAGPHVAGILSEHTLTEAVEKD

SEQ ID NO: 194166 - protein, 232 aa, Zea mays
  Clone ID: MRT4577_108659C.1.pep
MQIFVKTLTGKTITLEVEPSDTIENVKAKIQDKEGIPPDQQRLIFAGKQLEDGRTLSDYNIQKESTLHLVLRLRGGMQIFVKTLTGKTITLEVEPSDTIENVKAKIQDKEGIPPDQQRLIFAGKQLEDGRTLSDYNIQKESTLHLVLRLRGGMQIFVKTLTGKTITLEVEPSDTIENVKAKIQDKEGIPPDQQRLIFAGKQLEDGRTLSDYNIQKESTLHLVLRLRVACRSL

SEQ ID NO: 194167 - protein, 121 aa, Zea mays
  unsure (1)..(121): unsure at all Xaa locations
  Clone ID: MRT4577_10865C.1.pep
VGFYSPFGSGWRSGGSPELEFGDERLEMATPNVVHRWLSDGLAWATNNHSLHNALSTYGEVLXSKIILDRETQRTPGFGLLTLCTLDAMRNATXDMNGLELNGLFITGNKAQPLGWRGSGS

SEQ ID NO: 194168 - protein, 146 aa, Zea mays
  Clone ID: MRT4577_108661C.1.pep
MAPRTSEKTMAPAAAAATGLARGAGPHYRGVRKRPWGRYAAEIRDPAKKSRVWLGTFDTPEDAARAYDAAAREYRGAKAKTNFSFPSCLPLAAADVGGACRSGNSSSTTTTVDSFGGDVQATLIFRVKLRTCGLNGSKLTLYGLYS

SEQ ID NO: 194169 - protein, 300 aa, Zea mays
  Clone ID: MRT4577_108662C.1.pep
SSLRSKDVRGKYVLCTGGPSTEIEQQMDEVQSNGGLGAIIASDMKEFLQPTEYTMPLVLVTQPDGAAIAKYATTAAGSARAGGGAPRASIRFGGTALGVKPAPTVSYFSARGPGLISPTILKPDIVAPGVDILAAWVPNKEIMELGRQKLYTKYALVSGTSMSSPHAAGVAALLRSVHPDWSPAAIRSAMMTTAYVKDSASNVIVSMPSGSPGTPLDFGSGHVSPNEAVDPGLVYDAAADDYVDLLCALRYSGSQISTITGRPNPSCAGANLDLNYPSFTIILNRTNSATHTFKRVLTNV

SEQ ID NO: 194170 - protein, 88 aa, Zea mays
  Clone ID: MRT4577_108663C.1.pep
KGGTLTNTLMLKNLGLKQQTHSLKPCGGGLSTRIWDDPSYFPAKILNFQVPKEWENCKGGETIFFHNRGIKFKGAISIRGAGFIEQAC

SEQ ID NO: 194171 - protein, 116 aa, Zea mays
  unsure (1)..(116): unsure at all Xaa locations
  Clone ID: MRT4577_108664C.1.pep
VVHVRVVVVSAFVVVCVVGHVVGRVMVVSLALLXLPVWVVLGPGAARVVDKNGGLALPLXGGVLHRKRRFLRVNLPLKXDASGWLSAHDSTSASSAKQARSGSGAPMVGRAAHARL

SEQ ID NO: 194172 - protein, 112 aa, Zea mays
  Clone ID: MRT4577_108665C.1.pep
CSLVSLLCCAPRGPAPALGPLADFVRLFCLPLTVLLSGCRRPVFVSLPRRDRSSWWRLGVLAVAAWCPLALPRGSCSGCGPPPDLLSRRLLPGALGASSCNWPRGALSCCGS

SEQ ID NO: 194173 - protein, 44 aa, Zea mays
  Clone ID: MRT4577_108666C.1.pep
CSAVAPKKKKKKKKKKKKKKKKKKKKKKKKKKKKKKVLCVVTTA

SEQ ID NO: 194174 - protein, 109 aa, Zea mays
  Clone ID: MRT4577_108667C.1.pep
ILGVKSVASHGCEVDDVQRVAVQDEFTRISVPQKHIGNKGSRDSSPDNVCNAAIPSAMEQGYTLMTGTHNPSVNVVTVTVHGVGVLVFASGLVSRTYTVGTVMSGCIPQ

SEQ ID NO: 194175 - protein, 193 aa, Zea mays
  unsure (1)..(193): unsure at all Xaa locations
  Clone ID: MRT4577_108668C.1.pep
DLRDRRKTKQGKETPCSPIGRRLRSFAPNATAAAASKAASVSAACCRGRAGRRTWWSPEGRPPLCRPVARRCSRGGILSFCSISISCSIAVLRPLLRRRCCSLWKSRCVSEEPVYVNAKQYRGILRRRQSRAKAELERKXLVKARKPYLHESXRHQHAMTRRARGNGGRFLNTKKSDRVPPDDLIQLRRHNEA

SEQ ID NO: 194176 - protein, 38 aa, Zea mays
  Clone ID: MRT4577_108669C.1.pep
LHCTIIYEAFIFHYLHLKETSYLCVLFPISEQDYEEKV

SEQ ID NO: 194177 - protein, 70 aa, Zea mays
  Clone ID: MRT4577_10866C.1.pep
LRDRIDEGSKVDQKPQGRSALLSPTGSWSSAFEEVFSLAPGLNLLPLQKRTIGGNMVAFPNSGVSLFLGV

SEQ ID NO: 194178 - protein, 247 aa, Zea mays
  unsure (1)..(247): unsure at all Xaa locations
  Clone ID: MRT4577_108670C.1.pep
KKKKKKKKKKKKKKKKKKKKKKKKKKKKKKNPTLGFVGGAHTHNQISPKSTRGNLRLKMQIFGKTLTGKIITLGGESFDTFDNVRAKIQDRGGFPPNQKGLILVGKQFGDGRTFVDYNIQRESPFHFGLRLRGGMQIFGKTLTGKIITLGGESFDTIDNVRAKIQDRGGFLPNQKGLIFVGKQFEDGRTLADYNIQRGSTLHLGLRLRGGLQILGKTLTGKIITLGGEFXDTMDNVRAKIQDREGFP

SEQ ID NO: 194179 - protein, 88 aa, Zea mays
  unsure (1)..(88): unsure at all Xaa locations
  Clone ID: MRT4577_108671C.1.pep
RAPVHPATDSSPQQLATSVWPLLRGAKLRGKSKTDLQAQFKELKSELSLLRVAKVTGGAPNRFSXIKVVRTSIARVLTVISHKQKSAF

SEQ ID NO: 194180 - protein, 39 aa, Zea mays
  Clone ID: MRT4577_108672C.1.pep
AVVPLYAQDICGCSKDAPPRLHFPFDINTKRACLHQCES

SEQ ID NO: 194181 - protein, 131 aa, Zea mays
  unsure (1)..(131): unsure at all Xaa locations
  Clone ID: MRT4577_108673C.1.pep
QKFAKILXFVYKVSXQPNLHYRIPSFQLTAFTSLEVMPIATKVMWLTXNLXXTNTPRWGSFTXXSFNRSLHFWDRRGSRGPPQXXPSKGGTMSSCGCPSPXXERQWSNXXVGXRSPXDSRGGNPXSSSCLD

SEQ ID NO: 194182 - protein, 125 aa, Zea mays
  Clone ID: MRT4577_108674C.1.pep
MLNHYLQGNSIYAEIPSDIVDEQNPLIDVNKVYIIRRFRVIYAKSSYKVVDAPFMICFTKFTIIELCREPPTTFPQYVYRLTPYNEIDPFGPKAKTFHGMFLQLCFYTSTHSLHFTIFLIFTEKL

SEQ ID NO: 194183 - protein, 125 aa, Zea mays
  Clone ID: MRT4577_108675C.1.pep
SLSERRIDGWWVWCAVVVGPPSPSPVGSAVASHSLLPTCRSWLPWLACFGSHSKERNPLSTVRPGPEASASAGPHLPSFGIRRAVHASAYDKNLEEQVRPAFVPDDVIGSAGSPDKYWSPHPKTG

SEQ ID NO: 194184 - protein, 113 aa, Zea mays
  Clone ID: MRT4577_108676C.1.pep
SSSTKKRSIEKYRFLDCAVRRKVPVLGRLLARTVLPCCCRCWLERLVDRSLGRLLACALLPARLDGRLRGQPLACAAPFACLRRQDKDERGQGKEGRQRDPSSILFPGRLEVP

SEQ ID NO: 194185 - protein, 208 aa, Zea mays
  unsure (1)..(208): unsure at all Xaa locations
  Clone ID: MRT4577_108677C.1.pep
MGRGKIEIKRIDSATSRQVTFSKRRSGLFKKAKELAILCDAEVGLAVFSSTGRLYDFASTSMKCVIERYSEAREEHRQTMSASAEAXRQLLGQQLSGLNVGDLQNLENKLETSLRNIRLKKDQLIFYQIQELNRKGSLMHQESIELYNKVNLLHQHNTELQRKVYGQGVNNEQTSTTVRHSTRDTENLPINLELSVQRDKSETPSVGL

SEQ ID NO: 194186 - protein, 593 aa, Zea mays
  unsure (1)..(593): unsure at all Xaa locations
  Clone ID: MRT4577_108678C.1.pep
GFIVSHREIEANLEKIEAIMRMEAPRSQKKVHRLTGCMAALSRLISRLGEKCMPFYKLLKKVDKFQWTTEAHEALEALKKFLTTPVLKPPRXQPAEDLLLYISCTTHVVSTALVVERVEEGHTYPVQHLVYFISEVLGPXKMKYPQVQKLLYVVLLTARKLRHYFDDHKVIVGFPIGDILHNKEAIGRIAKWACELGAHDIEFRPRTAIKTQALVDFVSECTEHQVLDNLETTEVWRMYFDDSLKLQGAGARILFIAPGGEQLKYALQLLFPASNNAAEYEALIHGLNIAVSLSIKKLMVYGDSLVVISQINKDCDCSTDSMSKYRAAVRKSEYKFEGLEFHHVERDRNATADALSKLXSSRAQAPPGIFVQKISQPSILSLSQPESDPNDWREPIIRYIENEEEPDDKAAAERIARQSAHYTLIGGILYRRGATGVLMKCIHSAIGKQLLDEIHVGQCEAHAASRTLVGKAFRFGFYWPTTKSDAAELVHRCEAXQFLSKKQHLSAQQLQTIPVTWPFAYXRLDMIXPFKKAQXGYTHVLVAIDKFTYWLPLTSSCTACLIDFCKSISCKKKNHVARCFIVIYVSIAPSDIL

SEQ ID NO: 194187 - protein, 113 aa, Zea mays
  unsure (1)..(113): unsure at all Xaa locations
  Clone ID: MRT4577_108679C.1.pep
HTAHIIRIYTAISLFFFLDVFQLPVDGIHSTTXGPDPVYWMHDILPSNRENVMDVRITPIVTSEMLMLLLVGLKIIEVDYSVREDRALLNDAQEPLAILIAIEEAVAYVLSAM

SEQ ID NO: 194188 - protein, 94 aa, Zea mays
  Clone ID: MRT4577_10867C.1.pep
VTCMLHDIADCITKQIVARSEMMSAVDVDAAANSCNVQKTYRTQVGAHADRVATETMGTDMQHEYIQALADIAHVTLDVRCKGISVVHDTEAMT

SEQ ID NO: 194189 - protein, 148 aa, Zea mays
  Clone ID: MRT4577_108680C.1.pep
MEDLQHHVEGVRARGRHHHQHQLVRERGRRRIVKAAAAEERALVVPPEEETSTEDKLLEGPRDHEGDDEEVVVEQKVALLRQLVPGGEGMAVEGLLEETADYIAALKAQVGAMRALTCLLSGSGSGSDLDALRPESLAAGVLTPDNPM

SEQ ID NO: 194190 - protein, 108 aa, Zea mays
  unsure (1)..(108): unsure at all Xaa locations
  Clone ID: MRT4577_108681C.1.pep
RPCACCSSSLSXXAALXPXXFXLPXALXPAVLXXXXXPCLLXLXXSXXXSXRPPPPFLLFFVAPAPAPAPFCRXXXFWAWLAPCVGVLVVXGPLALPRXSPLPRFSRP

SEQ ID NO: 194191 - protein, 125 aa, Zea mays
  unsure (1)..(125): unsure at all Xaa locations
  Clone ID: MRT4577_108682C.1.pep
MGRHGQALLAALLGSAGGAASAQPSYDDGGGGQGXTGMIALLGAGIAGGGCIASFTGYLRHCTGSAGTADDYDRARAVPNFDAFIXRXRRQRRPRGLDAXVVXAFPTMKYAEAKALRVGKGGALC

SEQ ID NO: 194192 - protein, 129 aa, Zea mays
  Clone ID: MRT4577_108683C.1.pep
FVAGHVGRQGMVHTQWYLLWTKFAQYDDIPHILFRSISRIMNSNRRDQYGSARDTMTHHMQHFAFVTETPGFFQASTDHVTGRPRLQRVQHHPYLISGLCSQMLRASVQRFRSISHLTMLDTSAYHTVS

SEQ ID NO: 194193 - protein, 49 aa, Zea mays
  Clone ID: MRT4577_108684C.1.pep
PVDVFAMLNFMVALLRELAAGEVLERCARRRHRELYRSRSGVCVPSTIS

SEQ ID NO: 194194 - protein, 87 aa, Zea mays
  Clone ID: MRT4577_108685C.1.pep
KFLRGSVLTGGGGTPRPNGVILPADRRLQPPDRNPARGSVQNPALRPGVQTQQAALSKGAAAAGEVAAGSWLRRQERKERGKRSELS

SEQ ID NO: 194195 - protein, 80 aa, Zea mays
  unsure (1)..(80): unsure at all Xaa locations
  Clone ID: MRT4577_108686C.1.pep
WTGLANTLVSYFNHILSFNYATFHGFITNQLISNMAXIINTLLGGHGKFMLEMTHLLLTFCSTMAICNKDISRVQCLIPS

SEQ ID NO: 194196 - protein, 100 aa, Zea mays
  Clone ID: MRT4577_108687C.1.pep
LISAPPRDSSRHSAVPSPRRRHRCCHYHRRPSLQNYRGDPRPPEPAPALYHVVSLKSYPLADAQSSIRIRDVPPHPGEYGRPRRRGKDASSTLKRPISFF

SEQ ID NO: 194197 - protein, 71 aa, Zea mays
  Clone ID: MRT4577_108688C.1.pep
PPLIKKGKNPPSCLWVWVGVRLCPCGGGTWTNELWRAPPTSARFALQAGPFFFFKKGGIVRIKFAYQLMHR

SEQ ID NO: 194198 - protein, 112 aa, Zea mays
  unsure (1)..(112): unsure at all Xaa locations
  Clone ID: MRT4577_108689C.1.pep
PTLPKNLDSDIEVPKAIRLVHPXCSLNLDAYEXYTADQAIDVLDRLNDMGVYPVAIXHPYHRDDWEGHRDVSSVAIEKYKCVGAADESCHNMVDAHDIIHGNIAHVINIKLA

SEQ ID NO: 194199 - protein, 92 aa, Zea mays
  Clone ID: MRT4577_10868C.1.pep
PLTPPTYFTPTTHIKMRANTFALAIVAAAASGAQADLLSDVTSVFGDVTSGAVSVATNIASHATSAFGDVTSGGASVATTLPSRHIGVGDAL

SEQ ID NO: 194200 - protein, 192 aa, Zea mays
  unsure (1)..(192): unsure at all Xaa locations
  Clone ID: MRT4577_108690C.1.pep
MPRRAGAAWPCFLLLHIIAHLHLAVNAADADALLTFKSSLDRSDRLPWRPDTAPAFCASWPGVRQCAPAGRVTKLVLEGLNLTGSLTAALLAPLAELRVLSLKSNALTGPIPEALPRALPNLKLLYLADNRLQGRVPATLAMLHRATVIVLSGNRLTGQIPPSLXALAXLDSLLLDRNLLTGAVPPLAQRTL

SEQ ID NO: 194201 - protein, 50 aa, Zea mays
  Clone ID: MRT4577_108692C.1.pep
WKPPDPDWDASSGIPLNMSLPRVLKKWRGFEATTPFSGGPFFFFSSLVNP

SEQ ID NO: 194202 - protein, 64 aa, Zea mays
  Clone ID: MRT4577_108693C.1.pep
NVELSFAKTETYIPVLTPVQFPKQNNNTYIHLCYCTSFTQTCVCIIYIYIFKYATHKERLWHFT

SEQ ID NO: 194203 - protein, 129 aa, Zea mays
  Clone ID: MRT4577_108694C.1.pep
FVSKPTPGPGGIRTRTPRPLLRITTTLNGPDERDTAAQPNWDPPQPQATARTWEPSEPNRREWTQWSDLISTFFSTANQHAAYTRAYGQQPTIVRTGEPPLKHKRTKKKHKFCQDTNQPLPEGVVLPLQ

SEQ ID NO: 194204 - protein, 41 aa, Zea mays
  Clone ID: MRT4577_108695C.1.pep
PMLGHRRVWLHPNTTHSQAQVEGMRGPGLAFLLGRLCPISA

SEQ ID NO: 194205 - protein, 95 aa, Zea mays
  unsure (1)..(95): unsure at all Xaa locations
  Clone ID: MRT4577_108696C.1.pep
MASLSSAAGTGPSFAAPVPARAVVRRRSFTVRASLRKGTGTGAVVMDASALLAGSAXMSQDVLLFSGERCCRHQSQSDLRDGRLGHNIRVQRLIP

SEQ ID NO: 194206 - protein, 94 aa, Zea mays
  Clone ID: MRT4577_108697C.1.pep
PPKLIKGILLPKFSPLPPKVGAALSMVYKFGAPVMFVGWGQSPPALKKLNVKSLLKPPLKGLPPRVGGQFAQSLFFFVSPGTFVIPMLEVVGDL

SEQ ID NO: 194207 - protein, 115 aa, Zea mays
  Clone ID: MRT4577_108698C.1.pep
MEFWGLEVKPGSTVKCEPGHGFILHVSQAALGESKKSDSALMYVKVDDKKLAIGTLSIDKYPQIQFDLVFNKEFELSHTSKTTSVFFSGYKVEQPIEGDEMDLDSEDEEKVIKYL

SEQ ID NO: 194208 - protein, 55 aa, Zea mays
  Clone ID: MRT4577_108699C.1.pep
ADTGEAPDDQLPDQPLWYIAAAITVLLLIHELRENCYIHASIYINALAQHDHTHY

SEQ ID NO: 194209 - protein, 368 aa, Zea mays
  Clone ID: MRT4577_10869C.1.pep
RVSCCNVHEIVFWGTWLCKLYGLIFIAGKSEVSAIVYKAGECMQELLKSWKDFEATQEATNVESLQNGPTLEIRIPAEFVTSTNRQVKGAQLWGTDIYTNDSDLVAVLMHTGYCSPTSSPPPSAIQELHATVQVLPPQESYTSTLRNNVRSRAWGAGIGCSFRIERCCIVKKGGGTIDLEPRLSHTSAVEPTLAPVAVERTMTTRAAASNALRQQRFVREVTIQYNLCNEPWLKYSISIVADKGLKKSLYTSARLKKGEVIYLETHFNRYELCFSGEKPRGIGSSSNASDAEPEKHQSSSHHSQNGSVEHELRDVFRWSRCKKAMPESAMRSTGIPLPADQLEVLQDNLEWESIPSPEFTSSRGTSSS

SEQ ID NO: 194210 - protein, 101 aa, Zea mays
  unsure (1)..(101): unsure at all Xaa locations
  Clone ID: MRT4577_1086C.1.pep
MATELTGGQLRAYQGTDPFKPIYVFVRXXAXXTFGRGFYRPGGGYAVFPGREGKRALGXXXQDQGHLFRELFGLNDQELGVLRDWENQVQGKVPGVGRIGG

SEQ ID NO: 194211 - protein, 97 aa, Zea mays
  Clone ID: MRT4577_108700C.1.pep
LGIRLETYKPPLLVERSWTPPEVGSVLTYLHFTSAHPMIKADVYVTNTPLVVANATPLANTCTTRPTHLRTLDDDTIRPPHDLNGHVPGTLHAWYTS

SEQ ID NO: 194212 - protein, 94 aa, Zea mays
  unsure (1)..(94): unsure at all Xaa locations
  Clone ID: MRT4577_108701C.1.pep
RYKGLTHFDVDNFVEEVLVKDIDWLPRSPEPMSGSYIFVCSHGSRDXKVAVSACSHVGGHKYAGNVIIFSSDAKGEVTGHWYGYVVPDDVPVLL

SEQ ID NO: 194213 - protein, 187 aa, Zea mays
  Clone ID: MRT4577_108702C.1.pep
MASPTQGDAPLAAPAPAADATDAAFAAAAAVPDPGAEFGFQRPELGKEKLVGTVGFHERHVFLCYKGPDLWPSHLEASESDRLPRLLAAAIKARKPNLKRTIKLTICEGEDGTESSNGDVLIFPDMIRYKGLTHFDVDNFVEEVLVKDIDWLPRSPEPMSGSYIFVCSHGSRDKRGGVCGPGLIKRF

SEQ ID NO: 194214 - protein, 393 aa, Zea mays
  Clone ID: MRT4577_108703C.1.pep
MASPTAGDAPLASPSPSPAADATDAALAAAAAVPDPDISFGFLRPELGKEKLVGTVGFHERHVFLCYKGPEVGPAHVEAAYSDRLPRLLAAAIKARKPNLKKTIKLTICEGEDGTESSNGDVLIFPDMIRYKGLTHFDVDNFVEEVLVKDIDWLPRSPEPMSGSYIFVCSHGSRDKRCGVCGPALIKRFKEEINELGLDDQVAVSACSHVGGHKYAGNVIIFSSDAKGEVTGHWYGYVVPDDVPVLLHKHIGQGEVVDHLWRGQMGLSVEQQKRALELRNMVNGGEESLEETRTDGASFNPAAAGGCCQGNGGFTCCQTDLPKEKQDKSIIAEQNPKSSDKEGGAGSKKGDTKTCPVPIWFETWERADTYAALAVVAAAAAVLVSFRIYKNLN

SEQ ID NO: 194215 - protein, 77 aa, Zea mays
  Clone ID: MRT4577_108704C.1.pep
NLYKLSPLLQIPFFAGTVNKRKKVISAGIPINAWAAFFGLETTTPELSVFEKVFKLKKRQPPPIFEDIKKFFINNYV

SEQ ID NO: 194216 - protein, 445 aa, Zea mays
  unsure (1)..(445): unsure at all Xaa locations
  Clone ID: MRT4577_108705C.1.pep
MASPTAGDAPLASPSPSPAADATDAALAAAATVPDPDISFGFRPELGKEKLVGTVGFHERHVFLCYKGPEVWPSHVEAAYSDRLPRLLAAAIKARKPNLKKTIKFTICEGEDGTESSNGDVLIFPDMIRYKGLTHFDVDNFVEEVFVKDIDWLPGSPEPISGSYVFVCSHQRRDIRCGIRGPALIKRFKEEINGLGLDGQVAVSACSHVGGHKYAGNVIIFSSDAKGEVMGHWYGYVVPDDVPVLLHKHIGQGEVVDRLWRGQMGLSEEQQKQALELRSMTNGGKESLEETETDGASCNPAATGGCCQGNGGFTRASEQQKQALELRSMTNGGKESLEETETDGGACNPAATGGCCQGNXASLAAILTCQRKNGTRASQLSRTLRAVRRMARRGVVLXSKKGNSKTCPMPTWFETWERADTYAALAVVAAAAAVFISFRIYKNLN

SEQ ID NO: 194217 - protein, 122 aa, Zea mays
  Clone ID: MRT4577_108706C.1.pep
DASGQPSPRCGPIGSHARHTMRTHHPCSAAAALRSRRPSPASTTTTSRHLLHASASCRHRGRAADRVGCCARVPRVHCAAHGGWHRRVGADQGVLAHGLLATSGGAAAARAGAYPSGVAVKQ

SEQ ID NO: 194218 - protein, 87 aa, Zea mays
  Clone ID: MRT4577_108707C.1.pep
QLRVLRPPVLGRGIIACHVKSAAGGALGWAPAASYLTSAVMFPNCGGGRKSTGSKSQKVLTSHNQQKKHQRSKKGRPPTYELVAPGN

SEQ ID NO: 194219 - protein, 85 aa, Zea mays
  Clone ID: MRT4577_108708C.1.pep
LDGAWFGLPGVRSGACQARRLCVSRRGCCSSPVSPWARELWSSCATPRRGAHTRTRPWGARPARIRRLAQVCLAAMVEERVCCVL

SEQ ID NO: 194220 - protein, 85 aa, Zea mays
  unsure (1)..(85): unsure at all Xaa locations
  Clone ID: MRT4577_108709C.1.pep
TXVGXEAFWXRARLPGXXAVLSQRWVGFSSPSYQVLLGLGFLRVLWRGKNGGGLMWSTVGFVGGVLAGXTXKEVVGELLFSSYGG

SEQ ID NO: 194221 - protein, 127 aa, Zea mays
  Clone ID: MRT4577_10870C.1.pep
ARLKKGEVIYLETHFNRYELCFSGEKPRGIGSSSNASDAEPEKHQSSSHHSQNGSVEHELRDVFRWSRCKKAMPESAMRSTGIPLPADQLEVLQDNLEWEDVQWSQTGVWVAGKEYPLARVHFLSGN

SEQ ID NO: 194222 - protein, 85 aa, Zea mays
  Clone ID: MRT4577_108710C.1.pep
VQLSELTNNVESMFVCSQVKYKYYTDNLELYHCSSQIDYQPYYKSSYNCLIVVASIVYCEHPAHTSDDVLSALEDGGPRVRGRVG

SEQ ID NO: 194223 - protein, 145 aa, Zea mays
  unsure (1)..(145): unsure at all Xaa locations
  Clone ID: MRT4577_108711C.1.pep
MKVLIDALALLALAASAASNTSGGXAAQTPPMHQPPPLYMPPPFNLPAEHYSQTWQXPTQPRGLSPCHQARSCDVGSDGSRCLRQRDEFLRHQSSPAATPYCWPHGQALEHQRCHQIRQEEPLNRYQATYAVALQXFLQQHPHGE

SEQ ID NO: 194224 - protein, 91 aa, Zea mays
  unsure (1)..(91): unsure at all Xaa locations
  Clone ID: MRT4577_108712C.1.pep
IILATRTQNVLGEKGRRIRELTAVVQKRFGFPEGSVELYAEKVATRGLXCIAHAESLRYKLLGGLEVRRACYGVLRFIMESGRRGCDAVVS

SEQ ID NO: 194225 - protein, 233 aa, Zea mays
  Clone ID: MRT4577_108713C.1.pep
MKFATAAAVFAGLAAAGPVELSERQSCPKVYIFGARETTVPQSNGYGTAGGLVNSVKSAFPGAGSEAIVYPACGGGSACGGISYDNSASQGTAAVVKAVTAYHQKCPSTQIVLIGYSQGGQIMDNALCGGAGSTLTGSALNAVKAAIFMGDPHNRAGLPYNVGTCRAQGFAARPQGFTCSPANGSIIQSYCDSQDPYCCNGNDGNHHQQYVNIYGNQALAFIKSKVTGLDAVF

SEQ ID NO: 194226 - protein, 302 aa, Zea mays
  Clone ID: MRT4577_108714C.1.pep
KVGACINDKESKLMRLEDRVDELIKEKEHISVLLRSALQATTSEVLKVAEDGLREAGIEIGLDERKVHGPGNVEKDEVYTLAGALENTMKESQVRIIELQHLVEALRAESGLLRTRLEGQEKEIGQLRKQIKHVEEKERVANESVEGLMMDVTAAEEEIKRWKMAAEEEAEAGRSIEQEFQIQISSLRKELDEAKQAMVELENKLKFKEETAAAAMAARDAAEKSLKLADMRSSRLRERLEELNRQLEESDSRIDSVNRNGHRRYMCWPWQWLGLNYNYVRLPPVEADETSNEMELSEPLII

SEQ ID NO: 194227 - protein, 64 aa, Zea mays
  Clone ID: MRT4577_108715C.1.pep
ARVKAYAPRSSPPAARACTVAVNPSPNKGAPLKFRRFVPLSGEMQALYSAGDFTFAPEDPASKC

SEQ ID NO: 194228 - protein, 64 aa, Zea mays
  Clone ID: MRT4577_108716C.1.pep
PILAILEWAGSPPIRSARMHCAEQSVCHRRPHLMVWRAPSTGVSSPRSPLFISLHTYRQNSLPF

SEQ ID NO: 194229 - protein, 97 aa, Zea mays
  unsure (1)..(97): unsure at all Xaa locations
  Clone ID: MRT4577_108717C.1.pep
RNTIRTDNIINIGEEAVNTLFSETVAGKHMPLAVVHDHNPTDIXRSGPSTYRSXYQPEQLINNKDEDXNNSFTSYYTVGKWIADLCLYLIMTLADHC

SEQ ID NO: 194230 - protein, 72 aa, Zea mays
  Clone ID: MRT4577_108718C.1.pep
FLKGRGSFWGLGHCLLCLPSRVMMLKKCVLAMAPWREVATLLAMVSPPYRLEVVQLAFKMVFIPQQFLFEPT

SEQ ID NO: 194231 - protein, 134 aa, Zea mays
  Clone ID: MRT4577_108719C.1.pep
SPEDVNKTTPPSSGSLTRLINTHIRKASMDALKHASLEQKLTRGSVVVVGRRMHVRVVASRNGLNSSNRSKYDVAEAITKAAGASRSEAGSVFACLPRVAQRGRQHRHLGRRGEGAILHDRICSLYLMVSETGR

SEQ ID NO: 194232 - protein, 95 aa, Zea mays
  Clone ID: MRT4577_10871C.1.pep
GSGAADGARTRICRAELHNSRPRERHDRPLRFACRLCPVSYSGSMNDDELSSIASKLYHPLSGSVCTRIVETEDEAHTTRWILNRLMGWEQSWLA

SEQ ID NO: 194233 - protein, 90 aa, Zea mays
  Clone ID: MRT4577_108720C.1.pep
MEAAWKELAAAVVAILLVLHVMAAPPTDMADRSPRESVPDGSLATTPKATMLAVTLSYTVETCTYTPCFTPACSCSFRDRLCYVIFTPVA

SEQ ID NO: 194234 - protein, 169 aa, Zea mays
  unsure (1)..(169): unsure at all Xaa locations
  Clone ID: MRT4577_108721C.1.pep
VLTRGVSPPRPLPCTSCGYWIYYNXGATCECIDMDDDWDDKRDTRLSVRYSILTLDHSXASNMADKCVLASSGFQGDIKCLCKNLCDRELLYRLHXCKRMSCPGMAQLLSNTXLDYERFFRILHLQVSSVCLTSXGKGRDVSYDAXXSYDRTGYSAQATRSTYIMSLLD

SEQ ID NO: 194235 - protein, 220 aa, Zea mays
  Clone ID: MRT4577_108722C.1.pep
MAVGKNKRISKGKKGGKKKTLVCLPVISQFFRSSLGRLLSFFIRCCCGCVVALLLLCSVDPFSKKDWYDIKAPSVFSVRNIGKTLVSRTQGTRIASEGLKHRVFEVCLADLQGDEDQAYRKIRLRAEDVQGRNVLTNFWGMNFTTDKLRSLVKKWQTLIEAHVDVKTTDNYMLRLFCIGFTKRRPNQVKRTCYAQASQIRQIRRKMVEIMINQASTCDLK

SEQ ID NO: 194236 - protein, 46 aa, Zea mays
  Clone ID: MRT4577_108723C.1.pep
YIYRLGILRLRENIYIKNGAPHKKTTTTNPLMTPLIKNMCTEATHG

SEQ ID NO: 194237 - protein, 176 aa, Zea mays
  unsure (1)..(176): unsure at all Xaa locations
  Clone ID: MRT4577_108724C.1.pep
MSRKNERISKGNKGGKKKTVDPFSKKDWYDIEAPSVFSERNIGKTLVSRTQVTRIASEGLKHRDFEVCLDGLHGDEDQAYRKIMLRAEDVEGRNVLTNFWSMNFTTDELRSLXKKWETLIXEAHVDVKTTDNYXLRLFCMGFTKRRPNQVKRTXYAQASQMRQIRRKMAEIMINQA

SEQ ID NO: 194238 - protein, 73 aa, Zea mays
  Clone ID: MRT4577_108725C.1.pep
WISGWLVKKKKKKKKKKKKKKKKKKKKKKKKKKKKKKKKKKKKKKKKGGAVLKDQSLLTRAWKEITFLWGHQN

SEQ ID NO: 194239 - protein, 171 aa, Zea mays
  Clone ID: MRT4577_108726C.1.pep
MAVGKNKRISKGKKGGKKKTVDPFSKKDWYDIKAPSVFSVRNIGKTLVSRTQGTRIASEGLKHRVFEVCLADLQGDEDQAYRKIRLRAEDVQGRNVLTNFWGMSFTTDKLRSLVKKWQTLIEAHVDVKTTDNYMLRLFCIGFTKRRPNQVKRTCYAQASQIRQIRRKMVEI

SEQ ID NO: 194240 - protein, 144 aa, Zea mays
  unsure (1)..(144): unsure at all Xaa locations
  Clone ID: MRT4577_108727C.1.pep
TRPKTRQTPSTRWPRRPRVTRVVGKNKRCSRGTQGXHKKTGNPFSKKVWYEIKAPSVFIVRNIGKTLVSRTQGTRIASEGLKHRVFEVCLADLQGDEDQAYRKIRLRAEDVQGXNVLTNFWGMNFTTDKLRFLVKKWQTLIEAH

SEQ ID NO: 194241 - protein, 177 aa, Zea mays
  Clone ID: MRT4577_108728C.1.pep
MYVPSSMHLPLQSRRQRSLPSETPSTSAAAGAAATMAVGKNKRISKGKKGGKKKTVDPFSKKDWYDIKAPSVFSVRNIGKTLVSRTQGTRTDCIARVSPEDGLVVGWIFLHELRRQLWNSGNTNIDVLNGIAWDERRHRLFVTGKLWPKLYEIKLRAVDGPADGSVEKLCPKASFYR

SEQ ID NO: 194242 - protein, 260 aa, Zea mays
  Clone ID: MRT4577_108729C.1.pep
MAVGKNKRISKGKKGGKKKTVDPFSKKDWYDIKAPSVFSVRNIGKTLVSRTQGTRIASDGLKHRVFEVCLADLQGDEDQAYRKIRLRAEDVQGRNVLTNFWGMNFTTDKLRSLVKKWQTLIEAHVDVKTTDNYMLRLFCIGFTKRRPNQVKRTCYAQASQIRQIRRKMVEIMINQASTCDLKELVSKFIPEVIGKEIEKSTSSIFPLQNVFIRKVKILKAPKFDLGKLMEVHGDYKEDVGVKLERPVEGDEAMQEVAAAE

SEQ ID NO: 194243 - protein, 49 aa, Zea mays
  Clone ID: MRT4577_10872C.1.pep
TDRVEPAYALSNTNIYYILIEEPLKDAGKNRYLELTHTESAKVYNKSAR

SEQ ID NO: 194244 - protein, 64 aa, Zea mays
  Clone ID: MRT4577_108730C.1.pep
NITRVPWAKSEFKLPSTIKKLFKETNKPLCWPRGGSLQTHGPWPGPYMKWLRQSLIRPLERHNF

SEQ ID NO: 194245 - protein, 283 aa, Zea mays
  Clone ID: MRT4577_108731C.1.pep
MRGGGRQLSLPSETPSTSAAAATMAVGKNKRISKGKKGGKKKTVDPFSKKDWYDIKAPSVFSVRNIGKTLVSRTQGTRIASEGLKHRVFEVCLADLQGDEDQAYRKIRLRAEDVQGRNVLTNFWGMNFTTDKLRSLVKKWQTLIEAHVDVKTTDNYMLRLFCIGFTKRRPNQVKRTCYAQASQIRQIRRKMVEIMINQASTCDLKELVSKFIPEVIGKEIEKSTSSIFPLQNVFIRKVKILKAPKFDLGKLMEVHGDYKEDVGVKLERPVEGDEAVQEVAAAE

SEQ ID NO: 194246 - protein, 106 aa, Zea mays
  Clone ID: MRT4577_108732C.1.pep
LHPFFFSKQKYDYVLVDDDGMSLQFNQNWHNKRITFFTLKSSLGSLLCLGVDSNFQMLRDKGGSLRRTSWKEIFPSIRAGTALAGLESQCNRQTLALYKSTARFHF

SEQ ID NO: 194247 - protein, 260 aa, Zea mays
  Clone ID: MRT4577_108733C.1.pep
MAVGKNKRISKGKKGGKKKTVDPFSKKDWYDIKAPSVFSVRNIGKTLVSRTQGTRIASEGLKHRVFEVCLADLQGDEDQAYRKIRLRAEDVQGRNVLTNFWGMNFTTDKLRSLVKKWQTLIEAHVDVKTTDNYMLRLFCIGFTKRRPNQVKRTCYAQASQIRQIRRKMVEIMINQASTCDLKELVSKFIPEVIGKEIEKSTSSIFPLQNVFIRKVKILKAPKFDLGKLMEVHGDYKEDVGVKLERPVEGDEAGQEVAAAE

SEQ ID NO: 194248 - protein, 56 aa, Zea mays
  Clone ID: MRT4577_108734C.1.pep
KPRYLHCPQPYIESNECQSTSYRLSEHVHKKVVFSSTLTMVNDSGTIKKIKKKKQA

SEQ ID NO: 194249 - protein, 260 aa, Zea mays
  Clone ID: MRT4577_108735C.1.pep
MAVGKNKRISKGKKGGKKKTVDPFSKKDWYDIKAPSVFSVRNIGKTLVSRTQGTRIASEGLKHRVFEVCLADLQGDEDQAYRKIRLRAEDVQGRNVLTNFWGMNFTTDKLRSLVKKWQTLIEAHVDVKTTDNYMLRLFCIGFTKRRPNQVKRTCYAQASQIRQIRRKMVEIMINQASTCDLKELVSKFIPEVIGKEIEKSTSSIFPLQNVFIRKVKILKAPKFDLGKLMEVHGDYKEDVGVKLERPVEGDEAVQEVAAAE

SEQ ID NO: 194250 - protein, 77 aa, Zea mays
  Clone ID: MRT4577_108736C.1.pep
VCVFVVMVVGHGFSGAGAPCLPRLQLVVSCVGSFLFFLFYLFSTHGSLGDGIGIGSFMVFVRSHFRLCHCVIICVLY

SEQ ID NO: 194251 - protein, 71 aa, Zea mays
  Clone ID: MRT4577_108737C.1.pep
YMGTGDAIGSTNMQGDTRSFMSTKTGAKHAERGRQPENSGFFFFNTPHNTYVWEATRARLLLVNHHHKLDR

SEQ ID NO: 194252 - protein, 112 aa, Zea mays
  unsure (1)..(112): unsure at all Xaa locations
  Clone ID: MRT4577_108738C.1.pep
RXXRVRAHAVRRACCTRLFRPQLSIRLRNYRIGWFVMARHASPVANTLTPKGLINGEYCSARGGDLSSHAFRRLQRTYYQTXXQGALLFLMKILXYCNXVENPSIFLGQRTS

SEQ ID NO: 194253 - protein, 318 aa, Zea mays
  unsure (1)..(318): unsure at all Xaa locations
  Clone ID: MRT4577_108739C.1.pep
TAATPLLALQLALLAALVMATDPSPSPELVELTLLTGAREKGAVCLDGSPPGYHLQRGFGSGSHSWIVYLQGGAWCSSNTTDTETCSERKMTAYGSSKLMGAVTFDGIFRNQQPQNPDFYNWNKVYVRYCDGASFSGDAERTRGDGTKLFFRGSRIWDAVVDELMGKGMDAAEQALLAGCSAGGLATLLHCDDFRARFPQEVPVKCLPDGGFFLDIKDLSGERHMRSVFSGVVQLQNVSGVLPKRCLAKKDQQRHCFFPAELIKSIGTNTFIXNSEYDSWQIANVVAPDGSYTGDAWTCCRDNILNCSSEQMDVLHGS

SEQ ID NO: 194254 - protein, 52 aa, Zea mays
  Clone ID: MRT4577_10873C.1.pep
VNGPKLLLRGPSLPRERAAGQIQSILTTTLQSLETSTTIGLQFSHILNHSPT

SEQ ID NO: 194255 - protein, 137 aa, Zea mays
  Clone ID: MRT4577_108740C.1.pep
GGKKKGGFFFFFQKGAPRVFKIFPRGQEFGVKIKKNGGGEGPTLFPKRFAKGGVNPSKTLRKGARFFTNKGGVYLVKNYKRGVKPEGFFSETFISQIFGPPNRKKKIKIFFLVRGCFSRLESPPPPKYNEYLNTKKE

SEQ ID NO: 194256 - protein, 45 aa, Zea mays
  Clone ID: MRT4577_108741C.1.pep
GHRSVGTQQALMNRNALFILFPCQHSSVGIQSFEELKSSGRTFHH

SEQ ID NO: 194257 - protein, 198 aa, Zea mays
  Clone ID: MRT4577_108743C.1.pep
MPPRTRKIARKSTGPIGVPRHQLAPWHEDSSSGSNDPIGDLEAQILSEWEPDLLEQRLASHQVTWDEFKLAFREHYIPEGVLHMKQEEFMKLKQGGDTVTQYLNKFNRLSQYAIDQVNTDLKKRNCFMRGLNDRLQRKMATCLDLSYSRAVSTALAVEAKYAGPGKSKGYGGDRPNQGPEKRQRVYEAIIPEIQDIPV

SEQ ID NO: 194258 - protein, 121 aa, Zea mays
  Clone ID: MRT4577_108744C.1.pep
PADLSFFFFCHQPFRVYKFMLLHILFLIITLTQAGHHYSFSSYPNSPDKPLSLHMLTYSFLTNSPHLISSPTYYFNIQTRLLLIPFHTHTYPANSSPLHLIIFTNTSYIKLLSPHKCTQYT

SEQ ID NO: 194259 - protein, 150 aa, Zea mays
  unsure (1)..(150): unsure at all Xaa locations
  Clone ID: MRT4577_108745C.1.pep
NDLEQNAAKEAGLQGSQEAETPPTRPTPPRQQSHRGERGDGDGDARGGRRQGRGRPDADGXGGGPGEPXRAHXERADGAQXEGRHGXDQRRDAXGPRRHGQPEPGXGGAGRXQGRRPRQPRARQXGQQQRTGPPQEPGARQEHRRHRRAP

SEQ ID NO: 194260 - protein, 333 aa, Zea mays
  Clone ID: MRT4577_108746C.1.pep
MALEAVVFSQPQAGHFGCGRGDSPYAVPWSDLLQGGGGGGGGFGDVCAAGEWVDQHDLDTCWAAPTVGDDRDWGEALSRDHSSSDAASTDHGSRKAAPEPAAGRRKRRRTKVVKNKEEIESQRITHIAVERNRRRQMNEYLAVLRSLMPPSHAHRGDQASIVGGAINYVRELEQLLQSLEVQKSLKQSRERRPAAGGASCSPPFAGFFSFPQYSTASSSTSSSGGEKCRGHDVAAADIEVTMVEGHASLKVLARRRPKQLLKLVAGLHQLRVPPLHLNVTAAVDAMVLYTFSLKVEDDSKMGSVEDIATAVHEILGSIQRQQQEEEEEETAAM

SEQ ID NO: 194261 - protein, 45 aa, Zea mays
  Clone ID: MRT4577_108747C.1.pep
TEQAQSCTSNRSIKTAGAYAPWCMCRCCYRYHSTTMLTRSYSFLP

SEQ ID NO: 194262 - protein, 114 aa, Zea mays
  Clone ID: MRT4577_108748C.1.pep
ASERDRSWSDGAAYACCVPDSPARVQSSRAARAPFSTASLFQLQADNTDGLSSRVTCGLHRRTLAPSLLRRCLPHQPHEINGIKGVCPSGHSPHDGGCTKARSRPPLDPADTPR

SEQ ID NO: 194263 - protein, 73 aa, Zea mays
  Clone ID: MRT4577_108749C.1.pep
SSLHLPLPSPPTTHLPLSRITLNLRRPPPPRPPLLLPPPLTTNNSSSATLTTPFNSPLSLTYHYHPHHIPPVT

SEQ ID NO: 194264 - protein, 43 aa, Zea mays
  Clone ID: MRT4577_10874C.1.pep
CIKCSIIGGMKYGVHVFHFLQEQIDHGSIYSYSSCSRLYMCQA

SEQ ID NO: 194265 - protein, 31 aa, Zea mays
  Clone ID: MRT4577_108750C.1.pep
RTRPLTRGRTRGVLHSTVYSYRIILLLLLVQ

SEQ ID NO: 194266 - protein, 64 aa, Zea mays
  Clone ID: MRT4577_108751C.1.pep
VRKLGIRLEGTTAACAHDTKHRSTGSHICDSRQTGVGQHSPHRTATATTTCAHLSTAMHERQHR

SEQ ID NO: 194267 - protein, 68 aa, Zea mays
  unsure (1)..(68): unsure at all Xaa locations
  Clone ID: MRT4577_108752C.1.pep
MATKLLTLLALIALIDSATNAYIFPHCIFAPSAIIPQVLPPRSXKGLXHLAVQAYRLQLALTEKCLIT

SEQ ID NO: 194268 - protein, 78 aa, Zea mays
  Clone ID: MRT4577_108753C.1.pep
HWVPRGRPGMLLILPPVLSLIVAPLCGKERCTRSLSWLSMTLDLEGCLLYHHLAILEKQGSSSRSMIIMNRNRSFSTL

SEQ ID NO: 194269 - protein, 77 aa, Zea mays
  Clone ID: MRT4577_108754C.1.pep
PWNHQRNGIRGYGWPWSADENREPLFFGSTLYFFVDDDRTSLHKKKIIKKKKKKKKKKIKKKKKIKKKIKIKKRIEY

SEQ ID NO: 194270 - protein, 46 aa, Zea mays
  unsure (1)..(46): unsure at all Xaa locations
  Clone ID: MRT4577_108755C.1.pep
QRXXKGLSGGLGSSHYMKTLCRQFLKVASQHCWTIHTWTSFARLTL

SEQ ID NO: 194271 - protein, 45 aa, Zea mays
  Clone ID: MRT4577_108756C.1.pep
LKYKKNFYLGLTTKKIQNYKITYLRRPSYNIRAPKFMFPANFLLL

SEQ ID NO: 194272 - protein, 85 aa, Zea mays
  Clone ID: MRT4577_108757C.1.pep
RHHLRPVLATRYIHRTPHLRNDHVRGTQRLNTNTHPTILTTAEILQYPNDDYAHQMQAQNHAPCTNLNEEHHDYTQESTQTANSH

SEQ ID NO: 194273 - protein, 75 aa, Zea mays
  unsure (1)..(75): unsure at all Xaa locations
  Clone ID: MRT4577_108758C.1.pep
PPVLLYGGGPVIPLWVXSVVVGAISTVPLLPKIMELXVGLGSPGWFVYQVLLFKEIRKELAPVLEPFNKKIAGTE

SEQ ID NO: 194274 - protein, 332 aa, Zea mays
  Clone ID: MRT4577_108759C.1.pep
MAWQGWSHRHSQISNYGCSSPPNGPNPIEDKAEKLVAEAAGYGSQLVLFPEVFVGGYPHGSTFGLVVGNRTAKGKEDFQKYHASAIDVPGPEVSRLSALPGNSPTRPVIGVVERAGYTLYNTVLSFDPLGKYLGKHRKVMPTALERVFWGFGDGSTIPVYDTPIGKMGALICWENRMPLLRTAMYAKGIEIYCAPTVDCMPTWLSSMTHIALEGGCFVLSACQFCRRKNYPPPPEYTFCGLEEEPSPESVVCSGGSVIISPLGTVLAGPNYESEALLTADLDLGEIVRAKFDFDVVGHYSRPEVLSLVVKSDPKPAVSFISAAGRDDDYVQT

SEQ ID NO: 194275 - protein, 65 aa, Zea mays
  Clone ID: MRT4577_10875C.1.pep
TRYGYDLSLMKEVRWETVNSAPSIFLCPLQRSQGQDLSWYAFDRYEGTKGIKFKKMVGHVFSKLG

SEQ ID NO: 194276 - protein, 141 aa, Zea mays
  unsure (1)..(141): unsure at all Xaa locations
  Clone ID: MRT4577_108760C.1.pep
AILEAYGASYRLHAMDILHECYENDAFGNEIRSAXRLNRKFNEXEGLHAVPMKKIXQTHMRKXGAKXRPNIPQGDINPLLPFNAQEDEELMKDQIDDLKKKAXSYSNIINEILIRAXDYTNLFXMHARPVSFIVHNCFTPA

SEQ ID NO: 194277 - protein, 156 aa, Zea mays
  unsure (1)..(156): unsure at all Xaa locations
  Clone ID: MRT4577_108761C.1.pep
MGSDTETEKKASVALMSIAKPLAGKKLCKRTLKLVRRXKLMFLTXSEAKCLKRGVKEVVKSIRRGNKGLCVIAGNISPIDVITHVPILCEEANVPYVYVPSKEDLATAGTTKRPTCCVLVLTKPNKGELSGEVKDKLKSDYDQVVTEVAEATSAMF

SEQ ID NO: 194278 - protein, 134 aa, Zea mays
  Clone ID: MRT4577_108762C.1.pep
RFLPICSCGGSSGGNAFARPEQGRKKRVRPWTEEEHKLFLLGLKKYGKGDWRNISRNFVQTRTPTQVASHAQKYFIRLNKKRSSIRDTTTVNLTDDQPTSPSQSSLITDQFSALALATDVNQNSRANSPSIELA

SEQ ID NO: 194279 - protein, 63 aa, Zea mays
  Clone ID: MRT4577_108763C.1.pep
CSSESAGAHPAFSALPPSSGLRKNPPSPLIKVYQVIWWATGGSSPQKRCRKSLLLGRRMQLGP

SEQ ID NO: 194280 - protein, 66 aa, Zea mays
  Clone ID: MRT4577_108764C.1.pep
FAFFFGGSTRGAYLMDRVSSYYYGHIIKVHFVSWNCYITQIWFKSIDLIPHVCRTLTHIPSKVKDI

SEQ ID NO: 194281 - protein, 87 aa, Zea mays
  Clone ID: MRT4577_108765C.1.pep
LQEGGQVRVEALVIKPLGIDVRTARAKFRHKYHEGLVSQAEVTMTLRHVRSHSRRASGQRPTRSSSSLTNAPSGYHPTEGKRIERKE

SEQ ID NO: 194282 - protein, 67 aa, Zea mays
  Clone ID: MRT4577_108766C.1.pep
LSAGLVDLFAGTQSGGAGWLGLGLRGPRGHLSCLFWAHLTCLPLRGQGNGRRFYFGRGGGPLALGPQ

SEQ ID NO: 194283 - protein, 91 aa, Zea mays
  Clone ID: MRT4577_108767C.1.pep
QEITGLPAPGPSSSPAAAVAAPSWTPAAPACVLPTLDTSAFFLLDRAAAAPASGGQEPGRARMDRDAHARRRGSWGRRLGLGGAARAGGTG

SEQ ID NO: 194284 - protein, 100 aa, Zea mays
  Clone ID: MRT4577_108768C.1.pep
REKKQGGGKWTGKNRQREQKHQQRKKKGNSNRTPLKGARGGKFGHTREKGTTITGKRGGLWPGARSVAGLGTLKQHPHSFDQVMDASTHTKGHQKESEEK

SEQ ID NO: 194285 - protein, 170 aa, Zea mays
  unsure (1)..(170): unsure at all Xaa locations
  Clone ID: MRT4577_108769C.1.pep
MAKQDIEASGPEAGEFSAKDYTDPPPAPLIDADELTKWSLYRAVIAEFIATLLFLYITVATVIGYKHQTDAAASGPDAACGGVGILGIAWAFGGMIFILVYCTAGISGGHINPAVTSGLFLARKVSLVRALLYIIAQCLGAICGVGLVKGFQSAYYVRYGXRANELSDGY

SEQ ID NO: 194286 - protein, 62 aa, Zea mays
  Clone ID: MRT4577_10876C.1.pep
PPVPARSPSWMTYFFFLLIPRAGAKELYTTTTERRLLHRERGCSTCMGGLNLTYPRAMRKPS

SEQ ID NO: 194287 - protein, 109 aa, Zea mays
  Clone ID: MRT4577_108773C.1.pep
EFGSREYYGIMSFYTPAPCSNPFFILIHYSIWLFWTLCYQSSFVNRSPPCPSNFPLHRGHVTAETKTKGSLVKTRGGAAACADTGQSKRSILTGDCAESDCLLPLHHPL

SEQ ID NO: 194288 - protein, 115 aa, Zea mays
  Clone ID: MRT4577_108775C.1.pep
FPDPPTLPQQTLNTHKIYLQKTKKNTKERLHNKIKQPPTYLLTSPPNFQPPYLTLHTLQLNHFPINFPNSISLSFFSNLPIFTNPNLSQLNPITLHPPYPTFPNTQNPQTNLLFK

SEQ ID NO: 194289 - protein, 65 aa, Zea mays
  Clone ID: MRT4577_108776C.1.pep
CVITTFSIIFGRNHRSNVTYLFNVYIALQFDRITKQSRTTIFLFRSMTHLTHRFSRALYLNRKFA

SEQ ID NO: 194290 - protein, 68 aa, Zea mays
  Clone ID: MRT4577_108777C.1.pep
LVVLVQNLMLYDIRDEWPTFVTKVSQWTVLFKSKCSCLNMWQFFLDYIPSKHLCTILVCKIFHRVLYF

SEQ ID NO: 194291 - protein, 59 aa, Zea mays
  Clone ID: MRT4577_108778C.1.pep
MRECITNHIAQAGIQCQNPDWKLNCLEHGIQPEGGMPCDNTIGRREQPDQMFMNRTDTN

SEQ ID NO: 194292 - protein, 63 aa, Zea mays
  Clone ID: MRT4577_108779C.1.pep
TIGTLLQLARKETTSLEVCSLCEQRLEFQSGIYFILGQYSLFITSTNKQTRKSKLHKLTTRVT

SEQ ID NO: 194293 - protein, 106 aa, Zea mays
  unsure (1)..(106): unsure at all Xaa locations
  Clone ID: MRT4577_10877C.1.pep
PRLRPRVRPRVRPRVRLXVSGRSGDIYMPALIKXMRDGTAGXRQXXLQNSLKXRRXXXXXGFGLKEPPXAGRGGPHLSDNRAKERSGEGLSGGRGSTFRRRCICTR

SEQ ID NO: 194294 - protein, 106 aa, Zea mays
  unsure (1)..(106): unsure at all Xaa locations
  Clone ID: MRT4577_108780C.1.pep
FVLSSALLSLLLPWPSVCWLGGSLCLSSFSVRLSSFLSVSCCLALSVVLCVHGLGSARFGMFGCLLLFGVVGFPLLRRSLLPCPPSLVLGVRARSSLLVPPRXGWV

SEQ ID NO: 194295 - protein, 93 aa, Zea mays
  Clone ID: MRT4577_108781C.1.pep
ARFPREPSTVLLLDRGTEGVDTQIPKFFDNDHTDISLTGVVVADGVWCICHSHSPNNSMTSTAASPVPLLNLKHIYQYNLYTYHPRRRRRQTA

SEQ ID NO: 194296 - protein, 49 aa, Zea mays
  unsure (1)..(49): unsure at all Xaa locations
  Clone ID: MRT4577_108782C.1.pep
MMMAEVANHSKRNHTDSYFSGKPVAVPAAATSSEEFGSMSLEXPRNASP

SEQ ID NO: 194297 - protein, 74 aa, Zea mays
  Clone ID: MRT4577_108783C.1.pep
MGKLVPSLLMLLLSRVIALVPTITRMGDHVSGRVRRKVCCQVQSGIRTLILIPISSRRPRIPMDPCPQTIIILI

SEQ ID NO: 194298 - protein, 440 aa, Zea mays
  Clone ID: MRT4577_108784C.1.pep
MEMDGVLQAADAKDWVYKGEGAANLILSYTGTSPSMLGKVLRLKKILKNKSQRAPSCIVFSSHEQLLWGHIPELVESVKQDCLAQAYAVHVMSQHLGANHVDGGVRVRVSRDFLELVEKNVLSSRPAGRVNASSIDNTADAALLIADHSLFSGNPKGSSCIAVEIKAKCGFLPSSEYISEDNTIKKQVTRYKMHQHLKFYQGEISKTSEYNPLDLFSGSKERICMAIKSLFSTPQNNLRIFVNGSLAFGGMGGGADSVHPADTLKCLEDLSKISGLKLPDFTELLSETIFRSEVLGNLLATQKLDDHDIEGVIHLYYNIISQPCLVCKNLTDVELLRKYTFLHSLPLDKSLKIVRDFLISATAKDCSLMISFRPRENGSTDSEHDSVFLESAKRTYEYKAYFLDLDVKPLDKMEHYFKLDQRIVNFYTRNGGGLAISKGQ

SEQ ID NO: 194299 - protein, 184 aa, Zea mays
  unsure (1)..(184): unsure at all Xaa locations
  Clone ID: MRT4577_108785C.1.pep
MKDRHLSLNQTQRVRLEAALQELQSVAPAAASAAAVTVADTIPVNQEDNILKGHGTSDQDGEVVATLCGVVERVNKLVYVRTLRARYKPEVGDIIVGRVIEIAPKRWRLEINFSQDAVLMLSSMNLPDGIQRRRTAVDELNMRSIFEENDVICAEVRGFQHDGSLHLQARSEKYGKLERGQXLM

SEQ ID NO: 194300 - protein, 42 aa, Zea mays
  Clone ID: MRT4577_108786C.1.pep
KTSSSTSFGHWLHPCIGRKARGLASLRLVAKHSISFYMLGCK

SEQ ID NO: 194301 - protein, 276 aa, Zea mays
  Clone ID: MRT4577_108787C.1.pep
YKLDQNTLRLVIYGTLVILYRLLLFDIRLIPNTFLHTFQISKTSEYNPLDLFSGSKERICMAIKSLFSTPQNNLRIFVNGSLAFGGMGGGADSVHPADTDKCIKDLSKVSGLELPDFTELLSETIFKSGVLGKLLTTQKLDDHDIEGAIHLYYNIISQPCLVCKNLTDVELLRKYTLLHSLPLDKSLKIVRDFLISATAKDCSLMISFRPRENGSTDSEYDSVFLESVKRTYEYKAYFLDLDVKPLDKMEHYFKLDQRIVNFYTRNGGGLAISKGQ

SEQ ID NO: 194302 - protein, 109 aa, Zea mays
  Clone ID: MRT4577_108788C.1.pep
PACAGRRRSSGGVISFHLRFSSSVYYSKPTGRREERTPEAQLEEERRQRLELDARMRSEQQRTEDILRYIQSATGVAPPPLLFTPNPPPSNFSTPGVGTTVIQDEKESL

SEQ ID NO: 194303 - protein, 497 aa, Zea mays
  unsure (1)..(497): unsure at all Xaa locations
  Clone ID: MRT4577_108789C.1.pep
MGGCSWRRGHGTSDQDGEVVATLCGVVERVNKLVYVRTLRASCRFSMEMNGVLQAADAKYWVYKGEGAANLILSYTGSSPTMLGKVLRVKKLLNDKSQLPPSCMVFSSHEQLLWGHIPELVESVKQDCLAQAYAGRVMSQHLGANHVDGGVRVRVSRDFLELVEKNVLSSRPAGRVDASSIDNTADAALLIADHSLFSGNPKGSSCIAVEIKAKCGFLPSSEYISEDNTIKKQVTRYKMHQHLKFSQGEXIPNTFLHTFQISKTSEYNPLDLFSGSKERICMAIKSLFSTPQNNLRIFVNGSLAFGGMGGGADSVHPADTLKCLEDLSKISGLKLPDFTELLSETIFRSEVLGNLLATQKLDDHDIEGVIHLYYNIISQPCLVCKNLTDVELLRKYTFLHSLPLDKSLKIVRDFLISATAKDCSLMISFRPRENGSTDSEYDSVFLESVKRTYEYKAYFLDLDVKPLDKMEHYFKLDQRIVNFYTRNGGGLAISKGQ

SEQ ID NO: 194304 - protein, 118 aa, Zea mays
  unsure (1)..(118): unsure at all Xaa locations
  Clone ID: MRT4577_10878C.1.pep
LDLGPLHHFLGIAVERRPAGLFLQQHTYAIYIINRAGMTGCKPCSTPVDLQAKLSADSGPAVQDANXYRSLAGALQHLTFTRPDITYAVQQXLCHMHDPRETHLTTLKRIIRHLRDTA

SEQ ID NO: 194305 - protein, 68 aa, Zea mays
  Clone ID: MRT4577_108790C.1.pep
SLPPFSTVSLGQKRRWHPWNIYAHANNTLEAPRACGYGVPCGQSPFHKLKKKANGSGPVPFKKTGAQV

SEQ ID NO: 194306 - protein, 526 aa, Zea mays
  Clone ID: MRT4577_108791C.1.pep
MKDRHLALNQTQRVRLEAALQELQSVAPAAAVTVADTIPVNQEDNILKGHGTSDQDGEVVATLCGVVERVNKLVYVRTLRASCRFSMEMNGVLQAADAKYWVYKGEGAANLILSYTGSSPTMLGKVLRVKKLLNDKSQLPPSCMVFSSHEQLLWGHIPELVESVKQDCLAQAYAVHVMSQHLGANHVDGGVHVRVSRDFLELVEKNVLSSRPPWRVNASSIDITADAALLIADHSLFSGTPKGSSCIAVEIKAKCGFVPSSEYISKDNSIKKQVTRYKMHQHLKFHQGEISKTSEYNPLDLFSESKERISMAIKSFFSTPQNNFRIFVNGSLAFGGMGGGADSVHPADTDKCIKDLSKVSGLELPDFTELLSETIFKSGVLGKLLTTQKLDDHDIEGAIHLYYNIISQPCLVCKNLTDVELLRKYTLLHSLPLDKSLKIVRNFLISATAKDCSLMISFRPRENGSTDSEYDSVFLESAKRTYEYKTYFVDLDVKPLDKMVHYFKLDQRIVNSYTRYGEVLPPPKGK

SEQ ID NO: 194307 - protein, 90 aa, Zea mays
  Clone ID: MRT4577_108792C.1.pep
YLPRGGDSYPLTRPHLLRGRELYPQKVGFIISALTKINGGGLSYWFTFRKIVVPSLLAFLPAGVQRRFVYWPLSPLRENNCVLWAVLLLP

SEQ ID NO: 194308 - protein, 100 aa, Zea mays
  unsure (1)..(100): unsure at all Xaa locations
  Clone ID: MRT4577_108793C.1.pep
CPKQGGIRYPITGNKYFNMVTIPNVGGAGDISAVSVKGTKRVNWPEIKPTWGQVWQPKKALPCESLTFRVMKNDPPKAPPWHVFPPDXKLGVTYQGSKNF

SEQ ID NO: 194309 - protein, 122 aa, Zea mays
  Clone ID: MRT4577_108794C.1.pep
GGGIKILIYPNTPSYTFPPSSNPIYFFNFKYNFTANLLNIPTTLNTPPYPKPITSSFLSFFFTPPILITIIIPTTQTLTRLHTSYPTTQLKTPSFLFLNNIPYFFSPNKSPLSPFFYYTLSF

SEQ ID NO: 194310 - protein, 146 aa, Zea mays
  Clone ID: MRT4577_108795C.1.pep
PAIHHHTAIHTCTSTSHGRCAQTHLASAPMVYYQEVDYCSEEVRSVSPAGFGRHEGDVQQYVANDKFKECDTFSRVLHQPPPSRCSLMLTLLRGVKNQGRIIHQHLHRPVPLAARRASSAGLTEPPGGRHPRTFHACLRALCMSVM

SEQ ID NO: 194311 - protein, 85 aa, Zea mays
  unsure (1)..(85): unsure at all Xaa locations
  Clone ID: MRT4577_108796C.1.pep
SAIPIGGIIKTLCRRPHATHGVSSRWPPCSCCHSSATGXGKRTCELTVFWGRNKEEGTLREACYTRLYNTVIISLXNVFGHNRYA

SEQ ID NO: 194312 - protein, 92 aa, Zea mays
  unsure (1)..(92): unsure at all Xaa locations
  Clone ID: MRT4577_108797C.1.pep
PFSLGVKNGLPYIWANKANNPFFYLKKENKGLFWQEDIIPXFFQKVALSKDWAPVPKGYIYLFGQVKEKLGKIHPXFFKLGDPKVPWIKAWD

SEQ ID NO: 194313 - protein, 38 aa, Zea mays
  Clone ID: MRT4577_108798C.1.pep
RILPLYGNRPPIGGAILEIFKALPGNNKVLTLKRATCQ

SEQ ID NO: 194314 - protein, 142 aa, Zea mays
  unsure (1)..(142): unsure at all Xaa locations
  Clone ID: MRT4577_108799C.1.pep
MEPSSQPQPMMGVGSQPYPAAAPYVPVPGSLAVPPGSQPAAAFPNPTQLSAQHQMVYQQAQQFHQQLQQQQEQQLREFWTTQMDEIKQANDFKIHTLPLARIKKIMKADEDVRMISAEAXVVFAKACEVFILELTLRSWMHT

SEQ ID NO: 194315 - protein, 207 aa, Zea mays
  unsure (1)..(207): unsure at all Xaa locations
  Clone ID: MRT4577_10879C.1.pep
DRETNWSSKVTTLLLTNEQRLTTPPSPWLCCTADGRFMMRLKLPNGVTTSEQTRYLASVIEAYGADGCADVTTRQNWQIRGVTLPDVPAILDGLRAVGLTSLQSGMDNVRNPVGNPLAGVDPHEIVDTRPYTNLLSSYVTNNSQXNPTITNLPRKWNVCVIGSHDLYEHPHINDLAYMPAVKDGEFGFNLLVGGFISPKRWAEALPL

SEQ ID NO: 194316 - protein, 168 aa, Zea mays
  unsure (1)..(168): unsure at all Xaa locations
  Clone ID: MRT4577_1087C.1.pep
ALYRSSGETXQRPQRTYEKERIDAQLKLRVKHRLRCKTELWRXQYALSKIRYAXRHLLTLDKKNPHRIFDAEALMLRMNRYGLLAAGQSKLDYGLALTGGNFLQRGIQTLEXLLLWTHTFHHAQVLIKRANIKGVGPIERAPXFMARAEXDKHIXDYSLTSPFRGGPA

SEQ ID NO: 194317 - protein, 253 aa, Zea mays
  unsure (1)..(253): unsure at all Xaa locations
  Clone ID: MRT4577_108800C.1.pep
MAASPQTLSAPPPAAAAVPNLGGKRKRQPKGKKNKKNKLARSDQDDSVRRRRNKPSAKFLKLLRKRARDYNSDDEDEAGDDRQQEHLPNPQRRVDEDDDEALSHSEPEEGEDEDEEEGASSSAVTRFEQGCRAFRVAFLKIMAKKLPDDPLGPIMSAHKTLVAAKLAEEVEEHKPKREARPRKRVAAEKGHVIPKDHLDSKEKELIKVATKGVVRLFNAVSKAQKSRKDLNPSRTKDAKVIANERKTXLLSEL

SEQ ID NO: 194318 - protein, 177 aa, Zea mays
  Clone ID: MRT4577_108801C.1.pep
MEPSSQPQPVMGVGSQPYPAAALYVPLPGALAVPPGSQPAAAFPNPTQLSAQHQMVYQQAQQFHQQLQQQQEQQLREFWTTQMDEIKQANDFKIHTLPLARIKKIMKADEDVRMISAEAPVVFAKACEVFILELTLRSWMHTEENKRRTLQKDDIAAAITQTDIYDFLVDIIPRDEM
